United States Patent Application Publication US 2008/0050393 A1 - sequence listing, part 24

SEQ ID NO: 83868 - DNA, 670 bp, Homo sapiens
ctcaatcatagcaaaataaaccttctttttaagtgtacatagaacatttaccaagatagaccatattctggtccataaaatgtaaaaggattcaacttatacaaaattatacaaaatatgttctctggccgtaatggaaatcaaaaacataatgattaacgataacttgacaatccccaaatatttggaaaccaaataacttatactccactagtcaaagaagataccaaaggtaaaattagaaagtagtataacctgaatgaaaatggaaatatagcacagaatttgtgagaaagtcctaaggcagagctgagcttagcttcagatgctgcccaaatgcctaattagaaaagatgaaagagctcaaatcagtgacctcagctcccaccttaagaaactagaaatagagcaaattaaagtaagcgaaagaaaggactcccggcactttgggaggtcgaggtgggtggaccacctgaggtcaggagttcaagaccagcctggccaacatggtgaaacctcgtctctactagaaatacaaaatgagctgggcatggtggtgcatacctgtagtcccagctacttgggaaactgaggcaagcagtcacttgaacccaggaggcggaggtttcagtgagcaaagttcacgccactgcactccaacctgggcaat

SEQ ID NO: 83869 - DNA, 2312 bp, Homo sapiens
catggagcggaggagatccgcgggctggagcgccaggttcgggccgagatcgagcacaagaaggaggagctgcggcagatggtgggcgaacggtaccgcgacctgatcgaggcggccgacaccatcggccagatgcgccgctgcgccgtggggctagtggacgccgtgaaggccaccgaccagtactgcgcccgcactccgctcaggccggctcagccgcgccccggccaccgcgggcccagcagttctgtgccttcccctgcagccacagcagccatcccaagagaagttctacagcatggctgcccagatcaagctactcttagaaattccggagaagatctggagctcgatggaagcctctcagtgtctccacgccacacagctctacctgctctgctgccacctccacagcctgctccagctggattcttctagttcccgatacagtcccgtcctctcccggtttcctatactcatccggcaggtggcagccgccagccacttccggtaagtggatccagcgcaaagagctgctctggtggtggccaggcttcacattacgggtttatggcgtttgtcttctttcctgatgtaccaaagctctttacccaagatgtgaaaaacaccctggcgacttctgtcatcatttttctaggtcaactattctgcatgaaagcaagatgttgctcaaatgccaaggtgtgtctgaccaagctgtggccgaggccctgtgctctataatgctcttagaagagagttctcctcgccaagccctcacagacttcctgctggccataaaggcaactattcagaaacttctcaaccagccacaccatggtgctggtatcaaggctcagatttgctcattagtggagttgctggccaccactctgaagcaagctcatgcccttttctacactttgccagaaggactgctgccacatccagccctgccatgtggcttgctcttctctactctggagaccatcacaggccagcatcctgccggaaagggcactggtgtcctgcaggaagagatgaaactctgcagctggtttaaacacctgccagcatccatcgtcgagttccagccaacactccgaacccttgcacatcccatcagtcaggaatacctgaaagacacgctgcagaaatggatccacatgtgtaatgaagacattaaaaatgggatcaccaacctgctcatgtacgtgaagagcatgaagggtctcgcgggaatccgggacgccatgtgggagttacttaccagtgagtccaccaatcacagctgggatgtgctatgtcggcggcttctggagaagccgctcttgttctgggaagatatgatgcagcaactgttccttgaccgattacagactctgacaaaagaaggctttgactccatctccagtagctccaaggagctcttggtttcagctttgcaggaacttgaaagcagcaccagcaactccccttcaaataagcacatccactttgagtacaacatgtcgctcttcctctggtctgagagtcctaatgacctgccttccgatgcggcctgggtcagtgtggcaaaccggggtcagtttgccagtagcggcctctccatgaaagcacaagccatcagcccttgtgtacagaacttctgttctgccctggattctaagctgaaggttaaactagatgacctcctggcttacctcccctctgatgactcatcactgcccaaggacgtttctcccacacaggccaagagttctgcctttgacagatacgcagatgcggggaccgtgcaggagatgctgcggactcagtccgtggcatgcatcaagcacatcgtggactgcatccgggcagagctacagagcattgaagagggtgtgcaagggcaacaggatgccctcaacagtgccaagctgcactcagttcttttcatggccagactctgccagtccctgggagagctgtgcccccatctgaagcagtgcatcctgggaaaatcagagagctcagagaaaccagcaagggagtttagggctctgagaaaacagggaaaggtgaaaactcaggaaatcattcctacacaggccaagtggcaagaggttaaagaagtactcctccagcagagcgtgatgggctaccaggtctggagcagtgcagttgtgaaagttttgattcatggattcacccagtcattacttctagatgatgctggctcagttctggccacagccaccagctgggatgagctagaaattcaggaggaggcagagtctggcagcagtgtcacatccaagatccgactccct

SEQ ID NO: 83870 - DNA, 380 bp, Homo sapiens
aaaaaatacatagacttaaaactaaaattggccaaaaaaggaaaaaagagacaaattaagtaagagtggattgaaaaattcagggaagaaatagaggaaaaagaaaaaatatcttagaaacaaaggttaaattataaggtgccttcctcttaaataaactcaaatggaaaattaagacaaacaattgaagaaaagcagagtgaatgaacacaagataaatgcagagtgaatgaacagcaaagtgaatgaactcaaatggaaaattaatacaaacaattgaagaaaagcagagtaaatgaacacaagataaaagcagagtgaatgaacagcaaagtgaatgaacacaagataaatggatgagttataagggtcagagagag

SEQ ID NO: 83871 - DNA, 388 bp, Homo sapiens
cggcacgagaactggaacaaggatgcctctcttagcacttctattcaatgtagtactagaagtcctagccagagcaatcaggcaacagcaagaaataaaagccatccaaataggaaaaaaagatgagctctctctcttcatggactacatgattctatacctaaaaaaccctaaagactataccataaggctcctagagctgataggcaactacaataaagtttcagggtacaaaatcaatgtacaaaagtcagcagtgacatttaacctaagagccaaaacaagaacacactccaatttacaatagccacaaaaataaaatatctaggaatatagctaatcaaggacgtaaaagatcactacaaggagaattacaaaacactgctga

SEQ ID NO: 83872 - DNA, 497 bp, Homo sapiens
gctcgacgtcatcctcaggtttgataactaatggtgccttctttgatccatcaaagttatgactgaatgtggcaccgggacagttagttgctgtcctagagttaatttgctagcttcttgtgttaacaagatggtggcagctaatgccttaaggcaaagaggccatcttaacaccacggagtctagttgttgggataaatatgccactgggtgacgccatgatcctataagttgagtcagagcccctatagtcattgttttttgttcatgaacatatagaaagacttagttatgtctcatagtcttaaggctggggcctgggttaaagcttccttgatctgtttgaaggctatttcttggttagttttttaaaagaggggctccttttcgcctcctttggtggcgtcatataacagcttagccatcagtgaaaaacttggaatccgatgtggcaaatgttgctgcgtccaaaattccattggtcacgggtaatcggg

SEQ ID NO: 83873 - DNA, 374 bp, Homo sapiens
  misc_feature (1)...(374): n = a,t,c or g
ggtctgtaagcggctcattaagtataattgtgagagaagccgctcgcactttcaccttttgattctcacaacttacaaattctagtaattggagagacacataccgcatcctcctacgacagatgcccacctttttaggatgttgtctcccaacttgctttgtaactgattctttagtaagcctattaatttggttagctactttcaggcaatggcatatatggtaagaccagttaattccatgggcatgaacacagacctgtatttcctctgctgtgacatgagctcctcagtaagacatgatggctgtgaagagtgccgatagtggagaaggcatcctgtgaggctgtggataacagaagctttacaggcan

SEQ ID NO: 83874 - DNA, 1213 bp, Homo sapiens
  misc_feature (1)...(1213): n = a,t,c or g
ttttttttcatttttaaggcaaaaatcctgtatttcgggacggtggcatttgtgccccctgggaaggggatgagcactgctgcctcctggtatccaccggaccccgcagggcgcaggaaataaagcccctccacccctccctggtggtcacctgcacgcacctgagggcgcgtgcggagccgccctggggtcttcgggggctgctgccagcaccttggctctttttccaaacggcggcgctggaagccggcggcatccgggtgcagcggccaggaaggggcgcaggcgcgggcgggcttaggccaaagggcgcagggttcaagtagggcaggaacggtcccggtgggggcagggcgngtgggtcgtgaaatggttccagcagcgggaatggcaggcccggcgctgatgcggggtcaacctccggggggcgctccggcgcgggcgggctctcggtccagggccgggggtggcggcggggctgggctctgcgcatgctccgcgcaaacatgcaggtgcttgaagagcgagcggtgctggcggaagccgaggagggcagttctcacacttgaagtagcgattgggtttgtagtgcagtttgctgtgagccaccagctcctgcatgctggggaaggtctcggtgcagctcagggctgagcagcggaagagcttgccttccagggactgtgtgggcgggcagtgggttcgcagatgctgtgccaggtcacggacgctgggaaaactgaggcagcagccagggctggagcaagggatttgcttccctggaggtgggcgtcgtctgggaggccgcaggtcctcgctggtcccggagactatgctggtcaggccagggctgggtccggggccaggctggcaagctgtctggggctggggaggagccctgccgcatccctccagcccctccacgttcccacactggcggtgtggctgcctgctcagggcctggctcctccgacatggaggaggaaggggctgcagctggcacagccggggacaacacctccttgtcggtctcactggagctgggctctgcagtggccagcatgtctgggatgggccctgagggtttctcctccatcttcgacacggctcggcctcttgtttctgcggctccggcggctgcagcttagcggcggcncacctctgggcagtgcgagtttcggctcacgtcagcgccattttcctcgttccgaat

SEQ ID NO: 83875 - DNA, 419 bp, Homo sapiens
tgttccctatgggactgtataggagtcccgagctctgggttgtgatgaggtgggcgtctttctaccccttgcccccaggctcttaccggcgcgctcctggccgacctgaaaggaggggcgcggccttcaggcgttcccactccccgcgccgcctgtcttccctttatccccaaaccggccgaagctggtcagctgcagattgtcgaacgtcctgggagctgcggggttgcggacgtcccgcgcccgaagccacccggatggtacctggggcacgtcccagccctgtgtgcctccacttccccttacctgccgtcgtcgggcctagggccccggtcggcgcgaggtttccgtgcctgtggctcgcgcctgtacccagcttttgcctaacgaattcgcaccctgtgtaccccttgacccgc

SEQ ID NO: 83876 - DNA, 418 bp, Homo sapiens
ttcgccattcgtgcattttccttatttaaaaacaaacaaaaattacgaggtggaacccctgggccttgggccataggaggagcatggtccccccatggccactcagcccccagctccagcgggtgctctactccaccaccccaaacagcctgcagcgtgggcacccacaagctctggagcagcaggacctgggcgaggcccctctgtaggctctggaggcagggctgggccgggcctggacaggaggtgctagttggggctgacaggctcagcagctcctggacaggctgcggtgggatggcctacagccctacaccaggagggtttgctgctgaagggagggccccctccccccagctcccccaagtccagggtgggaggaagtacaagggatatggtgggaaggtgaggggcctcc

SEQ ID NO: 83877 - DNA, 447 bp, Homo sapiens
aatacaccctgggtatgtgaggtgtgtctatcctgatccccaggtgtgtccgactctgtgcccgggtgtgtgtctgtgcccctgagtgtgtctatatctgtcgggtttgtccacttccccgtccccagctcccatctgggtgattttgcccgggtgtgcctccgcgtgggggcgtttccgtgcgtctccgcctgcaggtctgtgtatgtgtgaaaatcaggaagagccagcggggagtgtgtgttgccatcgcgtctccgcctgcaggtatgtgtgtctcagtgacagtgcgtaagcgtgtgccttgttgtgagccgcgcggcggcgtgtatccgaatgacagtgtgactcacgtgcgcgcgcgagtgtgtgtgcgcccgcgccggggtgagtctcccgcccccactcctttctttccccattcctattcctctctacctctcccgg

SEQ ID NO: 83878 - DNA, 389 bp, Homo sapiens
aatacaatggggggagaaagaggtgataggattggaggggaagctggaagaaagagagggagatggcatagtaagaggagggaggtacgacgtcccacctcccttctccatcatcttgtctccccgctccttcatcccgctccctgctccatcatcccactccctgctccgtcatccccactgcctgctccctcatcccggctcccctgctccatcatcctcgctccccactccatcatcctggctgcctgctccaacatctttgctccccactccatcatcctggctgcctgctccatcatcccagctacccgctccatcatcctgccccccccgctccatcatcctgtctccctgctccatcatcctgctccccactctgtcattcc

SEQ ID NO: 83879 - DNA, 585 bp, Homo sapiens
atacaaggctgcgtactgggggggtcccgctgctttccagggcctcgcctgctgactttggcggggcaggcaggatggcctggtagttgtggtgctgctgctgctgctggttgaggatctgcagctggaggaagagctgctgctgctgcaggatcttggcgtaggatgagtccatggggggtgcccccctgtcctgcttctggtccggggggatgtactggtggtacttgagcttcttcacctttggcttcagctccttggccttcttgctgcgctgtgacttctcactggcagacttgggttggctttgcttaatgagtgtgggggtggacttggcagtggggatagtggttccattggtgaggctgggaggcagcagaggtgggggaggcagaggaggctgctctgccaggaaaagcatttctctggaatcccggcccatcggaagttgagacacaacctgggtgggggatgcagaggtggcactgagcagtggttcgctgactcgggcctccaggggtgacggcacagaaccctgggactcatggctggcaggctgctcgggggataacgcatccctgctgg

SEQ ID NO: 83880 - DNA, 546 bp, Homo sapiens
  misc_feature (1)...(546): n = a,t,c or g
gcggccgcggttcggacccgccggcgacatggccagctccggagaggtactgtccgcgactgtctccgctctgcttctgcctcggcggcctcggtctccctgggttcttccatcccgacccgggttcccttgcatcctttctatcccgacccctaccccgccccgtccttcccatcctgaccctggccttgcccctgctcccgtccttcccgcatcctgtccccaagactcctaccctgtctcggaaggcacaagctgtctcccccttcgctcgtgcattcctgatcgccagagttgtccccgtctctccgtcccctgagggtccaggctcctccgagacccctttctcagtgccccggttccttggctgggcccctgcagccctgggacattccccctccgtgcccacgttccaactcattctctatctcttgattgctcagtttcagccccagcccacttctccctggagcctgcttgctgaatgacgtgnggggtgggtgatggaggaaaagccatttcacctgagggacttacgacgtaccc

SEQ ID NO: 83881 - DNA, 606 bp, Homo sapiens
gtgtctcgtgcctctgctggaccctgactctgggctcctggtcctggcaggaaaggggttcagtcagcaaacggggctcagttcagactcatttcagggcgagaggcagctgtactgttacgaggtggtcccgcagcagccggcgctgagcccagtgacccagtgtgtcctggagagcgtgctgcgtggggctgcccttgtgccccggcaggcgctggccgtcatgagctgcgaggtactccgcgtcctacagctgagcgacacagccatcgtgcccatcggctaccatgtgccccgcaaggctgtggagttccacgaggacctgttcccggacactgccggctgtgtgcctgccaccgacccccatagctggtgggctggggacaaccagcaggtgcagaaggtcagcctcaaccccgcctgccggccccacccgagcttcacttcctgtctggtgccccctgcggagcccctccctgacacagcccagcctgcggtgatggagacacccgtgggtgatgcagacgcaagccctggggccctcactctccagcaccagtggcatcgggaccagccccagtttgaggtcgctgcagagcctgctgg

SEQ ID NO: 83882 - DNA, 769 bp, Homo sapiens
aatacattgtggggcttctgttggaattttttgaaagtaaataaatccattttctctctgacatttttctagggtgttcttcacaaggtttccaagtttcctaaagaacagatgtcctgaaggtttgactgttggtccaggtcctttggtttctccatattctttacacagtgcttctgcctttgcatacaatttttctgcttcttggagagacctgattgcttcaccgcatttatcactagccaataaagtctcaccatggtaacagtaagcataagctgtgtagaaacacatcttcaagtgaagatattttctccatttggcagaatatgcaggctccaaactggataaagtatgatcagctttttgatagaaattggcttgtttcatacgccagtgcagcaattagtccaggagcatgttttagttcaattgctcgagcaattgttacttcttgagcttcagcctgacattgaataacgtatgcttctatgagtcgtgactctaaatctcttcctttttccgcaggtgtaatgagttttgggagatgactttcctttaaatgtttaaaaatcccagctgcaatctttaggcttcgatgaacttcttttgcttcatcttctgttatattttcttttccagccagtcttgaagcatatttggtataccataaagctacattaaatcccatggaaattaattcaaaatttcaagtggactgatacattgcaaggacaggttccaagtgcccagcaggatgctgtttttg

SEQ ID NO: 83883 - DNA, 925 bp, Homo sapiens
tttcgtcaggctgccgggggctgcagacatggagggccagagcagcaggggcagcaggaggccagggacccgggctggcctgggttccctgcccatgccccagggtgttgcccaaactggggcaccctccaagcccctgacatggccctcccaaggcttggcacacagagtacagggcctggcaggtgcctgagccccaaccttcaggcccaagaagccccagccccagtcaccacctcctcttctacatccaccctgtcatcctccccttggtcagctcagcctacctggaagagcgaccccggcttccggatcactgtggtcacatggaacgtgggcactgccatgcccccagacgatgtcacatccctcctccacctgggcggtggtgacgacagcgacggcgcagacatgatcgccatagggttgcaggaagtgaactccatgctcaacaagcgactcaaggacgccctcttcacggaccagtggagtgagctgttcatggatgcgctagggcccttcaacttcgtgctggtaacgcacccctcaccccctggacagccagagaccctgctgaattcctggctccagctgtaccctggctcactgtggggcccgctgggcctctgtggctgggtccgtgacatgggtgggtggaggagcagacctgaaggtgggcgcgagggcgggggagttgtgttctgtcccccagccacgtggcctcccgctgcaggtgagttcggtgaggatgcagggtgtcatcttgccggtgttcgacaagtatgacctcgtgcccgtcttgcgagacgaacagtgagcgtgcacgcgctttgcacaggacgcatatagggtcagcctgtcagcaggctcagaagaggatcggtctagaaaaagatggtacgctagtacgtccgcgtctggtatt

SEQ ID NO: 83884 - DNA, 528 bp, Homo sapiens
aatacacgggaggggaagagctttacgcaggagtagatcacagacacaaacaccaccaaggtcagcagcagggaacaggtcaggtagaagctgagcatgaatatggagtggggcacgatggtgatctggacaaagcagatgaagaggaagacgagcgaggcacacgccacataggcaccaaatcggtcgtctacctgcttggagtacttcttctctaagtcaggctccctgaaggtcaggaggaacttgcggacgtgctcagaccgaagcctatcaatgctcctggcgtcaatggcacggcccagaaactcatccacttcatcctcagggttcgcactctcctgggcgctcttgtcccttggggtcttcagagcccatccgctttatctccttggacacctgggtgccacccaggcgcttgtagaaagggcgctcacccccccatagtggggggccgcgcccgctggagctgggctttccgcgtccgcatcctgcctaatcatggcctctcccttccttcccgctgcg

SEQ ID NO: 83885 - DNA, 404 bp, Homo sapiens
  misc_feature (1)...(404): n = a,t,c or g
aatacaggtggggagaggcttcagcttttccttagagctggaggcacccttgggcttcagagtctgggaggaggcagctgctggggttagtaaggtgtcagggcgaggtaggggggtgaccacaggaggccaccagccaggacgctgcctggcccaggtctgggagtggtgaggcagggtcagcctcagggaaggctgtgggaagtagaggaggatgtgggcattggtggagggccggggactcacagggttctcatactggggaccagggtctcatgggggctcgctactaggccagggtgtgaaagggggcttcacagtgggggcggtctcgccctggtggcatcgggggctcacaggaagggcttcaaaggggtacgcagcaagagcttagggactcaccn

SEQ ID NO: 83886 - DNA, 393 bp, Homo sapiens
gcccgttttaagagttttaaattttttctcctacatttagggctgtgatctatattggtttgtttatagtgagaggtaagggtataatttatctttttgcatgtgggtgtgtgattattccagcaccttttattgaaaagactgtcccttccctattgaattgccgtagcatcttatgaaaatcaattgaccataaatataagggtttatttccggattctgagttctcttttgttctgtaggtgtatccttcatgctaatactgcactgtcttactgactgtagctttatagtgaattttgaaatttggaattataagccctctaactttttcaggaatgttttgactatgccgggtcctgtacagttccatacaaattggcgatttctgcc

SEQ ID NO: 83887 - DNA, 399 bp, Homo sapiens
  misc_feature (1)...(399): n = a,t,c or g
tgggcatcgnnnncccatctatcacatgtgtgtgcagttttagcttgtggtttaaacttgcatttgtcaggccattaataaagttgagcaccttttcgtatgtttattgaacatctaggtatccccatctgcgaagtgaatcttgaagatttttctcttgtatctattggattcttttattgatttgtagaagttatatattttagatagaaatcctttgctaattgtatgtacttcaaaatctttcacatgtggcttttttttaaccttcatagcttcttttgatgaacagaaattcttaattttagtgtagtcagatgtatcaatcttttcttttatgtttagtatttttttagcctgtttaagaaatctttccctcctaagagattatgatgaaga

SEQ ID NO: 83888 - DNA, 1015 bp, Homo sapiens
  misc_feature (1)...(1015): n = a,t,c or g
aaaaatgaccccactccaccttaggaattaggagtttttttcttaatgcaggacaaaagtctgattgtgtattttatcatcatttatcatgcacattttattactgtttatctccacaacaccatgggcttgatatatttttctgccttaatctccatttttttcatcaaagcttcccagtagggactcatctcctagcaaaaatggtttttaactatttgggatatttttaaaagacttttgtggacccttttatatggtcagccaagttttgacttagtcatcactcattctttaagtcaagtttcaataccgtcttcaatggttaacgtttcttggaaccataaagcttatttatgatgaatatattaattttattttgcagttcttctattaaggaatataagaaggaatatagggcacagaaagtggttctgtattatttttatttgaattcaacttatgattgtcctcctcgaatcaaaaaaaaaaaaaaggggcgcccgttttaaagaaccaaggttaacgcccgcgggcggggcgaggaaatagttttttattgggggcccccaaatttcattccctggcccggggtttcacaccgccgagaggggaaaaacaannnctnnccccccntccctccccctccctcccggcaactgcccctaaccaccgaacggactaacttggccccccacaagactcgaccaggtggcgcctcccagcagatcgcctccgcagccggcccgccacggtcgaaagcgtgggccgcgcaagacgacactagtcaccaaccggcacaccgggccgcctccactttccagagacgcgcgaactaggccgacagatggcacccgctcacagccataggttggcgccctatctccgcccccaccaagccggcaccactctcctctcaccgaagacacgtccgccgccaccgccgcagcaagctcggtcgcatatcagtgggacccaacacgccgcacaaccaacggccacgagtaccacatcg

SEQ ID NO: 83889 - DNA, 415 bp, Homo sapiens
  misc_feature (1)...(415): n = a,t,c or g
aaagccattttgacattttagacattataaaaccattggatagtcaagttactgatatctccaagggtgaagaaacaacaaccaaaagattagaaactgtttaacgaaatgatagatgaaaatttcccaaatctagcaaaagatttagacattcagataaaagaggcttagcaatccccaagttgataaaatacaaatgtgtctccatggcacattatagtatgactgtctaaagctatagataaaaagccaatcctaaaaacagcaagagaaaatatctagtcatctataaagggaaccccattagattaaaagcagatttgtcagttgaacacttacaggccagaagagaattggatgatctactcagtgctgaanaaatgtcagtcaaaaatgctatatccagcaaaattat

SEQ ID NO: 83890 - DNA, 387 bp, Homo sapiens
  misc_feature (1)...(387): n = a,t,c or g
acatactgtggccatagtttgtaactcaacatagtaaagatttcagttctctccaaatttatacaggtctgagacaattgctatcagaatcctaacatgattttttgaagatatagacaagattatggtaaaattcatgtgggaaaacagagaaactagaatagctaaaacaattttgtaaaaaaaggataaagcaggaggactcactctaccaattttaagactatgtagctacagtaatcaaaactgtgtggtattggcaaagaaacagacacatcaaaggaacagaagagagatcccagaaatagacccacacaaatacggccaactaaattttgactaaggtccaaaagcaattcaatggaggaaagacagccttttcaatan

SEQ ID NO: 83891 - DNA, 486 bp, Homo sapiens
gaagagactcttaattatttgcctttatattttttgcctcaaactctgctgctttcttttcagcttgagatacttatgaaaagataattaagacttctgcttcagtgatggtggaccagcttttcactgaagaaaactaaaaacaaaatataaaacacatcctcttaaaataatcaaaagacactccacatttgagtcaaaattgctaaagtgaagaatattgtgaagaaccacccataaatcaggcctgaaatatttcttccgtggttaccaagttatcggaactccccacaagatcctcagtgtggactgagaaagaggaagctgtgcagaaggactagctactatagataactgagccacttgagcatgcagcttagttgtacctttgggacccacttgtgcctgatctcatatatattacttcatctgcacatgcccaactttacaatttcatgaataaagtaattcccagttcgtgaaaaa

SEQ ID NO: 83892 - DNA, 415 bp, Homo sapiens
  misc_feature (1)...(415): n = a,t,c or g
tgtgtagtaaggttttaaatttagaagtgtgagttctttaacattgttctttttcaagatagttttgactatttttggtccctttaatttccatatgaatttcagatcaccatgtcaacttctgccagaaagacagctgggattttgttagacattgcagttaaatccgtagaacaatttgagggaatatttccatcttaacaacattaggtgttctgatacatgaacatggaatgtctttccatttatttaggtgttctttcatttctttcaccagtgttttgtagtttccagtatacaaagtttgcattaattagttaaattcatttctaagtattatttttcagaccattgtacgtgaaacagggttctttatttttgcattgtttattgctagnggatagaaatacaattt

SEQ ID NO: 83893 - DNA, 382 bp, Homo sapiens
aaaatacataaaataaaaactgatagattagaaatgtgaaatagacaaatccataattataggttgagacttcaacagtcttctctcagtaattggtatcaccgctagacagaagatcaggaaagatttagaaaactcaacaccatcaatcagctggacctaattaatatttatggaacacttcattcaataacagcagaatgcacattctttttaagcatctacattacatacggatgctgatgcagtattttgcttatgcaagagctaccatatccttagccacagaacaaacctcaacaaatttgaaagaattaaaatcatacagagtatgttctctgactacaatgagtcaaactagaaataaataataaaaaaaata

SEQ ID NO: 83894 - DNA, 438 bp, Homo sapiens
  misc_feature (1)...(438): n = a,t,c or g
agcatcccgttggggtnnnnagcggacccacgcgtccgctgagccttgtttttggacactctgttttacctttcagccgggaaatgtaaggtttttatggtaggttggacagaagcctcttgggttgggctatacacaagaaggngatccacatactggagtatactcccatcctccaattgcagacccctcagaattcctctctaagggttggacaaagaagtgggggctatcccaaaagccttaggggagcactgcccaagagtttttctctggtattaggattttcccattcaaaggcaaaagggtattgggactctggaaccacaggaatgaagaagaaagcatcttttaagtggaggactgagaaccattttgcatcccctggtacctgagccagnagggtatatagatccatcatcaatggggggagagaga

SEQ ID NO: 83895 - DNA, 419 bp, Homo sapiens
  misc_feature (1)...(419): n = a,t,c or g
tttcatctaagttatgtaatgtatttgcataatatttccttatcttaatatccataaaattcatagggatcttacctctctcattcctgacattggcaatttgtttacgtttttttcctgatcagtcattctacaggtttatcaattttattgccttttgaataaaccaaattttattgatttttctctaaaattttctattgaattttatatttaattgatttctgccctaatcttattattttctttctcctgcttactttagctttacttttctctccattttactagnttctacttggaagctcaggacattggcttgacacctgtattcttttataatacaggtatttactgctataaatttccctgccttacatgggatcttacaaatctggatacattgtgttttcattttt

SEQ ID NO: 83896 - DNA, 375 bp, Homo sapiens
atcttccagagcttatatttttttgggtttttcattcacgtatttaattcatgaggagctgatttttatatatggtataaagaaagaacccactccccttcttcttgcatatgactaatcatatatcccatcaacacttattgaatgggaacttctctctttaatgcctgtttttgttggtgctgttgaaaaacaaatggctgtacatgtgtggcattatctctgggctctctattctgaaccattgatctatttgtcagaatttgtactagtgatatgctacttgcgctattgtggccctgaagaagagtttgaatccatataatgagagggcttctttttagtgcttttcactttaatgggctgattataaca

SEQ ID NO: 83897 - DNA, 368 bp, Homo sapiens
aaaaaaaccttgttttccagaaaaagaaaagaaaaaagtcatccagattggaaaagaaataaaatgatttcaattttaagatgacataatattgtatgtagaaatcctaaggaatttacaaaagaactattagagctaatacatgatttcagcaaggttgcaggatacaagatcaacatacagatataaattgtattctacacacttgtaatgaaaaatctgaaaataaaattaagaaaatagcaccctttgaatagtatcaaaaagaataaaatacatagaaaaaatgtaacaggaagtgcaagactggtacattgaaaacaataaaacattgttaaaaaatttaaaatcatcaaaatagatggaaa

SEQ ID NO: 83898 - DNA, 1149 bp, Homo sapiens
gccgactggggtgaaattaccgggccgacccacgcgtccgcaccccagccatcagtatcaatgtgaaaaccacaatgcttggattatttagatttatttccaaatcccacaacagctatcagagcactaaataatggggcgagtaagcgggtactgatcacagaaccccagcacgtagctctcacactggcacagaaacgtattctagcaaggcgtgactgagaaagagctgcgagcagcaatttaggcaagtctcaacaacgggtgccactattagtttacttttaatggtggctggggtgtttctgatgaatggtactctctgtcccctccacctcccaaggtgtaagagacattttaggcgtgctccaactgtgaggaaagtctgtttagagccaagcctattaatccctatttctgatgagaagagacagaaatgtaatgaggcgaatttgtgtgcggggcatgtgacccacgctgaggctaagggaatctaagggaaacggatcacaatgacattaggattcagagctgctgacgtcattcctttcataggattcagaagtcaagactcaggaatgggctcatatactcaagcaatttgggaactcaatatcattacataaagaaccagaaacccgtgttaaaaatgggatctattttttttcataatcgatgtgaaagtctctacagcctaacaggttcatgaaattttaaaagaaataaactggctggggagggggttatgcctataatctcacactttccagccgagcaggaggtcccttgactgggagttcagataaccggggaacacacgagacccgtcttaccaaaaaaatttttaaaaaaaaaaaggggggcggttaaagaccaggttaagacgggatggaaggtagtttttttggggcccaatgaatttcgggcgtgttttaagggggggggaaaaggttgggtggatgagaccggtgggaggatggtgtggatcgttgggcgggtgggttgaaagagcgtgagcgtatgctacgttgcgcgcgtaggagtaatggggagcacggaacgcgtggatccgttggacggagtggccgccagattctaggaacgcagggctggatggatcgggcgaacgggtgactggctcgggcgact

SEQ ID NO: 83899 - DNA, 394 bp, Homo sapiens
aaagacacatcccccagtgttgtgctgctcaaactggcctggaccataccctactatcaaaggaatcagcctcacatttgctcctgctaggtgaaaggagagtgtcagagaaaagaggagcgtccctacagacagaagaagcctacagatctggatgatccccttgctgatcaaaatgttgaagactcatattatggaatcaatgaccctatagctgataagcttctaaagcagacttcaaccatgcctcatctggacccaccagaggacaagactctcaccacattacacgtggatggtctgggtgaaacagatcacagaaatcatttctaccagttaggagagattgaccatcactctaatgcagaagcagcagggtgctttcacccagttt

SEQ ID NO: 83900 - DNA, 406 bp, Homo sapiens
cccacgcgtccgataatcacataatcatattcataattataattaccataatagcggcctcagacaaggaatttagaagaattccctcctcttcaattttctggaagattttcagaagattaggtattagtttttttagtgtttggtagaattccccagcgaagccattgggttactgtagaattggcattttgataggaatgtcattggtatttcaacaggaatttctttgggctttcctttgatgggagactttttgttacagattcaatctcaatgctcatgactgggttgagctggctttctatttcttctgggctcagtcttggtaggttgtattgtccacaaatatacctgtttctgctaggttttctaatctggtggtgcatggcctctaattatcctt

SEQ ID NO: 83901 - DNA, 386 bp, Homo sapiens
gaaggtctaccacatagttggaggggagggaggaaaagttcaataggaaaccaaattttgttttgccttctgtatatcttcctggcggtgaatacgcctgtggatgattgtttttctctaggtcctctcaagtttcagtctccgaccccaagcacggtggtgcccccggctccccctgcaccgccaacacgcccacctcgtcggtgtgactccaacccatgtttccgaggtgtccaatgtaccgacagtagagatggcttccagtgtgggccctgccccgagggctacacaggaaacgggatcacctgtattgatgttgatgaggtaaaagttcacttagactgggaggggatcactaaatatcctcctcaccctgcagcttttgg

SEQ ID NO: 83902 - DNA, 401 bp, Homo sapiens
  misc_feature (1)...(401): n = a,t,c or g
ctcaggcagagggaaaagcaggtgcaaagtttctgatttttgtanaagctcagattccattacccaaaaccgttgagactcaaatgtgtttcagaatttggattcttttggatattccacatattgtacattatgcgtaatacaatatatattgtatattataacatataataccatatatagtatattataacatataatacaatatataggataacatataatacaatatatattgtatgttataacataatacaatatatagcataacatataatacaatatatattggatattataacatataatacaatatatattgtatattataacatataatactatatattgtatattataacatataatacaatatattgtatattatataacatccccac

SEQ ID NO: 83903 - DNA, 395 bp, Homo sapiens
acgctgacccttccaacggaaagcattccttttggactgtcctccaagccacctgctcgtggaatttatctgtgcattctggatctgccatatccatttaacatactgcccatgtccaattttattatttagaggatcacagaatatccagttcatgatgggtgtttcagatcacagttacggtatcttttgcccaggcattccgtttctgcggagcatgttaccaccccacgaactgattttcatagttattaacaaagagggacaggcttactccaaatccctaggggtctgtgctggaattctctcattgggtcctagtagagtttctataatgcatccctgtctgaacaaacattttagctgccattggaactgatatgacataaagcacg

SEQ ID NO: 83904 - DNA, 425 bp, Homo sapiens
cccacgcgtccgcccacgcgtccgcccatgcgtccggcttttatcacacgtactacctttggggggcatcagagaactcatactggagagaaaccttacaaatgtactgaatgtggcaaagcctttactgaacgttcaaatcttactcagcataagaaaatccatactggagagaaaccttacaaatgtactgaatgtggcaaagcttttacccaatttgcaaacctcactagacaccataaaatacacattgaaaagaatcattgtaaacataatatacatggtaatgctttattccaaagttcagaccttggagatcatctaaaaagttataatagagaaaaacatatcaaatataatgagacaaagattaagtattcaagctgtacctagcatcaggggctccattgagaaaagaaaccata

SEQ ID NO: 83905 - DNA, 758 bp, Homo sapiens
aaaatttgagaagggccaatatcagatatggataatatctgatattgacctagattgaagaccagacacacaagcatgtccctcagcaccatgacaatcacagctaaagcaaaaagcttgtttgttacgtagatagaaaaggctggacctgactatattgttgaatttattgctagctctgggtggtttaaatgattcgagaattgttactcattacacaattgtgaaagtgagtgctaagtctacaagtgctgatgtgaaggcagctgaagaatttttggaaactctagataagctgattgtgggggaaaattacttgccagagcaaatctttaatatggatcaaggctccctattctggaaaaagatgccggaagggactgtcatccataaagaggccaagtcagtggcaggtttcacggctttgaaggactggctaacaatgtttgggggcgatgttgctggccacaaattaaaaccctttgtgatttgacacagtgagaaccccagggccttcaagcatatcagtaagcacacactgccggtgtactacatgagcaataacaagtcatggatgacccagcttctcttccaatatgccctcctgaattgctatgccagtgaaatggagaagtactgtttggagaataacatacctttcaagattttgcttgttgttgataatgctcctgtacatccttttattggtgatctttgttttaatatcaaactggtgtttctccctctaaacatcaact

SEQ ID NO: 83906 - DNA, 402 bp, Homo sapiens
tcaaaactaccttggggaagtggttgttatccacctcatcaagttagaaccatcttaaatcaaaaggcaggaaggtggcttactgactcaagaattttaaaatatgaagctatcctgttagagattatttaacactatccactgatgattcacttaacccagcaggtttcttgactggagatccaaatctaaagagacctgaacatgagtgtttagatttaattaattaccatacaaaagttaggcctaatttaagagagacccctttcaaaacagggcagcacttatttataggtggctcttgctgagtaactgaaggaaaaagatataatgggtactcagtagtcaatcaatggggaagcccttgaagaagtagggcttgaagtagcccttgaagaagtc

SEQ ID NO: 83907 - DNA, 444 bp, Homo sapiens
  misc_feature (1)...(444): n = a,t,c or g
catgaaacattgannnntcgcaccnatttaacgaaccgggctgacccacgcgtccgccagatgtacaagccttctttttaccgtttatcactttttaaaaaactgcatgcgaagactttgcccattttaatatcatgaatatatgttccaatgttttgctctaaaagcattatttatttttaaccttttacctgtaggactctagtccccatctggaaattatttttctgtatggcgtgagatagatgccacgattaatttattttagtcatctttcccccactgcacttcagggtcatctttgtcataaatcaccgactgcatatataaatatttcattgcatagacaaatatttctgtttattttgccagaaatatgttattttcattatcgcagctttaaaataaattttgctgcctggcacggtaagtctttcagctttg

SEQ ID NO: 83908 - DNA, 416 bp, Homo sapiens
tgtgatctcttgggaagggcgttttttttcacttaacataacttcctggagcttcatccaagcgtgtgccagcagctggctcctccgtagtgctgagcactatttcacgggatggaagcaccacagtgtgtttaaccaaccacctgctgaaggaagcttgagcagctttcagttttggcttttataaataaagctgctatgagcattcatgggtaggtttttgagtgaacatgtgttttcatttgtcttggataaatggccagggctgtatgttggttgcatgtgtagtttttggagaaattaccagctcgttatggagattggctgaccattatgtgtccaccagcaagctgagtgactttttcaccatactggccagcatctggagttgatataattttgatgtcagccgctaa

SEQ ID NO: 83909 - DNA, 469 bp, Homo sapiens
gtttctcaataattttttcgaagcaacagctcccggcttcattcatattccatttttgttttcaatttcattgatgtctgctttttgtcttcctttgttctgctagttgtgggttcattttacttatcgttttctgttactgtggatgctcagattattgatctgaaaccttctttcataataaaagcactcaatgcaataaatttccctctaagcactgcattatctgtgccccacgtattttaatatgctataatttcacttttcttccctttaaaatatgttctgatttctcttgagaattcctctttggtgatttatttatgactatgttgtttaacttccaggcaatttcagattctcctgttatccttctattactgaattttagttcaattccattatggtcagaaacatactttgtatgatttcagttattttacattcattaaagtttattttataaacc

SEQ ID NO: 83910 - DNA, 442 bp, Homo sapiens
gggtggaattccgttagcccagaccgggaggaagggccctggggccccgcacctctcaggccagatcacccaagcctgtctccatgcccagctatgggatagaagacctgggctgcctcgggggtgcccacagacacagatcagtcctttattcaataggaccccagcttcgccactcatctgtcaccatcatccaccatctgagccagaaacctggccccgaacctccacccaccccatcctccagcattccctccttggccaggttcccaagacctggtgaatcttctcccctcccctccccacagcccagcctcaggccctcccatcagaccgcctccttcccagagggcgagtcccccttccagcccaggccttgagtgcagcctcaaggttatctttctatcatgaaaccatgcctccagggagagaggcccagcag

SEQ ID NO: 83911 - DNA, 1769 bp, Homo sapiens
ggtaataagatcagtatcttcttaatggaagcacctggactacatttttttcattcattgttatcataaatgaggactaacctgtctcccgttgggagttttgaacctagacctcatgtcttcatgacgtcatcactgccccaggcccagctgtgtccctacaccagccccagctgacgcatcttctttttctgcctgtagagatggttacaatgcctggcgtgatgcattctggccttcgcagatcctggcggggctgtgccaacgctgtggcctccctgcccctgaataccgagccggtgctgtcaaggtgggcagcaaagtcttcctgacaccaccggagaccctgcccccaggtatcagcccctttctgttcaagcaagatgtcggtagaacaagggatctcttcacatgtggattgacatctttcctcaagatgtgcctgctccacccccagttgacatcaagcctcggcagccaatcagactggctttctgttcactcacttttctacatccccaaactctggcttgtggtagctccagctttgcatctgatgccacaccatgcaacagtgcagcgccctgattctaaattcacgggaaggagaacctcgctggccccacagaccattcctggggccatctgctgtggccagggtgccccttttagggccccactcgagagtctgaagccaccccctaatgtgccccccagctatgagctcagagttgtcatctggaacacggaggatgtggttctggatgacgagaatccactcaccggagagatgtcgagtgacatctatgtgaagagctgggtgaaggggttggagcatgacaagcaggagacagacgttcacttcaactccctgactggggaggggaacttcaattggcgctttgtgttccgctttgactacctgcccacggagcgggaggtgagcgtctggcgcaggtctggaccctttgccctggaggaggcggagttccggcagcctgcagtgctggtcctgcaggtctgggactatgaccgcatctctgccaatgacttccttggatccctggagttgcagctaccagacatggtgcgtggggcccggggccccgagctttgctctgtgcagctggcccgcaatggggccgggccgaggtgcaatctgtttcgctgccgccgcctgaggggctggtggccggtagtgaagctgaaggaggcagaggacgtggagcgggaggcgcaggaggctcaggctggcaagaagaagcgaaagcagaggaggaggaagggccggccagaagacctggagttcacagacatgggtggcaatgtgtacatcctcacgggcaaggtggaggcagagtttgagctgctgactgtggaggaggccgagaaacggccagtggggaaggggcggaagcagccagagcctctggagaaacccagccgccccaaaacttccttcaactggtttgtgaacccgctgaagacctttgtcttcttcatctggcgccggtactggcgcaccctggtgctgctgctactggtgctgctcaccgtcttcctcctcctgtgtcttttacaccatccctggccagatcagccaggtcatcttccgtcccctccacaaaatactctcgctgaccttggacactcacccagggtgccaacccttcaatgcctgctcctggaagtctttcttacccatgtgagctaccccagagtttagtgcttcctctgaataaacctatcccagacactgaaaaaaaaaa

SEQ ID NO: 83912 - DNA, 452 bp, Homo sapiens
  misc_feature (1)...(452): n = a,t,c or g
ncgtacgcttgtgcggtcccggtccnnnnccccgggtcgacccacgcgtccggagaggcagaaccaagacgcccggtgagtgggcccggtggcagggctggatgcaccccaccccgaatccgggaattcaccacgcagagcaccaggacattgaggaatgtgagtgatggatccagtattatttaatctttaagaaattccagtcctgaaataaacccttatgtatggtcacatgatcttcaacagggtgtcaagaccattcaatggggaaaggacagtctttcaacaaatggtgtcacaacaactggatatccacctgcaaaaatataaagttggactcttacctaacaccgtatacaaattaactcaaaataaaagacctaaatgtgagagctaagactataaaactcttagaaggaaacacaggggaaaagcttcatgacattggatgt

SEQ ID NO: 83913 - DNA, 408 bp, Homo sapiens
gcctcactttcgaacctgctgtgaaggtgcctcccactatttctcttttctaagataggaggaggcgctcacacgacgggtgtccatacagctgggcgagccttacagccacggctccctccccagaggtgtttgcaggtgccaccatctccttaatgacagacgagcctgccctatacaaccctgcctacgtgtcctcggaagaggacgggcatccagcaatcagcccagtggactctggccggagcaaccgaactagggcgcggccctttgagagatccactattagaagcacatcatttataaaaataaacccagctttgagcgttcttcgaaggacacagagcgggagtgcagttgccaaccatgccgaccagggcagggaaaactctgaaaacaccactgccg

SEQ ID NO: 83914 - DNA, 423 bp, Homo sapiens
catgtctaccggccctgaattcccggggcgacgaatgcgtgacaaaactttggactcttttttcgcccctttctctaccaaacctgggaagaaagccaatttcacgaggacattcatagagccactcagctccttggcaagaaaggaaggtgccagcagccctgtgaatgggaaggacttggattacgtttccacctccaagacccagctggtcccatcctccaaagatggggatgtcaaagacatgctttcgcgggaccgggaaacttccagcattgagccccttccctcatactccccgaaggaggaattacgcccaattaggcccgacaccccaccctccaaaccagtggcctttgaggagtttaagaatgagcaaggtagtgagatcaaccgaattttctaagaaaacaaatgcatctt

SEQ ID NO: 83915 - DNA, 826 bp, Homo sapiens
tttcgtaaggaccttgtcagtggggcctggtcagtaaggtcctggccagtggggtcctggtcattgtgggcctggcagcaggggcctggttagtggggccaggcagtggccacatcgcccagccagggtccggggagcctggcctgggacctgcccagtgcattgagggtgcgcctggagcccactccacctgatgcccccacagccctcccagggtctggcctcccggcatgcgcctgcctctccctgcgccccagatgtccaccctgcctgttccctgacttcctccatcctgtccagcaggatgggctggacagtgggacagcctatgtgcacattttgtggcaagtaggagtgacacaccatccctgggaggcaccatggttcctgccaaacccaaccccagaattctccctgaggtggttttaccaaacccataacccagaactgctattgtggtttgggggtcagcacccaccagtgccagggcactactgggaggctgggacctgaccaaagcccatggtgtctgtggcctgaggacagggtgtcttggggccatgaggacaggccaccaatggccgttgggtcatagggcctgagccccagtgtttgtccttccctggctccttctggttcagtcccatcagggctctggatcccaagacgcagcatccaaggttccctccaggaatcctggtggctcggcttactttgtcatgtttcatctgatagcaaaaatatcagatcggctgcacagaaaaatggctcaaagtgcttaatgaccagaagaaatctgggagcagcaagaaggtaatgtggagag

SEQ ID NO: 83916 - DNA, 457 bp, Homo sapiens
  misc_feature (1)...(457): n = a,t,c or g
ccggttcggaatttctcggccgacgatttcgtatttccatgtatttgtacaatttctagaatttttgttgttattgatttctagtttaattccattgtggtctgagcagacacttgatatggtttcaatttttaaaacttttggagacctgttttgtggcctaacgtgttctatcctggagaactttccatgtatcggtagaggaatatttattctgcaactattgggtaaaattttctgtaaatgttaactccatgtagtatgtagtgcagattaagtctgatctttctttgttgattttctgtctatatgatctgcccagtgctaaaacgagggtgttgaagttcacagctattgttatattggggtctctctctttagctataatagtattttctttatataactgggtgctcttgtgttaggtgcgtatacaattacaattgttgtatcttcn

SEQ ID NO: 83917 - DNA, 857 bp, Homo sapiens
ttttttttttttgagagaacctgaacatttaatatggtcagcaccttgtaaggtgaaggtgtgttttttacacaaattataaataatgaaaaatatgcatttagaaaaagaagcagcagtccccttggcgggccggctcgaggactctttggttgagtggcaggtgaggccctgggtccagggtctgtcagagcccccctaggtcatctgccaggaaggccagcaggtagcggctgacatgtctgtcgatgatgacaggcgagaaaccgaggacgcgccgggtccctggcaggcccttggggtctggcggatagcagtacaggagcagggccagtcccacagcaaggcccaggccagccaggaagctcatgggtcccctgttactcagctcgccgctctggctgcccgagtctagctctgtgcaatctgagttctgcagagcgtggcggctgggcaggcggctgtgcaggggctgggcatggatatacagggctcggtagaactcctggcagtcccgctcaccgctccgctgcaggtggctcaggaggtcacagagccgcacacgcaaggatgccttggggttccggaactcctcagcaccttttccgcctccttgttggtaaggatctgtgggtagtaacggttcagctggaggatgatcctgtccacctgctgctcactcaagcgcccatggcctgtcaggaaaggcgtgtcctgcaccaggcggtcacaataggtctgatctgtcatggcgacggacacagcgccgcccgcagtccccagcggtctgccccgccgcgcgtccgcccctcggtcagccgcccggtccaccagctccagcgatacgccgcccgcgg

SEQ ID NO: 83918 - DNA, 427 bp, Homo sapiens
  misc_feature (1)...(427): n = a,t,c or g
tttcgtgccatggtgtcctccaccctgaagctgggcatctccatcctcaatggaggcaatgctgaggtccagcaggtaacagaggcaaagggacttcagaagaaggcaaggagggatgagaggttcctgtgtgactcccagtttctcctcccctgcctcgccctctgcagaaaatgctggattatcttaaggacaagaaggaagttggcttcttccagagtatccaggcactgatgcaaacatgcaggagagaaggtcatggcggatgatgaattcacacaagacctgttccgattcctacaattgctctgtgaggggcacaataatgatttccagaactacctacggacacagacagggaacacgaccactattaacatcatcatttgcactgtggactacctcctgcggctgcaggaatccatcn

SEQ ID NO: 83919 - DNA, 843 bp, Homo sapiens
tttcgtgcttggcctgctacagggcagcctccagttccaccagctccccacgctgctcagcatccgcgatggcctctgaggccctcaatctcagcatggaccccgctgatgttgcggatcatctcagagttctccatcttcccgcgacgcaggtcatccccgtgcttcccagccagtgtctgcaactcctcatccttgacctggtgcagactcttagccttgcctggccgcagtgggcgatctcctcgtactgggcgttgacctccgcgatgatgccatccacgtccagggagtggctgttgtccatggacagcacacagacgtgtccgagatctgggactgcagcttccagatctcctcttcacacagctctctggggaagttgatcttgtcagtcagcccttccaggtgagactccagcactgccttgttcatgtaagctccatccacatccttctcgatgaaggcaaattcattccccatctctgtccactcgttgatctcatcctggtacttatcgttgaagtcttccagcagcccctgcgtgttgccaagatctgcctccaccttcagcttctcctggcccagtgtccagctgctgcccaaggctgtggatgtggctctcaaacacgctgtccatgttgctcccagctgtcttctgctgctgcaggatgctccacttagtctccagcatttgttctgctgctccaggaactgcaccttgtcgatgaaggaggcaaacttgttgagggtcttgatctgctccttctcctgggtatgcacagcctggatattggggtccaggtccagcttaagggggctcagcagactctggttcaccat

SEQ ID NO: 83920 - DNA, 413 bp, Homo sapiens
tttcgttgaggctccttcagctgctggcctggatggacagggtacaggcagggctccgggagctgtttcaggggaaggaaaggcagggccctcagcagggagcaagggctgccaagccagggctgggcccaggggcctgggcataccacacagttcctccccttccacatccggcttctccctagctgtcactctgccatccacacacccgaccacccctccattcctcggtcccgtcgcaggtctgcttcctccctcccccaggactgctggcacccaagggccacggctgggccctctgcctcccctcccaccaggcctgagctcccatgcatgaggactggactgccaggcaagctgtgctctggcctgtgcccttctggtttgtttgttgaggagggggtcagggggaa

SEQ ID NO: 83921 - DNA, 410 bp, Homo sapiens
tttcgtgtctgcgtaaccgcacgggaaacgtgggtatttgcgatccgtgtgtctgtgcgcgtgtctgtgtctgtgttgtgggtgtgtgactctttgtatgtgttatgtgtgccagggtgtgtttatgtatgtgatgtgtgactgtgggggggttctgtgtctttgtaaccttgtgtgaaaggtgtgtgtatttgtgatgcgtgtgaccatgtctgtttaggtatgtgatgtgcgcaactctgcgtgtctgtgtatttgatctgagagcctatgtctgtgcttatgtatgggcgactgtgtatatgtgcatgttatatgtgtctgtatgtatcagcgtgcggagtatttatgtgtatttttgcatgtgatttatgtaaccctgtatgtatgagttgtgcgtgcccgcatgc

SEQ ID NO: 83922 - DNA, 391 bp, Homo sapiens
tttcgtggaggcgggctccgaggggccgcacaccggtcactcgcccctccctgcccggggttgccatggtgacgcgtgcagacgccggcccgagagggctgcgaggggcaacttcttatagtggcccatcggtcggtctatggaggggagggtcatgcgttgcaaggtgtgtgtcgggggcatatggaaggagggaaggagtgctgcggataaggggcagtagcgtccccgtaggaagggaccgttgttggggagaatacgcagctgtggagggagagggagcaaggaatatttgggtgggggaggcggaggacaagagacaggtgctacggcttgcggactgaacccattacaaaaggagccttggccggggctgggccgttctacggaa

SEQ ID NO: 83923 - DNA, 411 bp, Homo sapiens; identical to SEQ ID NO: 68354

SEQ ID NO: 83924 - DNA, 430 bp, Homo sapiens
cgggacgacgatttcgtcacggctgcaccccgcctgagccctgacccctccaggcagacacgaccagggctcctgcacggctgcaccccgcctgagccctgacccctccaggcagacacgaccagggctcctgcacggctgcaccccgcctgagccctgaccccctccaggtgaagccaccacctccccaccggcccctgaaacactccggagccagctctgtcagacacagggggccccatggcgtcgccacaggctccccctctggcccccagcctcctggctactccacacccccgtgggcttcacccctgtgcagcccccaacagcagttacttggccagaggcctcacctccgagatgccaccatcctgaagagccttcctggcctttttccttcctttgtaacccacggtcctgcttcctgtgt

SEQ ID NO: 83925 - DNA, 496 bp, Homo sapiens
ttttttttttttggaaaaggtttttctcttttaacccgggttgggggggagggggtaaattctgggttaattgggcaacctcccctttttggggttacggggatttcccggcccctcaccctcttgggaagagggggaaaaacagggggccaccccccccccgggtataatttttgcttttgaaaaaagagacggttttcccccgggtggacgcgagtggtcttagactctagcgccaggggaaacccccccccccacccctccagaggggagaataacgaggggcaccttgcccccgcattaatcttattttggagcgcctcgcgcggggcctctctgcgggtcgagcgaagctcacgagcctactgttacgcgggagaacccgaccaccatattcggtcgcgtaggacctcgccagtacgttcttacgccggaacgtcatcaaacgccatcgcctcatcgagggtagcatagtgtacacgccatatttcactct

SEQ ID NO: 83926 - DNA, 522 bp, Homo sapiens
ccactccctgtgaaacacctttcatcaccgttgtgcccagcggggagtgggggaggtggctggggccacagaggagaacctatcactgttctcagggctcttagtcgggggataaaagctcggggcaactgcagcccactctgtaggggccacaagagaaccccattcaacacaggtgctggcaggataccccattgagctggacaagctgcagaacctcgtggtcaactactgctcagagctgtcggatatgaagatcatgtcccaagatgccatgatgatcacggatgaggtcaagaggaacatgaggcaaagggaggcgtccttcatcgaggagcgccgggcaagggagaaccggctcaaccagcagaagaagctgatcgacaagatccacacgaaggagaccagcgagaagtaccgccggggccagatggacttggacttcccctcgaacctgatgagcacggagaccctgaaattgaggagaaaagagacctccacagcagaaatggaataccagtc

SEQ ID NO: 83927 - DNA, 367 bp, Homo sapiens
acgcgttttcgaggcagccatgaggacctggaagcccggaatgggaccaggccctccaggggctcagtgcagagcgagggccccggggcccccgcccacagctgctccccgccctgcctgagcacctccttgcaggaaatccccaagtcccgcggggtcctgagcagtgagagagggagcccgtcctcgaggggtaaccctctgtctggggtggccatcaactccccgaacctcccgcacagagacgccgccgtggcggggagctcgaccaggctgcccagcctgttgcccccgcgcccaccggcttgcctagagcctgtacttcgcctccgacttccctgagggacagcaaacaaggtcgagttgg

SEQ ID NO: 83928 - DNA, 340 bp, Homo sapiens
gagtgaataggccggtttgggtgagatgaggctgggtgtatgtgcttgagaagtccgggagtgcggaggggcagaaaggtatacagtgcgtgcggtaagaggggatgggggtggggaggcgagggcggtcagtgggttgagaggagtggggagaagatttagggcgagagaggtgccatcgtgctggggaaggcgggactaggagaggtaaaagaatggggagagaaatgggagggagagaaggaagctgagggagatttgaggagagaaggcgcttgagggggaaccaagaggggagatagcttgtgaggggggaatgttgaaagagaaggggcgcgag

SEQ ID NO: 83929 - DNA, 408 bp, Homo sapiens
cccacgcatccgcctggcgcgtgcctggtgaaaccctcgcacccttccccacccccacaagcctttggcatggcctgggagactccgggcatcttcaacccagccagggacaagggtccgcggagggtctggagcccctcgtgggcctggtgcccacggagtgcccacccctgccctccaggagcccctgggaaggcagcactctgttcaaggaggaagccagacccagctacaagggagggaccctcggctgatgcaaagaggccggagcccgcatcccagcaccgcccccgccggctgtctgctggttccttctccaaggccttcagagaggatccctgaagcttggcagggacagacacaggttctggagtgggctgggcctgagttcaaatcccacactccagt

SEQ ID NO: 83930 - DNA, 419 bp, Homo sapiens
ggcagggagcgggcgccgcgccgttttctttgagcccagccccggaaacgggacacccacagcgggtgcccccaaacttcccacctctctggtccggtctggggaggggtcggggccggggccggtgggcagggcgcggagagctcatggagctcttagggtctgcggccccgcggctgggggttatgccaagggagaaagcgacgacgcgatggggagggaccgagagcaccccgaagccgggatcatcaagccggagccagtggaggggcgcgaagtcggcgagttggaaactaactgcaatcggccactcgtagccttcggcgtccggctcgtcctctggcggcttggcgggcggctgcacagggctggacctgtgttggatcctcaggctccgaagatatggtccccatcctcgc

SEQ ID NO: 83931 - DNA, 407 bp, Homo sapiens
tctgtttatctccatgtcggccctgtatactgattccagcctgccaaggctgcatgtctgactctgtgtgcttctctttcagggagcacactgccaggatgggagctgctgggaggcaggacttcctcttcaaggccatgctgaccatcagctggctcactctgacctgcttccctggggccacatccacaggtgagcactgcaaacagatggacctctgtatctcagcatggaaggcacggcccctcactggagcaaggctgcttttgggggagccaggagaaggagccgtgggagtgggtcagggtgcctgggccttggcccgaccttactaaactccttggtccccggcacgtttcgtcctgggcttcagtttcatcatccacaaaatgaaggggttggactag

SEQ ID NO: 83932 - DNA, 404 bp, Homo sapiens
ctgcctccaatccggtcacccccccccggcggtatgacggagagccgcgccccctttataactttgatgagctgacggtgccggcccacggggccggtggagtgcatcaagcccccttccatgggcgcgatgagcaggtcatacagggcacggagcgggggcttggcaaacgagctctgcctcctgggaagagaggaggtcccgtcctgggtcggtgacacagtgttactgaacaggctcgtcatgctctggcagctcctgctaaacaggttattgcggcgaaccatccgcagaaagccaggggggacaagggcccactctgagttagtgcccacatcttaacagggctggtccatgatgactcacgctgactctatgtctcactgctggcacaggcccttgag

SEQ ID NO: 83933 - DNA, 406 bp, Homo sapiens
ctgagcccgttgcctcacaccggcctctcccgtgcggacagaggtcggcccgagcccttgcctcacaccggcccctaccgcgcggacagaggtcagcctgagccccttgcctcacgccggcccctcccgcgctgagagaggtcagtgtgagccccttgtctcacaccggcccctcccacgcggacagaggtcggcgtgagccccttgcctcacgccggcccctcccgcgctgggaggggtcagcctgagcccttgcctcacaccagcccctcccacgcggacagaggtcggcgtgagccccttgcctcacaccggcccctcccacgctgggagaggtcagtgtgagcccttgcctcacaccggcccctcccacgcggacagaggtcggcgtgagccccttgcctca

SEQ ID NO: 83934 - DNA, 302 bp, Homo sapiens
gacccacaacaccactcatttaactccaccaacttggggtcaaataaaggtcttatcccatccacagaaaaatcattaagagaaaaatgaatccccaaaacgacaggtaatataattctggctgcctttattggagacagtgcagaggtgagtataccaccagtttgggcaactcataaatatacctactgcgcatgtgttcttttccccctttaattcaggctgtctcctggatggactcctcaggagaagtgtacactaataatagtgcattcatgccgggcccttaagatgataggttt

SEQ ID NO: 83935 - DNA, 428 bp, Homo sapiens
atccctggagctccaggacctgaccatccgttacctaccccgggggatgtgcatctacctggacccgaaggaggctgagcacctgggcacttccagctccctgcacctccggcataagcaggcgcagctgcaggcgctagagaccacagccaaagtcctcaagcagcgggtcgatagcctcaccgccaagcttcagggtgccgaagcgccggacaccgtcagggacccagctgtgggcctgctgcgctcgtgcccccacagcctacctgccgcccccacgctcgccacccccacgcttgccaccccagcctgccctggagccttggggcccaactggggcagaggggcacctggggagtgggtgagcatgcagccccagccccttctgcccccgacctacttcctggagggcgagacactgtcgtggg

SEQ ID NO: 83936 - DNA, 1084 bp, Homo sapiens
cagtgcggtggaattccagcccagcctcggtgtccagcagcccggcccgcgcgctcctgctggtcggcgtcttcctcctggcctactggttcttgtccctgaccctgggcttcactttcagcgtcctgcacgtggtgttcggccgcttcttctggatcgtgcgggtcgtcctgttttccatgtcctgcgtgtacatcctgcacaagtacgagggcgagccggagaacgcggtgctgccgctgtgcttcgtggtggccgtctacttcatgaccgggcccatgggcttctactggcgaagcagtcccagcggccccagcaaccccagcaaccccagcgtggaggagaagctggagcacctggagaagcaggtcagactgctcaacatccgtctcaaccgggtgctcgagagcctggaccgctccaaggacaagtgaaggtcagccggccgggcgggtccacagttaccagcacgctgtctcagaaaacgaaaacggaggaaaaaaaccccaaaccccaaacaatcttaataaacacgactgagcaagaaagtggcgctgtgtaaggctatttccacccacccggcagctcttaggacacattcccagaagagcggaaagatcattgacgtggaactacacacgaagtgtaattagtgggggaaaaaatattttttaaacaaaggatataaccatatttagttgtacagtaagagaaatttatctgtgcatagagcataaagttaattttttcaagcatttaaatacatcttttgtaaggttttttaataaaggcagattgagtcaagtttattaaaactttacatggaggggaagaatatgctaatttgacatttgagaaaagtttaaatgcgagcgtttgttttcacagcttagggattggtgggtgaggtctgtgtgcgttattttcatgttcccaaactgtgagctttatttcatgttatttttggtggatgttgacttagttcatgaatgttgtcacttctaaatgtggacagttgggctgcaggatgcaactcaacctcttttggatcctagagacccctgccaagcccccatcagtccta

SEQ ID NO: 83937 - DNA, 620 bp, Homo sapiens
gcggccgctgtcctcaccacgcacgttccgccgccggatcgcctaggaaggagggaagcctgagcggggtccccgcgatgccacccagccccgccagcccccacctgccagtgtgaactgaggttcaggggctcatccggcagcagagtcaacgcctcgtgacggagactgcccagcccgacgcaaagccgagagtgctctctcgagaaaaacgctgcggccctggccccaggagtcagccccgttggacacacaccagccaaggatgccaccaggtctgtcgggtgctggacatcccacgcccaggacccaacccccgccacacaggctcactcctctggggaccctccccagccactggggggttgtcacatccacaagccttaaatgctgaaggccccccgggaccccagcgagaaggccaaggcgggaagcccagggagctcccccacctccccacttaccttaatccaggaatgttccaggctctgggcaatggtcattctccgcctggaagacccccgctctggttaggtacacctgcaccatctgtcccgtcctcccgtgaacaactgactcccgggacccccaaaagccctaaagtcgccccccatcctctg

SEQ ID NO: 83938 - DNA, 418 bp, Homo sapiens
ttctttgcctatcactttctatccgttgtctctctcctctgcgtctttctgggtttctctctctcattcccacagtctcccttcctctcacatcctgtctgtctgggtcttcctctctctctacgtgtctcttgctcagtctctatctctttttattgacccttctctgactctcgatctctcataggtgtctcttatctctgggtctctcaggctgtgcctctatgacctgtgcctcaccccttatttaatgtgtttctctccctgtctcttggtccctggggctctttctctcctgttgtctctcgctgtctctgtcttactcagtgtctgtttttctttcgagacttctccctctctttctgactctgggccccactcaatctggttctctcacgcacactctgtctctggggcc

SEQ ID NO: 83939 - DNA, 384 bp, Homo sapiens
cacctggagcagagaattgtatgcttttggttggcgggcgggtgtagatctgtcttctggtatgccacttgtctctgacagagatggaatgcctgaccgtaagccaccaggtgaccatgcaaccagaactgcctgttaatgttaaactagcaaaagtcataacatcagttggggccagcaacggtccctcataatatggaagtagtatattcaaggttgagcatgagaatgtacagaggttaccaaatgagctgcagagcacagatgcacatgacttccagaactgttggatcagccacaatgtcatttcacacctgtgacagtgtgagggggcccttatagccagttgacaggagtaaaaattgtgagcatggtgtataaatg

SEQ ID NO: 83940 - DNA, 397 bp, Homo sapiens
ccaggatctgggttgggggttggcgtttaggaagggggtcgagtactgagctggagtcaggcctgcagggaggggagtaactagggtttgggctcttgtcccaggacgggggctgggttagtggtggggctgaggcccagggaggagtcggggagaaagctcccagcccggtctagatcaaagccagggggctttacaataggagtccaatctgggaagggagctggagtccgaactagagctggggtccaggctgggaaccagggagcctgaaggccttaaaagcctgggatgtccagggaggggattaggtctcattctgtctccaacgcttcccctttctaggcactgtctacagcttgtactcccttggctgggcctccttccccaggaatag

SEQ ID NO: 83941 - DNA, 377 bp, Homo sapiens
gattccgggaagggagccgaaaaaccggttcccacatccaaggaaggcagcagccccccaaataacccactcccaaccggggggggtggggacaaaaaataccaatccaggattttttcaaggccctgtattgggaaggagcccattttaaatcctttaacaaggatccatgggagggcaggttgggggccaccacccggggtaattccacctccaatagcgattataaaagtggcggcagtaaaaaacctcgtatttgaattttggaagcgggcgggcggcccgccggaaggcaagcaaccgcccgtccccgccctttgcttttgggggccccttgaatgttttaagttgagggccccgcggggcccgaatcgttt

SEQ ID NO: 83942 - DNA, 383 bp, Homo sapiens
tcgaacggacccagggaaaactcacggattttggggggatgggaagggggattttttggtttccaggtcctggaaaactaaagctcgaggcctcacctgaacgggggcttccaggcgaggctggcctgaatgaaaatgaggagcaggaccctccccaaaagatggccttggacatcagcctgggccacatttacaagtttttggcgctgggggcccaggcccagccgggggcctacactgatgaaaacctcatgggactgattgagctgctgggccgcaccaccctggacgtggggctccgcctgctgcccaaagttgacctccagcagcttttctttttgttcctggaaaacatccgggaggggccagggaagctccaggag

SEQ ID NO: 83943 - DNA, 390 bp, Homo sapiens
aagggggctcagccctgtcacccctccagtggggaaggtggtggtccccaacggggggtagagggaggggctggaggcgcctcagaggctgcaccagggtggcagggtgagcccggtgctgggccaggcccgggctcagggggaacaggtctgtcacgataccaggggattgtggagagtagcgtggggaccggcccagcccagtaacggtcagcagagcccctgcccctctcccagggcctggaggctgtacctggccttgccttcggcggaaatcctgaggtctgagtcgctcttatgaagcaggcacttgtcggagacactctctatctgaacacagagccgggagcggcgggcagccccagggcgccatctaggaccagccttggc

SEQ ID NO: 83944 - DNA, 382 bp, Homo sapiens
  misc_feature (1)...(382): n = a,t,c or g
actctgctggggctaggggccttgttggtgcttgtggccctgctggaaaagatggncgcactggactatcccggtacggatgaaaaaagatggcattcgaggcccaaaaaaacaacaaggccctgctggcccccctggaccccctggccctcctggacctacaggggtaagcggtggtggttatgactttggttacgatggagacttctacagggctgaccagcctcgctaaaaaccttctctcacacccaaggactatgatgttgatgctactctgaaggctctcaacaaccagattgagacccttcttactcctgaaggctctagaaagaacccacctcgcacatgccgtgacttgagactcaccctcatgcattcaggc

SEQ ID NO: 83945 - DNA, 415 bp, Homo sapiens
actcactccctccctcctgcccatccagcacccagacgctcactcactccctccctcctgcccatccagcacccagacactcactcactccctccttcccatccagcacccagacactcactgtctccctctcagctcccccagctcaacccccagcacggctgcatccaccatgtccgtctgctccagcgacctgagctatggcagccgcgtctgccttcctggttcctgtgactcttgctccgactcctggcaggtggacgactgcccagagagctgctgtgagcccccctgctgcgccccggccccctgcctgagcctggtctgcaccccagtgagccgtgtatccagcccctgctgccgagtgacctgtgagcccagcccctgccaatcaggctgcaccagctcctgcacg

SEQ ID NO: 83946 - DNA, 1030 bp, Homo sapiens
accctggatctgaccggccctctactcctggggggtgtccccaacgtgccaaaagacttccgagggcgcaaccggcagttcgggggctgcatgcggaacctgtcagtcgacggcaaaaatgtggacatggccggattcatcgccaacaatggcacccgggaaggctgcgctgctcggaggaacttctgcgatgggaggcggcgtcagaatggaggcacctgtgtcaacaggtggaatatgtatctgtgtgagtgtccactccgattcggcgggaagaactgtgagcaaggtgagtggccggcgtcgtccatccccccggtcacggcggcctgggaggcattgctccttgatgtgcccgggaccaccgtgagggggcttcacatccaggtccggcagcctctggtggtatatgctgcatttactgtggactcacaccgccctctccaagagactgtcctccgcagagcccctgctcctgcttctggggtccccagtccctcaggtgtggggtgggacaggtaggctgggccggcagagcccagccccagcaccccagccacggtcatcatctctgtgccctggtacctggggctcatgttccggacccgggaaggaggacagcgttctgatggaggccaccagtggtgggcccaccagctttcgcctccaggtgactggggccccgtgccaccaaggcacctgctaggtgggtgcccgagggagggacccaatgctgtccgggttgcgggtgaccgacggggagtggcaccacctgctgatcgagctgaagaatgttaaggaggacagtgagatgaagcacctggtcaccatgaccttggactatgggatggaccaggtgagctggcacctgcacctcctctggggatagacccttcctccggcccagggaaaaacaggcgcctctgaagacaaggtctccgtgcgccgtggattccgaggctgcatgcaggtgcgtgggggttgtggggggcggggggaggcctgcccctcacaggcagctccgaggctg

SEQ ID NO: 83947 - DNA, 438 bp, Homo sapiens
aattactaaacaaagatcctgaactgacattaattcctagagatactaagcatcactattgtccacctggcaaattagggactcagagaggtcagacattcaatgaaattttgcctctggtgcatttcactataggcacagcagatccctgaacctactctgtagttattttcccaattccaaacagaatatttatattgtttctatgagtgatagagtgcaggctattatggtataaaaggccaaggggaagccactggaaattcctctacctatgaaaattataaaccgaaaggaatattgtactcctggagggattgcagaaaggatggcaccatcaaggacttgaaagatgcagggctggtggttcttagcatatctctattcaactcattattcaactgcggaagacaaatggattatggagactgatggtga

SEQ ID NO: 83948 - DNA, 811 bp, Homo sapiens
gtgaattcacctcatcctggcagaatgccctctgtgtgggaggggtcttgcaagctgactcagtgccacaggggccaccctggtcatggaaaatgggcaggcactcttccctgttggagcaaaatgggaagccacatttttatgataagctcattgttgaatcgtttgaggaagcaccccttcatgttatggttttcacttacatgggatatggaattggaaccctgtttggctatctcagagactttttaagaaactggggaatagaaaaatgcaacgcagctgtggaacgaaaagaacaaaaagattttgtgccactgtatcaagactttgaaaatttttatacaagaaacctttacatgcgaatcagagacaactggaaccggcccatctgcagtgccccagggcctctttttgatgtgatggagagggtatcggacgactataactggacgtttaggtttactggaagagtcatcaaagatgtcatcaacatgggctcctataacttccttggtcttgcagccaagtatgatgagtctatgagggaccataaaggatgttttagaggtgtatgggcacaagcgtggccagcaccaggcatgaaatgggtgaattcacctcatcctggcagaatgccctctgtgtgggaggggtcttgcaagctgactcagtgccacaggggccaccctggtcatggaaaatgggcaggcactcttccctgttggaggtgaggcagcctgctcccaacccaaccacctgccacagctgtttgcccttcaggcttctcaagcctgattctgacagtagg

SEQ ID NO: 83949 - DNA, 380 bp, Homo sapiens
ttgtttctccttcaccagccatggaaggctttattgattgtgcatggccatgggggggtccctattcccggggccttctttgaggtatctacggtggaaactgtgacagaggggaaattcattgttgtggcgtactgattgtgtggtggatcatgttatggacaaccccgaggccattacgccacagtttagcgggaggggccatccacattcttttggttgtgagtaatgacgtggactgtggacatgatttcttccacgagacctttgtttgcatggatgaccttggccaggggtgctaaccagttggtggtgcaggagctagagggccagccccctgtctatatgatccttgcttacagacgcgtgcatgcgatgtg

SEQ ID NO: 83950 - DNA, 382 bp, Homo sapiens
tgatggagctgttctgtggatgatggagctgttctatgggtgatggagctgttcggtgggtgatggagctgttctgtgggtgatcgagcttttctgagggtgatggatctgttctgagggtgatggtgctgttctgtgggggatgagccgttctgtcagtgatggagctgttctgtggatgatggagctgttctatgggtgaggtcgctgctccatggatgatggagcttgtccatgggtgatggagctgttctgtgggtgatggagctgtattgtgggtgatggagctggtctgcggctgatggagctgttctgtgtgccctggagttcttccttaggcttactggggagatgttcacgtgcgtttattcatgtgtgaaaa

SEQ ID NO: 83951 - DNA, 447 bp, Homo sapiens
  misc_feature (1)...(447): n = a,t,c or g
gctctacccccagctgtttgtggtgcttctgctgcgcgtcagctgcaccgtgggtgtccagctgccccggaacctgcaggcccaggaaaggaggggtgccagtccagccctagccaccaggaacctggaaccctgcagctctgcagtggacaccctgcggtccatgctactccgcagcggcagcgaggatgtggtacagcgcatggacctggagggaggctgggaactgctcatgacctcggcggggcatgaggagggggccaccaggttggccaggtgagcgggcccagcccactgcagctccagcactggctgggctccaccggatctcgagcccagaacatgacaggatcaggcggnggcccatgcgtgtcaggccaatggtgccctgggctcctgcctggtcactctcttgggcaggggtagggaggcacccctgcagaggcc

SEQ ID NO: 83952 - DNA, 454 bp, Homo sapiens
  misc_feature (1)...(454): n = a,t,c or g
tctggtttcttccgttccgttctagctgcctgaagacccagcccgacagcgatgcctgtcagcccgcgtcgcccaccagggcagctgctctcccaactcgcatggggggcaccaccccgcctcggtgccctagagctgagcgcagccgcggctccacggggatcgccagggcctcagccctcgcggccggcggcgcgggagtgttgcggggcagggaccagagcgcgatcagagcggccacccccgatttaggtcgccagctttccagtcactgcgatggccactggggcgccccttccatcctgggtaaattctcattgtgatccccagccctcttctcgngtccccacacccaggaggcccgttctccgccgctcaggctgggagaggtcaccgctccgggcagggtggacccccagctccgtctccgaggaccttttcgccgaggcgagca

SEQ ID NO: 83953 - DNA, 456 bp, Homo sapiens
gggatccaggcaggccggcgattcccctccaacacaccccctgaagctaccgagacgctctgcacctgccgcgcctccagagcctgtcgtccccaggcctcagccctgaggctgcggtgacacctactgggcacctcgggccttgcacgcctcgcaggccggccgcaggcagtcggctctgctgccactcctccctcccggccgctggctggccctcctgccttggaggcacagagggaccgggcgctgaaaggtgtattcctgtctgtggagggatggatacccggagctgaagacagcacatgagagaggggacctccacctaccagtgaaggcgccgacagggcgctggcctccatgcctcctccagatatgcgataccgccgtgcggtccagatacccggaggcggctgtatgctagggagggagcacttatcggccctctgttgctaacgg

SEQ ID NO: 83954 - DNA, 420 bp, Homo sapiens
caaaaaaaaagctcattcccagctacggatttcaggcctctacccttctgcatactggtttggccaagcactggtggatgtttccctgtactttttgatcctcctgctaatgcaaataatggattatatttttagcccagaggagattatatttataattcaaaacctgttaattcaaatcctgtgtagtattggctatggctcatctcttgttttcttgacatatgtgatttcattcatttttcgcaatgggagaaaaaatagtggcatttggtcatttttcttcttaattgtctaacttctcccctgagtagagacttctgcttctagcaattcacttgcaatttcacctgaatatttaaagaagaccttagtgatcacataccggaaatgtaattgtcacctcaatcttattcttca

SEQ ID NO: 83955 - DNA, 433 bp, Homo sapiens
  misc_feature (1)...(433): n = a,t,c or g
ctgtaatgaaaataaagaatgccttcaatgggctcataagtattctgtgtagatatctcaatagaaacgtccaaaactgaaaaacagataaaatattgagggaaaaaaaaggaacagattatccaagaactgtaggacaactacaaatgatgtaatatacgcataacagaaatactaaaaaagaaggaagaacagaagcagtctttgaggaaataatgacggagaatttccccaaattaatgtcataaaccaaaccacagatggaggaaacacagagaacaccaagcaaggtaagtgccctctcgcccctcacaaaaacccctacaattaggtatattatattccaatttcagaaaatcaaatacaaagaaaaaagaagtcaaggaaaaaaaccttacctatataaggaacaggctgggaattacagtagtcn

SEQ ID NO: 83956 - DNA, 629 bp, Homo sapiens
  misc_feature (1)...(629): n = a,t,c or g
atcaaaaagataataagggaatactgtaaacaactgtacacacttaaatttgtcaatttagatggaatataccaattccttgaaaaactcaaactattgccataaataaaatcaatataaaatagatcatttaaatatttctataactattgagaacttgaattcaaatgtagaaattcttcaaaaagaaatctctagacccaggtattttcactagagacttctgctagaggtttaagaaatcattaacatcaattctatacaatctcttctggaaaagagaagaggaaacacttcccaattctttacctcaaactagtattaccttgatactaaaaccaacaaagtaccaacagtatcaaaacaaagtaaacttcagacttgatatcccttgcgaatataaacacaaaattcccaaacaaaattgcaaaaatagatttcaataatatattaattatataccatgaccaaatgnggttttcttccngggatgcaaggctgtttcaatattcaaatacatcatattacatgttaagnggcnaaataaggaaaatcacataatcatataaattggtacagaaaaaaaaatttgaaagaattcaatacccattcatggtaagaactctcag

SEQ ID NO: 83957 - DNA, 466 bp, Homo sapiens
acgcacaaggaaaattccgtacctaggttgcttcaagggtaaactcttattaaacagttaagaataaataccaatcatacacaaaatcttttttaataagtaaaaaaagcaaatactttccaacctgttctatgatgccacaataccaacatcagataagcagtataagaaaatggcagaccaatctctctcaccaacatagatgccaaaaatcctaatttcaactttggcctttaaagtcaaacaatatttaaaaaaagataacaatcataaccaagtgcagctcccagtaatgtcaggctgatttaacattcaaaagtcaatgtaattcataatgatagatgcaggaggcagataagggtacctgcacagggtctagcctaaacatgcccatggggagaaaattccatccttaacacatttgcaggaagggaagtacatcaacatggagtggctagactaaggg

SEQ ID NO: 83958 - DNA, 466 bp, Homo sapiens
tggtttgaggaggggatcggaatgtggctcaagttcgggaggcgttacctgtggagggtttgaggcaggcccagcagcgaggccacggtctgccgacgcggagccaggggcgggccccaggatccggagcttagggcggggccgagtccgggtttggggaccgttaggcggtgccggttagggcgtgggtccctgggatcgtccgggcaggccttgggcccacgtacgcactctcacagatccttcgccttctggaaggtctttttggcaagggccctacgggtgcgcgcttttgacctggaggacttatccaagcctcctctccattaacgccacccgtctggtgtccgaaaggagggagctttccctctgtcccccaagctttgggactgcaccaaaccaaccattctgtcaccaattacttattaaccgcctaccacgagacaaggaaaaccaatgtgaacag

SEQ ID NO: 83959 - DNA, 427 bp, Homo sapiens
  misc_feature (1)...(427): n = a,t,c or g
ntcctcaatgaagagtaccataactgaatgcaaaaactcattaaaaggttttgacagcaaacttgatgaaacagaggaaagaattattgagcttgagggtagaagctatgaagttatctaaacagaggagcaaaaagaaaagaataaagaatgaagaggtcctacaagaattacgaaacatcaataagggaagcaacctctgataattggaatttttaaaggagatgagagtgaaaaaggcctagaaggtatatttgaggaaataatggctgaaaatttccaagatctgagggaagatgacaacatctaggtaaaggaagctcaaagattaccattcaaattcaacctagagagggaattccccaaggccccccnnnntanattnatttttataacatttataattcaaagagagggcggcgcttca

SEQ ID NO: 83960 - DNA, 410 bp, Homo sapiens
aaatttggtaaaatttcagaatatgaaatcaacatacaaaaatcaataacatttctttattgatacatagaaatgacgagggatttcaattcacaatagctaccgaacaacacttatgaaatcatttaaccaatggagcacaagctcactacaataatatccacaaaagattgacgatagatattggagaggacacaaacgcatgacgatacagcgcctgctcatagatcagaagaattaatatcattataacgaccatactaccgaatgcaatgtacatatatatagaaagaagtctctacatagcttcagtgttagtcttcacaagaatagaaataccatagtgttcatggcgaccccgtcaagagtcagaatagccacagctatcctaataaaaaatgatcttgagg

SEQ ID NO: 83961 - DNA, 429 bp, Homo sapiens
  misc_feature (1)...(429): n = a,t,c or g
cagcccggctgcagagcctgtgctctgatgatggtgggacggccgcacccggaggccctgggatgtgggtagtgagcagggcggagcctggcccacggtgccctggcagccagtggcactgtccctgggtttggagcccatggggagagagggcgaaagagtgtcatgatgtgggggagcgtcgttctcagtgggactgggacaggtggcactcccgggatgcacaggggtggggcagatgggcctgggagcctctggcatcagggccaggggtggcccagagggggaggctgtggcagggacaggtgtctctggcaagtagcagggcaggcaggagagactgcaagggaggtggagggaggagcggggcctctggcagcgtccatggatggggcagttctacagaggagatggcagcccncatcaggg

SEQ ID NO: 83962 - DNA, 419 bp, Homo sapiens
  misc_feature (1)...(419): n = a,t,c or g
cacaaagactttggaaaggcatgaactctcacatcatactagcctttgccagtgagagtcagtcaaaagtgtactttggcgttttatttatacatcatggtaggggttatttattcagtgtccttttggataatccaaattaagtagttctcttttgaacttgagggaaaagaattgtttacttactgataataatagaatggcatttaattctgttaattgggaactgtggtttactagtatttgaaaaaatcaaagacaattcactgtttttacagataagcagcaaagatgaagattttttagacctttctgttgacgtggaacaaaatacatcaattactcactgcttaaggggtttcagcaacacagaaactctgtgcagtgaatacaagtattactgtgaagagtgtcgcacn

SEQ ID NO: 83963 - DNA, 460 bp, Homo sapiens
  misc_feature (1)...(460): n = a,t,c or g
tgaaaccagtgcttaaaggagaatttatggctttggatatatatgttaaaaaaagaagaaatatctaaataacctaaattttcaccttaggaaactagaaagggaagaccaaattaaatccaaagtaagcggaaaaaaagaaataatacaaatttagaacagaaatcaataaaatttaaaacaagaaatcagtagagaaaatcaataaaaccaaaagctgtttctttgataaaatcaataagccgtagccaggctaagtaagaaaaacagagaggacaaaaattactaatatcagaagtaaaagaatgacatcagtatagatcccatgagcattaaaggataaaaaagaaatactatgaacaactgtatgcctacaaatttaataaccttggtaaatggaccaattctttgaaagacacaatctgccaaaactcacacaagaaggcatagatactctgan

SEQ ID NO: 83964 - DNA, 450 bp, Homo sapiens
tctggactggctggaccccaccgatgctcctgccgtcaccccgtcctggccctcactggaggcagggacactcaggggcccggggcctcggggccagtgctgcagtggccgccgttgctctcacagcgggtccaggcctggcttctgaaggcaatgtgcctgcgtctcacactcaaaagggcctgccaggctgcacctggcggcagctcccacgggggacgatgtcctgctgtctgttggcccccaggtgggagggacgggcgtggagctgcaggcagtgggcaaggccatggcaggtggccaggcctgggaaccagcctccaggtggcatccacgctgaggcctgagctccggccgacaaggactggggatgcaggggattagccaggggctgtgtgggggagccctggagccctgtctgcgagttaccccgatgaacagggagacgcg

SEQ ID NO: 83965 - DNA, 428 bp, Homo sapiens
aaatagttttgcttcttcgtttccaatttggatgcctttgatttatttttcttgcgtaatttcctgactagagcctccagtacaatgttgaataaaaatggcaggagtagacatccctgatttgttcttggtcttatggggacagtgttcagtctttcatcgtcatgtatgatgttagttgttttttgtagattcctttatcagattgaagaagttcccttctcttcctgaattgctgagtgtttttattctgaaagggagttggattctgttagatgccttttctatatcatttgagattatcatgaggtttttgtcctttattctgtcaatgcggggtattacataaatttattttgtggggttaaaaccaactttgtatttctgggctaaatcccacttggtcatggcgtcttgtctttttattg

SEQ ID NO: 83966 - DNA, 438 bp, Homo sapiens
agagaccccactacaataatagctgtggacttcgacacaccattttcagcactggacatatcacccagataagaaatcagcagatcagcatggaacctaatttatagatcaagtgaatctaatagacatttacagaatattttatccaacaaatgcagaatgcacattcttctcctaagcacatggaacattctcaatgatagaccatatataagtccactaaagatgtcttaatttaaaaaaaaacactgaaattatatgaagtagtcttttctgactacagtggaataaaactagagagttgtaaccatgagaaactttggatactctacacacacttgaaagttcaacattattctcctgaatgaccactgagtcattggagaagctaagaaggaagttctttctattctagaaacgtatgaccatggacacgcg

SEQ ID NO: 83967 - DNA, 432 bp, Homo sapiens
aaatcaagagttggtcctttgatacatcaataaaatttagaaatctgtagctagactaatgaaaaagaaaaagacaaattatcagtaacaggaatgggagaggagatagcattgaagacataataaggataataaaggaatattatgagcaagtttatgctaaaaaattgggtaactgagatgaaagcagaatttgcggaaagcccaaattaccaacaacgcacaaacacacacacatgcatgcacacatgcacaatctgaataggtctatagcgagcaaagaaagtccgttcataatttaaaacttagctacaaagaatactgcagactcagacgactgactacataatagtgatgaaactatcaaatctttaacaataccaatgttaaattctttcagaaaataagggaggaaggaacacatcccatttc

SEQ ID NO: 83968 - DNA, 430 bp, Homo sapiens
  misc_feature (1)...(430): n = a,t,c or g
aagaaactcaaagtaggagaagaaagaaaatagtgagcatcaaaacagaagtcaataaattagaaaagcagaaagcattagagaaaagcaatgaaccccagagctgattctttgaaacaatcaataaaattaataaaccttgagtcagattggtcagcgaacaaaggatagaaaatacaaatcaccaatatcagaaatgagagaaatgacatcactacggagtcttcaggtgtttaaattataagaagaagatattttgaaaaaaagcaatanatttaaaaacttagaataaatggacaaattcctttaaagatacaatctaccaagaatcactcaagaaataatagataagctaatagccttatatttataaattaaatatgtagtaaaacctttccacagggaaaactcagggccaggggcttactgg

SEQ ID NO: 83969 - DNA, 325 bp, Homo sapiens
ccccaaagaaaatttttagttttaaattttcttatttaaagaatctttttttttcccccaagtttaaaagcccctccccataggcaaaaaccaaccccattccccccaaccaaaaaacccctagttttttctatccccccaatttttccccaaaaatttttaaaaaaaaaccctttttccccttgggaagttttcctatttaaaatatataccaaaaggggtgccttttttggcccccaagtttaaaaaggaaaaaaaaaatatcattaagggacccccccccttaacccaaaattccccccaaggggttcccccaaaaaaaaaa

SEQ ID NO: 83970 - DNA, 845 bp, Homo sapiens
atacctcatgagtgaatagcggagtattccagaggctacatggtgtcatcactctgatagccaaggccatatttgcttgtgtgctcttgcattttagaaattttctcggattttaccaaagtttattcaagaagaagtagataatttggatagccttgggtctattatagttaaatatgttcccaccatgaaaactttaggcacagatgacctccctggtaaattccaccaatcatttaaggaagaaatagtatagaaaatctttgggaaaattgaaaaaggggaaatgatttctaacttgttctgtgaggacagcactacttgatgacaaaaatcaggcaaagatattacaagaaaagaaaactccagatgcatctgtctcataaacacaggtgcaatatttgaaataaaattttaacaaactcaaaagaatgatacataaaaaggatgatacattatgaataagtggagtttatcccagggatgtaagggaggctgaatattcaaaaatcaacaatataactaatcatattaacaaactaagaaagaaaaaaaatgggattatctcaatagacatagaaaaaacatttgacaaaattgagcatatattcctgattaaaaaaactcttacgaatctaggaatggaaagggaacttccctcaccctgatagaaaggactctttatggaaaatccctttagcttagaatcataccttgggggtggaaaaagacccaaataccttttttcttctaaaattaacaaaggccaaagatggttcctttccccctttctatttcacaaccggggggggcccgggcccaaacttttacacgaagaaaaaacg

SEQ ID NO: 83971 - DNA, 440 bp, Homo sapiens
tcttgggtcgacccacgcgtccggcaaaaaacaccatagcagatggtttcactgttgaattattctaaacatatgaggaatacatgatagaaatctcttccagaaatagaagcagaaggactacttcgtaactattttgtaaagccagcattaagctaataccaacaccagataaagatctaacaaaaaaggaaaattgcaaaccactatctctcatgaacaaagatggaaaaaaaatcaacaacatattagcaaattgaacccaacaatatataagaattaaacatcaaaaccaagtgaaatttattctaggtatgcaaggttggctcaacactcaaaagtcaactaatataacctatcatatcaataggctaaagaaaaaccaaatgatcatatgaacagatacagtaaaagcatactcattcataataaaaaaaaag

SEQ ID NO: 83972 - DNA, 507 bp, Homo sapiens
agtgaagtttacagcaataaatgcctacatcaaaaaggaataaaggtcctgaataaacaacttaaaataacatctcagggaactaggaaaacaagaataaaataagtccaaagttagcagaagaatggaaataataaagataatagcagaaataaatgcagtagaggaaaaagaaacagtggaaaagatcaacaaaccttgagttggttttttgaaaagataaaatcaacaaacctttagctggactacttaggaaaaaaagagaatactcaaataaatagaatcagaaatgaaagaggagacattacaactgatacaagagaaatacaaaggatcgtaagagactactatgaataattattacataccaataaattggatagcctggaagaaatgaacaaattcctagaaatattcaagctatcgaactgaatcccaaagaaatataaaatctgaacagatcaataactagtagggagattaaattagttataaaaagtcttccat

SEQ ID NO: 83973 - DNA, 462 bp, Homo sapiens
  misc_feature (1)...(462): n = a,t,c or g
aaggatgatcgtcgtanagncacnaannttggggnganacgcgcgttcgcccacgcgttctgtcgtgagaagtattattatggcggcattttttaaaaggaagtaagatggcggtggtgaggaggcaggtagtaagatggcagtggtgcagaaggagatggcggtggagagactaagatgggggccgcggacaagattaatggcaagagaggctggtcagacttcaaggggaaggctagccagagggacttgcgccagcgaaaacacttggcggcagtggtctgacgagagcggaggtcccagaacctttgaacaaatttgatttttgactatttgcctcgcctctgacaaaaattggtaaggtcgtttaggatattgaagttgagtgtgccttcggggggccagcgagattggttgtctaagttatattgcggccaggcaactgtgcagaagaaattattt

SEQ ID NO: 83974 - DNA, 1216 bp, Homo sapiens
ctcgcctttgtgccatccgggtctctcgcgcgagcgatttagtctgaggcgaagcttcggagcggccggtactgttgaaagcgacaagtggaggcgccgctctagcggccgggactctgaactatggcggctagtgatacagagcgagatggactagccccagaaaagacatcaccagatagagataagaaaaaagagcagtcagaagtatctgtttctcctagagcttcaaaacatcattattcaagatcacgatcaaggtcaagagaaagaaaacgaaagtcagataatgaaggaagaaaacacaggagccggagcagaagcaaagagggaagaagacatgaatccaaagataaatcctctaagaaacataagtctgaggaacataatgacaaagaacattcttctgataaaggaagagagcgactaaattcatctgaaaatggtgaggacaggcacaaacgcaaagaaagaaagtcatcaagaggcagaagtcactcaagatctaggtctcgtgaaagacgccatcgtagtagaagcagggagcggaagaagtctcgatccaggagtagggagcggaagaaatcgagatccagaagcagagagaggaagaaatcgagatccagaagcagggaaagaaaacggcggatcaggtctcgttcccgctcaagatcaagacacaggcataggactagaagcaggagtaggacaaggagtaggagtcgagatagaaagaagagaattgaaaagccgagaagatttagcagaagtttaagccggactccaagtccacctcccttcagaggcagaaacacagcaatggatgcacaggaagctttagctagaaggttggaaagggcaaagaaattacaagaacagcgagaaaaggaaatggttgaaaaacaaaaacaacaagaaatagctgcagcagctgcagctactggaggttctgttctcaatgttgctgccctgttggcatcaggaacacaagtaacacctcagatagccatggcagctcagatggcagccctgcaagctaaagctttggcagagacaggaatagctgttcctagctactataacccagccgctgttaatccaatgaaatttgctgaacaagagaaaaaaaggaaaatgctttggcagggcaagaaagaaggggacaaatcccaatctgctggaaatatggggaaaaattgaattttgggaaacaagg

SEQ ID NO: 83975 - DNA, 483 bp, Homo sapiens
  misc_feature (1)...(483): n = a,t,c or g
nnccccgggtcgacccacgcgtccgaaaaatccatttacaataagaccagaaagaatatagtacttatgaatacactgaatcaaggacatgaaatacttttaaaataaaaactctaaaatactgccagaaagtaaagcagacaaaactaaatggaaagacatcttatattcttggattggaaaaactaatgttaaaatatccatttcacctaaagcaatgtacagattcaatgaaatccttatcaaaattccaaatacatttttacagaaatagaaaatgtaatcctaaaatatgtatgaatccacaaaatacccaaataacaaaaacaattttaaataagaataaagctagaaacattatacttcctgatttcaaaataattacaaagcaataatcagagtagtatgctactggcataaaaacaaacatgtagagcattggaacaatagagagcttatatcctacagccatgtcatgtacag

SEQ ID NO: 83976 - DNA, 452 bp, Homo sapiens
cggctgattgcgcctgagagcacccatgccggagtcacaactttgcctaaccatgtatccatctaagaatctccctatcgggagtctccatattggcatcatagtgaccattgagcccgaccctgggctccgggccagcctgtagcgctcctacctcaccgacccaaactcagagcctgagtgcttacatagctgtgctaaggcggtgatgtggcaaactatgtgattaggcctgcggctcttcacgccgttgttcaagagagaagaaacttcggccccctagggtggaatattccctatgaattcaacgaatctgacctgaggattagtatgtggcagatccagatgtttctcaatgactacaaggaggtgccctttgatgctctgacctacctgacaggggaatgtaattacggaggcagagtgactgatgacaaagaccggcgtctcct

SEQ ID NO: 83977 - DNA, 987 bp, Homo sapiens
gcgtccgcaccacaaaatggcagtcgctcggtcgcggagaagcacctgctaaatgccgtgactccctccccctgccctgccccgctagcgccaacgtcgttctccccgcccaggcgccccggtcttcccatgccgccccgcccagggaatcaagggtcagtgagcccgccaacaacgcggcgcctttgtgcgggcgcacgccacctttactcagccacacgggcccctctccgggggggctttttcttaaaagggcaaaccgctggaaaaaaaggaacaccggccgccccgggaacgcccctcaggcccggggttactacccggtttccccaactcgcaagcgtttagcgtcaggccaccaaagtgaagatggggtgggtgaaaggaccacagagcccgataggagagaaaacctaggaaaaattagtgaaagacgcccccaaccaatgctttggcggccacgctgagtcctaacgtactgagcccactcgacggggcccgtgcgcacaggcggctccaaagggcgggtttcggctttccttccacctcgcaaaagtccagtgagcgctctaggtttctcatggctaccccctgccctctccccgtgctggggagtctcgggggctgagcagtggcagagggaggagcggctgccgcggtccctgtgctttttctctggcgtgagggtctcagtggccttgggctctgcttgggccgtggctcgaaggttggaggtgtcgcggtgcgcttgggttttttcgctttctttcaaacgcttgcttcctggcgctccccaccccccagcgtccctttggctccatctttccagaaacttctctgagaaactcagcaaaaagcatccaatttcgccactgcttccccctccgcgcatgcgcgagacgccaagcggaaagcctttggcgcgccggagtgtgagaaaagaacgtgagcgcgcgcgcgctcgccgtgcgggggcggttctctcgc

SEQ ID NO: 83978 - DNA, 459 bp, Homo sapiens
gacccacgcgtccggaaaaaaataaaaacgcaatcattctaacacacatttgtttaacacaccacttaacaatagcagaatgtatattcttctcaagtgttcatggaacatattctaggttagacaacatgctacctgtaaatcaagcctcaacacatttaaaaggattgaaatcatatgaagggtctttttaaaacacaatgagatgaaattaataacataaagaaattgtggaatatcacaaatatgtggaaattaaactatacactccgaaatcaaaagggaaattagaaaaggttttgagataaatgaaagcaaaaatacaacattactaaaacatatagtaacacagctaaagcagggtttagagggaattttaaagctgtaaacatcaatatttaaaaagaaaaatggttcccaaataaaaaacctgacctgccaccttaagacactgaaaaa

SEQ ID NO: 83979 - DNA, 460 bp, Homo sapiens
acccacgcgtccggaagtgaacttcctcaccctgataaagagaatctataattactacacagctaacatcatacttaatggtgaaaaactgaaagtgtgccctctaagatcaggaacaagacaaggatgagttatcttactgtttctatttaactttgtactggaggttctaagcaggacagttaggtaagaaaaagaaaagcatccagattggaaagccagaagaaaaacgttctctatttgtagatgacatcttgtatgtaaaaaaatcttaaggaatccactaaaaaattcttagaactaattaatgaattcagcaaggttgaaagatacaagatcaatataaagatcaattgtatttatatatactaccaaggaacaatctggaaattgagaaaataaaactgagaaattaagaaaacaatgacgttggcagtagcattatacagaatacgcagga

SEQ ID NO: 83980 - DNA, 453 bp, Homo sapiens
  misc_feature (1)...(453): n = a,t,c or g
taccggcgncgcaattcttggggcgaaccacgcgtgcgctccatctgagaaaagtaataaatatttaaatacataaaataattattcacaaggaagatctgaataaatggaaatatatactatgttcagggatggaaagactcagtactgtaatgataccagttgtcccccagataatctacaaatttaatgcatagcaagctgatcctaaaattcacatggtaagaatgaggagcaaaaataacaattttgaggaagaacaagttgaggggacttgttcttgtccccttaagtacttgttaggtaaagtacctgttagataaagtcttgccacatattaagacttactatgaagccagagtaaacaagagtgtagtactggtgcaggtaacaattatgtagcagaacagaataaagagccctgaaaaaaatatatacatagatacttctcct

SEQ ID NO: 83981 - DNA, 486 bp, Homo sapiens
ttgcagagttccggaatcgactccacgcacccacgcgtgcggacacacaatatgaatgtcagaaatgagagagaggtattttactaatttcacagatattatgaggataataaggaaattttttgaacaactttatgccaatacattttacatgaaatttacttacgtgaaatggacagattatttaaaaggcacatactaccaaagctcactcaagaagaaacaggtgacctgaacagcagtgtatctatcaaataaattaagtttatatttaaaaacttccaacaaagaaaactattgatccagagggcttcactggtacattctacaaaacattcaaagaagaaacaatgccaattctgtacacactcttacagaaaattgaaaaggaggggatatttttggctcaatttatgggatctgaattacctgatatgagaaagagaagggaattagaaggggagaaaactatagaccaagatgctt

SEQ ID NO: 83982 - DNA, 452 bp, Homo sapiens
accacgcgtcgatctggagccgctaccctatggtaaaccagtttagacaatacaagaaaggacaactatagaccaatatctctcatgaacatagacgcagaaattcccaacaaaatattagtaagccaaatccaaccatatataaaagaaattataggccatgattaaataagatttattctagttacacaaggctggctcatcctttgaaaatcaattaatgtaatccatcatatcaacaggctaaagaagaaaaatcacctatcaatagatgaagataaagcatttgacaaaatctaacatttgtgataaaaactctgagcaaactaggaagagagaatgttctcaacttgttaaagaatgtctacaaaaaaccctacagctgatattatgctttattgtgaaaaactggatgcatcttccctaagattaggaggaaagcaaggatatct

SEQ ID NO: 83983 - DNA, 428 bp, Homo sapiens
  misc_feature (1)...(428): n = a,t,c or g
cccacgcgtccggacagatccacctgcctccaggacagctcctcctgaagacgtgagagcaaagcccaactctaggtcacccccaggctctgtcccaggaccaccatccacccacctgttcaggccagaaacccagaaggcatgttgatccctccactatcctcaccctctatttcaatcagtcactatggcctctcgatcccccctgcaaggtacgtctcaaaccaatctactccaaacccacatcctaacagtcgtcaagctaatctgagccccttcatctttctccaggaccactacaatggacccttgcattcttgccccgacaacccacttcccacccagcagcaagagtgagcttgtaaaaacacacatccaagagaaccactcctctaccaaaaccctctagtggcctccagctgcacctn

SEQ ID NO: 83984 - DNA, 443 bp, Homo sapiens
  misc_feature (1)...(443): n = a,t,c or g
gaccacgcctccgctacagatgtaatgaaattcctaatcaaaatcccaacaagtgtttttttatagacttttgtaagtttattgtaaaatttatatgaaaaaagcgcaggcccaagaatagctaaaacaatctggatgaagaagaagaaagtgggagaaatcactctatttgattcattaattcaatttcattacaactattatcaagttggggagaaatggcatctttactatactgaatcttccaattcataagtacagtatgtctctccatttatttagttcttctttgatttctttcatcagcattttgtaattttcaacatacaaattctattcatgttttattaagtgtatattctaggcatttcattttatttggagcaattaattataaatgacattgtgttttaaattttgctttccatatgttcatcgntaat

SEQ ID NO: 83985 - DNA, 441 bp, Homo sapiens
cgggtccaaccacgcgtccgcctaaatttatgtgcgtctaacaaaagaggtacagaatatatgaaataaaaagtttctgacattaaaggagaaatagacaaatctacaactataggtggagacttcaaagtacctttttcagtaatcaatagaccagttagaacacctcagccaaaaatagcagaatataaattatttttgagctctcacagaactttgctgagatacattataacctgggccataaaacaaacctcaaccaattaatacagttgaaaccagagtgtgctctctgaccacagtagaatcaaactattaattagtaatataataatgaaaatctccacactcttaaaaaaaaacaacatgcttttaaattatccatgattagggaagaagtctcaagagggaaagaaacatagaactgagtgtaaaggaaaa

SEQ ID NO: 83986 - DNA, 434 bp, Homo sapiens
atccatttcaagttcatttttgtgtacagtacaaagtatggctccaagtttattttttttggtatatggatatccaattgttatagcatcatttgttgaaaagattaacatgtctccagggaattgaccgttgcagaaaatcagttgtcaattatgtgtggatctatttctggattttctattctgttctactgatttatgtgctgatctttacattaatgcgacactgtcttgtttactatagctttttaataagccttgaaatcagtagcattaattctccaactttgttctttgcatagtagtttttgctattctagatcttttacaatttcttatgtatcagctggtcaatcctaaaatcatgctagggatttttattgggattgtactgaatctacagaccaatttgaagagaattgttatcttaataa

SEQ ID NO: 83987 - DNA, 428 bp, Homo sapiens
aataagtccttacttatcaataattacaatgaatgtaaattgttaacccaaatcaaaagacacagagtggctaaatggcctttttaaaggactcaaatgtatgctacctataagagactcaattcacctggaagaacacccatggatgaaggaatggaaaaagatattccatgcaaatggaagctaaaagaaagcaggagtatcagataaaatagaccttaggtcaaaatctgtagaaacaggcaaagaatgttactgtaaaataataagggggtaaatttagcaaccggatctaacaattgtaaatatatatgcactcaacattagagtatctaaatatataaaccaaatattcatagatctaaaggaaaagactacagtaaaataagcataggagatttcaatgctcttcttccatcaatgacaga

SEQ ID NO: 83988 - DNA, 521 bp, Homo sapiens
  misc_feature (1)...(521): n = a,t,c or g
gcgcagaaatactagaanaaaagattaaaaaggaaatagaagacttgagaaacaccataaactgacttgaactaacaaatatacagagcgttctacccaaaaaacaacagaagatacattttcaagtatacatggaatagtctccaggatagaccaaatgttagactaaaaaacatgtttcagtacatttaagtagattgacatctcatgaagtatcttttccaactatagcagaattagaaatcagtaacagaaggaaatctggataattcacagataagtggaaattaacagtcacataatcagtgggtcaaaaaggaaagcacaaaggaaatgaaaaaatattttgagaaatggaaacaaaaatacaacataccaaaacttatgacatacagtgaaggcatggctcanattgtagctataaatgcctacattaaaaagatctcaaccctccacctgaaggaactagaanaagaaaacctanaagccagatgaagaaagagaattaatattagaacaag

SEQ ID NO: 83989 - DNA, 536 bp, Homo sapiens
  misc_feature (1)...(536): n = a,t,c or g
acgcgttcgcaattcccgggttgannaatgcgtccgatttaatcaggggcaataacaaaatgtgtacaacaaaattgtttgtcatcacaagagccactcaggtttctttttaactactgagacactagacagaatgtatatatcataccctaaaaattatcgcgtgagaaacccaacagtactccttaaagtggatattcctaaagtatatgttatcaaaattacatggcttatatgtcccatgctattagctatacctttttacagaagtaaaaacaatttaaaactgagcattgatctaatgaaagtaatagtaaatacacagtacaatccacccccaaaagaataggattttttttgcctgatttctagttttaagagggagaaaattaaaataccagccaggactgagacttgcagctcattaaagctgaggtgatttccctatataaaatctattgatctcatagccccactaaacaaaagtgtgtcaggaaggggtgatgatgccttgccatacactgaccaaactgttt

SEQ ID NO: 83990 - DNA, 495 bp, Homo sapiens
actggcccaccacattgattacattgcgctggccgggtgctaaccaagaagcagctaacacactgggagtcttggtaagatgcctgagtgcctgcagctggcagacaaatcctacaaagattctgggaactgccactaataacactcttggtggggaggtcccatatcccataaccaggagcatattgggcctcccgtccacagcaaagagccaattactgcatcttgcatctcccatgaccaagagagacagacaatgccagtacgccttctggaggcagcacgttccacacacatgaagactactccagcctatgtaccattgataggagaagctgtcggccttccctgagcctgcagcaggtcgaggctgcagtgctggcagccctgtgactcaggccctgcagctggtcggaccctgtgttatgagaggtatcagacgtgggaaagcaatgctgtgtgtttatggcaagccactatgccagaatcacagtg

SEQ ID NO: 83991 - DNA, 441 bp, Homo sapiens
  misc_feature (1)...(441): n = a,t,c or g
aatcttggcggaattcccccgatattcgcccttaactttttaatttaatttcttattttttagggatgnnnnntttttgccctttccccaaattcttgagttgagtacttagcttattaattttaacttttcttgttttctttgaactgtttttaaagctacatatgtacctctaaatacttctttagctctattctacagatttttatgtccagtgtttttattattattcacttttaaatgttttcttttctttgtgatttcttttgtaactaggttatttattaaggctatttaattctgtattttgctattttttgttaatgtttaattttattgtcagagtataggatgtctgtatatttaattctttatagtttatggatagttccattatagcttattatattgtctatatttttaaatattacacatatgctt

SEQ ID NO: 83992 - DNA, 510 bp, Homo sapiens
ttggcccggctgactcggggtaggggaggtcggggagggggcgataaaatggcgcagggggcggagtgaggcgcagtcgttcgcccaggctttggcccggcttccggaggaaggtgggagtcaatcattttgacaagtctcctgaaaggaacagctagcaggaactgaaacctttttccatttggtctcgtggcaaaggcagagattgctccagcagctccacacaaaatgatgtgctcacgggtgccctctgaacagtcttctggtacctctctcttgcctaaagacggtgccccattttcttgggattccttggatgaggatggattggatgactccttgctggagctgtcagagggagaagaagatgatggtgatgtaaattacacagaggaagagattgatgcactgttgaaggaagatgacccatcatatgagcagtcttctggggaagatgatggtgggcatgttgagaagggagaaagagggagtcaaattctacttgatact

SEQ ID NO: 83993 - DNA, 398 bp, Homo sapiens
taaatgtctgggagtgaggatgctgaatcatatggtaagtgtatgctaggctctataagaaattgccaaaatgttaaagtggctgtgacattttgcattcccattcacatgcatgagagttatggttactttaccttcttaacaacatacgatattgtcagtttttaaggagggcattctgataggtgagtagtggcgtttcattctggttttattaataactaatggtgctgagcttctttttgggtgctaatttgcaattcatctgctttcttcggtaatgtgtgtgttcaaattgtgtgtccattttttgagttgcttgtttcttattattgaaatttaagtgtcctttgtatattctgtatataagtccagatatcaggtatgtattttgaata

SEQ ID NO: 83994 - DNA, 1541 bp, Homo sapiens
ttttttttttttgccgcatgagattattttattaaaaaactcaaaggaagcagagtgtggagcggtatctgtcctgcgtgacgtctcacatcggagttggctcagaccctggctgtgcatccatcagaaagtgcaaggcccaggccatgagctggggaggaagcctgacagcttggacccgagcacagagggacgtgcagggtggctcatactcatactggaaggcagaaccatcacgatgcctctttgggggttcccagacagagcagggctcctgggctcccctggtagctccggtcctgggaaaaggcggccgattcttgcagggcaaccctacaaactccttgaactccaggctaggtttctggggcctggtcacaagagcctggtgtggactggggacatggctacggggtgagagactgggagtgcagctctggagtggggagctgggggtacggctggcgtgtggggacctgggggtcagggtggccaggggcctgagcagatggctggtgagggctgggagctgcttctctgccctgggtctggagcagccaaggacagggcaggcagaaggctgatgctggtaccactttcctcggatgacatgtggccgggtaaggccggggttcctgaggaactgggtgaggaaggaggagaggctatgagggtcagagataggtcctgcagagccgggtctggtgggggcagctcagggccctgtgtcctctgacaggggcctagagagctcagaattagctggtcattctcagagatgcacagcattgagctggggacagtgtacacagcttctcccgtggccttgcatcgtgaggcagcccagtgggtgacagggggtgctgtgaaagggccctccagtgtcaggcagctttcagccaggcacacgagtgccccctgatgctcctggtcctcccgcatttcatccagaagctgggacagtgataggcctgcattggacgaggtggactctgaaaggtgctcctcaaggcagtcatagagctttttctgaacatctaagtcttggttgcaaccaggcacccgtagccggggctgctccgtgggcagcaggctgaagcggtccacctggagatagaactctgcgggcgcgccgccctcagcgacctggacatgaaccccgcagtcctgcagcagcagcagccggccctctgtcccgcggaagccgaactccttctcctcccagtccgaggtgtccagggcctcccgcgtcaccaggcatcggacactgtgggtcccgtcagacacaagcagcgtggccccgacgtcggacgtatcaggggcgtgggatgggcccgcgaccgcggcctcggcgtcctgtagtacctcaagcagctgcccggctcgtggactggagggtgtctctgaccccagaatcagctcccgaatccagggccgtaggaccagcctccccgaacctgccatccccacggctacacccagcggatgcaacgggcccgggtttcccgcgggcgcccaggccccgcctttcctcggaagag

SEQ ID NO: 83995 - DNA, 422 bp, Homo sapiens
cccggaagacccgggacgacccacgcgtccgtccgtggttacggctaccagtgtcattcattggacgtgttccaggtgagtgaacacacgcacacacacgctcagacattcacacacgcgtgcacacaacctacacacatgcgaacacctacattcacatgtgcacacacacctacaaacatgcacacctacacttacacacatgcacacacctacacttacacatgcacactcgcacacacacctacactgacgcacacacacctacacgcatgcacacacctacactcacacatatgcacagtctcactcacgcaccctacactcacacaccctacactcacatgcaaacacctacattcatatgtgcacacacctacactcacacacctacagtcacacacatgcacactcgcacacgg

SEQ ID NO: 83996 - DNA, 363 bp, Homo sapiens
aaagatataagttatgaaaatagttaagtggaaatttgggacttgaaatgtttaagaaatgaaaagaaaaaatcactggggcacttaaaaatatatttgagttggcagaagaaagtatcagcaaatttgaagatagatcaatagagattaccacatctgaaaaaaagagaaaaagagaatgaataaaaatatgcagagctttagaaaaacatggaacaccattaaatacagcaatgttaagtttaatgggaatacttgaatgaaagaagaaagaagccaaaaaatatatgaagaaataatagccaaatactccccaaatttgagaaagaatattaatctttatatccaagaagctcaacaagg

SEQ ID NO: 83997 - DNA, 396 bp, Homo sapiens
atatcccaatcatctacaccccatcacctacaacctgatcacctataccccgatcacctacaacctgatcatctataccccatcacctatacccatcacctacaccccgatcatctacaccccaccacctataccccatcacttacaccctgatcacctacaccccaatcaccaacaccccatcacctacaccttgatcaccttgacccccatcacctacaccccatcacctacacctcaatcatctataccccatcacctacaccttgatcatctataccccatcacctacacttcaatcatctataccccagtcatctacaccccatcacctacatcctgatcacctataccctgatcacctacaccctatcacctacaccccattgtcttttt

SEQ ID NO: 83998 - DNA, 397 bp, Homo sapiens
aggaggatgtggcccatgtcacccccaagcctgcccagcatgcccaccacccaatttctgtcacaagctaagggtctaggagaggaggccccctgaatcctctacccttctccatcttggttctgcagcagcgtccctcaaagcgggttgcgcagggaggagcccgaccttcagcctcaactggccagcgaagccccacgccgccctgcccagccgcctccttccaaatccgcgctgctccccccaccgtcccctcgggtcgggaagcggtccccgccgggacccccggcccagcccgcggccacccccacgtcgccccaccgtcgcactcaggagcctgtgctgcccgaggacaccaccaccgaaaagaagcgagggaagaagtccaagtcgtccg

SEQ ID NO: 83999 - DNA, 403 bp, Homo sapiens
  misc_feature (1)...(403): n = a,t,c or g
gaggagaactgtgagcgccgggaggccttctagtcataatggaaggatctgacactgtccacacgggcgagagggagggctgctccctgcatgaagaggacacccagagacatgagacctaccaccatcaagggcaggggcaggtcgctggcgcagcgctcgccctggctgatgatgcggatgggcatcctcggccgcgggctgcaggagtaccaactgccctaccagcgggtactgccgctgcccatcttcacccctgccaagatgggcgccaccaacgaggagcgtgaggacacccccatccagcttcaggagctgctggcgctggagacagccctgggtggccagcgtgtggaccgccaggaggtggctgagatcacaaagcagctgccccctgtggtgn

SEQ ID NO: 84000 - DNA, 375 bp, Homo sapiens
aaacccacagttataggcagtgatttcaacatgaaggtctccagccattggctttcattttcacgttttaaaaccagaaaactcatagcaaactaagccaaaagaaagcagaagaaagaaaatagtgaagatcagcatgaaaatcaatgattgaaaacagaaaaagagtagagcaaattaataaaaccaaaagctggttctttcaggagatcaaaacaattgataatcctctagctagactgatgtggaaaaaagagaaagacaaatcatcactatgaacgagaggagtaaaatcaccagagtctacggaaattaagaggaaaataagggaatattattcacaattttatgccaatacatttaacaacttagatt

SEQ ID NO: 84001 - DNA, 473 bp, Homo sapiens
acatgattacgcctgcttggccgaggcgtacggctctgtgagtggaaactgactgccgtgaccctatttagttggcttgtagagacacgtgtggctctgtgcatggaaactgagtcccgtgcggctctgtgcgtggaaactgagtcccgtgtggctctgtgtgtggaaactgagtcccgtgcagctctgtgcgtggaaactgagtcccgtgcggctctgtgcgtgggggctgagtcccgtgtggccctgtgcatggaaactgagtcccgcgtggctctgtgtgcctgggggatgagccctgtgtggctctgtgtgtgtggaaactgaatcccgtgtggccctgtgcgtggaaactgagacccgcgtggttctgtgtgtgtggaaactgaatcccgtgccggttttgtgcggggggctgagtcccttgcgggcctgtggcgagaaaactgaatcccgggcgggctctgtgcttg

SEQ ID NO: 84002 - DNA, 1204 bp, Homo sapiens
ggggtgcgttttcaccgtccttaccgcctgctcatgcaccgctaccatcacacaggtgaatacccctacaagtgtcgcgagtgcccccgctccttcttgctgcgtcggctgctggaggtgcaccagctcgtggtccatgccgggcgccagccccaccgctgcccatcctgtggggctgccttcccctcctcactgcggctccgggagcaccgctgtgcagccgctgctgcccaggccccacggcgctttgagtgtggcacctgtggcaagaaagtgggctcagctgctcgactgcaggcacacgaggcggcccatgcagctgctgggcctggagaggtcctggctaaggagccccctgcccctcgagccccacgggccactcgtgcaccagttgcctctccagcagcccttggaagcactgctacagcatcccctgcggcccctgcccgccgccggggtctagagtgcagcgagtgcaagaagctgttcagcacagagacgtcactgcaggtgcaccggcgcatccacacaggtgagcggccatacccatgtccagactgtggcaaagcgttccgtcagagtacccacctgaaagaccaccggcgcctgcacacaggtgagcggccctttgcctgtgaagtgtgtggcaaggcctttgccatctccatgcgcctggcagaacatcgccgcatccacacaggcgaacgaccctactcctgccctgactgtggcaagagctaccgctccttctccaacctctggaagcaccgcaagacccatcagcagcagcatcaggcagctgtgcggcagcagctggcagaggcggaggctgccgttggcctggccgtcatggagactgctgtggaggcgctacccctggtggaagccattgagatctaccctctggccgaggctgagggggtccagatcagtggctgactctgcccgacttcctctttggcacctccattccctgttgctgaaggccctccagcatccccttaagcatctgtacatactgtgtcccttcctcttcccatccccaccaccttgtaagttctaaattggatttattctctcgtgaggggggtgctctggggtccttgacacacataaaggtgcccccccaccttccacctcttagcactggtgaccccaaaaatgaaaccatcaataaagactgagttgccagcaaaaaaaaaaa

SEQ ID NO: 84003 - DNA, 411 bp, Homo sapiens
aagccaatctccaaggctggcagcttgtcatgttattttgcctgattggttattgagggcctcttctgtggtgagtgctttcttgtgagtgttaacgtgcaatacaagattctttacactccgtgcctgctcctgcatgtccactcatatgcttctaacccagcttcctcgtctcagatatttcagatcttttctatctaagcctctgaccagatgattcacccactgactacggcaaagaaatctgtttatattcctgccttaggccatgtttcttctatgtaaagtagatggccagggccactgttcccagtgctgctaatagggaatattttaatttccttctgtctttcagagccattcttgcataggggtgcaatgcaactacacctttaaacagagattgccctg

SEQ ID NO: 84004 - DNA, 809 bp, Homo sapiens
tgagtttcccccggaggcccagagcggcggcagcgtgcaagacttgcagaactcgggccccctggaggagacctgcccgccacggtcttggggaggttccggagggcctcggttgtctgcactcccaacaccaagaaacccctgagacgcgaagctgccagcgtgctgccctcagagcagggcgacgcaaagccagcggaccccggggtggcggggcagcccacagacacgcaggtcgactggaacagttcttggcagcctcttctggagggcgtatgaggtcgtcagcagcggcctacgacttcaaggcaggcttctgacccctggggatcacgcccatcggactagccaaggaggagccttcgcactccgacctgcaccgcatgcgcgcccagttcctgatccccaagagcagcccgtctgagctggaggaccgcggcaagcccttggaggagctggcaggcctggcccgacgaggaccccgcgtcctgacactgtcaaggagctccgggagcgcaaggcgaccgcgcgctccgccaacaccttttcttccggggttcatgggcgctgccggcgctggaaatcccaggggcacggcgaggagcccagctcctaggatcccgacatcgccagcgcggcagaggacgcggatcaggcctccccgcaacccggcgtccctctacagtccggccgagtccacgcagcaagctgtactggaggacggccctgcacggctcgcagaagcccgcggagcccgtcgagaggccccgtgttcgtccacgctgggcggcgcgccttccgggagcgca

SEQ ID NO: 84005 - DNA, 424 bp, Homo sapiens
ggtcgacccacgcgtccggaaagattgtgtcccacgtgaatgcctgccgtgatccactagaaatagagcagacaaaatcacgtgctctaaagatacctgttactttacctagctgcacctcagtgcttgctcaatgggcccattaaaaaatgttcatgacagcagggataaaggctatgtgtgggctcagcaataaggacttccccttaccaagtctgacccagctaacattactgctgggcctaatctcctgaaagcagaaatcaacactgagcatccaatacagcaccattccttagaggagaccagccagccatgctgtaatgggccctcttctatcaggaaattgtcaaagactcatccccaccagaacagactcacgttccggtgtggatctgcctttcgactagttaggcttctgctg

SEQ ID NO: 84006 - DNA, 449 bp, Homo sapiens
  misc_feature (1)...(449): n = a,t,c or g
gtttgaattgttctaagtttgcttaatggcctgacatggtttgttttgcagaatgttctatgcgcagctgagaaaaatgtggattctgctgctttaaggcgggatgctttatagatgtcctttaggtctagttggtttagaacttcaggtcttagacttctttctttgcagaccattctggctggttggtctatctattattgaaagcggagtattgaagcctcgtaactattgttgttgtattatctatttttcccttcatttctatcagnttttgcttcatgtgttttcaagctctggtaaaaagtattttgttttgtatcagcatagctatttgagctttcttttgattattctttgcataatatttttttccatttttaaattttcagcctttgttattatcagaaatttaaagtggggctcctgacaccgcataccagcagttg

SEQ ID NO: 84007 - DNA, 457 bp, Homo sapiens
gtctctgtaccgcccgattcggtcgccccgcgccggctgttttagcacttgttgctattttatatcttttttaatcaagtatatctccaaatcattggcccactttttaatctagttttcgttttcttattggtgagttttgagttcttaatatattctagatacaagtcgctttttagagagatggttttctgcctttgcttggctttttattcccttttcaggggtttttttctagcagagagttttaattacgttaaagttcaatttatcaatttttaaaatattgataatgcttttggtgttggatgtaagaaatttttgcctaattcaagttcacaaacatgtaattttcctcttctaatagttttagggtttgaggctttatatatgagtctaaaatttattttgagttaattttcttataagggattaggggcgagctgaggttcactgg

SEQ ID NO: 84008 - DNA, 394 bp, Homo sapiens
ctgaaacaataccaatactcactgccaggcagttgagggggcatgatggaatcacaaggattgttaagaatttaggcattatagggccagaacataccccaaacaaaacagccctgtatggcccctgtggaagcctgatgggacatggagaacaatagtagattactgggaattaaataaggtggtctctgcaatgtatgcagctgtttccaatactgcctcccatctgatgataagagaggcgtttggcacataccattttgttgtagatttagccaatgccttcttcagcatcccccttgccccagagagtgaagaccaatttgcattcacctgggaaggagaacaatgaacctttatcatcttgccccaggaatatttacatagtccctac

SEQ ID NO: 84009 - DNA, 373 bp, Homo sapiens
caagatacaagttttctgtcagatatgtgttctgaaaatatttactacaaatctataacttaaccctttcattttgtaataatatcttttgaagattaaaattttgattttgatggcatcagtttattgaattttttttcctattggttttgctatttttttcatatataagaaatctttcccaaactcaaggtcactaagatttttacctgtactttcttctaggagttttatagttttgacttttatatttaggcctaccatccctttttaagttaatttttgtatatatttgagggaaggatgaaactgggggaatatggccatccaactgtttcattgtgctttgataaaaagatcatcctttccccac

SEQ ID NO: 84010 - DNA, 401 bp, Homo sapiens
aatatggtatctttattataatgggttagcacagtcttagcaagtgatatgcaactattaatatggaaatgccacttttaaaggattcagcaggatgtaggttgagaagcaattcacattctcaaggattggacaacagtatatccttacggtcttgctccagggcaatgtgaatcctgctccgtgttacaatatagcctttctggaaactctggaatacattacattcgtccactggattgatgacagtatgttcatgggcctgataagtgagaaatatagactattctgaatgacttactaagtcacaaacactgcaggtggtgggagagaaacgttacaaagattcagagatgtgccatataggtaagctgtcaggggttcaatggtctggagcatgt

SEQ ID NO: 84011 - DNA, 410 bp, Homo sapiens
aagaaaagaaactctttatgatgatatgttgtttatgtgaaaagtctcaaagaatcaacagtgcaacaaaaaatcctggcactactaagtgagtatagcaaggtcatgggatacaaggttaacatacaatagtcaattgctttcttacatatcaacaatgaacaactggaatttgaaaaaggaaaaacaatatgttgacagcatacaaaaataaaatacttagatataaatctaacaaaacattacaggatctcaatatggtaaactataaccctaaatagagagtcagtgttcatggattggaagactccatagttttacaattcagttcttcccaacttaatctgtagattcagggtaatctcaatcaaaattctagcaagctattttgtagacatcaacaaattaat

SEQ ID NO: 84012 - DNA, 335 bp, Homo sapiens
attttttcattgaatgtgtagatcatttttagttgtattgccatcttaatattggcttccaatccatgaacatggaatagctcttcatttacttagatcttcaatttgtctcagtagtgctttgtagttttcagtgtaaaagtgttgcattctattgttaaaatatttgtaagtatcttattctctcagtgctactatggataattttattttgggctctttattgctagtacagaaatataattgatttttgatgtagttatctttggatcctgtgatcttactcaattattagttctaacaatttggaattccttaggactttctacatatgg

SEQ ID NO: 84013 - DNA, 341 bp, Homo sapiens
caaacatctgttatataaatggtttttactcacttttttttaaagggtactcagactgataacaccaccaccgcacccagccccattgtttttcatatttgaaccatccttgcattttgcggataaatctctcttgatgatgtcatataatcctttaaatatgctgtcaggtatgatttgctagcatttatttgaggatttttttgcattgatattcataaagggcatttgtagttttgttttttgtagtgtctgtctttggtgtcagcataattttgacctcatagagggagtttggaaatgtcccctcttcagttttggaagagtttgaggaggattgg

SEQ ID NO: 84014 - DNA, 409 bp, Homo sapiens
tcgtccagcatgctgaaggaaagaaaagttttccaatttccttcctgcttatttttccaatatattacatggctgggtccaccttaccacgtcctgtttgattccagcgttaccaacttttctattggagccaaataagacatactgcaatcagtgatgaactgtctatatgccaagcgtatcccttgtgtaactgtgtaatggctgaaactgagaaattggggctaagtatcaagtggcttaaaggattgtcacggatccaaaatttgaacgattaccaaattacctcgcacaggaaggaatttatgcagatgactgtttaccacagagagttacttatcataagtgttgtagccacgaacctgggaccttaaaagaagaatcctaagattcttggagttcctatcat

SEQ ID NO: 84015 - DNA, 408 bp, Homo sapiens
  misc_feature (1)...(408): n = a,t,c or g
gcactttgtgggaatttttaatactactaattcatactctttgcctgtaatagatttattggcattttcgatttattcttgaggcagtcttggaagctttatctttctggaaatgtgtcagtttcttctcaatgatctaattcgttgttatataattggacgcagtattttcttataatcctttttgattctgtaagatatgtaacaatgtccactttcttttcctgactttagtattttgagccttctttcttttattcttgctcagnggagctataggatagtcagttttcccaatctttccaaaaagccacttttgggtttattgagtttctctattgcttttctattttttatttcatttatatccattataagggttctcatttcctttcttctgctagggaa

SEQ ID NO: 84016 - DNA, 386 bp, Homo sapiens
aaaactaatctcacttctttttgttaaaaatctcaaatgcaaagtcaaaatgaagaaaatgcaacagatttttcacctttctacaaatgtgttttggtactaagttctgatatgacaacagttacatcagaaggaggtaatgtaagtcctccacagagttcttggtacatactgccagttgtaaatggatgatagtagaccaaatgtataacaaatgtttaacagactaagctgttcagataacagctcactactgagaactgacatctgcaagaatgacataaattctggaatcttgttgttcctcataattttcttgttcaaaacagcatactcaatgagcttttgaacagtatcagaacattcatgatatgtagtttttgcat

SEQ ID NO: 84017 - DNA, 631 bp, Homo sapiens
agtatagaccaaatagacctaacagcacattccattccacagcaacagaatacacgttcttcttaagtgaacataaaataatctccagaatagatcagatgttaggccacaaaacaaaccttagcaaatgtaagagtattgaaatcatatcaagtgttctttcagatcacagtgggataaaaccagaaatcaataacaggagaaatcttggaaaataaacaaatatgtggaaattaaacaatatgctcctaaacagccactgggtcacagaaaaaattagaatgaaattttaaaatgccttcagacaaagaaaaatggaaacacagcataccaaaacttatgggatgcagcaaaattagcagaaagggggaaatttatagcaataaatgcctatatcaagaaagaagaaatatcatgaataaacaatctaatgttacacctcaaggaacaataaaaagaagaacaagctaatctgaaagtgaccagaaggaaggaaagagcaaagatcagagccaaaataaatggaatacagactagaaaaataaaagaaaaatttcaacaaaactaagagattcttttttgaaaaaaaaaaaatcaacaaaccattagctagactaaccaagaaaaaaaa

SEQ ID NO: 84018 - DNA, 389 bp, Homo sapiens
cccacgcgtccgcagcttccatgacccaaaggccatacccattgaacagcagaagcactcagactccaggaccatataatcctgaaggagtcaaatgaattgctctctccacagcatgcagaactgattgcagttgttagagcatttggacactcagtatcagaaaatcaaaagaatatatatatgtgtatatatttacaaattcatgagcagtcacaacaacatagccccataatcacacaaatggaaacaaaataattttaaaattaatgacaatgacatatggtccgaatcttactgagaggaactatataaatcatcaaacagaattaagatatttatgacacatatcagcataccaaaaagataacttaggcagggcacagtgg

SEQ ID NO: 84019 - DNA, 424 bp, Homo sapiens
cttagcaagctgacagccaccatctcctttacaaaacagagctctttacagcaaaagttacccagaacaggagttatcatggcccttacagtcccccaggaagaagaatggagacttttttttaaccgagccaggccaagggataaaaccagctctagctaagcaatggccttgaatatgggcagaggataatcctccaggactggtggtcaaccaagcccctgtactcatagaagttaagcctggggcccaaccaattagacaaaagcagtatccagttcccagggaagctcttgaaggaatccaggctcaactcaggcacttgaaagcctatggaattatagttccttgccagtctccatggaacactcccctcctgcctgtccctaagccagggaccaaggactactgaccagtacaagaa

SEQ ID NO: 84020 - DNA, 415 bp, Homo sapiens
gggtcgacccacgcgtccggttatgacaaaacaccagacttcattttacaagtaccagttgctgtagaagggcacataattcactggattgaaagcaaagcctcatttggggatgaatgtagccaccacgcctacctgcatgaccagttctggagctactggaatagcctcaagcacagaacttggcagggaattggaactgttgccagcaatctttcccagctctaaactctaaatgcaccttttccagagttgttactgttcagaagtctggctagaactggatttgtgttaacctaaaagatttgggccaggcttagtcatctattggtatggatttatccaggagctggactgcaaccgggaaaggggcatcctgctcaaagcctgtttccccacgaacattgtcacctta

SEQ ID NO: 84021 - DNA, 412 bp, Homo sapiens
agaaaccttacaatgcaacgaatgtggttcagcttttatttaatcttcaaaccttactgaaagctgagaaaagtcctactggtgagaatcctacaaatgtgaacaatgtggccaatcctttaactgatcctcaacttttactaaacataagggaattcatactggagaaacgccctacaaatgagaagaatgtggcaatgcctttaatcagccctcacacctttctacacataagataatttatactggagaggaactctatagttgtgaagaatgtggcaaagcttttaaccaatcctcataccttactatacagaaattcatactggagagaaagcctacaattgtgaagaatgtggcaaagcttttaaccttccttaacccttaactgtagataagaaaattcatactg

SEQ ID NO: 84022 - DNA, 439 bp, Homo sapiens
  misc_feature (1)...(439): n = a,t,c or g
ggtaccggttccggagattcccgggcatgtactgcgaggcacgggcgttatcgtaacgcgtgcactgctagaggcagtaggtctgtctatagctgcagcctagatcgatgctgtgacgactggttctctacggggtgacagtgaggatgctgctgataccacaagttaatcgtgttggagctgagacggtggttgctgggagtagggtggctgctgctgctgagggtgaggacttgtttctgactttccctaaatgcatggtctttaaacttgctgattaaagaaacatttccattcttaattacaacatataagctcaacctgagaatggatagcaatatttgtggatagctgaagcacagttatttctgtgcctattcccaaggggaagtggcaggagctggtggctatttcttagtaggaaagggaaatacagaan

SEQ ID NO: 84023 - DNA, 430 bp, Homo sapiens
  misc_feature (1)...(430): n = a,t,c or g
gcgtacccgtccggaattcccgggcgcgcgccggggcgatagggaaggggagagcagcacacacgtctgggcctcagggaaggggagagcagcacacagggggggggctcanggagggggagagcaggacacaggtcgaggcctcanggaaggggagagcagcacacaggtcggggcctcagggaaggggagagcagcacacacgtcggggcctcagggaaggggagagcagcacacaggtcggggcctcagggaaggggagagcagcacacatgtcggggcctcagggaaggggagctcagcacacacttcggggccccagggaaggggagctcagcacacacttcggggccccagggaaggggagagcggcacacacgtcggggcctcagggaaggggagctcagcacacacgtcggggccccaggga

SEQ ID NO: 84024 - DNA, 394 bp, Homo sapiens
  misc_feature (1)...(394): n = a,t,c or g
ccggaattcccnnntcgacgggaggcaggaggatgcagagcccgggacagagacagacagagagggagacacagagagagattaggcaagaagggacagagatgggttcaggtggtggaggccgggcgaggccagcgtgagatgggggcagcatgggtctctggggaaggagtgtgtggggcggagtgagaagtgggggtgtggctgggagtgaccctgggtccccggggccccgcctgggctatagcctcggccatcccagtccaacagagaggagccatgaactagggccaaggcaggggtccagaggcagagggctcccctttttctggggtacaggggctggggacagggcaggatgcaagagccagacccagctcctcctcgacagcgc

SEQ ID NO: 84025 - DNA, 442 bp, Homo sapiens
  misc_feature (1)...(442): n = a,t,c or g
ggcactggggncaattcccgggtcgacgggaggcaggagagcggcgacggggttctagaaggcccttagcccattcccaggttcctgagccagcccaggtggtggccacgctcctataatcagtgctggccctgagtgacgcggatgctgtgcttccctccagaagatgcttcaggagacggtgagctggacctcagtggcattgatgacctggagattgacagggtacgtggcagcaccccttcccaagaggggctgggcttgggagggcgctgcagcccaaggagccctgagtggtcgggcggggttggccacctcccctgcccagagcccaccccgctgggtgaagtgggctcctggccttctggccactgttcccgggacccccccccacactctcttcttcagtgtcggctcgggggcgagctgtcgagaggcccct

SEQ ID NO: 84026 - DNA, 447 bp, Homo sapiens
  misc_feature (1)...(447): n = a,t,c or g
gcaccgtnnnaaattcccggctcagacagcaggcacgagaggcgggatcctcctggtgttgcggatgagaccagttttctctatcccgtcggaagcccatctcaggagcgcctccaactcctaggaagcccccggcccctacgaagcacccccccaactcctaggaagaacccccctcccaaggaatgctccccatcccgggaagccccccaacaaaactcctaggaagctccccttccagggagcccctccctctcccaggaatcccatccccacacataggaagacccccactcctaggaaaccccccactcctaggaagccccccacttccaggaactcccccaactctttggaagccttctgactcctaggaagcccccccactcctaggaagccccctactcctaggaagccctggcctaccagcttccctcccatcagaac

SEQ ID NO: 84027 - DNA, 440 bp, Homo sapiens
  misc_feature (1)...(440): n = a,t,c or g
ggaggcagaggacgcccaaagtggctggatggtagttttgactccagttccatggaatcattattgtgtttcctggtggaagtattcctctctctctggaactaagacttctaggccaaaagagcataaagttacgggaacaggaagtaaaaattttgcttgtgggtaatggtgagtagtgccattcctatttgtattccttagttcaggaaacaaggaatattgactcctggctgtgggaaaaacagtaccatgtagtggatgctaactcagaatgtgtacagccttctggagaacctagtgctagacctgcaaggtattatcacctagctggcactgtaactgaaccttctaagggccatttcaccatcctgtcaagctagctgcttcaggatggcagggaacatggtaaaccaatgaattccatgagcttgagcccn

SEQ ID NO: 84028 - DNA, 451 bp, Homo sapiens
ttcgagattccctggtcgacgggaggcggagggtgaggctgggtgtgggaggtgtggccgtgggtgctggggtcagccttgggtgaggctgggtgtgggacctgtggccgtgggtgctggggtcagccctggatgaagctggatgtgggaggtgtggccatgggtgctggggccagccttgggtgagtctctgtgtgggagctgtggccgtgggtgctggggtcagccctgggtgaggccgggtgtgggagatgtggccgtgggtactggggtcagccccgggtggggctgggtgtgggaggtgtgttctctcttgccttggctctccctttctgtgctttgtggtgcctgtgtccttcttcccttgtttcctctcctgtagggcgtgctgcctcctctggctgcccgctttcttgtctgtggtctctgtggttctcgtgcttttgttcgc

SEQ ID NO: 84029 - DNA, 457 bp, Homo sapiens
  misc_feature (1)...(457): n = a,t,c or g
gcccggaattcccgggtcgncnnccgcaggaggaacaatcagtaaacttgaagataggacaaaggaaattaccaagactggggaaatgaaagaaaaaagattgaaggaacgtgaacaaaacctaaggaatcgtgtccatcaagtggaccaattgacctattgtgggagtcccagaggaagagaagataggggagggagcacagggaatatttgaagaaagaatggttgaacacttcctaaatttgatgaaaaatattaaacattcaaggagattgacaatatccaggtaagatgaactcaaagagacccacagcaagacacattatcagctttcaaaagacaaagacaaagagaatctttgtagccgtaagagagaggtgtctcatcacatatgagattgtcagtaagattgtcagcatgtttctcaccagaaactttggatgccagaaggcagtgg

SEQ ID NO: 84030 - DNA, 442 bp, Homo sapiens
  misc_feature (1)...(442): n = a,t,c or g
ggaggcaggaggcggagtccaggcctatgggaaggggcagagggcatggctggcagtgatggagggagatctgtggggcgggtggaaggggcagagggcatggctggcactgatggagggagatctgtggggcgggtggaaggggcagagggcatggctggcactgatggagggagatctgtggggcaggtggagggagccaaaacacggagtcggtagccgggctaagcaagtcgagattctgttcctgcgcctagacagacactgaacaaaccctcccaaagcgatggctgaggttaggctggtggctgtggcaagtgtgctgggtggactccaaagggagagtgcagaagcacagcctggaccacaggcaccgaggtcccggctctgagacgagaacatcaaaggcgagtgtgtatcanggggatcaggaaagaaacct

SEQ ID NO: 84031 - DNA, 432 bp, Homo sapiens
aatactcaattttagaacaaatttaaacaaggagctcataaatctttcaagtgaaagatatatcaatgaaaaaaattagggaggacactaataaattttaaaatgttttatttctattgaaagaataagtattatgaaactgccatattatccaaagtgacctgtagatttaaagaactccttatcaaaattccagtgtttttcttcacagtaatgaaaaatccaatcctaaaatggacatgaaactacaataaactttgaatagtcaaagcaatcttgaggaaaaagaacaaagcagaaggacatcctactttgtactttcaaactatatttcaagactacagtaatgaaaacaggatgaaatgtgcagaaaaataaaccaaaaagaaaaaacccaatataacagaaactactacgaaatcgtcgacccgg

SEQ ID NO: 84032 - DNA, 450 bp, Homo sapiens
gcggaaccgctccggaatttccgggtcgacgtttcgtctagtggagaaggtgagaggccgcgggagtggcggttgcgcgggccgtggtggaggtcttaggtggaggggaaggggcttctctcgggggagagtgggctgcggtgggcagctgacctggccttgtaggaatcgggagggagggtgccctttaacaagggtaggcgcttgattgaggggttgtgaggctgagcgcagcatgtgagttgggggtgatctgtatatcgcaggagggtcttcaatggggaaagttgtaaagcaggagacagcagatggtaaaatatagagacgtccttggaatgcagcgtggcgatttagtaggaggttttaaggcagagggttattacagcgcactatgctttacaagctttgatttgggtgaaagtcgtgggaagaagcaatattgaggaaggg

SEQ ID NO: 84033 - DNA, 417 bp, Homo sapiens
  misc_feature (1)...(417): n = a,t,c or g
tttcgtggggcatacggtgttgggatgggtttacaaacctcacgagagggtggtgggggaggagaatgggtacaggcaattctagaattgtcctgaggaggggatggtgcacaagaaaaagtgggtactgctgactgagaagatggcagctaggaagagggcagctgggaagatggcggttgagaatataatgaggaggcttggggggttaaagaatacggttgagaggaagaggtaggggctgggaggggtagacagcagtcagctggattgaatgaggaaaaagaggtacggtcaggaagagaaaggtgatcagggcatcaagaatggaggagaaggatttgaacaggtgagcaagaattgcacaggtcgagtcgtgatctgagtgcaaaaaagcctggacataaggaatttctn

SEQ ID NO: 84034 - DNA, 457 bp, Homo sapiens
  misc_feature (1)...(457): n = a,t,c or g
ctgcgtgctatagggannnnnactttccggttcgacgatttcgtggttaatcctgcctatagcagggaataggcaaccggaccttcctagggacgagcgattcctcgaggataaggatttagactttaatgtctccctagcaaaagggttgaaggacttggccattaaggggacactggatttcataaattgtgtgaaaaggctggaagatttcaaaaaaatattcccacatggaaagactgtcctggctggctggatctctgtttgaagtggatttctccttgctggatggagtcaagcctaatgtcatcatttttaagcagcaatgcgtggcagcccctttggtcatgctgaagcttcagcctgatggaggactcttacccatggtcatccagctccagccaccttgacacggatgtcccccacctctgctctttccgccctcgcatccccccat

SEQ ID NO: 84035 - DNA, 407 bp, Homo sapiens
tttcgtttccatcaggaagatagaattacaaatgtatatgaaacttacagagcctcaaaatacatgaagcagaaactagtgaaaatgaaggaagaaactgacaactcaacagtaacaatcactgactgcagtaccctgctttcaatcatggatagagctagacccaagatcaacaaggaaagagaacacttgagcaacactgtaggccaactaaacctaatagccagctatagacagaacatttcgccttcactttccacttattaagcggaaatgggaaaaaagaacactccatctaacaacagcagaatgcactttcttctcaagggcatattaaactttccagaataaaccacaggttacgccataaaacacgtctcagtaaacataaaagaactaaaatcatg

SEQ ID NO: 84036 - DNA, 412 bp, Homo sapiens
tttcgtcttggtgtggccactgaggacggcgctgagagggggaaagtcatgggcagggcctggtgtgggatgtggaggagacggcgcccggggaggaggaggtgagctccccgtcctgggagtgagcaagtgtggactgggccttgggggcgtaatccttggaggaatttggatggggtctccttggaacatcattattgaggtgttcttaggaaacaccctttgaaatgtcctgtgacagcttaagttttgagaaggtcgttggttttaatgccttcgtgggcggcactcatggatattttgtcgcagagccttcttggggccacaggggtgggctggggcctcgctcacactcacgtggggcctccagggggaggctttgtaaacctcgaatttgcaattacaccgagcc

SEQ ID NO: 84037 - DNA, 442 bp, Homo sapiens
  misc_feature (1)...(442): n = a,t,c or g
gctctggaattcccgggtcgacgatttcgtcaggcagagacctgcagagctcccactgcacgttggactaggccttcgaggacctggactgggacgctgagaagggcctggaggctgtggcctgcgacaccgaaggcttcgtgccaccaaaggtcatggtgaggcccagcccgggcagtgctcctctacaccccgagcaggactccgccccaacccgagtccagccagctctgcctgggaccacgcagccttctccagctgcctgggggagggtgtctcacagggctatacccttgggctgcctggcagccagaaggtagcctcatgggggctcccacagccccttggcttttggatgggcctggggcccctgagcagctctttgtctccgcagctcatttcctccaaggtgcccaaggctgagtacatccccactatcatn

SEQ ID NO: 84038 - DNA, 419 bp, Homo sapiens
tttcgtgtgacaagcaccccaaaaggcccgagccccagagatcaggatatgccggaggctgctgagccgctgtcgcaggtggaatgagtagcataggaagggtcatgaggtgggaggggtcctggggaaagcctgtagtatggggctagggcctgaaggctctgagtgagcagacgggcagggctgtgctgagagcacggggtggagggcttcttagtccatagggaggttgccccgggtgggatgtgtggggtgttcaggagagtgaggagaaggaagagagccgagaggctggggtgctggccgagtcttcccagcggtggtggcgtttctgtggtgagccagacagggaccccaggactcggcagcaggctctgcaggctgtggcgtgggcctgcacatcccctggggttgggctc

SEQ ID NO: 84039 - DNA, 426 bp, Homo sapiens
tttcgtggagaatgtgccccctgtgcccatcgaggaggccgtgaagatggagctgcccatcatcagcaacgccatgctcattggggaccagaggaagttcctgtccatgctgctcaccttgaagatcactgctccttccacaataacacgaggctcaacacagtagcagctactcattctagaaccgtctctttgaaacagagctcacatgattcacacccttgccgacagcagtaagacctcctccaggaccagggcttacgtcttgttgggtaaggcttggtcctcatctgatctctggcttttcagtgcactctggacccagacacctctgaccagactgataatctgactgaacaagctgtggagttctgccagagggtgggcagcagagccaccacagtgtccgagatcatagagaagaag

SEQ ID NO: 84040 - DNA, 423 bp, Homo sapiens
tttcgtgtgcacaggattctgaggccaccatgcagggagggggtgtgaattaggcatcaagcttggtttgtggaggggagtggcaggtgacgctggagacagactctgaggggactcatgtgcccggatcccatgggtcgtgggagctgttgaagagcggagcagggaagtggcagatgtgagaggcaggggctggagaaggaagaggtgaagaggtggaaggtcaggctgaggtcaggccgtggggacctgggctgtgggtggggaggaagagggaagtggaaaccttggctcttccttgagggaaacaagcccatatctatctgggtgcaggagaggtcttggctttgcaaagcactggtgtcgcaagaggctttactgtaggggaaatgggaagggtgagctggtgcgggaggcctggga

SEQ ID NO: 84041 - DNA, 428 bp, Homo sapiens
tttcgtagttcgtgggcaaactggatgagcgctgccggcgccgggacacggagcaaaggcgctcctaccagcagcagcgcaaggtccacgtgccgggccctgagtgcagagacttgaccagctatgcaatcaaccccgagaggttccgggaggagtttgaggggcccccactgccccccgagaggagcagcaaggacttttgcaagatccccttggacgagctggtggtcccctcgcctgacttcccggggccttctccctacctgctgtctgacaaggaggtgcgtgagatcgtgcagcatagcctctccgtgggcaactttgccgcccggctcctcgtccgcctgtttcccgaactcttcaccgccgagaacctccggctgcagtacaaccattccggggcttgcaacaagaagcaactggacccc

SEQ ID NO: 84042 - DNA, 406 bp, Homo sapiens
  misc_feature (1)...(406): n = a,t,c or g
tttcgtggaagagcgttttggggacgggggctggtgaggctcacgttggagggcttcgcgtctgcttcggagaccgtaagggtgagtgaactagcgcactctccgcagcgggcgggatcccggcgcctctcctgtgggctggaggcttgggctcaagatgagaggcaggagtagtctgggggcgcgggctgggcccccaggccgtctcgggacgcttaaccggctaggagcacggcctgtctcccggggcggaagcctgtgccccaccgggggctctggagccagacggggccgactgggcagatctccgcccccttccctggtccctaggggcccgaggatcggcctgtgggaccagctgtgtcgggtggacactgctcctggcccggcccaaaagcagcgggcn

SEQ ID NO: 84043 - DNA, 506 bp, Homo sapiens
ctcgaccatatcgtctctgatgaacagacatgatcatgcctggagaacagggatggacagtctcgcttctgaaagaccctgtctggctgatgattcatggtgcgccgggcagaccccaggccaagagaccccacccacagtacctgagtgctcagctgggaaccagaccagacctcaaaacagaccagccccccagcattgacctggatgcctgccacagcctcctccctggtctccggcctcccacctctgctcctcggtctcctctacccagccagtaactgcagagagcactaaagcacagtcctggcatctcactcccttaaccctggccacggcttcccagtgcctccaagataaagcaccaacacctgaggacagcaggtgagtcctcccggagctagctctcccccaccttcctgtcaccctctgccccaggctctgcccgtgctgctgccccctgaacccacactttccgctttagctttccctttccctgagatgct

SEQ ID NO: 84044 - DNA, 452 bp, Homo sapiens
  misc_feature (1)...(452): n = a,t,c or g
tcgtgcggnnccgctccggaatttccgggtcgacgatttcgtgttcagggtaatgctgtcttcatagatgagtttggatatgttttttcctcctcagttttttggaagactgtgaggatgattggtcttaattcttcaagtatttggtagaattcccccagtgaagtgattgggttttgtttgggcttttctttatgggggtatttttgattgctgattctgtctgattagttatgggcctattcaggttttctatttcttcatggttgcgtcttgggtagattgtatatttctataaagttgtcctcctatctaggttatccagttttttaggatgcagtggttcttagtactctcagatggttttttatttctataatatacatagtaatgtctcctgttttgtttctgctattagctatttgagtcttctctctttttcttagacaaac

SEQ ID NO: 84045 - DNA, 571 bp, Homo sapiens
ccacttacctctgctaccctatcaactggactggtacctgtactctggtttttctaagcccaaaaatcgacattgtcccaggaaacaaaacctacctatccctgtaaaaactcaagtgtgccaatgcagggccgttcagttaatacccatcctagtacgactaggaatgactactgcagttggaaccggagtggtcgggctttctacttccctcatgtactattgctccctctcacaagatcttacaaacagtttggaagacttacctaatactgtttcaaccctccaatcacagatagactccttagcagcagttgtccttcaaaatcgcagaggccttggtttgctcactgctgaaaaaggagggctctgcatctttttagatgaacagtgctgcttttatcccaataaatcaggcctagttcaagatgcagtaaaaaaactcaaagattgagcccaaaaaataaaagaaaacacatctgctacctggtccctctggtcctcatggtccctcagctcctgaagttccctggcgactacccctccttggcccagctataaccatacgaaa

SEQ ID NO: 84046 - DNA, 454 bp, Homo sapiens
  misc_feature (1)...(454): n = a,t,c or g
accgctccggaattcccnntnnnccatttcgtgccccttccagggcccagaactgccattgcaaggcccccgaatgtccaccttgtcctcctggcttgggttttgaggcccagcctcctctcccttcccactcttgctggtccccaccccctcttaaactaacctcagcctctttttctgagccccttcctacctccgcgcgtacgctcctgctggatcccctgccaggcctgcccttccttccctcctctccgcttcaatcctcctcgctcagccacggctcaggacctcctccccgcagagcccttccagccccctgcccactctgttctctgcctctcggaactcggagaagaacactcattgttagcggcactgttcagggctgagccactgctgctctgtaatcttgctggcgttcctcctgagccccagcgcctctcccattattcac

SEQ ID NO: 84047 - DNA, 456 bp, Homo sapiens
  misc_feature (1)...(456): n = a,t,c or g
agtaccgttccggaattcccnnnccgactatttcgtagaacaccacatggacccattactttgacatcatgcttctgaacagatgatctagtggtggctctaggggccttggtaagatgtacacattccagaggactggagataaaccatgctaagatttcaggaaccagccactcctgtgaaatttttaagggattcagcagtaagagttgcactaggtgtcccctccatagtaaaggacaaatttctgtatcttgcatcccctaccgcaaagaagaaagcatagcatctggcaggactatttaacttctacaggcaacatactccataccaaaaatactactctggaccataaatcaggtgacatgtagagctgcatgcttcaagggacctagagcaggaagtactgcagcagtactgcagtacatggcgcaatcacaccctgcaacttgcacc

SEQ ID NO: 84048 - DNA, 440 bp, Homo sapiens
cggtcgacgatttcgtaccgaaactcccctagtcgcccctgccccccagcactcgcgccattgcctccagccccgagccaccattgtttccagtgccaaatcgggcagccccgctagcctccgaggccgaaccgccaggggccccataagccccgaggaggctcgtcgggaaccgcttccttatcctctcggtatgcgcatcgccaccaccctcgctgcagaggccgccgccctcccagcgcgccatcaccgcctcctctgcctcttcccctccctcagccccggcccctgcattgacttggctcgggctgcgcctcactgcgcctgccaactgtcacacgctctgaggctttcaacagcggggcgccagggacaaacaagccgcggcaagcgcaaacagcctgctcaaacagggacggccagggtgttgtttgaccagc

SEQ ID NO: 84049 - DNA, 1532 bp, Homo sapiens
tttttaaaggttttttgtctgggattttaggtaacatcccagtagtcattttcaaaaacctggagattttttgcttttggttaaatgataaccattatttccccaaaattcagcgagccccatttgccctgccccagaattgaaaaaggcttggtaaaccggcccctggttaaaagaaccaataattatatcggggtctttccacacaattttactattcatagtcttgcctgcccaattaatgtagccatttgatctaagtacaatgtaaaagtcttaactgtactgtgaggaaggaatgaccactcctcaagatctgtattttgaacaataatgcctgttggagaatgtgcagtagcaaaaatgaaaagttggagtggggctaagtgatctattctatttacttttgctgactgaattttttcttcaactaattcaatttctttagttgcccctggagttaatgttcttttactatttaagtctggatcccctctcaagatagagaacaaagttgacatgggataagtacggatgcctagagttggccaaatccaattaatatctccgaatccaattagtatctcctaccaacttttgaaactcatttaatgtttttaatgtgtcttttcttatttctattttttgtggtttaattttcctttcctctacctgcattcccaagtaatggaaaggaggggagaggtttgaatcttatcagatgctattgtccagtcccgcgttggcaacctctgtctgcagaaatgtgtaacggtcaattaatttgtctctcgtttctgcagcacacaaaatatcatcaacataatgaatgatataacagtctgaaaacttgtctctaactggttgaagaacttgagctacaaaagtctgacaaatagttggactattaagcattccctgaggcaacactttccactgaaatctagtggctggttctttattatttatggctggtatagtaaaagcaaattttttcaaaatcctctttttgccagaggaatggtaaaaaagcaatccttcagatcaattataattaaaggccaatattcggggatcatggctggagagggcagcccaggttggagaggccccatgggttgaattactgcattaacggctcttaaatcagttagcatgcaccatctgcctgattttttctgaattacaaacacaggagaattccaaggcgaaaatgaatgctcaatatgtcccttttctaattgttattttgccaataagtgtaaggcctccagcttttgttttggtagtggccactgatttacccatacaggcttttctgttttccaagttaatgaaatgggttttggaggctctacagtggccacccctaaaaaggataccctagtccttttctttctggatttcccttagcctcaattggaactttaatgctttctccatttttccctagtcctttgccagggagctatcccattttagtcatgattttttgacttgtggggctgtatagagagactggaatagtaatc

SEQ ID NO: 84050 - DNA, 554 bp, Homo sapiens
ggttagggaggccgcgggtcagtagggcctccgcgcggcctcttctcgttccctgcgtcctggggtagggctgcgatctcctcctgcatgtcggggtccccggctccccgggtcctgtcgcgtttgcccagcgcgtgcccccgcgcccagggagacccgccctcctcgtggctttgcttcctctccccgcgccctttaccttcactctctaggctcagaggcctcgtgccctgcccagggccagctccgttttcctcgtctttctggctgccgtgctggacccaggctacctgcccgggacaccccatctctgcccctgtcgtctcacgtgttcttagtgtccactcctgtgggtgccgaagggtccgcgcccctagaaggcagcgcttttcccgagcctcgagagcccctcgttcctcgccccagatccgctacggccttggctcgccctccccccacatcaggtgctcacccagtcgtggcctagtagctgggcaggaatctcgcacccgggagcgggaggagcacattatagcgctttcttcgctagggat

SEQ ID NO: 84051 - DNA, 444 bp, Homo sapiens
  misc_feature (1)...(444): n = a,t,c or g
tttcgtagttacagtaaatgttccatgtgcagtttaaaagaagatatgttctgctcttgcagggtggaatcttgtatgtgtgtcagttaaatcaagtttgttgatgttatttaacttcagtgttcttactctttcattttgtctacttgttttatgcattattgagaagaggcatcactcactaaaattgtagatttgtgggtttttccttttggttctctccttttttcctttgtatattttgaggctatcttattaggtatattcagatttacaattgctttctcttaccagtagactgacccttgtaacactgtgaaattgcctgttttatttttgcattttaccttacaatgtactttatctaataattagtataacaatgtcagcgttatttttgatagngtatatttttttctatttcttaaaagtatagtctcttat

SEQ ID NO: 84052 - DNA, 472 bp, Homo sapiens
gtacccgtctcgacgatttcgtctgggcaattcactgctatctgtacatgttggtggggtgggaaggaaatatgaactgtttatttactgtgtcctggatacattatctcatcggatgaaattcctgctaagttaagctccgtttagtggacgggacttggaggctcaaagagggtaagtgacaggcccaaggatatgtgcctagtgaggggtgagccaggattcgatgtgtgactagtaaggggtcagccaggattcaatatgtgactagtaaggggtcagccaggatttcatatgggactagtaaggggtcggccaggatttgatacgtgactagcaaggggacaagccaggatttgatatgtgactagtgaggggcgagccaggattcgatatgtgactagtaaggggtcagccacgatttgatatgtgactagtgaggggcgagacaggatttgatatgtgactagtg

SEQ ID NO: 84053 - DNA, 475 bp, Homo sapiens
tatcccgctcgacgatttcgtgagagtcagtacgtgaccccacccaagatagattgtatagatacacgtctcccacgtttactcataaaggtaacagcagctactccaaaactaaagagggtgaggattgtgcatcctacacagaacccatacaacagctctgtgtggccgatgcaaaaatgtaacagcacccgaaggatgatggttgattaccaaaaactaaggtgactctggccacacatgctgcggtcccaaatgttagccccaaaagactaactgcttgtttaggaatatgaaagattgtcctataacaaaactttcttgaacatacccttagacccagagtcccaagacatgtttgccttcaccggtgaggcccccagtggacccttcaggttttcctccaggggtgctcacaaaaccccactactgccttggcttgatggccaaagacctggctgtttgggtgaatgcc

SEQ ID NO: 84054 - DNA, 442 bp, Homo sapiens
ccgcacgtcccggatgacgatttcgcgaatagccctagactctcctaggtatttaacccccacagcaaaaagagaaattgaggaaatcaagctatttctcagaggcaactagatcgcatagacccacaatactcagtccaattgtttgttcttcctattaaacatttcccctacaggattaataggacagatggccccagggctgcacttcctagaataggttttttgctcacataccaggactaaaacactatctccctatatccagctagttagtaaagtcatctatacagacagcggatgatgccatcagttgctaggttatgaccctgatgtcataagaattcccttgagtaaaaaacaatttgaagcagtcttgcccctatctctagaccttcagatagcactctctgattatgcaggccatataaaacatgccctt

SEQ ID NO: 84055 - DNA, 414 bp, Homo sapiens
tttcgtggggattcaggagtaaggagggtggtggcggtggcgtttcgaaggggtgggggcagtggaaagggaccgtggggcgcgggggttctggctgggaggctcccgggggagccggctgcgtcccctccagcctggtccatcaggctctgacatggccagggagcgggcctgcgagtccccggaagaggtgaggtggccgtcttgtctgcttcgattgcctcgcctccctggagggttggaagtctcgccctgggttagagaacagggacgcaagacggcttaacaagatctctgtaaggcggaaccggggccgggaagcggagcattgagactaggtcagaaagaacctgctcggcacgcagggctactccacctgctgccgcactgacacttcctaggagcctctcctgg

SEQ ID NO: 84056 - DNA, 443 bp, Homo sapiens
ccggaattccagggtcgacgatttcgtgacgggtgccccagctgtgaacacaccttgccagacagtcatgagtgtggccaatctggtcacaccctttccaaggtcagagtgaggagctgcactccacaccaagagaaccacttgagttttctaatttatacaagcagacaccaagggagcatgtgtgggagtggatattaggatgtggaacgaacatgaagttggatctggccgaatttatggatatgggcccactaagcggagattctgcacttgatgttgtagctcagggggttaagaagagatctgtttggttggctgactggaacatggatcaaaggatgacccactgtgagtaagttggagtttctgggtctcctttggtttaatgtagagttagggattcataggcttaggtttcatgtaaagttagggattcaaag

SEQ ID NO: 84057 - DNA, 451 bp, Homo sapiens
  misc_feature (1)...(451): n = a,t,c or g
ngcatgcgttaccgcnccgcaattcccgnnncaacgctttcgtgcagacccctttgaagatctccaagtagacttcaccaatatgcctaaatgtggaggtaacaagtatttgctagttctagtgtgtacatactctgggggtggtggtggtggtggtgtggaggtctntccaacatgaactgataaaactcttgaagaaacctgtgtgattctccgagatctcatccctaggtttgtactgaccttacaaataaactcggacaacaggctggcatttgtggctgacttggtacagaagaccgcataggtatcgcggatcacatggatactacataccacttaccgaccacagagttctggaaaagtcggagcagatgaattagactatcaacagtatttttaggaagggtgtcaagaaacacgatttaagttgcttccaacctttccctat

SEQ ID NO: 84058 - DNA, 469 bp, Homo sapiens
ttttttttttttaagtgtcagaagaaaggtatctcccccggctccagcagcaaacgttccaccccaaagtggattcccgcacaaaattaagcccaaagacgccaggagatggtgacgtggttgccgtgcaggtcgaaggcacatcaatcaccacagctgcagcccacaccagtcccccgccgccaggctcgggtagactgactcggtcggcgttcggcccgcctgggcttcccgggccccttccgtgcaaaccctcccgatgaaggcaggggacctcgccagagaaccccgacctcttcccccggactgcccagagccaagagccggaggaggacggtccccaggaaggaagcgccccaaaaggggaaacgtagagtccggagccccggggattgcgctccacgtcccaagcctcgccgccccgacgcgaaccccggggccggtcccggttcccccggggcccacgaaa

SEQ ID NO: 84059 - DNA, 469 bp, Homo sapiens
tttcgtactgagctaacccatccatgaatcaggcttgaggttttttttcattattcatcagctggcttcaagcatctccatgaagccctaggggtgaactcagggagaggcaccagtgttaacagtgacaagaaaaatgggaatttgagccatctgttcatggaactttcttaatccctctagacctgtttgggccaaattctgaatatagcatttcaatccatggattgttgtccactctatgattcagtgaattcgaaaatacccaggtcatcatgagaagctgaagccatagagttgtctgatgtcttataattagatattccttctctattctgacccagcaataggccagaagctacttttcaaatgggaaggatatttttgctgtggaaggtaaggccttcctccagaaccttaaagactttcattgtgaggctgttagtataacctaccacacactccacag

SEQ ID NO: 84060 - DNA, 418 bp, Homo sapiens
  misc_feature (1)...(418): n = a,t,c or g
tccggctgtcccgggtcgacgatttnnnnacggggcaggtgccggggacccagcgccgccggtcgctcgtatcgggccagccttctgccgccgtcggggctttggggctgacagagccccgcttttccggtctcctggagggaccgtgcctgaggatgcctccgattctcggagcgccgcgggcccggccgtccgcattctttttctgtccatttttcggccttgccctctttcccgtctccccgggcggtgatgctgggcctaacggggagaacggggcctccgcctgccttctaggcactcactgggcggtggttgtgaccgcgggggcgggagccatacggggcacgggctgtgcttctctccctcctgcccctgggtagccgncgcacgaaggaggtctttcagctggatcccc

SEQ ID NO: 84061 - DNA, 477 bp, Homo sapiens
accatttcgtctctggcccagaagcccacaagcctgctgtgcccgaggcgcccatcgcatagaaagatcctgtgccacggggcaaaagcttacggagccgtcgggtgcaccgggggctgcccgaggccgaggactccccatgcagggcaccagtgctgcccaaagacctcttgctccctgaatcctgcacagggcccccccagggacagatggaaggggctggagccccaggccggggggcctcggaagggctccccaggatgtgtactcgttctctcacggccctgagtgagccccgcacgcccggacccccaggcctgaccaccacccctgcacccccagacaaactggggggcaagcagcgagccgccttcaagtcgggcaagcgggtggggaagccctcacccaaggctgcctccagccccagcaacccggccgccctgcctgtggcctccgacagcagcccgatgggctccc

SEQ ID NO: 84062 - DNA, 426 bp, Homo sapiens
gacccgttcggaattcccgggtcgacgctttcgttcgcgtttctcgataacgactgtcagcaccagcagggctgcctgaggatgcacgccttggtcctcggcgcctgagagtcagcgtgagctcccgctgctcgcccgcgcccaggctgccgttgaggaacagcacccccagggctctgtcgatggcaaagacgcctggctgcgggctggcgatggagtaccggatgagtccgttccgcccactgtctctgtcttccgcacgtgcgaggtacaaggctgtgccagggggcgtggtctgggatattctaatctcatccgaggtcctgaggaacgctgggtggttgtcattgacatccatgactgttatgttgacctcggtgctgctgcaggctggggcgctgccgagctgcgcctgcaccgtgagca

SEQ ID NO: 84063 - DNA, 472 bp, Homo sapiens
aggtggaaggttgggttattgatttgagatctctttttatttagtgtaagtatccacagctgtacatttccctgtaagcactgtttagcttcatctgtattttagtatattgtgttttcatttccatttatctcaaactatcttctaaattctcttgtgaatgcttctttgccctattggatactaaggagttcagtgttttattaacatattttttaattacccaaatttctttctgttattgatttgtaatttcattcaattgtggtaagagaacatactttgcatgatttcaatcattttaaatttattgagatttattttatgacaacatcgggtttattctgtcagacattccacgtgcacttgagaataatgggcacaacaacctttgcagttgttggtggagtattctacagacgtctgccaagtctaggtgggttagagcctgttgacgtcttctactgacttt

SEQ ID NO: 84064 - DNA, 418 bp, Homo sapiens
gctccgtgaattcccgggacgacgatttcttaaaagacacaaatatatggaaagatatatgcacagataagaatacgtaacattaaactgttaatactctgaaaagcaatctaaagattcagtgaagtccctgaaaattccaatggcgtttttttttatttgcaaaaatggaaaagctgattctcaaattcatatggaatttcaggaggctttgaatatccaaaatgaaattgaaaaagagcaaagttgaaatactcgcacttcctaatttcaaaacttacagcaatcaaaacagtatagcactggcataaagataaacattcacaccaaaataatagaattgacaccaaaatagttgagaaataaaccatacctatatggataattgatttttgatgagtatgccaagacaatccag

SEQ ID NO: 84065 - DNA, 2173 bp, Homo sapiens
gagtggcggggtaaggatgggaagccgagcagacggccccagaacaagcggtcatgtgactgggaagatggccgtctttccttggcactccaggaataggaactacaaagctgaatttgcatcatgccgactggaggctgtaccattggagtttggggactatcaccctctgaaacccataactgtcacagagtcaaagacaaagaaagtgaaccggaaaggaagcacttcttccacgtcctcctcctcctccagctccgtggtggacccgctgagcagcgtcctcgatgggactgaccccctctccatgtttgcagccactgctgaccccgcagccttggcagctgccatggacagctccagaaggaaacgtgatagagatgataactccgttgtaggatcggattttgagccttggaccaacaaacggggagaaatccttgcccggtacaccactaccgaaaagctgtctattaatctgtttatgggatctgaaaaaggcaaagctgggactgccacattggcaatgtcagagaaggtgcggacccggctggaggagctggatgactttgaggagggttcccaaaaggagctgttgaacttgactcagcaggattacgtgaaccgcatagaggagctcaaccaatcgctgaaggatgcctgggcctcagaccagaaagtgaaggctcctaaaaatgttcatccaggaaagctcgtgtacgagcgcatcttttccatgtgtgtggatagccgcagcgtcttaccagatcacttttctccagagaatgcaaatgacacggccaaggaaacatgcctaaattggtttttcaagattgcctccatcagggaactcattccaagattttacgtggaggcatccatcctgaaatgtaacaaattcctctccaaaacgggaatttcagagtgcctgccccggttgacatgcatgatcagagggatcggagacccactagtgttcggtgtatgcccgtgcctacctgtgcccgggtgggaatggaagtggccccacatctcaaagaaaccctaaataagaacttttttgacttcctccttacgttcaaacagattcatggggatacggtccagaaccagctggtggtccaaggagtggagctcccatcttacctccccttgtacccgcctgccatggactggatcttccagtgcatctcctaccatgcccccgaggctctgctgaccgagatgatggaaaggtgtaagaaactaggaaacaatgccttgctgttgaattctgtgatgtctgccttccgggctgagttcatcgccacaaggtctatggatttcattggcatgattaaagagtgtgatgaatctggtttccccaagcatcttctttttcgatcactgggattaaacttggccttggctgatcctcctgagagtgaccgacttcagattctcaacgaagcttggaaagtcatcactaagctgaagaacccacaggactacattaattgtgccgaagtgtgggtggaatacacctgcaagcatttcacgaaacgagaggtgaataccgttttggcagatgtcatcaagcacatgactccagatcgtgcatttgaagattcctacccccagcttcagttaataattaagaaagttattgcccacttccatgacttctcagttcttttctcagtggaaaaatttctgccgtttctggacatgttccaaaaagagagtgtgcgggtggaggtttgcaaatgcatcatggacgcctttatcaagcatcaacaagagcccaccaaggacccggtcatcttgaatgcccttttgcatgtttgcaagaccatgcatgactctgtgaatgcactcactcttgaggatgagaaaagaatgctgtcatatttgattaatggatttataaaaatggtttcctttggccgtgattttgaacaacagctgagtttttatgttgagtccaggtcgatgttttgcaatctggagcctgttcttgtgcagttgattcatagtgtgaaccggttggcaatggagacaagaaaagtaatgaaaggaaatcattccagaaagacagctgcatttgtccggtcctggggtgcctactggttcatcaccatcccctccctggcgggcatcttcacacgtctcaatctctacctgcattctggtc

SEQ ID NO: 84066 - DNA, 1123 bp, Homo sapiens
ggaattcccgggtcgacgatttcgtctcggtttagcaattgaaacaggaagtgaaacacacaggagtttaggtccatcacaaactcagggcgtgggcgatccctgggctacccggcttcggtcccacctccaccccagctgtgtctttggcccgttgttttctaccctgggcctctgtttagtcattttagatgaggaaagcatacctggttcctaagactgttgggaggaatgagtgaattcatgcaaagtgacgggaacagtgtccaggatgccgtgagccggggagcctgcttattgctacagctgctcctctcagtaagggtgtgacagttgcagtgaccgtgaggaggtggcacctcaccgaggtgcatctgagaacccaggaatgcaggccagctcacaggtccaggatgctgcacgggggctccgtctggcctgtggtaccagctctcagttgcctctggcttggtgtgggggcctcaggctttgctgccgtagacgctgttatatcctcccatacccagatcacctggtgtctgagtcccaggccactcctggaaatgggatgtgtgggatttggtgtcaaactggctgttccttggagcaaggaggaggagaggtgagggaggtcctgttcctggcgctgcagggcctgtaccccttcctgtccaaagccttctctggccttcccctggggcagctaggggtgtggagcagggcggctgccagtggagccaccgtcaagggaagtgtgggtgtcgccccggatgcccagcgagactttcccctgaaccagagtgtctggtgccaacagcgccaccagagggggccgttccactggaagtcctatcgggaagtatttttacagcgcttggctgtccttgcagacgaaaataagatgtttgctttagcaatttgcttagccctgaaaacattcctagacaatgccagggccttagttgaaaataaatacacccaatccctcttccgcatgactgccctgcacataatcacaggcagagatggaaactcgggaacgttccctgctggggataagcattgccattctcttccacaacacatttgcaagtttttcacttgctcagaaccagtgttgcag

SEQ ID NO: 84067 - DNA, 364 bp, Homo sapiens
tagaaacatggcattctagcaggagttggcaaactatggctcaagagccaaatctgggcccttgcctgtgtttttacatacactttcatttcatctgcaaataaagacagtattcttcctttcccatctgcatgcctttttcttgtctcactgcactctgtgggacttccaatgcagtgttgaatagagtggtgagggagaacttccttaccttgtttccaatcttcagaggaaagctttcagtttcttatcattgagtgtgatgttgactttcagttttttatgttcttttcctactttgttgaaaacttttatcatgaataggtattggatttttccagatttttttttctatgtcagttga

SEQ ID NO: 84068 - DNA, 357 bp, Homo sapiens
ttttcatcagcacgttgaacattctccaagatagaccatgtgataggccacagaacaagtcttcataagtttaagaaaatcaaaattatatcaagtactttcgcagaccaaagtaaaataaaattggatattaactccaaaaggaaccctcgaaattatacaaatacatggaaattggaaaataagtaatctgctcctgaatgacctttggatcaacaatgaaatcaatatggaaattagaaaattatttgaatgaacaataatagtgacacatccaaccaaaacctctgagatacagcaaaagcagtgctaagaggaaggttcacagcactaaatcccaacatcaaaaagtctaaa

SEQ ID NO: 84069 - DNA, 460 bp, Homo sapiens
gtgcggtcgaatgttcttgcttgggacactgccgcattagggcgggctgctacttttctgttgatcctggattgtttctggagcagtgagagggaaagagaattgggggctctggctgccatatgttctgcgatgagaggtgcttgaggcaggagcctggcccagggggtgctggtgcctccccggggtctgggcggagagaacaggaggaatggctgggaagtggctgatggagccaggaggccggggggccgggggctgcatgggaggctgtgggggtcctgtcagccaggaggccccaggtggttttgaggctcgctcttgcgcggtgcctgataagagggtgaaggagctggggcaggccccatcctgggcattggagatgatgaaaccgagcagacctggcccatgtggagctggcatgggggacacagcccagagacagagaagcttatgaggt

SEQ ID NO: 84070 - DNA, 469 bp, Homo sapiens
gacattcgcactgaggcagaaagtcaacaaagaaatactggactctagaacaaactgacctaagagatatttacagaacattctactcaagaactacccaagagactgcagaatatacattcttcttatcagcacatggaacattctccaaaatagatcatatgtaagctgcaaaacaaatctcaataaattttttaaaaattgaaatcacatcaaccatattctcagaccacagcagaataaaatcaattccaagagtaatcctcaaaactgtataaatacatggaagttaatctgttcctgagtgatttttgggttaacaatgaaatcaagatgaaaattgaaaaatttctgaaatgattgataacaatgacacaagttctcagaacctctaggacacagcaaaagcagtgttaagaggcgtttatagcactacatacctacatcaaaaaatctgcaagggtacaag

SEQ ID NO: 84071 - DNA, 1238 bp, Homo sapiens
tgcatgtggaaaagccttcagtgagaagtcacaccttattgcacatcagagaactcatactggggagaaaccttatgattgttctgaatgtggaaaaggcttttctcagaaatcatccctcattatacatcagagagttcacactggggaaaaaccatatgaatgtagtgaatgtgagaaagccttctcccagaaatcacccctcattatacatcagagaatacatactggggaaaagccctatgaatgtagagtgtgggaaagccttttcccagagtcacagctgattatacatcacagagctcatactggagagaagccatgtaagtgtactgaatgtgggaaagcattctgttttatacattaaagagttcacactggtgagaaaccctacaaatgtgctcaatgtgaggaagccttcagcaggaagtcagaactcattatacatcagataattcatactggggagaaaccgtatgaatgtacagaatgtgggaaaacattctctcgcaagtcacaactcatcatacatcagagaacccacactgggagagaaaccctataaatgtaccaaatgtggaaaatccttctgttcagcagtcacatgcttcattgggacatcagagaattcacacgggagaacaaccttatgtatgttctgaatgtgggaaagccttctctcagaagtctcacctcccagggcattggtgaattcatacaggagagaaaccttacatatgtgctaatgtggaaaaggccttttctcagaagtcagaccttgttgtacatcagataattcatactggagagaaacctgatcgatgtactgtatgtgggaaggccttcatccagaagtcccaactcactgtacatcagagaattcatacactaatgaaatcataagaatggtctgaacacagaaaagccttcagggtcagttcaagccttaatagatagtgcaacaaccaatggatttgatgattttggggactacatctttgttgataaaattttacaagtgaagtcatgttcctaatgtatttcattctttatcaaagataatagagaagtcaatacgtaaatgatggacattttcactatggcatataaaagtttttaaattgagaaatgaatgattagcataacagaacgaattgcatgtacatctcttttgaagttatgtgctcctgattatactacataacaatcagatatgtgtaagattgttaaaaaaaaaa

SEQ ID NO: 84072 - DNA, 416 bp, Homo sapiens
atttgccaaatttgttgtcctttcccacaaccaacttttactttcgccaattttctcccctttttaccttttttatttcatttatttctactctaacctttattctttctttcttcttgctctcagtttcatttgtctttttctactttcttaaaaaggaagatcatgtaatagatttaagatttgttttgttttgttgcaggcatttaaagacataaattccccatttgagcactgtttgtcctaaatcccctaaatttgggtatgttgaatttttattttcatttatcttattttctaattcccattttgattttttgacccaatggttatataggaatgcatcgttcaatttccatatatttgtgaatttccaaaatattcttctgctatttttaatttcagatcattatact

SEQ ID NO: 84073 - DNA, 394 bp, Homo sapiens
cactatctccagccccatacctctcttcagggctccatacctgtgcttctagttgtctgccagacatgtccatttttcattgcccaactggcaacttattgtctgattgtctatctagttgtacatcctagaaatcatagtcataatttattccatcttcacttccccatactcatagataaccaagtcccataaattggaaattctaagttgccaatggaaaaacaaataacaaagatactggtctggggttaggagagtgttcgcagtcatcatactcctcttggccagcagtgtcccacgtgttcaggctaacgatttgcccatccacggatgtctggacgctataattgtcaaagacagtggggggatatactcctcaggaaagacattt

SEQ ID NO: 84074 - DNA, 432 bp, Homo sapiens
ttgttgaacactatttccttactgatcttctgtctagtttctatccattgtttaatgtggcatacagaggtctccaaatattgttgtagaactgtctactatttgtttttaattccatcagtgttcacttcatatattttggagctctgttgtttgatgcatacttgtttatcattgttatatcttctttatgaattaaccctttatcagtaaaaatttccttcttcatttttatgacaattttttacttaaactccattttgtctaatattagtgtaaccatctcagctctcttgtggttactatttggatagaatatctattattttaatcctttcacttttaacctgtatctttgggtctaaactgagtgtcttgtcagtagcatataattggatcatgttgttttttaatccattctgccaatgtctg

SEQ ID NO: 84075 - DNA, 430 bp, Homo sapiens
attaccgcgtcgaaccacgcgttcgaattttactttcgatggtggcccatgggaagatcctgtgttgctagctgttcttaaagctcactctgcttgtcaagtgatagttatcaaatatttaagttctgaaaatccactgttctttgaactacgtgccagatacctaattgcttgctgactgcatacctctatcaatggctcttattaaatcttgtataaatcacccagaaatcagtaaagacttatatatttttcacgcactcttcacatgtctgattatgtcacctgtagaagatcagctattccgggagcatttattgaccactgacatgctaaggggtagtgagatgatcagtgacgctgattaagaaggcaaaactatgttagccttgcaactctgtgaatcctttcttattccacagcttcagag

SEQ ID NO: 84076 - DNA, 387 bp, Homo sapiens
cggacgcgtgggtggcgaggctgaggacaaacggtatctcttacacactggtggagggaatacaaagtcgctcagcctctgtggaaagcagtttggaggtttctgaaggaagtctaactataattattattccacccagcacttccattactcagtatataccccaagaaaaatagattgttccatcagacagacacccgcgcttgcatgtctatcatatcactattctcactagcatagagatggaatccacacacataccaaacgctggcggattggataaagagagtgtggtacacaccctgcatggcttactacctatctatgaaaataatacatacctatcgtttgcacctgcatgcatgcggcggcagccattatcacaag

SEQ ID NO: 84077 - DNA, 424 bp, Homo sapiens
  misc_feature (1)...(424): n = a,t,c or g
gcgtcgacccacgcgtccggttaaattttgaagaaaaatgtacagatggttatctctttaaaatagggggaagtgtcctgtttgttgaatttgttcatttattctcacaggttttttggatgtgaaatcattagggttttctacatacgagacccatgtcatataattttacttctccaatctagatctgctttctttctttttcttgcctaattgctctggctagaccttccagtactactttgaataaaagtggtgaaaaagggcatctttgtcttcttcctgatcttagaggagagcttttagtttttcactgttgagtatgatgttcactatggatttttcatatatggnctttattatattgaagntgtttcctttattcgtaggtcattcagtgctttttagatcataaaatggtgtt

SEQ ID NO: 84078 - DNA, 351 bp, Homo sapiens
  misc_feature (1)...(351): n = a,t,c or g
ctctattcttgctgattctctgtctagtaggtctatcaattgctgagagaggagtgttgatgtccgcaattataattgcaaattagtctatgtctcctttcatttccatctgtttttgcttaaagtgatttaaaacgtgttttgtggttttttgttgttgttgtataaacatttaggagtgttatatcttcgtgatgaattgttcatcttatcatgatgtaacatgacttttgtctctagtaagtttgttctgaaatctaatttatgtgatatttatttnggcaattcctgattctcttcaaagctaatgtgtgcatggtatatcattttctgcccttttactgtcagctt

SEQ ID NO: 84079 - DNA, 366 bp, Homo sapiens
acgactaagaaaaccttgataagtaataatgtttccagtaggagtttgcccatccttccagaactgaaagccttttctttggcttttaatgatcctttagaaatacaaaaatatatgagaactgtcagtagtgtgtcactcatgacatttctctttatattgtcacaaagttagcactaatttttttaattcccagggtttttcttttccatcaattgaacattacctaataatgtttacatttctttactatgacgacgtttattgcaattccattttcttttctttttcttggtagagacagtctcttgctatgttgccaaggctggtctcaaactcctggcctcaagtgatcctcccacctca

SEQ ID NO: 84080 - DNA, 411 bp, Homo sapiens
catgaaatatgtttagaagtattcccacttctatgttctggaagagattgcgtaaaattggtgtcattttctctttaaatgtttggtagaattttccagtgaaactctcagggactgaagaattctttctaggaatatttttaatataaatgcaatttataaatggttttaggactatccaggttgtctgtttcttcttggctgagttttgggagttgttggttttcaaggagttgatcctctaagagttcagatttgtgagtatgaaaatgttagcagcaccaccttcttattggttgcaggatctgtagtgatgtcctgttttttattcctgatattgatgattggtttcttctggctttttaatgttgtctgtcttctgtgctggtcctgtaagtttgctattaaaat

SEQ ID NO: 84081 - DNA, 408 bp, Homo sapiens
cggacgcgtgggatctgctttggtattgatttctagttttattccactgtagtctgagaagatatttgatataattttgatttttacacttgatcttagccaaaagactgagaagtgatataattttgatttttaaaaatttattgtgacttgttttgttgcttaaagtatggtctattttgaagaattgttcatgtgcagatgagaaaaaaatgtatgtttggcagttgttgggtagaatgttgtataaatgtctgttaggtccttttaatctagagtctgatttaagtccagagtttctttgttgattttctgcctcaataatctgtctagtgatgtcattggattgttgaagtctctcactattattgcattgctgtatacttcttttcttaggtctagtaatat

SEQ ID NO: 84082 - DNA, 492 bp, Homo sapiens
gacttcccggggctatccacgcgtccgacgcttgtgcgcatgaatgccacctggcacatcatgcttaaattcactttggagagaaaccctacccgtgtaatgagagcggcgaaacctttagtacgctgtcaacacttgtttaacgtcaggcaatccatggtgtaaggaaactttactaaggtaatgattgtcacaaagtcttcagtaatgctacaaccattgagaatcactggagaatccataaggaagagagatcatactagggtaataaatgtggcagatttttcagacattgttcataccttgcagttcatcggtgaactcaacgctggagagaaaccttacaaatgtcatgactgtggcaaggtcttcagtcaagcttcatcctatgcaaaacataggagaattcatacaggagagaaacctcacatgtgtgatgatagtggcaaagccttcacttcacacctcatgagacatcagagaatgcatact

SEQ ID NO: 84083 - DNA, 1713 bp, Homo sapiens
  misc_feature (1)...(1713): n = a,t,c or g
ttttttttttttcgcactgaagacaggtttattgacactcctgcttcggatcgagctacatggggtaaggagggacagttgtggagagcaggagggccccggggttctggggagcagcagagagggagacccagggttgctggtgccactgtgagcacaggcctgcaccacacgccttcccaggaaggcctcccctcacccagccaggccctcctgctcccttcccacatgcagggtgggacgggcctgtgcatggcccccagatgaggacccaagctcctgcaggggcggtggccttcagtcaagacagctgggaggcagcagatccgtgattaggctgggacgctggctcccaggctcgggtggtggtgcagcggcctctccagccccagcccccaggaccattcagactggtggtgtcatggatgaggagcacctctgcctggcccagacatgcttggagcttagggatgggggctcctgggcagtggggaaggggcccagggcaggggggagcctcatacgagtctggctggcacaaggctgagcaggagcccggggctcacagtggccgaggcagggctaggaccaggcccaggtgggcgggcagcactcagctgctgtggtagatgcggaggcgctgggcgatgtcctggcggcacagcgggcaggtgcgcagtggctggcagcactgctggcagcagcagacgtggccacagttgaggaagatcatctgggcctcccgttccaggcacacgacacactctgaggcctgcacctccagctctgcagggggagcggatggcctcacagactcaggaggctcctggggggccgtaggggtgacgacctcacccattggtggtttcagctctggctggatcctggctgcatccagcagttcctggactctccggaggatctcgtgctgcaggccagcttctgagacgcccaccttggccaggtcccctgggctcatttggctcagcaggtccagtgagaggcggtggtgcgcaaagatgggcaggtagtgctcagccgacagctcctccaggagggccaccagctggcgctccatcccctcttcttgcagcttcaaggacaagggcttctggttcaaaagccgttgatactgaatcagccagtaattttcctgcctggtttcacttttggcttctaactccgtcaggatttcccggagctcttcctctcgctgctgcttctctttgagcagctgctggagcagggagctgagggcccagcgctgctccgagatcatctcctggagtgactctgtgtccagggacttcctctttaactccagctgtgtcagctgcaataactcagtttctattaacttaatctggctcctgatctgccgatgcatcaggtctttcttcacctggagtgcctcgaacgcagccttctgcatcgcgctctcctgcaggatctggctgatggctttgttctgatccatttgctgccacgccagattctgctggaatcgttcatccatttcggccatgctggaacaggcctgctggaccaagttctgccttgagattggtaggcctctggaattccnccgcctgttcagaggtgctccattatnaagggggggggnnngnncgnnnntngngnnnnnnnnntgntnnngtnnnnnngnnnnnnngccgtcnnggatattagagatttccgccatgtgtaggaatg

SEQ ID NO: 84084 - DNA, 715 bp, Homo sapiens
gcggccgcccgcaagactcagttcggcgcctcggccaccgcggccctggcccccgtcgcctccgacccgctgtcacccccgctctcggcgtccccgcgggacaagcaccccgggaacggcggcgggggcgggggcgggggcggcggcgcggggggcggcggccccagcgcgtccaactccttgctgtacactggggacctggaggcgctgcagaggttgcaggcgggcaacgtcgtgctcccgctggtgcacagggtgaccgggaccctggccgccaccagcacggccgcgcagagggtctacaccacgggcaccatccgctacgcgcccgccgaggtgaccctggccatgcagagcaacctgctgcccaacgcgcacgctgttaacttcgtggacgttaacagccccggctttggcctcgaccccaagacgcccatggagatgctctaccaccacgtgcaccggctcaacatgtcaggaccgttcggcggcgcagtgagcgcagctagcctgacgcagatgcccgccggcaacgtgttcaccacggccgagggactcttctccacgctgcccttccccgtctacagcaacggcatccacgcggcacagactctggagcgcaaggaggactgaggcgccgcccgtcctgtgcccggccaggccccgcttggaggaagcatcgctggcattttcgttagacctttaattctagcat

SEQ ID NO: 84085 - DNA, 853 bp, Homo sapiens
ttcacgccaagcttggcacgaggcagcaccttcccttgggagtggacaagtcctcggccacctcagcaccaccagctcccacccaggggcaccctcacccccaggtcattggtgtgcggcccctgacccagctgatccagcaccagttacaaggcctcctcgtgcccagtcccaagcacacgggacccacctgccaccctgcccatgccgggaccccacaactctcctcccacatgctctaggctctgatcccaggcagacgccctcttgcaaggcaggagcatgggcaggtgtgcgtcccctctgcctggcatctccaccagcagggctgtccccgtccctggcctggaatcccagcctcctggcagcactccacagctcgccactcacccatgccccaaaggatgctgcctggctggtgcctgtggctccagctctgcctcggcctccctggcctgctccctggcagccatggtcagtagtgtgctgagccagcccagccctgccacctgctacaggcaggagccccgagctgccacctggatgtcaccactcaaacgaacaggacacatccccggtggaggccctgggcacgctctggcctccccctcacagctctgggcctaggttcctgcaggacaaaggggcagcaggacagatggccgagcagacagagctcagagctggccatggcaggatggccaagctccgcagccacagggcctcatgggccagtcctccggacctggatgcagcagcctcgcctcacttggccccaagtgctgcctcagccgatgggctcccagccacacgtgcacagacccccagaccaccacccactccctcccgccag

SEQ ID NO: 84086 - DNA, 451 bp, Homo sapiens
attagtacagtctaattgctctgcggcccggtcccacgcccttgctacaaccttgctacgccctggcttcccgattctttttttcaccccctgtcgctgcccctcattgcacgcccgccaaacccgttccccagtcttgggtgccgatggcccgtctggcgcccaaccaaacaccccgcagaaaaggagttttgacctcctcaccccgttcatgccacctacgctccgggtttcaggggattggcccgggcctggcggcccccggaacctcaagcccacggccagcaagctgggcgctccgctgagcggcctgcatgggctgtccgagtgcacgcgctgcggccactggatcgtgtgagtaaccgtccccgctgcccctcccggaccctagccttgcagggccctggatgcgggcgcagtcttgaactcattaatcactcgacgcttgccg

SEQ ID NO: 84087 - DNA, 1326 bp, Homo sapiens; identical to SEQ ID NO: 68456

SEQ ID NO: 84088 - DNA, 442 bp, Homo sapiens
  misc_feature (1)...(442): n = a,t,c or g
gtaggaagtgccttgtttaggtatatttctaagtattttacgtttttttgcagctattctgaaagaggttgagttcttgatttgattctcagcttggtcactgttggtgtatagcagtgctactttaattttgtatcctgaaagtttgctgaattcatttaccggttctgggagctttttggatgagtctttagtgttttctagttatacaatcatatcatcagcaaacagcgacagtttgatttactctttactgatttggtttccctttatttctttctcttgtctcattgctctggctaagacttctagtactgtgttgaatagaagtggtaaaagtgggcatccttgtcttgttccagttctcagggggggaatgctttcaactttctatgtttagtataatgttagttgtgggtttgttgtagatggcttttattan

SEQ ID NO: 84089 - DNA, 723 bp, Homo sapiens
ccctatccaggggggaatcttcgggtcctttcaagtgctctgggcgttcgtgctggccgcggcgcgctggctggtgcggcccaaggagaagagcgtggcgggccaggtgtgcctcatcaccggcgccggcagcggcctgggccgcctcttcgcgctggagttcgcccggcgtcgggcgctgctggtgctgtgggacatcaacacgcaaagcaacgaggagacggctggcatggtgcgccacatctaccgcgacctggaggcggccgacgccgctgcgctgcaagctgggaatggtgaggaagaaattctgccccactgtaacttgcaggtttttacctacacctgtgacgtggggaagagggagaacgtctacctgacggctgaaagagtccgcaaggaggttggcgaagtctcagtcctggtcaataatgctggtgtggtctctgggcatcaccttctggaatgtcctgatgagctcattgagagaaccatgatggtcaattgccatgcacacttctggaccactaaggcttttcttcctacgatgctggagattaatcatggtcatattgtgacagttgcagttccttgggattgttcagtactgccggagttgaggattactgtgccagtaaatttggagttgtgggtttcatgaatcctgagccatgaactaaggctgctgaaagggtggatttaaacaacccccctgttggggccccc

SEQ ID NO: 84090 - DNA, 466 bp, Homo sapiens
  misc_feature (1)...(466): n = a,t,c or g
tctagtccagtgnggnggaaatcaccccgatcccaccgctgtcccacagccggcaccccgatcccaccccagtcccgcagccggtaccccgatcccacagccggcactcaccccgatcgcatagcatagctgataccccgatcccaccccagtcccatagccagcaccccgatcccaccccagtcccatagccagcacctcgatcccatagatgacaccccgatcccgccccagtcctatagcccgcaccccgatcccacccgagtcccgcagccggcaccccatcccacccatgtcccacagtcggcaccccgatcccactcggatccggcagccagcttggatcctgtggccctcctccagcccccagggctcatttatatgttttattggcagaggctggggctggctctgaaggcctctgtgctgggattcttcctctgcaccgcaggactggctctcctgg

SEQ ID NO: 84091 - DNA, 450 bp, Homo sapiens
  misc_feature (1)...(450): n = a,t,c or g
agtgtggtggaattcgggagctactacgtacccggcttaaagaactggaaggctctgtcacttttcgccccctggagcctggagcttggagcctggagcctggggcactccctccctgttggtggtggtggtgacggagcggtaggagggaggctagcagcgagagcttctcctgccgggctggaagacagaaagaagaggcaccgccgcatgctggaggctggagccggagcttgcgcctccgcggctcgcctcgctgcggttggtggtgacatcagagaccgcagctcggccacagtggtagaaatgtggtagggtaggtttctctggctttgcctgcgcaactgctcccagccaggctggaggaggaggaggagtcacctgtggtatgctggagcctgtagatggcgtggctctgcagcttgcctcatgaggctctccaggaagtcn

SEQ ID NO: 84092 - DNA, 479 bp, Homo sapiens
tggaattcgctagaccagccagccaatccctttgccactgctcagctatctacatatagccacacatcagaccacttctcttttcattaaaaatgaatggccaagtatatttcttacagctctgcttacacagaagggtttcctttaccactgtcctttagggttccccttaagtaacttagcagttaagcatttttggcttgcaccaacatatgtaccaagcacctgtaaactgggaccaatatcttttctcttctgtcagttggtcatagggaattttccaatgaaaatataggtatgaattgtgaattgctttggcacagtagagattggtgaaacaggagtctaggtcatgtgtttatggaattccttctggacttggttggagctaatcctgaatttactatttctcttatacaaaagggttctcttatacctatctaaccttacaatttagtaaatctgatgataccaagttc

SEQ ID NO: 84093 - DNA, 506 bp, Homo sapiens
gtccctattccagagtggtggaattcgctctggaagcggcgcaagttgaacctgctgtcggactggtgtttgcagccggtctctgctccattctggcggctatgctgatactgaggagcctggtccggggcgcggccggcggcggaacctgtcctgaaggctgtcctgagcgcaagacttcgcgagcaccgctcgcatcttggccgccaacctggacgccagcatcgacccatgccaggacttatactcgttcgcctgcggcggctggctgcggcgccatgccatcctcgacgacaagctcacctacagcaccatcgcggccattgggtaacataacgaggagcgcctgcggcgcctgctggctcggcccaagggtggacccggcggcgctgcccagcactaggtgcgctccttcttccgcttgtgcctcgagatgcgcgagatcgaacgactgaacccgctgctcatgctggaggtcatcgaggactgcggaggctgagacctgg

SEQ ID NO: 84094 - DNA, 448 bp, Homo sapiens
tagtccagtgcggtggaattcaagaaatagaaaatttgaacaaaccaataatgaaaaggagattgaatcagtaatcggatacatcccaacgaggaaaagctcaggaccagatggcttcactggtgaattctaccacatacttaaagaagaatgaatgtcagttcttctcaaagtctttccaaaaattgaagtggagggaacacttcccagctgtattatgaggatatattataccctgatttaaaagccagacaaggacattacaagaaaagaaaattacaggccagtattcctgatgaacatagatgcaaaagctctcatcaaaatactagcaaactgaattcaacagcacactgaaaggttcagacactgtgattaattgggatttatcgctgggatgcaaggatggttctacacacacaagtcaataaatatgtatcacattaac

SEQ ID NO: 84095 - DNA, 443 bp, Homo sapiens
gtaccctgcgctaccgctcctgagttcacgggtccacccacgcgtccgtgaagccaaaatttggttctttacaaagatttttattactgacaaaccttcagccaccccaaataagaaatgtttgtgaggacatgactaccaatcttggagaaattaaaaggattgtaagagaatataatgaacaattgtacagcaacaaattggataatctaggtgaaatagacaaattcctacacaaatgaccagactgacccaatacaaaggaaatttcaatagactttcaataaataaagggatagagttagtaatcaacaacctcctaaaaaggaaaagtcccagaccagatggctttactggtgaattctaccaactattttaaaaaaataacatagaatccataagaaacgactaaagtaataaacaaattcagcaaagttgcacag

SEQ ID NO: 84096 - DNA, 230 bp, Homo sapiens
  misc_feature (1)...(230): n = a,t,c or g
tcccttccataacatanaagcacgggaacactatctatcacattctatgaggcccgcattatcctagtcaaaatcacataaagacaccaaggaaaggaaaacaatggaccagtatttttcatgagcataaatgtaagaattatcaacgaaatattagccaatcacagcagacagtgtgtacaaacattttataccatgaccaagtggaatttatttcaggtatgtatgac

SEQ ID NO: 84097 - DNA, 655 bp, Homo sapiens
ctcgaccagcgtggtggaattcgcacggctgaatgagcagagccggctgctggagcaggaacgctggcgggtgactgccgagcagtccaaggcggagtccatgcagcgcgccctagaggagcaaaggaaggtcacggcccagcagatggccatggaaagggcggagctggaacgggccaagagcgccttgctggaggagcagaagtctgtcatgctcaagtgcggggaggagcggcggcgcctggctgccgagtgggcggagttctccgcgcagcaaaagctgagtaaggagcgggccgagcgcgaggccgagcgggcattgcaggtggacacccagcgggagggcaccctcatcagcctggccaaggagcaggctgagctgaagatcagggccagcgagctccgggccgaggagaagcagctggcagcgggagagagcagccctggagcaggagcggcaggagctgcggctggagaaggagaggatcaacgccaccgccctgcgtgtcaagctccgcgccgaggaggtggagagcatgagcaaggtggcctccgagaagtacgaggagggggagcgggcattgcgcgaggcccagcaggtgcaggcagagcagcaggcccggttgcaggcggtgcagcaacagcaggagcggct

SEQ ID NO: 84098 - DNA, 467 bp, Homo sapiens
gtgggctcgccaggcttaaagcaaaacctccatcttgtctgtctccactctcatcccaggcaatcgcggtcatttccacagcctcaaccactgtctacctgggatgcctcccaagcccgggtcgccagcccaaacctgccttcctagccccagacccatctgtcctggcacacattgccccctgggtcccaacaacctcagccaatgagaccaatgccaacttcctgtccttgcctgacactgtcagccctgagatcagacttgaccattcacctccagtacctgataggtccgtcagtcctttggaacacatcccacgaacattccccaaaccaggcaccggactccacacatcaacaccgtcacgtgagtcaccagcatccctggcagggacccctgtcccagcctccaactcatctccttcctgtcccttgagttctgtgtcacattccagaggccacaagaag

SEQ ID NO: 84099 - DNA, 393 bp, Homo sapiens
aattcctcagctgcaggacacaaacaatctagggctgctgggctggagctgccggggccaggaggaaggtggggatgggggcatggcctggaggggcagctcctgggggcactcaccgtggaagggctctggcagagctgttctgtagcatcagtgacacctggcaactgcattcgccaacccggttcctgaagaattccaaagatcaataaagatcaagaggccctctgggcaaagggcctgttcagtgtggacttaatcacaggctgctggccagcggggaagatggaagtcgccggcttgactgagacattcaccccagccttagatttagggcaggaccctctcactgtgtggtcaccctttattttctcagctcttatttaaaaagaa

SEQ ID NO: 84100 - DNA, 419 bp, Homo sapiens
gtgtggtggaattcgttagctctccgttaaggtgtttgatcctgagttaatttttctatacagtattaggtaagggtgcaatttcattcttttgcatgtaaatttccaattttcctagcaccatttgttgaaaagactgccctttctccattgaatggtctcggcaccctcgtcaaaaatcccttatttctgggctttctattctaagccatttgtctatatgtctgtccctatgccagaactacactgttttaattactgtagacttgtagtaacttcaaagtcagaaagtgtgagtcctccaaatttcttcttctccttctccctcttattcttctccttccccttctccttcttcaagaatcttttggctattcggcgccccttgcaattacatatgaaaatgctgttggaatttt

SEQ ID NO: 84101 - DNA, 425 bp, Homo sapiens
cctggacagtgcggcggaattccccgcccgcagccggagagggtcgcccctcctgaaggttctgggcaggtgaaacgtttgaccatcgctgacagggggcaggatgcaaaagactcctgactttggatctcagatcaccctcggaagctccgattcggatccgcgtccacagacccggcgacctcagacagaccgggcgttcggggaagaggcggcggcagtgagcaccgcagtgaggaaaccaggctccggcgatccccaggccttacgcccgaccccagggcatttgggagcaggtctgcgtccgggaccagcacactctggacgggagctctgcctttctggggtcctccagctgaaggatgtgagttgcaagaaacccattctgtagacctcgaaatcagcggcgagccccaagcacttgg

SEQ ID NO: 84102 - DNA, 444 bp, Homo sapiens
  misc_feature (1)...(444): n = a,t,c or g
acattagcagngtttgaaactctagcacctctgnggacccaggntccatgatggcccccatggcctaaggatccaggtcacccctcacagacctagtttccaagccagcacctatacacccaatctccaagccaaccccagtggacccaggcttcaggccagtccccgtagccctaggtgccagccagtacccatgatcgcaggctctataccagcccttatagacccaggctccatgcctgcttcatcactggctagccccaggatccaggccagtcctgatgacaccagactccagttgacccaaggtcaagacccacccaagtagatcccagtgccaggccagcccctgtgggcctaggacccaggtctgcctccacagactcaggcttcaggcctgtcccagcaccaggtcagttgctgtggaccaggacacagacccat

SEQ ID NO: 84103 - DNA, 426 bp, Homo sapiens
gccttgagagtccccgccactgacccccttgctggggacctctcatctgggcattgactgtctcctctgtccccagtcccacccctgagctctcatgcattctcaagtctcctctcctgcttgtccggtgctgggctatggccatctcttctgtccccggccccaccccagagctctggtccactcttgggtctctccccttgtcctggtgctgggcagtggccatctcctctgtccccagccccacccccgagctctgatccactctcaggcctctccccctgtcctggtgctgggccgcggtcgtctcctttcggcatctgctccctgcagggccgtgccgctgtccccacgtcggctcacctggccacctcacctgcaggtaggaattctgataccaaccgggaggccctggaagaatttaag

SEQ ID NO: 84104 - DNA, 412 bp, Homo sapiens
ggtggaattcgcctcacttggctgccgccccgagaccccagcccgtacctggacttcgcgcccgccaagtgggcccagccctggctcctgcgccctgtggcggccacctccatcgccttgctttcccttcgggcactgggggtcgctcagggcgggacatgggtgaacggaagtggaagctgtgagcgtcgcagcccgaggcgccgaggcctgaggcgccgtcggggccaccgcgacgctcgcatggagagcgctgggcgctgggctgtgcaccgacggctaacctggacccacggtctctgcggggcgggagctttgcagaaccgactggccgactggggcgcgggaacatgaggcttggctaggagcccgctgcgggccaagcgcgcggtgcgcaggcatacccgggtcg

SEQ ID NO: 84105 - DNA, 449 bp, Homo sapiens
  misc_feature (1)...(449): n = a,t,c or g
tctctggaccagcttggnggaattccacgagcccacaggcagtcataggcctcataggccccancttcattctccagtttagagagagggcccctcctccctctgtgggaggctgaagcaggccttgaagccttgtccccttgaggacaagaaacccgaggactgcaaagtgcccccaaagcccttagaggctgaaggtgcccanctgcagggcggcagtaatgagtgggaagtggtggttcaagtggaggatgatggggatggcgattacatgactgagcctgangctgtgctgaccaggaggaagtcaaatgtaatccgaaagccctgngcagctgagccagccctgagcgcgggctccctancagnnnnncctgctgaaaacanaaaangnacnnnnnngccnnnnnnnaggccccacatgtcataaatagatcctcagaagaaaa

SEQ ID NO: 84106 - DNA, 426 bp, Homo sapiens
attacggccaggagatacaaccagcactttctgtggtactcctaattacattgctcctgaaattttaagaggagaagattatggtaataaataaattggtggtattattttagctattgctagatgggtggtaaaatgtggtaccaattgcattacagtacactaatgcattttgacgtgatcttattattataaggattcttgatcctgttaaaaactacatggagagtcccagactttgaaatcgagacagtgggaccttggcagtatttgggggtaccaagctgaataatattttattagtggcaaacactaaacagtagcaggcactattctaagcagtttacatatattaactaagttaatcctcttaacaaccctgtgaggtaagtactattaattctccttttacagttgaagaaactg

SEQ ID NO: 84107 - DNA, 417 bp, Homo sapiens
  misc_feature (1)...(417): n = a,t,c or g
gctggaattcgtggcccacaaggccatgatctgcccatgacctccctgacccctctcttacctctcccctcactcagctccaggcattctcccacctcagggcctttgcgcgggccgttcctgctgcctgggacaccctccagagcccctcccggctccctctcctccttcaggtgtcacctctgtggggcctttgctaactcactctactcacattcctgccaccttcctggcagaatgcccctggcccctcacccccacctatctccagtgtctgggccccctgctagaatggcactgacaccagggcggggtccttttccggttttattcactgctccgtccccagcacctagcgcaggactggcacctcctcagtcctttgggcctatctgttgaagtggaggaagagaangg

SEQ ID NO: 84108 - DNA, 430 bp, Homo sapiens
gttccagcgtgctggaattcggcgcgccggattctctgccaggttttacagcctccctcgccttgggaccgccgcggaggacccgttcccgccacttcggacctcgcgagcggggctgagctgcttgggtcggggacaccaccagcctctggagaaacggcccgaagcaccccgaagaagagggggtcccagtcccctgcccctcccttgtgcgcacccccacccccagcttgcctggaacctgactccacacctttgtcgaccgggacagggactgggggttgcaccccagatcagaaagtcagaggtggccctccgaatcggcgcggacttccgaggaacctcagccaattctcgacccccttaccacctgcaaggccttaggaatcggctccagaaagctcgagcttatctgcgtgtttcgttttaa

SEQ ID NO: 84109 - DNA, 615 bp, Homo sapiens
tgttgacggaatgcatatattcttttgaaaagggtctaccagcttctctccagccttccccagatttctgccacagtcagccccaggcacccaggacaaccctagacactcacaggcctcacgagactatctccctatgacctgtacctatacagggatggctcccacgcatccctcagtgaccccaaacctatctccacttacactcaggcactcccagggcctgacagctactccccattatcgtcgttcagttcgaagccctggccaatctattagcccacatgacgcagttacctggccatttctccacggttcccgtgagggccccacacccaggcgcacaagaacccctcctgcattccgtcctcacacgcaggcctgtccatctacttgctactgtcacactcttgccagcagaagaggcccctgtaatggccgatatcaccacccagtctatcctcaccccacagctgtgcagcgggaacctcctgcctgctgacgtggctgctggcgcccgtgccagcgtgaaccccaaacctgtccgtgtttctgcgggcgacgccaccggggacatccctagcttgaccccctttcctggcagtgacactgtcg

SEQ ID NO: 84110 - DNA, 446 bp, Homo sapiens
gagtccattagtccagtgcggtggaattcgtggagttagaggcacctgctgctgtcactgagtgcagtgactgggaagtgctcatttgctcctgactgtggagagctaaagctgccaggagctgcctgcgcttgccaagtggttgcagatgtttcctccctactgctctgactttgccagatgcgggagctgcggtgtgagaacgtcgccacctgcctgggcattttcgtgatctctggggaacctgcttcggaaagaggtcctgcacctagactggaccttcaaggcctccctgctgctggatttgatctgcatgagatccctccctgggcctggcactgcagagctgctatggacagctcctgagctgctgccggggcctgggcgccctgggcggcgcaccctcacaggggacatcttcagcactggcatcatcctgcaggagg

SEQ ID NO: 84111 - DNA, 461 bp, Homo sapiens
  misc_feature (1)...(461): n = a,t,c or g
tactcagtgcggtgaattcgatttgcacatatttcctctcattctttgtctttctactttcttgacagtgtcctttcacatgcaaagtttttagttttgataaagtccagttatctgttttttcttttgttactgtgctttgtttttggtattatatctaagaaactgttgagtaatccaacatcacaaagatatacatctgtgttttcttttataagttttataacattgtctataaacattaaggtctttattccattttgagttagttttagcatatggtgtgtggtagggatctgaattcattcttttgcatgtggatatccagttgtctcagcactatttgttgaaaaggcaattctttttccatttaacgtacatttgttgaaaatcaatgactattgatttccactgaaggcacactgggtgaaaatcaacgactattgattatngccagtang

SEQ ID NO: 84112 - DNA, 640 bp, Homo sapiens
gcggccgcgcgaaccttctggtacaagctgttcccgtgcagaggatctgggggggctgcaaaagctgcagaacagaaaaggcaagtcgggggcagggctgagcctggcaccgctgctccctgtggagcacggtgccctgggcccactccagggtggcaagttcctgccaccaaggcccttctgtcacagccaatgggatgccctcctccaggaccctgcagaggccacacctgagcagaccctcagctccccctcacccatgccccacagaggcgagactctctccacagcaaccacctcgtctcccccagggtcggcaacccctggtgcctgagcgggtgtggcctccccgaagcccactctccctgccccaggtgcaccagggacccctcagaggcttccggggcctggagggagaaaccagcgttcttatcacagcctgaaagctccacctagccccacccaaccccagtctcagccgcctcgagctcccctgctctgagagttcctgtcatgatgaactggggcttctttccttaaatcttccggccccagggccccccaagcctacacctggggccgcggcatcctttcagggctcaggctgagagctgtgcctctgagaacccctcgacccggg

SEQ ID NO: 84113 - DNA, 553 bp, Homo sapiens
agggtagatttttcgggaaatccgcggggacccacgcgtccgctggagcattggggacgataattttattatagttgtttaattcatcttcaatactgtgggaggctttgatgaaatcagtcctgctgggattcaggtttcatttgtgcaatacagcgatgaggtcaagtctgagttcaagctgaacacgtacaatgacaatgacccatcaaccccacttcacttctttcaggatgctgtagggaggaaaggtgcttccatgacctaacctcggcctctcctttcttccctcttcactcacacacatagagctaggcctttatactactgattttgaaggacagttttcaatgtctaatcatctgtttaggtgtgcagtggttgaaaaaagaaagctgagtgctagaaggaacatgaacctcaaccgttacttattgttctcattgtaagatattttaaccctgtataaatgcaacttttcctttagcttaatggcctggggtggaatattaaaaatatatattaaaaatacagtaaaaatccagaaaaatgt

SEQ ID NO: 84114 - DNA, 406 bp, Homo sapiens
ctgctgaccgggacgctggtgaaatgggagtttcggagccgctgtgggctcctgtccaggctgggtcagtgctcggatggggcctggcatagggcgggcgtgaacaaaagccagcctctggtctggggctggtgtgtgggcctctgggccctggtgatgtctgagttcagggtgcagtttgctcgtgggtccccagaagtgggagcgagtgagatgtgttggcctgggatgagaggactggggctgtcctggtcggccctgccctgttctatggaccgggaggaggtgaggctcagccgccagacaccccaggcttttgaggcccagatagggccggcccagaacacaggcccagcatggctgctcccagcctcagtcttatctgttggcgcctgggagggcccaa

SEQ ID NO: 84115 - DNA, 366 bp, Homo sapiens
tgaaggatgcataggagtttgacaggcacaagctccctgctgttccccctgggttaagggctccggtcagttcttgcagggatggtcacctcccagagtgggcccacctccttgtccttatctctgcttcccagccttccattatgagagcaacaatgatctggagaaacaggagttcgagaaggccctggagacgattgctgtggccttcagtagcacgtgagcacgggagcctgtggggcagggcaagggagcgtggggggcccgggtgtctctcgatggtgacctcgctggccctgcagagtgtccgagttcctcatgggtgaagtggacagcagcaccctcctagcagtgcctcctggggac

SEQ ID NO: 84116 - DNA, 454 bp, Homo sapiens
caccgacttcccgggtcgaggcgcgtgtggttccgagaacccccagcggtgaccgtccactacattgctgacaagaacgccacagccactgtcaggggtgagttctgagcccacatccctgtgccccactgccccctccgtgggtgcacccaccctcacaccctccccgagggaggtgtcacagggccagggcctctaaggagtccccagttggggagctcttgttgcaaggagaccccaagaggctagggaggggccatgggcatggacagggtggaatctccccatcccttccccaccagccccagtcctccagggaagggtcgcgctggctggcgctgaccctgcctgccctctggccgcagtgcccggccggcccaggccgcacggcggctccctgctcctgcagctgtgtgtgtgcgtcctgctcgtgctgggcctgagcctatactgg

SEQ ID NO: 84117 - DNA, 451 bp, Homo sapiens
ggtaccatccggaattcccgggtcgagaatggcctcttgctggtctcccagccaccaccctgtcccaccccacggtggggatggtgtggatgcctagcagcgcggctgtgggcccacccatccttatgggcagtggggagcacctcagcccgtgtccctaccttggtgtagaggaggggacggcagagaagcagggttcagttaggggggaagtggtggccctgccggaggggccgttccctgtgtgcctggcccccagatcctctcccctcccggagcccagggcacaggcataggctctctgagtgtcccacagcccctgggggaagggaactgcacccccaaccgtgccctccatccgcagatggaacgagaagctccgggagccagtgcccagcgtctcatctgtctgggcacccagcccaggtgagggcctggctccaccgtccgc

SEQ ID NO: 84118 - DNA, 658 bp, Homo sapiens
agttggccctaactggagttgattatagaaatctagcagtaatggaggatgctgccattgttcagctgcgctatgcgtgcttatgggcatgggaaaggataaatgttacaggcgaaaaacatccttctgtgaggtctatacgtcaaggacctaaagagaccatatattgattttattgctcagctccaagaggctgtgtataaagccattactaataaaacagcacaggatgttgtaatacagcttcctgcatacgatactgctaatgcagagtgtcaaactgctatttgacccctgagagggaaggcttatttagctgaatatattaaggcttacgatggcattggaggtaacttatataaggctactcttttagatcagactatggctggtttaagagtaggaaagaatatgccccatttctcaggatcttgctttaattgtgggcaatttggacacacaagaaaggaatgtagaaaaggaaatcaaaaggcaaaaactaccatcaatcaacagaaaagtcccggtgtatgtccccggtgtaagaaaggcaatcactgggaaagtcagtgtcattataaatttagcaaagatggacaacctctttcgggaaatgggaagaggggcccgcctcgtgccgaattcctgcagcgcagat

SEQ ID NO: 84119 - DNA, 376 bp, Homo sapiens
actgcgagctgggtgagtgtgcggggccagcgggaccccagcatcccctcagggaggtgccctgggctgccatagggctgggcaaggctggtgccgaaggactgcccaccctgccctgtccccagcctgtccccctgggcgctacggagccgcctgccatctggagtgctcctgccacaacaacagcacgtgtgagcctgccacgggcacctgccgctgcggccccggcttctatggccaggcctgcgagcaccgtgagttgggggcctgtgcagctgggctggggcccctttgagccactgtccactcctcccgtgtgggtgatccaggcagcagtgaagtggtggggaggtggggagccagcagcagtggggag

SEQ ID NO: 84120 - DNA, 396 bp, Homo sapiens
  misc_feature (1)...(396): n = a,t,c or g
cccgctcgcgccctcggagacacattcccgaacctatttgtcttctttcttcttccccactacgctcacactcttctccaggttcccccattaagggcagctctctacctggcgctctcgcggttccttaactgctcacccccatctccctttagtgtggttctccccacccgtactacaacttccctcccgctactcgacacgcctccttccccaggcgcgcgctctccacctggtgcgtacggagatcgaaccctctcctccgaacccctcctttcgccttccccgcctcctcccctccgcctcgagcaccgcgcgcgcgcattcggtcccagccaccgctaacactacaggctgcttacccccgccccctccaccctacccctggcggcctan

SEQ ID NO: 84121 - DNA, 481 bp, Homo sapiens
cggaaccctgggtcgacccacgcgtccgcggaactttttaatcttaagagcctagagtccgtttaacactgtcacctggacagttctttgcggtgaatagaagtggagcatccaggcctccccgtgccgtgggaagcacgccgccagctccgcacagtcaagtgatgtttgtgtaaccaccgactatacccctaggatccccaaggaaggagccacccctcggccagtcaccatgtctgcggtgctcctctcacgcccttgtccccttgggctcgggcatcacccctgctctcccctcagacctgggagtcacccctgcactccccgcaggcccaggagtcatccctgcgctccccacggctccgacgtcacccctgcattccccgcaggcctgggtgtcacccctgcactccccacaggcccaggcgtcacccctgcgctccccacggccccaacgtcacccctgcgctccccgcggccg

SEQ ID NO: 84122 - DNA, 409 bp, Homo sapiens
gatcctggaggaccctggggtccaggctctccaggggtccccataccacctggcattccaggatgacccatcgaccccttgggtccaggcacgcctgggggtcccatcatgccacgatcacccttttctcccacgattcctggctccccgaccagaccaatgaatcccataaatccctgctctcccacaggccccggccgaccaggatcccctggttcccccttcacgccatccaggccgggcctcccaggaaaccccttcctgccaggctgaccctccaagccaggggcccctggcggccccatgggtccctcatctccccttcatgccttctgggccattgacgccaggggggccgatgtctcctgggaatccctctggtccagggggccctggaaacccaatggat

SEQ ID NO: 84123 - DNA, 162 bp, Homo sapiens
ttttttttttttctgaaaaagtctcgctgggtcacccaggctggagtgcaggggggcaatctcactgcatcctccgcctcccgggttcaagcgattctcccgccttagcctcctgagtaactgggattacaggcaaccgcggctggctaaattttgtaattg

SEQ ID NO: 84124 - DNA, 404 bp, Homo sapiens
cgccccgaaacagccagtgcacatgcggctcctccaagggtcccagaggacttggctgttagaggaggaagaggaatggcaactcgagaggtccccgtgaggctcagggacccccaggattgccctgacagtctccttctaccctgtttattttcttttcaggtttttgctttttgttctgcagcagatcataccaacagaatctacccactgcgcggacagcgtaaggaacaagccacggccgggcgcacccagcgctccccggaaacctgcctgctcctctctagggattgctttgcagaagggattctgagggtggggaggagggcggaggaggacagagttttctcgtcaaagtgaggcctgctacagcacagcccgcacgacgctttccgtcacactca

SEQ ID NO: 84125 - DNA, 1036 bp, Homo sapiens
gctactgtaggaggaagagagatttatgtaaagggctttgtccactataaagtccgggctctgtttccctgtgagaagccgcctcggcccaccgagatgtcccggcaccatagccgcttcgaaagagattaccgggtgggctgggaccgccgcgaatggagcgtcaacgggacgcatgggaccaccagcatctgcagtgtcacctcgggggccggtggcggcacagccagcagcctcagcgtccggcccggcctcctgccgctgcccgtggtgccctcccggctgcccaccccggctacagctcctgctccctgcaccaccggcagcagcgaggccatcaccagcctcgtggccagctctgcgtctgcggtcaccaccaaggctcccggcatctccaaaggggacagtcagtcccagggactggcgaccagcatccggtgggggcagacgcctatcaatcagtccacaccctgggacactgatgagccaccctccaaacagatgagagagagtgacaatccaggcacagggccatgggtgaccacggtggccgccgggaaccagcccaccctgatcgcacactcctatggagtggcccagcctcccaccttcagcccggctgtgaacgtccaggccccggtcattggggtgaccccctcactgcctccccacgtggggccccagctcccgctgatgccaggccactactcgctccctcagccgccctctcagccactgagcagcgtggtggtcaacatgcctgcccaggccctgtatgccagccctcagcccctggccgtgtccacactgcccggtgtggggcaggtggcccgcccaggacccaccgctgtgggcaacggccacatggcagggcccctgctgcctccaccgccgccagcccagccgtccgccactctccccagtggtgcccctgccaccaatgggccccccacaaccgactcggcccacgggctgcagatgctgcggaccattggcgtggggaagtatgagttcaccgacccggggcaccccagag

SEQ ID NO: 84126 - DNA, 592 bp, Homo sapiens
ttttttttttttggtccagagaagtttaatgatgactgaagctttgaccacattgaggaaactcaaggtttctaaaatagattctttgataactagttaggcctgagtgtccaaagaacttttgatattactgctatattagtagagtttatttgcggtatgaattctttgatgtctaataagagctgaacttactcggaaaggccttccacactcatcacattcatagggtttttcacctgtgtggattctctgatgctgaataagacctgtgcgcccactgaagtctttcccacattctttacatttatagggttttactcccgtgtgtactctatgatgtccaatgagatgtgagcgctgaatgaaggcttttccacactcatcacatttatagggcttctctcccgtgtgagttctcctgtgtttactaaggtctgagctatgactgaaacttttcccacattcatcacatttatatcgtcttctttccctctgttgccattctgatctgccctcattttcaataatatctttggacttaggatgctgaggagtatctttgttcagtctgtcatttatctccccaagg

SEQ ID NO: 84127 - DNA, 408 bp, Homo sapiens
gccgcccttctccctgccccagaggatttgtggagcctgggagaccttctctacaccatggtgacaagggcttgccatttgtcagactgacctttgtggaactgcaagacgagatatgttacgggaattacaaaatcccattcttcatttcctcagaactagaaagcctcatgaacaaactgcttaccctcaaccccaggaagaggaacacaataggctagattatggggcatccatgagtcaataacgaccaggggatactaaggccacaccaggagccactccctcattaccaagtccacggaaagacacagctcatggtgtccatggggttcaaggcagaccacatccaggagtccttgttgggaaaacaaatatgactacaccatggccacatacctagtcctg

SEQ ID NO: 84128 - DNA, 410 bp, Homo sapiens
  misc_feature (1)...(410): n = a,t,c or g
tctgcgcaggatcggagctgtgggccaagttgtgtctaggacggcgtggacggccctttggctggccgtggttgctccaggcagcctctggagtgttctggtggctgcggattggatggtaccagtttgttactttgatttcttggctgaatgcgcttcttcttaccaggtaaggaaacggatatcatgtcagcgtggtgctttaaggaaccaattttgtgccaattgcaggctctcatttgatttgatattttgtaaggatttagcttatatttacatagtgtttgtatattttacaaaagtgcttttatattcttatttttcaaaccaacctgtgagataagaaaagcagatatcattaacgaaaacaaatgtgcatgaggtgaggcaactgggatggcctgggcagn

SEQ ID NO: 84129 - DNA, 444 bp, Homo sapiens
  misc_feature (1)...(444): n = a,t,c or g
ggtccggaattcacgcgtcgaggaccaggcccggcccgaggggtgggggcccgcgggcgactcgaggtgctggaacgcgggcgcttaccgaggcgagaacctagggggtctccccgcgtggaaaccccgcccctccctcggccttggacacagtcggcgctcaataaatgaatcgaagtttcttcctggacggcgaccctgggctttcgggagaaagccagaggggcagggttctggaaggttccctggcggctggggtgcggtgcgggctgaaatccgagcaggagctgggcgcggccctcggggaccgactatgggggacggcgccgcgggagtggggcaagtgcgggcctggacccttggggccaccgcgtcagcagtcggcggtgccgtgggagggacggtgcccgcccgctgtgaagggcggtggcccttctagggtcn

SEQ ID NO: 84130 - DNA, 411 bp, Homo sapiens
cccgggtcgaggatgagacccaagcacctccaaggaatagcacccgaggtcttcaggacaccgaccggtagccatggccagatgcccggccaaccccttcagcgtggccacgccctggatattcgacctcccctgaggccccaccccctgatatcaggccacgccctccgaggggaccggtggcaaactccagccctcgctctagggcccgccctttgcggctttgtccctgcccactgggtcctcacagtgcctccaccccagaggcccagcatcccctcccgttctgcagacacttgtccagcgtcccgctgagctcggcagtgtggctagtttgtgtggccctgccccttgtgcccagccttcgcaggccacaccctgaagccactctccaaccgctcagccagggtg

SEQ ID NO: 84131 - DNA, 380 bp, Homo sapiens
caaaaagccacaaggacaaggaatgttacttatactctagctttagcataaaaactgaaatacttgaaaaatacaacaaaatgtgtgccagatatgtttagtgaaacctataaaatgttgccgagagaaattgaagaacaacttcataattggaaagatataccatgcttgtggatccaaagactcagtattgttaccatgtaaattctccccaaattgtatagattcaaaacaatacagtcaaaatcccagaagtctttttgttattgaaattgacaagctaaaactgaaatggaaacacatcagacctgaaaaagtcaaagcaattttttaaaagaagaacaaagttgcaggacttacactccttattttcaaacttg

SEQ ID NO: 84132 - DNA, 408 bp, Homo sapiens
  misc_feature (1)...(408): n = a,t,c or g
cacaatttaaaatgcaatactatttacagctgctaatattgacatgcatgtaaacctaacaaaatacgtacaagatgcgcactgcaaatgacagaatgctgatgaaggaaatcaaagatttaataaatggagaggcatactgtgttcatgcattacaaacctcaacataagaaagatgtcaactctccccaaattggtacacagacttcatgcaattcctgtcaaactttcagcaagatttttgtagatatagacaagattattctaaaatgtatgtggaaaggccgaggaactagaatagctaacacaatttttaaaaagaacaaggtgggaggagtcatcttacctgattttaagacttattatatcattttaaagactgtattgatgttggtggaggaatagatn

SEQ ID NO: 84133 - DNA, 430 bp, Homo sapiens
aaatttttattttaaaaaagtattggaggtatagagagactttcctcatcctatgtcagagcatgatgcagaactgtcatgagtaaaatagtacagcattagtgcagaagagacacaggttatggtgtataatcagagctcagaaacggaccagattgactttaacatttaaaggcagttaatcataggagaaaacattgttttaaaaatagaagatataaaactacacaatatttttcaaagaaactaaagaagatctaaataaatggaaagctgtaagacttattattactagtaacacaatactcttgaaatttatctacaaattcaatgtgagcgctatcaaaattttatctggtttctttgcagacattgacagtctgatcctaaaattcatgtggatatagaagagacacagaatatccataac

SEQ ID NO: 84134 - DNA, 398 bp, Homo sapiens
cgaagaggaaacggcggcggcgcccgggagtcgttgaagccctccgcgctgggggccgccgggaaccattctccccaagcccagaggcaggacttcgcagcaggatggggtggagagcccgcgggagtgacccccacgagagtgaacgcccctcacactcccaccatcgccggctggccccggagcgggaggcccgcagccagatcttcagccaagggaccacgattcgccggggggctgggggtttgctgcccaggaccgtgctgcaccagggccctgagccgtagggggatggggggaggggcggggagatcccggcaccaaacccttctgcgccgctcgctctggtgtatcctacatgcaggggtgactggggctttcccccaagactcagggga

SEQ ID NO: 84135 - DNA, 386 bp, Homo sapiens
ctacattgtaaagctcatcatctgcaatgttactggttttgcccacaggcgtccccagggagagagctatgaccaggcgatccgcaatgatgacacagggctgtggcagagccccttctgttagcatgacaatttccctgatctaagcgaggtgtggaaccactttgacagcggtttgtgcccaggccaggccatcggtgtcaaaacacggctagacaatgtgtgtgaccggcttcatccccaccaaattcctcagtgacacagtggtcaagctgtctcaagaacgagtgaaggtgggaatgactgttcactgccgcatcatgaatattgacattgagaagttcagtgcagacctgacctgcctgacctcagacctcatggacagg

SEQ ID NO: 84136 - DNA, 4055 bp, Homo sapiens
atgacaggatcaaattcacacataacaatattaactttaaatataaatggactaaattctgcaattaaaagacacagacgggcaagttggataaagagtcaagacccatcagtgtgctgtattcaggaaacccatctcacgtgcagagacacacataggctcaaaataaaaggatggaggaagatctaccaagcaaatggaaaacaaaaaaaaggcaggggttgcaatcctagtctctgataaaacagactttaaaccaacaaagatcaaaagagacaaagaaggccactgcataaaggtaaagggatcaattcaacaagaggagctaactatcctaaatatttatgcacccaatacaggagcaccaagattcataaagcaagtcctgagtgacctacaaagagacttagactcccacacattaataatgggagactttaacaccccactgtcaacattagacagatcaacgagacagaaagtcaacacggatacccaggaattgaactcagctctgcaccaagcggacctaatagacatctacagaactctccaccccaaatcaacagaatatacatttttttcagcaccacaccacacctattccaaaattgaccacatagttggaagtaaagctctcctcagcaaatgtaaaagaacagaaattataacaaaccatctctcagaccacagtgcaatcaaactagaactcaggattaagaatctcactcaaagccgctcaactacatggaaactgaacaacctgctcctgaatgactacttgggtacataacgaaatgaaggcagaaataaagatgttctttgaaaccaacgagaacaaagacacgacataccagaatctctgggacgcattcaaagcagtgtgtagagggaaatttctagcactaaatgcccacaagagaaagcaggaaaagatccaaaattgacactctaacatcacaattaaaagaactagaaaagcaagagcaaacacattcaaaagctagcagaaggcaagaaataactaaaatcagagcagaactgaaggaaatagagacaaaagaaaaccctttcaaaaaattaatgaattccaggagctggttttttcaaaagatcaacaaaattgatagaccgctagcaagactaataaagaagaaaagagagaagaatcaaatagacgcaataaaaaatgataaaggggatatcaccaccgatcccacagaaatacaaactaccatcagagaatactacaaacacctctacgcaaataaactagaaaatctagaagaaatggataaattcctggacacatacaccctcccaagactaaaccaggaaaaagttgaatctctgaatagaccaataacaggagctgaaattgtggcaataatcaatagcttaccaaccaaaaagagtccaggaccagatggattcacagccgaattctaccagaagtacaaggaggaactggtaccattccttctgaaactattccaatcaataggaaaagagggaatcctccctaactcattttatgaggccagcatcatcctgataccaaagccgggcagagacacaaccaaaaaagagaattttagaccaatatccttgatgaacattgatgcaaaaatcctcaataaaatactggcaaaccaaatccagcagcacatcaaaaagcttatccagcatgatcaagtgggcttcatccctgggatgcaaggctggttcaatatatgcaaatgcaaggctggttcaatatatgcaaatcaagtgggcttcatccctgggatggaaggctggttcaatatatgcaaatcaatacatccctgggatgcaaggctggttcaatatatgcaaatcaataagcaaatcaataaatgtaatccagcatataaaccaaagacaaaaaccacatgattatctcaatagatgcagaaaaggcctttgacaaaattcgacaacccttcatgctaaaaactttcaataaattaggtattgatgggacgtatctcaaaataataagagctatctatgacaaacccacagccaatatcatcctgaatgggcaaaaactggaagcattccctttgaaaaccggcacaagacaaggatgccttctctcacctcaccactcctattcaacatagtattctgccccatagtgttctggccagggcaatcaggcaagagaaggaaataaagggtattcaattaggaaaagaggaagtcaaattgtccctgtttgcagacgacatgattgtttatctagaaaaccccatcgtctcagcccaaaatctccttaagctgataagcaacttcagcaaagtctcagtataaatctcaggatacaaaatcaatgtacaaaaaatcacaagcattcttatacaccaacaatagacagacaaacagagagccaaatcatgagtgaactcccattcacaattgcttcaaagagagtaaaatacctaggaatccaacttacaagggatgtgaaggacctcttcaaggagaactacaaaccactgctcaaggaaataaaagaggatacaaacaaatggaagaacattttcattccatgcttatgggtaggaagaatcaatatcgtgaaaatggccatactgcccaagggaatttatagattcaatgccatccccatcaagctaccaatgactttcttcacagaattggaaaaaaactactttaaaggttcatatggaaccaaaaaaagagcctggtttcgccaaatcaatcttaagccaaaagaacaaagctggaggcatcacactacctgacttcaaactatactacaaggctacagtaaccaaaacagcatggcactggtaccaaaacagcatggtactggtaccaaaacagagatatagatcaatggaacagaacagagccctcagaaataatgccgcatatctacaactatctgatctttgacaaacctgagaaaaaacaagcaatggggaaaaggattccctatttaataaatggtgctgggaaaactggctagccatatgtagaaagctgaaactggatcccttccttacaccttatacaaaaatcaattcaagatggattaaaaaaaaagatttaaacgttagacctaaaaccataaaaaccctagaagaaaacctaggcattaccattcaggacataggcgtgggcaaggacttcatgtccaaaacaccaaaagcaatggcaacaaaagccaaaattgacaaatgggatctaattaaactaaagagcttctgcacatctgcacagcaaaagaaactaccatcagagtgaacaggcaacctacaaaatgggagaaaattttcacaacctactcatctgacaaagggctaatatccagaatctacaatgaactcaaacaaatctacaagaaaaaaaaaaaaacaaccccatcaaaaagtgggcaaaggacatgaacagacacttctcaaaagaacacatttatgcagccgaaaaaacacatgaaaaaaatgctcatcatcactggccatcagagaaatgcaaatcaaaaccactatgagatatcatctcacaccagttagaatggcaatcatgaaaaaagtcaggaaacaacagtgagaccctgcctcaaaaaaacaaaacaagaaacaaaaatcacatgatgatctcaatagatgcagcaaagagcatttgacaaaatccagcatccctttatgattaaagctctcagcaaaattggcatacaaggagcatacctcaaggtaataacaaccatctatgacaaacccatagccaacataatactgaatggagaaaagctgaaagcattccctctgagaactggaacaagacaaggatgccttctcttaccactcctattcagcatagtattggaagttctgaccagggcaatcaggcaagagaaagaaataaagggaattcaaataggaagaaaagaagtcaaatcatctctgtttgcagatgatatgactgcatatttagaacaccccattgtctcagcccaaaaactccttaagctgataagcaacttcagcaaagtctcaggatag

SEQ ID NO: 84137 - DNA, 587 bp, Homo sapiens
  misc_feature (1)...(587): n = a,t,c or g
ttaaaaataataaactaggaagagaagggaactttttcagcctgattaagagcattatgaaaaacccatgcctaatatatggaatgctgaaaactaattcctccctcctaaggtcaggaacaagacaaggatgtttgctatatccacttacatttaatattatactggaggttgtagccagtgcaatgtgtcaagaaaaaaataaaaggcatccagattggcatggaagaagtaaaacaagctctatcttaaattactgatcttgtatgtaggaaatcctaaagaatccacaaataaagctattagaacaaatagacaagcacatttgcaggatacaagataaatactcaaaaatcctgtgttattctgtacattagcaatgaacaatccaaaaatgaaatcagaccaggcacagtggctcctgcctgtaatcccagcactttgggaggcgaggtaggtggatcacttgaggccaggagttcaataccagcctggccaacatggtgaaactccatctctactaaaaaatacaaaaaactagctgggcatggtgntgcggcacctgttaatcccagcttactagggag

SEQ ID NO: 84138 - DNA, 397 bp, Homo sapiens
cggacgcgtggggattgaaagacttagcattgttaagatggcagtactctccaaatttacctatacattcaacacaatccctaccaaaaccccaactacctttttgaaaaaattgacaagctaatctgaaagttcatgtgaaatttcaaggcatttagcattgccaaaacaatcttgaataagaacaaattggaggtgtcacatacgtgatttcaaaacttgcagtaaacccacaataatagtgtgctactgacataaagttagacttacaggtcaactgaatagagtcgagaatctaaaaataattcttatgattatggtcaattaaatttcagcaaggtggtgccaaaacaattcaatggagaaagaatagtcttttcagcaaatggtgctagaa

SEQ ID NO: 84139 - DNA, 857 bp, Homo sapiens
tttttttttaataaagagctgctgtttttattaacaaacttatctgtaggagctcgtccatggacaacatccagttcatacagatgcgtgcgcatttcgcagcagccatacacgcccaaagaggacgagactggatgtgattgagctgactggcatctttagatggatggtcctcagtccagtccttccattttacaggcgaggaggcggaagcttggggaggctaagcgcgctgagctggcggcggagcggagcttccactagggctcccagtttccccgcaccgcgcccgccgtcctccgggccacccatcccacccgaacgcgccaccgttctagcccgcgctccagcccgcgcgtcaccgacgcccgcggcctctcccaccctctaagttccaggaagctctcggcctctagctgaccgcgttgctgctgagcttccctggggagaaggcgccgaggtgcccggtgcgggccgaggcagggctgggcctcgcgggcagcaggcggaagaaggaagggcggtggggcaggtcccggctgcgcggggcagttgtgcgcacttgggttcttcacgcgggacacacgtggaacgccgacccctgcgcccctggccgctggcaactggcaaggccgggaacagaaagtgtagggacagaagagcgctggagtcttccccgggagggagcccggggctgcagcccaggggcggggagcggggcggggctgggaaagttgagtactggtcgctcagggccgggctccgccggagtgcccggcgcagaaaccgtaaaaggctggagcgggcggggtaggtgtggctctgtgtgcgtgacctgagccccggtcccagtccct

SEQ ID NO: 84140 - DNA, 712 bp, Homo sapiens
gaaaagaaagagagcccctcctatggtaaaaggaataggaaaaggccttcaaagatataaacgaagctctcatccaagccccggtgctaaggttgccagatattaaaaagccctttttttgtatgtgaataaacgaaagggaatggcagtcggagtcgtaactcagctgggttcttagcatcggccggtaacacacttatccaagagactggacttggtggccttaggttggccccactgcctcagggcgttggcagctactgcaatccttctaaaagatgccaacaagctagccctaggtcagaagttaatagttcgggtgccacatgctgtagtcaccttaatggagcaaagaggacatcattggctgtccaactctagaatgctaaagtatcaagggcttctgtgtaaaaatccccagataacactggagactgtaaataccttgaacccagttcccctgctgcctgtggaggaacccgactggaaggacgccaggaagatctcagagatatcctccttggagagcccagatgttgaatacttcactgatggtagcagtttcataacagatggggtacgatatgcagggtatgccgtagtgacccaacactcagcagttgaggctcaagccttaccttctgggacttctgctcagaaggctgaattaatagcattaaccggatcactgttattggacaaggggaagaaa

SEQ ID NO: 84141 - DNA, 410 bp, Homo sapiens
  misc_feature (1)...(410): n = a,t,c or g
caaggaggccagaaggatacccagatggggtatgtgttgtctccagtgtctgaacagatccaccagctgctgtgcttctattttatcagtgggagagccaggggctgtaacttctatttaaccttctccgtaatactctgttgattttatgctcagatgtccctgagaaactgtacttgttgggtgggtccttgaatcttatctggatttatggcccaactggtgttagtcctcgcattggtgatcgagcgaaaagccaaggccacttgttcttcagtgggatccacaaagaagatgccatctattanacctgacttgggcttgctgtanatcaagccctacccattgctgacaaatggcagggtcatgaaaggacccctgagggaagacggganaagtgtattacnagg

SEQ ID NO: 84142 - DNA, 410 bp, Homo sapiens
  misc_feature (1)...(410): n = a,t,c or g
actaggcccagcctcatggcctggaattccagtctgttatctggagcaaatcagcatttccgtccagcgttcctaggctcccttttatctgccccccacagcactgactgttactagcgtgagccgccacttctccccgttcagtgcaggctggctgtacggggttgattccttagacatataaaaatctggcaaaatcagaaaacagtcattctcacttcacacctgatagaatagccattgtcaaaaacacaagagacagccactgttggcgagggtgttgagaagagggagccccagcacgctgcaccgttggtaggaatgtaggttggtacagccatgatggaaaacaatatggaaattcctaaagaaataaaactagaactactatatgactcagcagtccttcn

SEQ ID NO: 84143 - DNA, 522 bp, Homo sapiens
cgggcccagcctccagttccggagaagatgacgatgaggaccgcgcctgcggcttctgccagagtacgacggggcacgagccggagatggtggagcttgtgaacatcgagcctgtgtgcgtgcggggcggcctctacgaggtggatgtgacccaaggagagtgctacccggtgtactggaaccaggctgataaaataccagtaatgcgtggacagtggtttattgacggcacttggcagcctctagaagaggaagaaagtaatttaattgagcaagaacatctcaattgttttaggggccagcagatgcaggaaaatttcgatattgaagtgtcaaaatccatagatggaaaagatgctgttcatagtttcaagttgagtcgaaaccatgtggactggcacaatttggatgaaggtatatctttataggtgatgcaacaacatcttaaatttgcaagacagttccccaaaaacttggatttctaagcataagtgtttgcaccgacttatagagggtttttag

SEQ ID NO: 84144 - DNA, 396 bp, Homo sapiens
aaaaaaagagtgccattctggcctgggagcagctttcaggccagaatggcactctctattctaaacaccatcccacccctcagccaactccatcacggtggagatgtacagcgatgaggagttaagcatactgctggggccagatgagcggcttctggaaaaggacgacagcgttattgtggaagaatcattgactgagcccctgggctactgtgatgggagggggccagagcctcactcccctgggggcatacggctgcccaatggcaagcttaagtgtgacgtctgcggcatggtctgtattggacccaacgtgctcatggttgcacaagctgcagacacactggtgaaaggcccttccattgcaaccagtgtggggcctgcttcacccagaag

SEQ ID NO: 84145 - DNA, 393 bp, Homo sapiens
cccctctgtgtgggcattgtcctcccatatgtctggccccatcctggaccagatgctcctgagggcaaagccccaccctgacaccccttcaccagcccaggaacctggatctcagaagggatgttggggcaccccaggagcccactgggctggtgggtaacaggatccctagggccttctgccccgccctcctgccatgaatcagcagctcagccgctcaagggtggtagtagctttacacctgggcttgggccgtgctccacggcattcaccagctcgtgaccagtgagcggggcagcccagggccacccaaaccacagctgcctgtggcccataccctttgtgccctgggctgcctgtggcactccatccacctcttccaggaagcccagc

SEQ ID NO: 84146 - DNA, 465 bp, Homo sapiens
gtagggtcgacccacgcgtccgatatgggcgccggcgcggagcgccgcggggcaacgcggtgtctatcatggctgagctgcagcagctccgggggcaggaggcggaggggtccatggtgaagagtctggaaagagagaacatccggaagatgcaggtagcggggctggggccgaaccaggacccccttctcagcgggtgggtgccgggcccttccctcagccaccacgcgacgccttgcactgcagccgcgtacccgcagaccgggtgtgggcggccctggggtcgccggggcggcctcggacaggacttcggatgctttggcggatcggatgaaatacgtgtgcccttgccgtgcgcgaggcgtgtttccgccccttccagcctggggcaggagcgtcctcggcggcaggtgggaagcccctggtggcaggcgctcgccccaccaactttccctcttacgcggg

SEQ ID NO: 84147 - DNA, 392 bp, Homo sapiens
ctataaccaaagtgcttgctctgggggaacctgcaagcatcactgctgttcctcaggaaagaaggctacttgagcatttaatttacatagtaggcctcatccaagcagagggatggggcattctgacatacatataaatcatgtcttagttccagatcccccaacttatatttcaaaggttgaaaagaggctttttgctggatactctctgctattcctgtcacgggtgctgttattcttgtgctctgtgcttctggggtgttaagaattgagtatgaaacccctgtatcaaccaggaaattaataagtttgctttccactgtcaataatatccagagcccttctggggaagtgttaattggttttgtaagacctaagggagcccatgggca

SEQ ID NO: 84148 - DNA, 707 bp, Homo sapiens
  misc_feature (1)...(707): n = a,t,c or g
aaaatattaatgaaggtaacaacgctgctagcacatcgaccttggctgatcacaaaagagcacattcagaaacttgtcaaaactggagaaaataattggtctctgcctgaactggtacatgctgaggacctcctggcacattatcatgctttggcaagctttgtttttggtagtggtatcaatccagagagagatccagaaatctccaatggattcaggctaatatcagtcaacaatttctgcgtttgtgatcttgctaatgacaacaacatagagaatgcatctctttcaggcagcaactttgggattgtggattctctaagtgagctagaggccttaatggaaaggatgaaaagacttcaagaagaaagggaagatgaagaggcgtctcaagaagaaatgagcactcgttttgaaaaggagaagaaagaaagtctttttgtggtctctggagatacttttcattcatttcctcattcaggncttttgaaatattaaaaatatactttggatttcagnctctaccttcttggaactttaagctgggactacagccttcaaaagtgaattttgactagnaagcttggacttagcccaaaattatgttctaattttaatagaagaggctattccagggaataatgtcagtatccatccatatacccctccgcatacatatatattcccatatttcccccctatatata

SEQ ID NO: 84149 - DNA, 513 bp, Homo sapiens
attcagacggactgaagccactcaaagtatgatctccaatcatagcagaattaaaaatcaccaacaggaagaaattgggaaatcttcaatatttggaatttaagaacacatttaaataacccaagagtcaaagaaacaatcatgaaagacattagaatatatttaaactaaatgaaaacaaaatcataacgcatcgcaatttatggtgtgaagctaaaaaactgcttagcaggaaatgtatagctttaaatgcctatattagaaaagaggtttcaaatcaatcatctaagcttccgccttaagaaacaagaaaatgaaaagtgaattacagccaaagtaagaagaaggaatggaataataaagatcagagcagaaattaattaaatgagaataatggagaaaatcaataaaactaactaaaagctgggatcttaaaaagataaaatccataagcctatacctaggctgaccaagaaaaagggaagatacaaaatccccaaatcagaaataaag

SEQ ID NO: 84150 - DNA, 451 bp, Homo sapiens
ccacgcgtccggaactttggcaagctgattctaactgcgacttggaagtgcaaaaagccaagaattggcaatattcttgaagaagaacaaggtgggagaacttgctgtaccaaacatcagtacttcttccaaggcagtggtcattagggcaatgtggtattgacacagggagagacaaataggccaatgggacaggattgagcattgggaaacagcccacacaaatatggaagcttgctgtgtatcacaggtggcctgcacatcctgggaagagcatggacttttcaatcaaatgttcaggagcagttggatacccacactggaaaaacattaagttggacccttaattacctcacatcatataccaaaaattcattcttgtcattctaggggattgaagacctaactatgaaaagcataactataaaggtcacatgactgaatatagaag

SEQ ID NO: 84151 - DNA, 413 bp, Homo sapiens
atcctttaaatgaaacccaccttggatcaggccgctcctctgcccagagccctccagggctcccaactcccttggggtcgaagcccaggtccggcccaacctgccccatcccctcctcactcggctccagcctcccaggcctccttcctattcctccaacatgccgggacagtcctgccccagggcctttgcacgggccgtgccctccgctcagatcacactcctgcccattctgacgcactccctctctgtcatttagacctgacttcaagtgtcccctcttcagggtgaccagccccagcacagccacttccttatcctggtacatgttccattttccaagcatcatccaacgcgacgccctatatattcatctgtgaattgtcttccccaaccatggcgccccccacccc

SEQ ID NO: 84152 - DNA, 421 bp, Homo sapiens
atgtctgctaacagcattcaataaaagctctgggtcgggggtaagagaaatgcattcaggctttagatgtctttgttttttgttatattgatcacagcagccattgtttgatgtcctgtgactgagaaaccaggctttaaactttatgcctttggagatggagcccaagatgagcaaactggcctttggctgtcagagaagttccacatcagatgatgactctggctgtgcattggaggagtacgcctgggtccccccgggcctgagaccagagcagatccagctctattttgcttgcttaccagaggaaaaagttccttacgttaacagccccggagagaagcatcggattaaacagcttttgtaccagttaccaccacatgataatgaggtacggtattgccagtctttgagtgaagag

SEQ ID NO: 84153 - DNA, 1745 bp, Homo sapiens
atgacagcggagtattacaagcttaaacaagtggtgactccaattgcagcagctgtaccagatgtggtttcgttgcttgagcaaattaacatatctctgtgtacctggtatgcagtcattgacttgggaaatgcctgtttctacattcctgtccataaggcccaccagaagcaatttgccatcagccggcatggtcagcaatatacctttactgtcctacttcagggagagatcttgatcactttttgcttttgcaaaatatcaccctagtccattacattgatgacagtatgctgattggatccagtgagcaagaagtagcaaacacactggacttattagtgagacatttgcataccagaggatgggaaataaatccaagtaaaattcagggaacttctacctcagtaaaatttctaggggtacagtggtgtggggcctgtcaagatattccttctaaggtgacggacaagttgctgcatttggcccctcctacaaccaagaaagaggcacaacgcctagtgggccaattaggattctggaggcaacacattcctcatctgggtgcgttactctggctcatttatcaagcgacccaaaaggctgccagttttgagtggggtccagaacaggagaaggctctgcaacaggtccaggttgctgtgcaagctgctctaccacttgggccatacgacccagcagatccaatggtgcttgaggtgtcagtggcagatagggatgctgtttggagcctctggcaggctcccataggtgaatcacagcagaggcctctaggattttggagtaaggccctgccatcttctgcagataacgactctccttttgagagacagctcttggcctgttactgcgctttggtagaaactgaacgtttggatatgggtcatcaagttaccatgagacctgaagtgcttatcataaactgcgtgctttctgacccatctagccataaaggatggaggttatgcatggattcagcaacatggacttccacttaccaaggtgacctggctatggccactgctgagtgcccaatttgccagcagcagagaccaacactgatccctcgatatggcaccattccttgggtaattagccagctacttggtgataggttgattacattggacctcttcaatcatggaaggggcagaggtttgtcctcactggaacagacacttactccggatatgagtttgcctatcctgcacacaatgcttttgcgaagactacatccatggattcacgaaggtcttatctaccatcatggcattccacatagcactgcctctgatcaagacactcaccttacagctaaagaagtgtggcagtgggctcatgctcatggaattcactggttttaccatgttccccatcatcctgaagcagctggattaataggatggtggaatggccttttgaagtcacaattacaatgccgactaggtgacaatactctgcagggctggggaaaagttcttcagaaggctgtgtgtgctctgaatcagcatccaatatatggtactgtttctcccgtagccaggattcatgggtccaggaatcaaggggtggaagtggaagtggcaccattcatcatcacttctagtgacccactagcaaaatttttgcttcctgtttcctcgacatcatgttctgctggacttaaggttgtagttctgatggaggaatgctgccaccaggagacacaacaacaatttcattga

SEQ ID NO: 84154 - DNA, 1404 bp, Homo sapiens
cgcaggactcctttacatgtgtccatcatggccgggaatgaatatgtgttcagtcagctgctgcagtgcaaacagtacgtagggagacacgcacaagtgagaaggcggttgtgaggggggattgtgagtgaaaaatcattctttttaaacatctttagtgttgcatatattaagaagttaaagtgagctaaaaaaaaaatgtgtcattgaaaaagggtaaagagaaagaaccaggttgttgtcagtatagagtgtctcaaaaagattgtatgtgctgttgacactgcttctgcttttcagactagatttagaactcaaagaccacgagggcagcacggctctgtggctggcagtgcagcatatcacagtgtcttctgaccagtctgtgaaccccttcgaagatgtccccgtggtaaatgggacttcatttgatgagaacagctttgcagccagactcatccagcgcggcagccacacagacgcacctgacacggcgacaggaaactgtttactacagcgggcagctggagcaggaaacgaggcagcagctcttttcctggcaaccaacggtgcccatgtcaaccacagaaacaagtggggagaaaccccgttgcacacagcgtgtcggcatggcctggccaacctcacagcagagctcctgcagcaaggcgccaacccaaacctgcagacggaggaagctctgcctctgccaaaggaggccgcatccctgaccagcttggcggacagcgtccatctgcagacgccactgcacatggcgatcgcctataaccatccggatgtggtgtctgtcatcctggagcagaaagccaatgctcttcatgccaccaacaacttgcagatcattccggacttcagcctcaaagattcccgagaccagactgtgctgggcctggcattatggactggcatgcacacgatcgcagcccagctgctgggctctggagccgccatcaatgacaccatgtcggatgggcagacgctactgcacatggccatacagcggcaggacagcaagagcgcactcttcctgctggagcaccaggcagatataaatgtcaggactcaggacggggagacagccctccagctggccatcagaaaccagcttccactcgtagttgatgccatatgcacccgaggagctgacatgtctgtgccagatgagaaggggaaccccccgctgtggcttgcattggcaaacaatctggaggacatcgcatccactctggtcagacatggctgtgatgccacatgctggggtccgggacctggtgggtgccttcagacgctcctgcacagagccattgatgaaaacaacgagcccaccgcctgctttcttattcgcaggtctgagagtccccagtatctctccacagcttttta

SEQ ID NO: 84155 - DNA, 382 bp, Homo sapiens
ggcgggtggaggaggctgccgggcagagcgcaggccaggatcagcgcgggctgtgagtccaggtcagccgtcgggacctcgggctccgggttcgaagagcggctcccggctgcgggtgctttgccaggagagcccttccggacagaggagccggggtctggaagaagcggccgacgcgacgctcgcctgccacggggctctgggagtaagcctgtctgcctggcgggccttcaggtgcggcgtgagagatggatgccaattcaaaagacaagccccctgaaaccaaggagtctgcaatgaataatgctggaaatgcctctttcattttgggaactgggaagattgtgactcctcagaagcatgccgaattacctcctaatcc

SEQ ID NO: 84156 - DNA, 399 bp, Homo sapiens
tataattcgggttgctcagggcagacccccagcttttgaatacactgtgccataaagcctctcttgaccccctcaccaaatgttcccacccatcaaaatctcctttgtctgtaaagtcctgttgccccacctgagtttcctgcatcccagggctgattctgagatagaagtaaatcacatataacaagtttctccccctctgttgtgccccagacgggattcacgcccctgcacattgcggctcactacgagaacctcaacgtggcccagttgctcctcaacagaggagccagcgtcaatttcacaccacaggtaaccctggggcacgtgcgccctcactgtccgggggcttggggctggcagttgctcctgcctcggcaccatgggtttcatcccagg

SEQ ID NO: 84157 - DNA, 372 bp, Homo sapiens
cggcacgaggtttttccatttgcttgtgtcagctctgatttctttgagcagtgttttggtatgctgtgtttttgttttaattcacctgaaaatatgttttagtttccgctgtgatgtcctctttgactcatcagttatttaggagtgtttaatttccactctttgtgaattttcttctattaatgctttctaatttcatcccattgttggagaatatacttggcataatttttatatttttatatttggtgagatttgtttttctggactaatgtatggtccattctggaaaatagttcacttgagaagatgtgtattcaccttgtggtgggtggaagggtctacagatggctgctggattcattggcttat

SEQ ID NO: 84158 - DNA, 377 bp, Homo sapiens
ctttttcaaaattgttttggttagtctaggcccttttactttccatataaattttagaatcagtttataagtttctacaaaaatatctgctgggattttcgttgagattgtgttgattctacagatccatttggacagaagtaacatcttaccaatattgagttttccaatccatgcacatagtatatgtctatttatgttggtattctttgatttcttttatcaggaatcaatagttttcagcatgcagtttctgtacatattttgttagatttatatttaagtactttatgtttttgaatgctgttataaatggtactgtttttaaattttaaatttaagtttaatttcaggtgttcattatgaggtttttatat

SEQ ID NO: 84159 - DNA, 382 bp, Homo sapiens
tagacagaagccccctccacgtcagaggccccctggccgcggggcctgtgagcggagaggggccctgcttcccacacaaatccgccccggtgcacccccggccaggcaggccccggggcggcctaagcgccttgtcggccgggggtggggctgcttttgcttcctttaaaggggcgggcagggagaggaagctctagctccgggcctgagtttccccgaggctgcgtcggaggagctgcagggcgagcccggacggctgccgtctccgccagaggccaccccggcccggcctccagggcgcagaggcgcccccctccatcctcccccatcccgggggccacggcaggggggccgcacagcgcggctgggacgattcggtgaa

SEQ ID NO: 84160 - DNA, 387 bp, Homo sapiens
cttaccctgtaccatatataaaaccgtaagactcttagaagaaaacacagggcaaaagctttataatattggatttggcagtgatttcttgggatatgacaccaaagacacagacaataaaaggaaaaccagacaaactgtacttcgtcaaaatttgaagcttgtacatcaaaggatactatcaacagagtaaaaaggcaacccatagaattagacaaaataattgcaagtcacctgtctgagaagaaactaatattcagaatatatagagaatgcctaactactgtgtaaaacagggcagttccttaaaaaaacaaacagaattacctgtttcattcagcagtcccacttctgagtatattcacaaatgaattgaaggcagggaat

SEQ ID NO: 84161 - DNA, 339 bp, Homo sapiens
aactggagaatacacacttgaattgaagaatgttaccggaactacttcagaaaccattaaagttatcattcttggtaaggatgtgtgacaaagatacaagcaagttgatgttcagtcacccaattttgatttgaagtaaaaattaatttcctgtatttcttctctttcatagacaagcctggtccaccaacaggacctattaagattgatgaaattgatgctacatcaattaccatttcctgggaaccacctgaattggacggtggtgctccactgagtggttatgtggtagaacaacgtgacgctcatcgtccaggatggctgcccgtttctgaatca

SEQ ID NO: 84162 - DNA, 365 bp, Homo sapiens
cggcttttccggggacagcgcgccggtcgagctgattctgagcgatgagacgctgcccgcgccggagttctccccggagccggagtccggcagggccttgcggctgcggtgcctggcgcccctggagggcgcgcgcttcgccctggtgcgcgaggacaggggcgggcgccgcgtgcaccgtttccagagccccgctgggaccgaggcgctcttcgagctgcacaacatttccgtggctgactccgccaactacagctgggtctacgtggacctgaagccgcctttcgggggcttcgcgcccagccagcgcttggaactggacgtggaacgacccccttccaaggcttagcttcgggcgaaggggg

SEQ ID NO: 84163 - DNA, 449 bp, Homo sapiens
caccaatagaaccttcttcagtactgaactggccttcaacctttagggcaacagagcagcagtgctccagaggaccttggcaagaaccatgccaagctgctactgaaggagtctacacaggcagatatgtggattctattagccagagcctgattctagaagctgctcatgatccaaattcctgctaggcctgatatctcccctggaacacagagtatttgaagcatttgaagaatttttttcaggttatgtttaaaattaaaaccaactcatgttgtgaaaaactcaagggcacggatagagtactgatgacttgtaatggaatggctttaccaacttaacaagaccattgtctcaggataagtccctaccctacaaaatgaaacagccaaggttaaatctaaggaacaagtttgaatgcataaattcagatcaggagaggactttct

SEQ ID NO: 84164 - DNA, 712 bp, Homo sapiens
acacaaataaaatcccaatgatttgggtgcatattgactcttggactgtttttaatggactttcaatttggtctagcaagtggactgtagataattggacaataaagatacccctgtctcagatattgctctttctataattctgagtgcaaatcaaagtaaatcatactgttgttcatcaaagaacttctagtttctcaaggtgattggaatcaacaagttgatgctttagttcaatctcttgaagtggcaatatgggtctatgaaatgagtggacattctggaggtcaagccatgcaatgatgggctgactggcaatgtatactactggactctgctgaagctcaaatttcttataaaaatagattattctgcttgccagcaggagaggcaacatttgaagtcatttctgagaagtaatcccagggaagaaaggctaacatataacagggaagtagattatattgcctcatttcctgtgcattcaagggtatttgaatagaatatacaagcataatagagattcttgatgtgggtttgcattttgaaaactgaagtcatggggggtgatactacccccagaatggacaacagaaacaaaactatggggtgaaggttggccccctaattaaaattcttatggggaggcgccgctctcagattgtggcccaaaatatgttgcaactgtgctcttggttattttctcaattgt

SEQ ID NO: 84165 - DNA, 1126 bp, Homo sapiens
tttcgtcgtgtctaaaaaatgattgccaagaccaatatcagaggttttctctcagagtttttaaggatacatgttttacatttaaggcttgatttcaagttaatttttgagtatggtgtaagaaaaatgggctatttcattattttgattgcgggtattctgtttctccaggaccaagtgttgaagagactatactgtctgtattgtatcttcttcgtgaacttgtgaaagattagttaagtggatatgcgtgagtttaattctgggctctctgttctgtcccattggtctctgcggcagttttcctctctgttcgcataccatcctgttcttactactgtagtcctaaaatgtcacttgaaaacagaaaatattatgcctcttgccttgttctttttcctatagattgctttggctatgccaagtctattgtaattccatataaattttagaattctattttcattactgtgaaaaaggccactggaatttgataagaagtttattgaatctatagtcttggtctttagcagaattttacaaccccctccctggattactaagctctattaaaggcatttttgtgaaatgaggtctctctgtgtcacccaggctgggtctgaacttctggcctgaagtgagcctctcaccccgaggtcctggattagcggcaatatatgcctgaaccgtggcgcctgaatctcttggaaaggccttcctgtcccccaatactgcacaatttcgtgcttgtcgggcagttatcacccagggcccacgcatctaccattttctttgcgctgcgcgggcattggacttaaaacttgccccggggcagcacgggtacccgcggccttaactcaggccacaacatccccatagcccggcgccccctattaccgggccattcgccgtggccgcccgcgtcccacacaaacgcgctcccaactacctacgactttgcgcctcaccgctcgccccccggcacgtacctccctctcctctccgccgacgtactaatcgcgcagccccccgcccccgttcgcgcgacgtacccaacgcggcggctcctcgcgtcccgcgcgctcccgccgtccccccacccccatcccctcgctcccccgtgccg

SEQ ID NO: 84166 - DNA, 411 bp, Homo sapiens
tttcgtagtaaaggtagcagctatccccaaattgatatacagggttaatgtgattcttataaaaatcccaacaaaattactttgtagatataaataagattattctataatttatatgagaaggcaaaggaactagcatagctaaaacagttttgaagaagtagaataaaatgggaggaatcagtctaccgtagtcaagactatgtgatattggtggagggacagacacataaatcaatagaacagaatagataacccagaaatacacccacacaggtatgctcaattgatttttgacaaaggcacaaaaggagttcaatggagaaatgaattttcaacacatagtgctagaacaattgtatatttattggccaaaaaatgaacctcagcccaagtcttgcactttataca

SEQ ID NO: 84167 - DNA, 774 bp, Homo sapiens
tttcgtcctgcctgagccttctccgaggagatgccttggggctggggtgggagtgaagctgactattctccaaaaaccaccctcagcatccaagaggaagaaacatcagccacaggggtttctgtgctgctgccagacatcagtgtcctcttttgtggctggctacagccggatacactttgctgcccatctggccctgggctcctccccaacccagccttcctgggtgcagcctgggagacacactagcatgctttggtgggaccagcctttccagggcatgctggcttcccctggggctgactcaggtcccgccctcttgtgtcagtgctaacaaggatcagattcgtccctgcccttctgtagagctggagggtgacctggagccaggggccctttagggctgagacatttgttagtcggagtgatgcatccctacccggcttcggggggagtcaggctgggctctgggcagtacagggagaggttcaccaggacccccatgccttcctcccccggtgcaggggcagtggtcaccatgctgactcctccctttgactccatgcacgggcgctggctggcctgtggttgcatttcccactcacctccttgctatccccagtcttggcaccgagaccccccacattccttctccagcaacagcagcccaggggccttcctgcctggacgcaggaccacggagacctgcatgtgcagggaggcctggcagcctgccgatgggggtccccgagccccggagtctcctcgaaaccc

SEQ ID NO: 84168 - DNA, 1278 bp, Homo sapiens
tttcatgctattttaaaaggtgtccactgtcaggtgcagctgttggactctgggggaggcttcgttcagcctggggggtccctgagactctcctgtacgacctctggattcccctttagttcctatggcatgagctgggtccgccaggctccagggaaggggctggagtgggtcgcaggcattcgcggaactggccttactgtgagtggcagtaacacaaactacgcggactccgtgaggggcagattcaccatctccagagacgaatccaaggacacactctttcttcaaatgaacagtctgagaggcgacgacacggctacatatttctgcgcgaaacttaggggggatgttggggactctctttggcgtcggtcgttttgggcgttctggggcaaagggaccacggtcaccgtctcctcagcctccaccaagggcccatcggtcttccccctggcaccctcctccaggagcacctccgagagcacagcggccctgggctgcctggtcaaggactacttccccgaaccggtgacggtgtcgtggaactcaggcgccctgaccagcggcgtgcacaccttcccggctgtcctacagtcctcaggactctactccctcagcagcgtggtgaccgtgccctccagcaacttcggcacccagacctacacctgcaacgtgaatcacaagcccagcaacaccaaggtggacaagacagttgagcgcaaatgttgtgtcgagtgcccaccgtgcccagcaccacctgtggcaggaccgtcagtcttcctcttccccccaaaacccaaggacaccctcatgatctcccggacccctgaggtcacgtgcgtggtggtggacgtgagccacgaagaccccgaggtccagttcaactggtacgtggacggcgtggaggtgcataatgccaagacaaagccacgggaggagcagttcaacagcacgttccgtgtggtcagcgtcctcaccgttgtgcaccaggactggctgaacggcaaggagtacaagtgcaaggtctccaacaaaggcctcccagcccccatcgagaaaaccatctccaaaaccaaagggcagccccgagaaccacaggtgtacaccctgcccccatcccgggaggagatggacaagaaccaggtcagcctgacctgcctggtcaaaggcttctaacccagcgacatcgccgtggagtggggaaagcatgggcaaacggagaacactagaggacaaggctaccaaggctggaatcggagggtacttcttgctcta

SEQ ID NO: 84169 - DNA, 448 bp, Homo sapiens
  misc_feature (1)...(448): n = a,t,c or g
gtcgaccatttcgtgcttggtccagcctggggggtccctgaggctctcctgtgcaacttccggattcacatttaagagacatgccatgagttgggtccgccagggtccagggaaggggctggagtgggtcgcgagcattactggaaccggcagcacagagcgctatgcagactccgtgaagggccgcttcaccatctccagagacaattccaagaacacactttttctgcaattgaatagcctgagggtcgaagacgcggccgtttattactgtgcgaaagatctacgtgaaattgtggtgatgactgccacccttnnnnnnnnnnnnnnnnnnnnnnnnnnnnnnnnnnnnnnnnnttccaccaagggcccatcggtcttccccctggcgccctgctccaggagcacctctggnggcacagcggccctgggctgcctggtcaggact

SEQ ID NO: 84170 - DNA, 1190 bp, Homo sapiens
ttttttttttttgatcattcaatatggctttattttctcatcggccggctgcatcccacaccagcctgagccccagacggtcagtcagtgcatccatcctgacgacctgtccaggaaggaaggaaggaagctccctccaaaatgctggccccgtggcacccagacaggagcctgctggctagcatgcaagcactccccaaattctctcatggtgacaaggtggcagctgcctgggtcccagagtctcagcacaagtgcccagaggccagtggtgatgggcccttgggcaagtctctggaggaggcgggcaacccgcagggcagacgggagaagagggtcccctgccaacctggaggaaagaggggtggttgtcccctcacccctccaggctgcaggttctggagggcagaggtgctggccgaagaactggtggccaaagtgagaccccctggtcctatctggacagaaccccaggctcccatgggccggcccaggtccttcggacagcaaacacctccctgggccacggaagggagacggctgcgggtgccaggccaggacttgcccagctcaagtcccttccccaccaagcctgctcggcacgcactgggtaggttatattgctaaagaacggacacaccggggtctccctgagctcaacacgggcctccttctctcccacacacacacggcgcctggtctgcggggtggagggttctgtccaaggcttcccgagggcccggaccttcctctccgagttccaggaagggtggccccagaggccatgccccaagtcctctccttcccagcaaacgttctcacctgacgcccccaccccgaacacatcctttctattgatgaggaagctgaggcccagggcgaggagcgaggggaggagccacaaggcctccccgggccacctcctgcctcccagtactccacccgcacccagttccccagggaggaccaactggccgtggcaaagcctggatggcctgggggcccagtaccgagcccaggaaacaccaggcactggctcaggactcagggcagggagctgggccagggccaagcaggtgacggccctgggagctgggctggggccgcagaggcacaggggccggagggatgggctgggagaagaggagtgcgggggaacgggggtttgcagtgggtgagctcgtgcagcg

SEQ ID NO: 84171 - DNA, 2095 bp, Homo sapiens
ttttttttttttgtggcgagcagtcagtactttaattcaggtcaggctccgacacctggggagacggggtcctgcccgccccaccctgaggtggaacccccagctgctcctgggcacagaatcatttacaaaaataaatatgaaaaaagcagcaactctttagtgatcatggaattaatctgacagcaattaaatgtgtttaagcatctggcatatctcctcaattgcaccaaaagaatttggaagcacttggtttggtctcaaaggcaaaaggaaaggacgaggaaggggccaggcctcccgccaggcccccgcccccctcacatttctgagtccgcatacatcccgttgattaagtagtccacctgggtgtagtccttcttcttgtagctctcataggcctgcagggcaaacaaaaccaagactgtgatgaaaagggtcaccccgagtaacagcaccaccagaaggagagttttgtctaccacggcctgggtgaggggctcagtggtgaccaccatgtactggccttgggtgctgggctggcacgagtccgtggctggcatcttagtgccccctgagctcctgggtgttggcccagtggaatcagtacctggtgtggcttcagtctctacctgctccggtgcctgggatgtgcctggcccagcggccctctgggtatatggcatggggcttggctgtgtcgtgggggacatggcctccatctcagggattgggctggtgtgaggtactggcactgggctggcagttggctccctggcttgtgccttggtggtggtcaccactgtgggggtgggggcgggctctggggttgtgtttgagggcatgggtgtggatttatttgttgtgttaaccacaggctggtccactgacacctggctaatgggaccttgtgcttggggacgcatagggggtacagggcttgccgcggtgtcactgggcatgtgcttggaaggacttggacgagtgctcatggggctgcttgtgtttgctgtggtcgctacagtctgagcacgtgtggccaatgtggccagggttgctgttcttggcaacgcgctgctctttggcacttgtgcgagggctgtgctgagagatggatgcccagtggcggtagtggacggggtccgccctgtggaagtggacgtgggcgcggggagtgcaagtgtcatgggagtgctggaggccgcagtcatactggaggctgcagtcgtgggagcaatggaggccacagttgtactggaggctgcagtcgtgggagcactggaggccacagtcatactggaggccgcagtcgtaatggaggccgcagtcgtactggaggccacagccgtgggagcaatggaggtcacaccatcagctgcaactcctgaagttgctggttcactcacatctgtcctgcttgtgtcctctgttgtgacttccatagagttgaggtgggctgccgaagtccctttggtcaatgtgacaggagaagctgctgccatggttacatcctcagacgttttattatcaactgtttccacagatgcattcctcttgactaatcccttccacattttgttagggacaaagttgcgtggatcgttggatgccgcatggctttcagataaggacaaggagaaaatccaaatgagcacaagagctgtccacatcttgtgggtgagctgggagcaaggctgggcggtccccgaggctcccagccagccagctcctcaggctgctaatggttccctcctgcttggccaagggatcagaggctgctgctaaggggatgctcccagcctggaccatcttcctccttggagagctgtgggcttgacactgtgtcgctgggcgaagtctggctttgcagggggtgaaagccacgtggtggggcactcccgggccatgccatcctttgtggcacatgtgagacgaaggtagactctccactctagtaacagacgcatccgggcgcagcaggcccccggcggcctggtggccctcggacagtaggaaggagcctgaggcccggcgcggggacgtggccggcagcgcaacccaggcagctccgggcagcctcgtgccgaattcgaat

SEQ ID NO: 84172 - DNA, 1097 bp, Homo sapiens
ttttttttttttttacagttttaaaaaaaggatcggtttttaatttacaagagttctaaatgtacagaattctcctttaaaaaaatcgttatacacaataaatacagtacaaaaaaatttatcttacagtactagttttgtctccgagatttcaaaatctggcgcgggcggctggaggcaggaagaacagagggaagactagctggggagaggttcgggggagagaaagaccccagtttcttgttttgctcagatttcaaagtcgaggggtgggcgttcgaaatctctcactcacttgtgcacacacacacacacacaggtcacggagctggacgtgcggatgtcacacgggtgcctgcgggcacagcacgctgggaggctggctcccccaccccctctccggttttgtttgacagcctgttgggggcggcggggagaggctgagactgtctggacggaccctgccagctcccagcaccctccaccatttgagaagccacacagacaagacaggcacccggagcgttggcatcaacccggtggccccatccctggcaaacacatgcgcgtgtcccccggacagaggggcagagtgtgccaggaaatgggaagaaacaggaactgacacagcactttgcccctcctttggcaggggagacgttttacatcacagccccctccctaaatccacgcccaccccccagcaacccagctgaagcaggcggcagggaaggaggcctttgtgactcaaataacttaggcaagaaaaaccgtcaggggatccccggctcgagtccccaggaggctgagggcggacacccgactgtcccggcgtcttcgggaggaggggacggggaaggggaggcggcccggtgttatctggtcaacgtcctggcgccgaggccaccgttgtgactggagggtgggtaggcctcgggcctgtgcaggggcggcggggatgcgggggtcccggccgaggcagcgcgggggtcctagggcgcgggcgtccggccggggacttgctacaggttcaggatgctgttgatggcgctctgcaggtgctcggtaagcgtggaattccaccgctctgtccgagt

SEQ ID NO: 84173 - DNA, 462 bp, Homo sapiens
gagagtggcgaattcctagttagtttcacattaaaaaaaccaaccaatgttttccaccacattaatggaatgaaattttttaataaactatcttctagagccatacagatatagcattttataaaattcagcatccatttatgttaaaagctcttacaaaatgggcgtaggagggaacttaacctgatagaagatatctacactgaagcctgagacttaatggtgaacagttgaaaactttccctctgagatcaggaatgagatgaggctggccatattgccacttgtactcaatgccatgctatctattgtcccagctgttgtcccagccggtaaaacaaggcatgagaaagaaataacatgtccattgattggacaagaagaaaaataattttcatgatttgtgggtgatatgaatacatgtgtagaaaataaaaaagaatctaaaaaattactagaatt

SEQ ID NO: 84174 - DNA, 1131 bp, Homo sapiens
  misc_feature (1)...(1131): n = a,t,c or g
ttttttttttttagtagacatagtctttttttcctttctcaattttacagcaaacattgcaaatatagaaatatttttttctgtacaatagaacgacttacagtgtacatgggggctgggctgggggacgtgcctcccaagccctttggccgtcctggccaccccggccgtccaccagcacagcctccaacccacccctgagtccagcagggctccaggaacctgtcccgggagccacttggccgccggcattcactctgcccctctgcagttggactccggaggcggcaatgaagagaccgnaccggacagagaatccacagaaaaccacggaccggaggagatcacgtgagggggcccctgaangttgccacgccggccacaccccccacggatggcattttatgtctttttaaaataacttgtcttttattatatttttttaaaaaaggaagaaagtaaagagatagagaggaaaagaaaaggcagagaagactcaaaagaggaaagataatgaaaaaaaaatccccacccccacccccgatccctaagacacagttttccgaagtccctcgtgtgtgtgtgtgtgtgtgtgtctgtgtgtgtgtgtggacacgtgccacccggggcgacaagcgcatcccaggaccggccacaggagctcgggacgtgtcccccttgtctgtccccactcgctcccccctcgcctctgcagggccccccgctgtcacagttgcggtggtggcgtgcgtgtgttgggtttggtgctgagtctctgggtggatcctgcatcctttttggtccagtgggcatcgccggtcttggggggctcaggacttgtgctgggccgacacgcccttccagtagtccaggatgtcgtgcagatcctcgtctttggcgaactgaaccttcttgcgcagggcatggcccgcggccatgaactcctcttcctccttgtgccgccggcggctcagtctgaagcgctcccagatgctctgggaggcccggcaggtgtactcggggctggaggagtagctcaggctgtggtactgcggggacagctgcgagtaggcgaggtcgcggggccgcggccgggtgagtggctccaggatggacacgaataacggcaca

SEQ ID NO: 84175 - DNA, 2756 bp, Homo sapiens
ttttttttttagcaaaaatgtttaatctctccttaatgtgtgtgtttatttacaagtactaaatctgaagaacagtaaaataggaaatagccgtatatgtacacatctgagggccgggcccacagtcagcggtgctgcttctgcaaagagcccggctgagggtgcccgcccggaccgtccgagggatcgctcttcttctgggagggggttctgcggtgttaaaggacagctaattgtgggctttgtcttaaaaatatctctctctctaaatatatctattctagctgtgtagcaccaacgtgagccactgaatccagacagggagaaagccagggcggaggctctcagcaaggccgagccgagatggcacgccgctccgggctctctcccggactcgacgctgcaggtcgtggggcccccagcccctcaggccaaggggccagtggtcctggggctggggagcacaggggaagctcgaggtatatcaagaggccaggctcccaggccgaggcgtgagcttttccagcactcctgagccaggcgcggggagagggaggacacggagcagggtaggaggtgctgcaggaagcaagtggcggcagcagcacgccaggtgggtgccagtttcacagcacatgtgccgcagccctggctccctgcagacacagggcccatgggagccgctcaccgctgctgggcacagaacggcctccaactgcagctcctaccagggcctccagccccaggccagagctcccaggtgctgcacagttaggagcacagtgggaaccagtgacaagtagggactggggcctaactccacgacctggcagagggaggtacggagtagctcggagactgctgtcccagtagacagcacaggtagtcggcttgatccttgcgcatgtaaacagatactgctaaagtgcttgcgcctagacacagccatgtgctctgtggtggccacgccccagccacacgcccatgtgggaactgcttcatgaggcctgtggtgcacccccttcatcaccactgccgtccccaccacccgcccatgctactcacatggacaagggcagcctggcagggcagagcagagcacaaagcctaaggagagtgggggttggaactggattctgaaggtgatgcaggagcccctacctaacccgtgaggaactggaagaaccagggacttcaacctgaagccagcatccagggaagactttgggggaaactgaggttcccaccccaccatagccaggaaacatcagaagggaggtggaggcgcacccaggaacaggaatcccagccaatgctaggggctactgaaaaaaacagcccagccactgtaatatggactggcctcagctctggcccccaagactgcccagggagtaagcccaccccctcagtgggctgggggcaggggctggcccaggcctgagctgggtgtggcagcagcagaaggccccagccctggcacagtgcccacggggccaaggagctccctgagtcagcagtcactgactccacaccgacccgcgttcagggaagaggcgggtctctgtggcgtcatctggctcacgctactcagctggggcggactgcaagactggcacaccccatggggccgagtcctctccttgggcctggccaaggacatggggctgagtctggccacagttagctgtcccttaatgtccatgggatcttcggtaccatcaaaaaagtgaccttgaaaaggggatggaccgcttgtttgcttttacaagtgactgattaattaaaaaacataaaaaagggtctaacaacctctagtattcaacacttgcagttttaaaaagatcaactcagactaaacgctagcacaatcatgcatgccccgtggtgccgcggcaccccagaggctctcagggtcagcaggaagtcctttccttgtcatgtcaaaccaaaacagcggcccgcaggtcggggggcacaggcttcagggctgctccactccagggaggctccggccactttctccacaaccatttggcattgctttcccactgccttcattttcttgttcaaatcgtctttaaaattcttcttcagttaactgtacagtaccccactggggctggagcctgaggctagagccacatatatatatatgcatatatatacatgtacagctttcttttaagaatgcattctctcttgctgagggcaagggtggacaccgctggcctccagtccctctggtcactgcccgtcactcatggcccagatagatccaggccactgcgggccagaggagccctgccacagacctcaaggcccaagcagagtgcagcagaatttttttcccctaaacacaaaaacagtccccagatgtcccactgctctggaggggccaggacactgctgagatgccacactggaagccgctggggcagggacagagagagtggagagagaggagtgctcaggggtcgccctcaggggctccagggtggggagctcagcctacccttgaagacagctgccagggcagcctgtgtaggacgcggaggggaataaataacgggaacgtgctctctgcgacccggggcccctggcccagtggctcccagaggcacagccctgaggacggagaggggctgcccggtccgtctggaagccacccaggagtccccccagcctggcccacagcccctccataggagggagcagagcctctctggggcgagaaggaagtggtgctccggcct

SEQ ID NO: 84176 - DNA, 2170 bp, Homo sapiens
agccgtaagatcatcacgcctagcttgggacgaggccctgccagcccttctcactgggctcaccctgccccagcaatcctccggtgccacccttaagccacactgtcttctctgtaagcagtctgccagcagcagccccagcactttgcaatgggcgtgtgtgtggtggtgggtggggggggcttggatccctcctttttcctcccctgccctgcccaggcccagatggccttgactgtaaagcaggtgctgcctgacaggttcttctctccctgcctctggtcattgatccatctctttgtccattcagtatccaaccatcctctccattctcctctggacctcaccactctcagagctgcttgtcctggcagaatctacaattcaccccaactctatgccttacccctcccaacccaacagcatttgcagtttgcaaaatatacagacccaagtcctgaggggactgaggacatgatgctgggcccaagtctcctgctcagggcttctctccaatgccagccctgccactccttcctcaccctccttggagcctcctctgctgcttgtctatcccaacggccctgctcccctcccttcctgcccttcaccagctttctggacaccatgccctgaggaagggacctttggttttctctaaacatctttgaagggctgaggcagtcagggctggctgccttgtcactctttatttggaagccactcaaaccattcccaagaagagggacctcagctggcaatctggaaacctggcccaggtctgggcagatgtcttcacttctcctaccttcccagtcttgtgatcctgtgatgagcaccaggatggccctgtggtccctagagcacccctcatgctgtagggtcctgcagccccatcctttctctactgggccctggtatcctggctcctctctcagctctgccactgatctctgtgccttagtttacttctctgcacgggggactcaccccaagaccatttccagcagcttcccaggtgatgtggtgccccaaggctgggctttgccagctgtggcccagctccttagtgctgcccaggagacaccaggcttgctcagaatgaggtgactgcgggcaccattctcagccagtggttcttgtattgcattccagcagcaggaatatcacctgggaacttgatagaagtgcagattagcagccccacccaagacccactgaattagagcttgtggagtggggccctacaagctggggttttaaggagccctccaaatgattctgacgcataagaatatgccaactgctgatctgggctagccattagtagagcctggggagggactgggactggctaggccaagaacaggtggaaaacaccagccttatctggactcctgagattgggaaccaccaccaacaaaaaccaaccctatagtcgctcctcttggaagaggaagagaagttgaagggcctggagaaagcacacattgtttgtttccctgctcctgctcacctctctcacttgtcttggttttacaaaaggctgtgtggatggtgccagccagggagggggtgggagtcctggggaggcaggaggcagaagaccctgactgtttctcccttgggaacctcaccataggccagatagcgcctcttcaaactgaaagaaatcttaactccacaaagaaagcatcctaaatccccagttcctcctcctcccaaccccagggataccttgtagacagtgccaaaaaacagctccaacccccagcagctgggaagagagccagaagctgcccttcctcctcatcctggcccctccccagcccccgccaatactgtgaaacccccttcccacttcagcctggtttcctggtgagggtcctgcagtcatgggccctgggggacccccagcaaggcccatgggagggaagggaccaagggcatccttgggccaactgtccacctctcttgtccactattctctcctttccacttctgtcttcaaaaggctccttcctaggatggatcgggtgctaggacaactgcagtccaatccaccagctctccctgcccctgtgtcttatttcagacatgagaataactgtacagtgtaaacttataaagcgtttttaatggttgtagattggaaataaagtatgtcata

SEQ ID NO: 84177 - DNA, 1563 bp, Homo sapiens
ttttgaaaataacaaaaaaaccaaactttacttgcatttagccattaataaataatttacagtatgtacacgcggtgacactccacacaggtcgcagacacgtggacgcagtgaggggtccccacttccaagcagaacgtgagcaaacacaaccaaaataaagtgcttcactttttacttccaacatagggaccaactaaaaccagcagggagagggaggggccgggccccgagcgccctcccacccgcccacacacggttctggcagagggagcaggacctcttggagggagggggagacacacgttctgcagcctcctggccagtgtatgagaggtccctggggaacagcagaggggctgccgatgggtgggtagggtgtggagctgtagggctgctggcaggatcaccctccagggcctggctgcacttttgggagtgaagcctggctttgtgctgtgggcatagcagcacaggtgggactgttctgggcccctggatgagcaccctgggctgaaatgaggcgggagccagcggcaagtctctcctggctgtgtggccacagggcttaagggaagagattagaggttgaagaccctgccagggatgctcagagctgagagtcctaagaccctgctcctctccccagactccagacgtggatggaccgggctgggggctcttggggttgtgaggaggaagcagaggatcagggcaggccagctggccccatccactgggtctcctgccacaccctggggcccaggcacccctgcccaggagctcttgcatctgcaggagggagaggaacagaagtcaaggatctcttctctgtttagacatttagaaccaagcacttcgactttctaagcacagggtggaaggggcaggggcccaggccagagacgggcagctgagcaggtgcctgaaaaccgggacctgcactggtacccacagcagccaggtgaacatgggcagggaggccacaggccagaaggcaccaggcgggcacgacctactggccaaaaggttccagcagtctgctaaggtgccaagcagcgccccggggttgccctgcctggggccaagccccaaggatgcctccctgtgtggctggggtgtccccgctggcctagggggatcgagtgtgctctcgtgtaagagtgtgtgcgtgcgtgtggcgggcacagggggccccacggatcggcgagcagcagtcggccgggcctttcagtgcattgcgagggggaaggagctgactctgacggttcccagtgtgtctctggtgggggtggggggcttcagcctgaggggatgtttcacacattcacactgcaggggcggggcgaggggagctgctctccctctcacccagctctactgtcaaacatcacggcaccagtcaccacaaccttgtcacgtgcactagaaggggaggggtccatgcctgagcccttggcagcaggcggtccctggcgttctgcggggccatggtggacacgccaggagatctgcaccccgtgggcggtcccagcccacacatggggaagccgagaggacgga

SEQ ID NO: 84178 - DNA, 1001 bp, Homo sapiens
tctcagctattcggtcatatagagatgtcatgaagttgtgtgctgctcatctccctactgaatcagatgcaccaaatcattatcaggcagtatgtcgtgcactgtttgcagaaacaatggagctccatacatttctgaccaaaattaagagtgcgaaagagaatcttaagaagattcaagaaatggaaaagagcgatgaatctagcacagacttggaagagctgaaaaacgctgactgggcacgattctgggtacaggtgatgagggatttgaggaatggggtaaaacttaagaaggtccaagagcggcagtacaaccctttgcccattgaatatcagctcaccccttatgagaatgttaatggatgacattccgctgcaaaagatacaccttgccgaaaaagtgattggtgaaatgggtgataattcccccctcgggttaaaaaagagtgcctcatgaaatccatccctcggacttcatcagatccagacctccctttaaaatcccagtctcagcccagaaaactgaaaccaactcccaccacggccacggagcctcccatgaaagaatattagaagaaattaaagcagaaagaaagctgcggcctgtatcaccagaggagattagacgtagcagattagatgtgactacccctgaatctacaaagaatcttgtggagtcatctatggtgaatggaggtttgacatcacaaacaaaagaaaacgggttaagtacctcacagcaggtgcctgcacagcggaagaagctcctcagagccccaactctggccgaactggacagctctgagtctgaggaagaaacgctgcacaagtcgaccagcagcagcagcgtgtctccctctttccctggaagagccagtccttggaggccgtgtccacaaggaagaagcctccaaaattcctgcccatatcatcaacaccccagccagagagacggcagccaccccagagacgacattccattgaaaaggaaacgcctac

SEQ ID NO: 84179 - DNA, 394 bp, Homo sapiens
atgatctcaattaacaaagaaaaggctttgacaaagtccaacaccattttatgattttaaaacactcagaaaactagaaatagaagggaatttcctcaacatgctaaacagcatgtatgaaaaacccacagcttgcattatacttgacagtgaaagactgaaagctttccccctaagattaggaacaagacaggatgtcccttttcaccaccaatattcaacattgtactggaagttctagccagagctattaaacaagaaaaataaataaataaaagtcattaaaattggaaaggaagaagtaaaattatttctattcgcgggtgacatgatcatgtctatagaaaatcccaaagaataaacaagaaagctactagagctttattaagaattc

SEQ ID NO: 84180 - DNA, 348 bp, Homo sapiens
gttgcctgtgtttcgacatgttattttaataatcctttccccgtccaatgttataaagcattttttagtttttctctaatagcttcataattgatagcattacatttaagtctttattttgaattgattttcatatatggcaaggcacaggggtctagcataatttttctgaatttaaatatttaaatggccctgcaccatttattgaagagattagcttttccctaaagtgtgttcttggcaattgtgttgacaatcagttggctttaggtgcataaactaacttctgggctcattgggcacattagtctatgtgtttgtttttatgccagcacagtgctgttttgg

SEQ ID NO: 84181 - DNA, 1364 bp, Homo sapiens
aaatttgtaagaatacctctttgccctaagcaaaatgcaaaagtaatggaattggaactctgctgaaacaggtgtttttagctcatactttgagacgagcctgactagatagcacatactgtgattttacaggatagagaattgtacgctggacatgtaactttaaaggtggcttttcccttgggcttagaatcaattactgtagtgtttgaaatgaaggatgtataattatctggagggttaaccaaggttctttgcatattagaaagtacttagtaggaccaaccctgtttccccctttggtttgtttagaagacttgcactatctgccagatgctgcttcctaaccagtgcagttatgcatcacaccagagaatccatcagcacaaatctctctacacctgccctgagtgcggggccatctgcaggtcggtgcacttccagacccatgtcaccaagaactgtctgcactacatgaggagagttggttttcgatgtggtgcatttgcaatggttgtgtactctgatgtggctgccctgcagtctcacattcaaggttctcactgtgaagtcttctacaagtgtcctatttgtccaatggcatgtaagtccgccccaagcacacattcccacacctacacacagcatcctggcatcaagataggagaaccagaaataatatataagtgttccatgtgcgacactgtgttcaccctgcaaaccttgctgtatcgccactttgaccaacacattgaaaaccagaagttgtctgttttcaagtgtccagactgttatcttttatatgcacagaagcaacttatgatggaccatatcaagtctatgcatggaacattgaaaagtattgaagggcctccaaacttgggtataaacttgcctttgagcattaagcctgcaactcaaaattcagcaaatcagaacaaagaggacaccaaatccatgaatgggaaagagaaattggaaaagaaatctccatctcctgtgaaaaaatcagtggaaaccaagaaagtggccagtcctgggtggacgtgttgggagtgtgaccgcctgttcattcagagagatgtgtacatatcccacgtgaggaaggagcaagggaagcaaatgaagaaacatccctgccgccacctgtgccagcacaaccggatcaagcacaaaggcatcaggaaagtgtatgcctgctcgcactgcccagactccagacgtacctttaccaaacgattgatgctagagaagcacgtccagctgatgcacagcctcaaggaccctgacctgaaagaaatgacagatgccaccaatgaggaggaaacagaaataaaagaagacaccaagttccccagtcccaa

SEQ ID NO: 84182 - DNA, 423 bp, Homo sapiens
acagcagccacctatcatcaaatggaaatggtgtattagaaacagcccaggcaggttcagaaggtataagtaaattgtatgagcaggcggctcagactcttccaacatcaactcctgttgctttgcctcctctccctcattctacaactatggcttcttgggatgctgcctatgtccagttgactgagggagaaaaacctccagcttggattataaatgggtctgtatgatgtgctggtaccacatgaaagagaacagctgcagcattcactcacactcactcaggggtgactgtgaagggcagtggtgaaggagaatccttccagtgagcagaaactcaaggctgtccactatgtctggagtgagagatggccagaatacagacctaaattgattcatggacaggcgctgatggtttatctg

SEQ ID NO: 84183 - DNA, 548 bp, Homo sapiens
ctcaaggacaagccatagtggaaagaatgaatctctccctgaaacagcagttgcaaaagcaaaaaaaaggggggaaaacaaggactacgggacaccccatatgcaactgaatctagcattgttaactttaaattttttgagcctgcctaaaggccagatcctatcagtagctgaacagcatctacagaaaccagctgcaaagacagaagcagaacaactagtttggtggagagatccaataacaaaaagttaggaaataggtaaaataataacttggggtaaaggttatgcttgtgtttctccaggactgactcaacagccgatttggataccatcaagacacctgaaaccttatcatgagccagatgctgaggaaaagattccgggaggaaactgtggaccccacccccacccccggttgcagccatgtccagactgacgctgaggaagaccccaactgtcacgagcaacacctgtcaaacacagccacccacctggagacagatcaagaagctgtcacagatggtggaagaaaacctgaggaaagg

SEQ ID NO: 84184 - DNA, 355 bp, Homo sapiens
  misc_feature (1)...(355): n = a,t,c or g
tttttacaacaatggggtgaggaaatcactatgcctgccccattatatagccccacaaatcaaaaaatcacgactaagatgggatatataccaggaaagggactaggaaaaaatgaaaatggcattaaagtcccaattgagattgagggaaatcaagaaacagcagcaatagggtatcctttttaggggcggccactgtagagcctcctaaacccactccattaacttggaaaacagaaaaacctgtatgggtaaatcagtggctgctaccaaaacgaaaactggaggctttacatttattagcaaagtaacaatcagaaaacggacatactgagccttcattctcgcctttgan

SEQ ID NO: 84185 - DNA, 503 bp, Homo sapiens
aagtacattaagtaaaacctgccagaagtgaatacagaaatagacaattgaacaatggtagttggagacttaaatacacaactttcaatcatggatagaacaattaggcagaagataagaaaatacaagacttgaacacctgcaccaccatatgccagtgagacataacagacatctattaggatactccatttaacaacagaatttatgttcttctcaagtgcatgtgaactattctccaggatagaccttatgctaagctaaacaaaacaaaaagaaaaacaaaaccttcataaatttaaaaggatagaaatagtacaaagtatgttctccagctacattagatgaaattagaagtgaaaacagaaagaaatttgggaaactcacaaatatgtggaagttagacagtacattcctaaatagtgaatgggtcagagactaaatcaaaagggaaatgcgtactttgagatgaatgaaaatgaagattcagcataccaaaactt

SEQ ID NO: 84186 - DNA, 1723 bp, Homo sapiens; identical to SEQ ID NO: 68729

SEQ ID NO: 84187 - DNA, 857 bp, Homo sapiens
attgcatatgcttttttacaaaagatacaacagtaaaagaatagaaaaaaaacatgttatgtgaaagctgtaacccaaaactcttatagctatacaataacatacaaagtagagtttaaggaaagaagcattattagaaataaagtgggatattttacaataataaaaatatcaatccatcaggaagatacagtaagtctaattctgtgtacaactaacaatatagttcaaaatatattaattcaaaaattcccaaaactgcagggagaaatagatctacaataacagtaagatcttttcagtaaccaataaaaaagtagacacaaattaataagaaaacacaaaatgtaaacaacatgattaacagaatttacaaaattgatatatattgaatatttcaccaaacaactacagaattcactttcatttcatatgaacatggaatgtttactaaaagtggcaataacttgggccataaagcaagcctcaatgtatttgaaaaaattgacataatacagagtacgttttttgagcagaggggaattaacctaataatattttaaaaactagaaaaatttcaaatatgtgaaaattaagcagtctgcttctaaataatccataggtcaaagaagaaatcacaatgaaaataagaaaatattttaaactaaatcataatgaaagtatgacataaaaaattttaagatgtagctaaaactgggtattgggggaaatttattatcttaggggctagaatcgatagctttaaacaaaaattacctaggtatttatctcaataagttagaaacaaaatgcaattaaacttgaagaaagcatatgataaggtaagagaaataagt

SEQ ID NO: 84188 - DNA, 505 bp, Homo sapiens
  misc_feature (1)...(505): n = a,t,c or g
gtcaattaagctgctgtgccagaagccacctgggaagaagaaacaaggtgctgttcatccacatccacccacctgccctatagacgcctcctgggggtcacttacctaccctcccatccgtcccacaaacttctactgggggtcacctatccatgccacacacacctactgggggtcacccacccaccccccacacatctactaggggtcacccaccctcccatccatcccatacacacctactgggtgtcatccaccctcctatccatcccatacacatctactgggtgtcatccaccctcctatccatcccacacatacctactgggtgtgccctctcccttgtggagctccaagatcaagtggggaaggcaagatgttaacagggcacctgcacattgtaatgcttctgtgacagcagaagctgtgacagccctctttacacggcgggctgggggaggcctnccaaggtatgacttaagagatcgaagatgggaaagaggtc

SEQ ID NO: 84189 - DNA, 389 bp, Homo sapiens
aaaacacaccgaaagcgggtctgactctgaatgtagtttgggtctcagtggtggactggcatttgaagcttgcagtggtctgacgccccccaaacgcagccgtgggaagccagccctgtctcgagtgcccttcctggaaggtgtgaacggagactctgactacaatggctcaggcagaagcctcctgctgccctttgaagaccgcggagacctggagcccttggagctggtgtgggccaagtgccgaggctacccctcctaccctgccttgatcatcgatcccaagatgccccgggagggcctcctgcacaatggcgttcccatccctgtccccccgctggacgtgctgaagctgggagagcagaaacaggcagaggctggagagaact

SEQ ID NO: 84190 - DNA, 630 bp, Homo sapiens
cctgaagttattcaacagtcagcttatgactcaaaagctgacatttggtcattgggaattactgctattgaactagccaagggagagccacctaactccgatatgcatccaatgagagttctgtttcttattcccaaaaacaatcctccaactcattgttggagacgtttactagagtcttttaaggaagtttagttgatgcttgcctgaaccaaagatccatcgatttcgtcctacagcaaaagaacttctgaaacacaaattcattgtaaaaaattcaaagaagacttcttatctgactgaactgatagatcgttttaagagatggaaggcagaaggacacagtgatgatgaatctgattccgagggctctgattcggaatctaccagcagggaaaacaatactcatcctgaatggagctttaccaccgtacgaaagaagcctgatccaaagaaagtacagaatggggcagagcaagatcttgtgcaaaccctgagttgtttgtctatgataatcacacctgcatttgctgaacttaaacagcaggacgagaataacgctagcaggaatcaggcgattgaagaactcgagaaaagtattgctgtggctgaagccgccggccccggcgc

SEQ ID NO: 84191 - DNA, 716 bp, Homo sapiens
ttttagtgcagaagagcagctgaaaccaaagcgggactttggtcctcagcaacttacagaaccgttttccacactattaagctgtcatctccggatgtagaaatgtctttgtcataaaactctacaaccagcatccttgggagggtgatgactggtgaggctacgttctctaaagcaaagaaattggagcatgtcatcgtaataccattgttgacattcaagtacacgcagacctcattttattgtatttcacagtgtggtgttataatatgtattatgtttctgtttgcaggtcctggttcataactcccatatcccttgttacagttttttggtttaatggtgggtatgttaggccttaggggcaggcctcagaaaacagaatgtctctgatctccttctgctctccttttacctgccccaaggtagggctctaatcaccaccccctacctttctgactgtaggtcttatgagcaatcagagggtccttcccccctctaccctggaggaaggaatgctgatgtcgcggagcttccacaaaaacctaagaggactgggttagcagagcttccaaatagctgaacaaatggaggttccaggagagtcatgccccagggaggtcaaagaagtttcccctccttccttcatagatcgctctacgtatctcttcatctgtttcctttgcaacatgcccttgtaataaatcagtaaatat

SEQ ID NO: 84192 - DNA, 696 bp, Homo sapiens
ctactgcgtatcctgccttgtggatccatgctctacaagagagctcccatctgtgaagagggtccagtctggattctctaggggagtttccttgaaatcctccctggctgcataggtctgtactatgacttgttcacaattatgctcaggttccctagtttcttcagggaggaaggtggctggatttaggctagaacaagtctttaattggatgttggaaccctctaacagtagggcctgatatttaaggagtcggctatctgttagccaaaggcttcctctagagtacagtagtcctgccacattatgtagggtgtaaacagttaaatcattccccagggttaatttggaggcttctgggaccagcagagccaccgaggcaatggcttggaggcatgctggccaccctttagccaccaaatcaagttccttacttagataacccactggttgagctggtcctccagcctgtgttaaaactcccagggctattcccttcctttctgatacatacagattgaagaccttccctacaggaaggctgagagctggtgccttgagcaagacttgctttagctggttaaaggccttttgagcttcaggttcttaggttaaaagatgagttttagctccctgagtttcttttatgaagttatataacagacgggctatttcaccatacccagatacccatag

SEQ ID NO: 84193 - DNA, 407 bp, Homo sapiens
ggccaagaattcggcacgagcagcagaggtgaaaataagaatattataagcaacttgatgccaataagattttaaaacttgaatacaatggatgcattctaagaatactttaaattacttcagtattagaaaacttaattgccctttaactattaaggaaatggagttagttctttaaaaattgcccacaaagaaaataccaaatcaccatagttttgtaagtgaaatctacccaagattctaggaacaaataattctaatcttatacaaactcagaacttaggaaggaattctctgtggtagttaaaaaatatgtttacaatctcttgatattttggagccctgttccccttgccttgagtgtgggctggacctaatcatgcaattctaacagaagaaaagcagac

SEQ ID NO: 84194 - DNA, 220 bp, Homo sapiens
  misc_feature (1)...(220): n = a,t,c or g
aaaaaannnaangnngcgggtagggcctaagactaccgaatgctcagtccatattgaaatgaccccagttgtccctgaggatgcgtctgaccactgcctgttggaaaagcccccaatcacggctcacatggtgagtgcaggggccacatgtctttggctgttttaatctagactcaactccctgacacacacacactccccaacccgctcccagcacact

SEQ ID NO: 84195 - DNA, 222 bp, Homo sapiens
atttcaattgatgcttgaaaagcatttgataaaattcaacattcttcatgataacaactctcaaaaaactgggtatagatggaaaatatctcaacacaataaaagccatagacgacagacacacagttagtaccatattaaatgtggaaaaactgaaagcctttctctgaagatctggaacacgacaaagattcccaatttccgggtccggagctcgaattc

SEQ ID NO: 84196 - DNA, 367 bp, Homo sapiens
agcgcaattaaacctatttgtgcacagaagagctgactgtgctcagttcctcggaggtcttgaaggaggcgtgttaaggccctcccttcagagcccatcttgctggcatcaccgtgtaccatgccacgctagggtcttgacacagtgatgcggccctgctgctggtgggccacgctgtgtggcaaacaccttagaatgtgttctcacgccctaaagatgcgtccaaacgcttcagcagcagaaactgaacagttgaatgcacacagccgcgggctgatgaattcatcatccaggcctgctccctgagagctccggagggcgggaatgggtcgtggagcctgggttgtcaatccccacacctgagagc

SEQ ID NO: 84197 - DNA, 441 bp, Homo sapiens
cccgcgatgctggctggcagcaatactatcaggtcattgaactggcggttgcacgtaaaaataatccgcaggccaccattgatatcgctccgactttccgtgacgacctagaagtcattggtaagcattatcctaaaactgatgccgcgaaaatggtgcaggcgaaaccctgctatgttgaagaccgcgtaacggctgacgcctgcgtcattaaaatgttacgtagcccacacgctcacgcactgattactcatctggatgtcagcaaagctgaagccttaccgggcgtcgttcacgttattactcacctgaattgcccggatatctactataccccgggtggtcagagcgcaccggatccgtcgcagcttgactaaggtatgttcggcaagagattgtcgcagtctcggcgatctccgggtcgcgacattgaatccgtaa

SEQ ID NO: 84198 - DNA, 207 bp, Homo sapiens
ttttttttttaaataaaaagggggttttgctccatcgcccaggctggagggcaggggttcagtcatgactcactgcagccttgaactcctgggctcaagcagtcctcctgcattggcctcccaaagtgctgggattacagcatgagtcaccatgcctgttcagaacttttttgtatcttacctttatctttagaccaggaatgtatt

SEQ ID NO: 84199 - DNA, 425 bp, Homo sapiens
ggggtgacagacacttgagggacatcagcagcaggcagaagggtggacatggttgggctgggccaagcaggcgtccccgtcgacagccacgtcagattctagccctggcctcagtccggcctgttcccaccagctgccccaaccagccagaccccttggggactcctcctggcctgggcctcccacagaccacttgggatggcaggacctggcgccagcccctgggggccaggcatgggctttgtgtaaaccccattccttttaaagccatggggctgcagaggaatgtggagacgagccaggccagccgggtcctcccagctcgtgcagctccctagaggctgccaggcctgcaactgggccagccttcaggctctgggcaaactcagccccttgctcccactggaggatgaggcgaaagtgga

SEQ ID NO: 84200 - DNA, 2261 bp, Homo sapiens
  misc_feature (1)...(2261): n = a,t,c or g
ttttttttttttttaggctcacgcctgaccaccggggtttttcaggcagtgcaaaaatgtttattctgctttcttccttggtgggtgggtcatcaggctgctttggctacgaagctcaggcttctgtgacctgggcggcccgagcagtacagagcaccattggcttcccttgggcctcaggagcagcaaggcacagaggtgagtcctgcatcgggtggcacggcgtgggcgtgtgagcaccggaaggggagaggcaggcgcttgccatgcctggggcacggggcctcttcagggacagagcagctccagtgtctactgagagggcacagactgacccaaacacgcattccacagccagttccttgggatattcacagcacatgcagccagtagacagctgcaacaccactaaggacacctgtgagcggccacgggctcagctccagagcaggccccacccatcctgctgggggagacccttgctccaggcttcctcacaggacctggtcaaaggaaccaagtcacaccccccatgctagaggatccccctgtagctccgggaagggctgcgaagctggagctgtctcaggttcccgttgaggcccagtaccctgagttccatgactccttgggggacagagcacaggagggaaaaggggaatggacttctacaggatggggtgggggacggcctgtcccggggacaccctggttctttctacgcgatggccgctctggcctggggagaagctggcaaggagagggcaccgggtaaggatggggtgctgcatgacccagctctgcccaaggtggccagggagaccactatgaaggctgcctggtgtgagcgggaccctggtggggtgcagagtgaggccctgtgtggggactcagggaggatgctgggcgggagagaggcccagggtgtcccctcacccatgcaggtccctgggtgtgatcatggaggactggtaaggctgctgctgcccagtggcgaccatcaccagggtcaggagtgggggagtcagtgcagagacccagggaagggcccacttcccaggacgtttagtgtcagcaggcggagtctctccacaggctctggctggcgtgcctctacgcctcactctggtaccgcagccgggagaaccggtccctgatggcttggtcactgtctggcccaccctcacccaggcggaccaccctgctgcttgggacaaggtcccgcaccttgtgcttgatcacagagaccaggccgggtgcctctgagtctgccgggcctgtcagaaggatgtaggcggcgtggcggcttggctcaaacaggacggcgtcaaaggcgacaatgtgggtagagacattggccagctccagcagcacgcgcggcagggtggggtggaacatgtacaggctgtgccgggcctccccggtctccgtctcgctggtgctccccagctcgtggaggccccagaagaagaaggctgagcggtggtctgcggtcggcaggctggcggacagtggacccccagggaggctcgggagggctaggctacacaggacggctccagtgccaaggtccagaaacaggatctggggagggaggggacactgtgggggccaacgtgggggctaccgggaaaagctcgaggcttgctaccagacacgtgccctcagccatgccagccctggaggcagatgctctgagggaggcagaaccttctcagcagctctgnangcagcagcctcctgggccgcagccccgtctgctttcagaccagtctatcctcagctaagaacaaaggtgccacctccgaaggaagaacaacgaacctgtctgtcggtgccagtttcttttcaacggctacagccaaggtgtctggtttgtagcggccgaagatgggttttctggaacaatatggaggaagcgctcacgaggggtctcagtgaggagactgagatgaaggaagcacccaggaacacgtccgcccctcagtctcccatggccacatctggaccagggcccaggacacggagccgacgtctggggcaaggggcaagtaccagaaacaggcaagaagcccgggcagcagcacnacgctccggccccacccccagcgctgtctcctcgccagccaacgggatgtgcccgggatgccgggaaggggtgcagcacctgcgcggtccttggggaaaccctgtacctcaggacatgggctgccttgggtgtccagcgaggcgtcagctcctgcgaccgcgaattcttccag

SEQ ID NO: 84201 - DNA, 1524 bp, Homo sapiens; identical to SEQ ID NO: 68647
  misc_feature (1)...(1524): n = a,t,c or g

SEQ ID NO: 84202 - DNA, 335 bp, Homo sapiens
gtgatggtccctggcaatccaacctggcaccatcgcagttggagtactatgcatcttcaccagatgaaaaggctctagtagaagctgctgcaaggattggtattgtgtttattggcaattctgaagaaactatggaggttaaaactcttggaaaactggaacggtaattttttttcatatattggaatgttttctgtgttaagtgtatatagtatagaataaggatcagtaaactgtagctcacagggcaaatgtggcctatattttctgcttttctacagcccctttcttttgtcgatttcgcctagtatcatgccgtcgagttgccagtctac

SEQ ID NO: 84203 - DNA, 241 bp, Homo sapiens
  misc_feature (1)...(241): n = a,t,c or g
gatgtctagtttatgtagcctgacagcagacacggttctgttcttaaatgtgttaaggtgtgttttatggcccagaattgctctgtcttggtgaactttctacgtaagcttgagaagaatgtgtattctgctgttgttgtttgaagtggtctatagatatccattgcatccagttgattgataatgttgagttcagttatgtcaatgattttctgcctgctggatctgtccatttctgatn

SEQ ID NO: 84204 - DNA, 378 bp, Homo sapiens
  misc_feature (1)...(378): n = a,t,c or g
ggcacgagggcggcgggaaacagggactatgggacactgcatatacaattgaatctagcattattgactttaaattttttgagcctgcctaagggccagatgctatcagcagctgaacagcatctacagaaaccagctgcaaagacagaagcagaacaactggtttggtggagagatctgataccaaataggtgggaaataggtaatactaacttggggcatagattatgcttgcgcatctcctgaggaacactgcttgtggatttatatacggttgagacaccttaatacttatttggaacctgctgctgtgatatgaaattcagatattcagagtctataactacagggttattggaacacagcacatgctcattn

SEQ ID NO: 84205 - DNA, 349 bp, Homo sapiens
  misc_feature (1)...(349): n = a,t,c or g
ggcacgagcacaaagtgaaggcccagtgatggaatggtgatggtttgcagtaggttggggctgtggcanttagtgacattttgtttttacattataaacagtgatgtaattggagtgaaatgccattatccactgcgtcattttaatgcagtcaattgttactggcttcgtatttaatttttatccttatcttggcattttttttctttttgttccttatttttatctacttcttcttttttctctttttctcctctttctcttatttaatattttttttatttttctttatcttcttctctgctccctttatctcaacttcttcactcttactattattcttcatacg

SEQ ID NO: 84206 - DNA, 621 bp, Homo sapiens
ttttttttttttgacagaagaaacatttttaattgttctggtcctgccccatcaccaggggagtcccggcactgctcaggctcactgctcttgctttcccctgggatgtcgaggacactttgacctcatctatgtcatagcccatgtgtttctcagatgccaccgccataagatctagtgccccctggtgccattgggcaaggcaggccatagaggccaggggcagcttgggtgtgcaccaggccacagggctgtggggcatgcagccgatggtgcagcttcaggtggatgtgctgggtgaagcgactccggcagacactgcactggaagggccgggccccggagtgcaggcgcaggtgggtcttgaggatactggagctgctgaagcgcttgtggcacaccgagcacttgtggggccgctccccagtgtgcaccaggtggtgcttctgcaggtgggcaagttgagtgaagctcttctggcacaaggcacactggaatggacgctctccactgtgcacacgcaggttggaccttgagaattgagagctgccaaaagctcttgcacatatgttgcactcgtacaggattttgcattcttcttttcagcgggtaaggaaggct

SEQ ID NO: 84207 - DNA, 349 bp, Homo sapiens
ggcacgagctcagtggcctgtaggaaaatctgtttagagcaggatttgctttttcattattgaggtcatccttttatatttccaaaacatattgttcttggttttcaaacctcatttctggttctctggctgatttcaactccaagggcacaagagactatagtccccggcagatggcagttcgcgagaggtgtttgacgtaatcatccgttgcttcaagcgccacggtgcagaagtcattgatacacctgtatttgaactaaaggtgaggaatgggcaagaagaaactacatggtagatgagtgggcatttgaataacaaagaagatgacaacaagagagtgagggtc

SEQ ID NO: 84208 - DNA, 353 bp, Homo sapiens
caagatgtcggcggatgcagctccgacgaggtagacatggacagcaggcttacgccggctcgccagaaaattgaccctgaggtggccgccttcctgcagaagctacgaagtatagtgcagatcggtgtggagggcggctctgactactgtaagatcgctgagcagctgggtgacggggatgaagtcattgataagattgatatatgtgcttgaagaggaccggacggtactcttgaatatcgtacgactgctattggtatgtaccatttcgcagaccttgagtgatgagccgatattagaagtggttaacttatgactttgtacagatgcctctggtaatatctcctattaat

SEQ ID NO: 84209 - DNA, 414 bp, Homo sapiens
  misc_feature (1)...(414): n = a,t,c or g
cccacgcgtccggcttttcccagcactgcggccccggagagtgggcatcgccctggattatgaagggggcaccgcgactttcaccaacgcagagtcacatgaactcatgatacaccttaactgccaccttaacgaggtgcctggctaccttcacgtggttcacgtgtgcaggatcacgcctactgctgataatccgatgccctgacatctgaaacgatccccacatgtatgtgcttcactcccttctggcctacggactctgtgtgcgggaactagaggctgcaagtacacctcctactgagaggacctgagctcgaccatcgactgcttcaagaccatggactttgggaaagtcgaccatatctatgatgtgggctaccagtaccgtaaggctgttgttggaggctgtacccn

SEQ ID NO: 84210 - DNA, 334 bp, Homo sapiens
aagtcctccacctccggcagaaatgtcagtggtttcgtagctgagagttggtgctggcacagatggggtagtgaaattctcctacatgtggaccatcaataactttagcttttgccgggaggaaatgggtgaagtcattattcgttattcgttttcatatatgccatatgataaattgtattgctgctgcttagctataattcaagtactgtataattcagactctatttcttggtaaccgattcttcttgctatctgtctgcactttatatctcattatgatcttaactttatagattgtagcttggtctttatttcccattgcatagctctc

SEQ ID NO: 84211 - DNA, 670 bp, Homo sapiens
attcccttactttcttaataaactcgctttcactttatggattcaactgtaattctttcttgtgtgagatccaagaaccttcttgtagggtctggattgggacccttttctggtaacatcttcctggtgaccatgaagggacaatactgaagagacccctgaccctaaggaaatagactgcagcaccaatgggccaactttggggcgatcatcttgcccagaaacatcatgttgaaactcttggtcagaggttggatgaaagctgacagggtccatccaggagcaagtttgagccttgcccagttccattttgggtgctgagtggagtggcgactatagcaaacctgtgatctctggctgctgcctcagaagaaacaagagggagggatgaataatgtaaaactctggatcaatattctaattctgagcctctattggaatcagctagcaaccacatatcagcttggtttcaacagtttcccagttcatgctgctgagaagttcagagtcgaaacctgaatctcacctctggcaaagagcacaggactccatggcaaacgttgtatatacgcaagtcatccctggcaccacattgatttactgcaccaggctttcttcattgtgatgatgttctctctcttttctaaaaaaaaaataaaaataaaattta

SEQ ID NO: 84212 - DNA, 366 bp, Homo sapiens
cccacgcgtccgtggacggcgacgaaggctccgatgacgtgtactactattacacacctgccatcctcagggagctgcaagcgctcaacaccgcagaggcggcggaacaccgaccggaggaggaccggatgctcagtgaggacccttgtaggcctgctcacatgatcaagggctacatgccacttcacaacatcccccatacggaggtgatcgatgtcaccggactgaaccagtcgcacctttaccagcatctcaacaagggcacccctatgaagacccagaagcgtgccgcatctgtacacctggcacgtcctagagcaactagagattctacgacagatcaatcaacagagccatgggcctggg

SEQ ID NO: 84213 - DNA, 363 bp, Homo sapiens
gttcaacttccaacagagtctatggccaggcctgaagggagggtgaacgtgtaccaccaccttgtagagacgctcaagtttgccagggggcagaggtggaggctgggggaccctcgaagccagacgacgctgcacaatgggtcccgtcacctgatgcgggcgaacttggccgacctctgtcctggacgccctgaaagccggcgggccaagcccgtcttgctgttctggtctgtggatgtccgctccctgggttcataaatgctgcctgcctgtgtgtctctccatctgttaggtggtggtagatctgatccagaggtctgatctgatttgtgcatgtgtcactgcagctcatcatggcagctg

SEQ ID NO: 84214 - DNA, 343 bp, Homo sapiens
ccgatgcatgcctcacctgtgaaactgggattcttgcctgctctatcggtggagagggcttttattagtgcacctcatggaggattatcccttggcactccattaaatccgcattatgtgctcctaaaaggccatgatgataatgccacttatgaggactaatatctatcaatgctccacacagctagtgcacctaatgaacctacctataccctgtgcaactggaatttctacttatatttgttccctgtcaaacttatccggaagtataggccccagatataggatacccaacatgactatgcaagatatgtccagagaatattctaaggcttaatagata

SEQ ID NO: 84215 - DNA, 320 bp, Homo sapiens
cccacgcgtacgctcaggttccacttcatgtcgccccctccagcacagtcgatggttcaagccttggagttactgtatgctcttgggaggtctggactgctactgctgcctaactgaaccgcttgtactgagaattgcagagtctcctttgagtcccatgtatgccaaaatgctgcttgaatcaggacacttctattgtacagaccatatctctaatcatgggtaccatgatgcatgattcaaatatctttgcggtgccgcaaacgatattactcgctcgattcgagtgcaccgaaaacttgctgtggaggaaggccaat

SEQ ID NO: 84216 - DNA, 372 bp, Homo sapiens
  misc_feature (1)...(372): n = a,t,c or g
cccacgcgtccgcccacgcgtccgcggacgcgtgggttttaaaatagatggttagactgttggcattgatggattattttttccatttctttaacaggaacatgaatctgaaggtggaagaacacctttgatgaaagctgcaagagctggtcatttgtgcactgtgcagtttcttattagcaaaggtgccaatgttaacagggctacagccaataatgatcatacagtagtgtcgctggcatgtgcaagaggccacctggcagctgttgagcttctcttgtctcatggacctgaccttactcattcacttaaggtatggtgtaccagtgctcattgaagctgtcgtatgttggccatactcttgattagtcn

SEQ ID NO: 84217 - DNA, 322 bp, Homo sapiens
gcctgccctccttcaaggtcaagaggaaggagccaccagacaccacctcatctggcgaccagaagcggctgcggccctcgacctctgtggatgaggaagatgaagagtccgagcgagagcgagaccgggatatggcagacaccccctgtgagctcgccaagcgggaccccaagggcgtgggtgtgcggcggcggccggcgcggcctctggagctggacagtggtggggaggaggacgagaaggagtcattgtcggcgtcctcgtcctcatccgcgtcatcatcctcggggtcctcaaccacctcaccctcgtcctcgggctg

SEQ ID NO: 84218 - DNA, 299 bp, Homo sapiens
  misc_feature (1)...(299): n = a,t,c or g
gaaagggtattcagggataatggctgaaaacatccgtatttggagaaaaacataaacctacagatccaggaagtgatcaaatctcaaacaggtaaacccacagaaaccctgacatatcactaaacttctgaaaacaaagataaagattttgaaagcaattacagagaaaagacacattaccttataggggaacaccaattcaagtggcaagagatttatcatctgaaaccacaaaggacagaagaaaagtggcacaaaatttttcaacttctgaaagaaaagaattgtcaaccataaan

SEQ ID NO: 84219 - DNA, 431 bp, Homo sapiens
aggccacataattcggcacgagtttgcatctataggactatatacatgcctgcacatccctcaccttcaaaggtgaactctacacaggattcttgtcctagtcattgtggcaaccccatctgacaccttgtgtagtacctagctttatagcaggcattataaatggattggaacctaaccagaaatggtccgtatgctcagaggaacatctgcctgccaaccgttccttaaaccggtgctataaggaggagctgctgttggtataacgctgagggttccaatgttaccagagttggagccactcgtcatcaatgggtttgtggtccccagggaagtcggaaaagctgattctgaaatcaattttggggctgctgatctgtggtattccttctgctggaaggtcattggatatttcccagggggtgagagcg

SEQ ID NO: 84220 - DNA, 518 bp, Homo sapiens
  misc_feature (1)...(518): n = a,t,c or g
agaatgtatagtggctgggtcacatcccataagcatccagtggttcaaagatgaccaagaaatatcagctagtgaaaagtacaaattctcttttcatgacaatactgccttcttggaaatcagccagctggaaggtacagacagtgggacatacacttgttctgccacaaataaggcagggcacaaccaatgcagtgggcatctgacagtcaaagaacccccttactttgtggaaaagccacagtcacaagatgtcaatcccaacacaagggtacagttaaaggctcttgtgggtggcactgcacccatgacaataaagtggtttaaagataacaaagagttacactcagggaggcaggcccgctcaggtttgggaagggatggacacctctaccagtctaggaggctctttggcaggccaaggcttaccgtttctggggaacctacatttggccaactagggcaatggtgttggggcacaggcaaccggcaaaggccanttttttggtaaaggttgg

SEQ ID NO: 84221 - DNA, 147 bp, Homo sapiens
ttttttttttttgaaacaaagtctttaatgccacccaggctggagaacgggggcacaattttggttcactgcaacctccccctcctgggttcaagtgattttcctgcctcagcctcccaaaaactggggttaaaggcacatcccacg

SEQ ID NO: 84222 - DNA, 774 bp, Homo sapiens
tttcgtgaagaaggtgcctgcttctctttgccttccaccatgattgtaaatttcctgaggcttttccagtcatgtggaactatatcgcaaacggcaccagttcaggggggtaccgcccgcctcccagaaccaaagaagtcatcatcaatggccagaccgtgaaacttaaatactgtttcacctgcaagattttccggccccctcgcgcctcccattgcagcctttgtgataactgcgtagaacggtttgatcaccactgtccctgggtaggcaactgtgtggggaaaagaaactacagatttttttatatgtttattttatctctgtcttttctgacagtctttatatttgcattcgttatcacccacgtcattcttcgttcacagcaaacaggattcctaaatgcccttaaggacagtcctgcaagcgtcctggaggctgtggtgtgcttcttctctgtctggtccatcgttggcctctcaggattccacacctacttgatcagctccaaccagacaacaaatgaggacattaaaggatcctggtcaaataaaagaggtaaagaaaattacaatccctacagctacggaaatatctttaccaactgctgtgttgccctgtgtgggcccatctcaccaagcctgatcgacagaagaagggtacatccagcccgacacgccgcagccagcagcaccctccaatggcatcaccatgtacggggccacgcagtcacagagtgacatgtgcgaccaagaccagtgcattcagagcacc

SEQ ID NO: 84223 - DNA, 460 bp, Homo sapiens
ataaagtgttctgacgcttcagactagatccccaagtaagcccttgtctacggaaattaatggattgggaagtagtaagcagaaattcaatatctgaggacaggttagaaacacaaagtcgtgcatcacgatctccaccggtaactcctaatcaatcacaagagacccctgtagatggcaagcctctagctttaccacccaaccagtcccagaaaaacattcggtaccatatccattatttacatttacaatactacctagaccgtcatattagtgccacacttccaatcccatcctcttctggtatacccactcctattgccgtaatcactgacgccctaactgaccttgtagagctgattcttggtcagccttgctctgaggagtctggtagggcaccaggtacccttttcttgcttgccctctgaagcttacttccgtgtagcttgtcactctagcg

SEQ ID NO: 84224 - DNA, 1843 bp, Homo sapiens
  misc_feature (1)...(1843): n = a,t,c or g
cccacgcgtccgaaaagagctcttggaaaagcaccaaagggagcttcaggagggaagatatgaatctgaaaagcttcaacaggaaaattctattttgagaaatgaaattactactttaaatgaagaagatagcatttctaacctgaaattagggacattaaatggatctcaggaagaaatgtggcaaaaaacggaaactgtaaaacaagaaaatgctgcagttcagaagatggttgaaaatttaaagaaacagatttcagaattaaaaatcaaaaaccaacaattggatttggaaaatacagaacttagccaaaagaactctcaaaaccaggaaaaactgcaagaacttaatcaacgtctaacagaaatgctatgccagaaggaaaaagagccaggaaacagtgcattggaggaacgggaacaagagaagtttaatctgaaagaagaactggaacgttgtaaagtgcagtcctccactttagtgtcttctctggaggcggagctctctgaagttaaaatacagacccatattgtgcaacaggaaaaccaccttctcaaagatgaactggagaaaatgaaacagctgcacagatgtcccgatctctctgacttccagcaaaaaatctctagtgttctaagctacaacgaaaaactgctgaaagaaaaggaagctctgagtgaggaattaaatagctgtgtcgataagttggcaaaatcaagtcttttagagcatagaattgcgacgatgaagcaggaacagaaatcctgggaacatcagagtgcgagcttaaagtcacagctggtggcttctcaggaaaaggttcagaatttagaagacaccgtgcagaatgtaaacctgcaaatgtcccggatgaaatctgacctacgagtgactcagcaggaaaaggaggctttaaaacaagaagtgatgtctttacataagcaacttcagaatgctggtggcaagagctgggccccagagatagctactcatccatcagggctccataaccagcagaaaaggctgtcctgggacaagttggatcatctgatgaaatngaggaacagcagctgctttggcaagagaatgagaggctccagaccatggtacagaacaccaaagccgaactcacgcactcccgggagaaggtccgtcagttggaatccaatcttcttcccaagcaccaaaaacatctaaacccatcaggtaccatgaatcccacagagcaagaaaaattgagcttaaagagagagtgtgatcagtttcagaaagaacaatctcctgctaacaggaaggtcagtcagatgaattcccttgaacaagaattagaaacaattcatttggaaaatgaaggcctgaaaaagaaacaagtaaaactggatgagcagctcatggagatgcagcacctgaggtccactgcgacgcctagcccgtcccctcatgcttgggatttgcagctgctccagcagcaagcctgtccgatgggtgcccagggagcagtttctgcagcttcaacgccagctgctgcaggcagaaaggataaaccagcacctgcaggaggaacttgaaaacaggacctccgaaaccaacacaccacagggaaaccaggggacaactggtaactgttcatgggagggaacgattgttaggaagtttgaacagaaattgaaatttgttgaaaaggttttttcaagagaaagtgaatcagctcaaagaacaagtgagcctacccggtcatctctgttcacccacctcacattccagctttaactccagttttacatccctttattgccattaactcgttaacttatgttgtctaataaaggcaaattctattat

SEQ ID NO: 84225 - DNA, 70 bp, Homo sapiens
ttttttttttggggccccaaaatttaattcccgggcccggtttttaaccgggcggggggggaaaaacccg

SEQ ID NO: 84226 - DNA, 384 bp, Homo sapiens
aaaatgaatatgatcttattctgaactcagacataaacagcaatcattatcatcagtggttttactttgaagtcagtggaatgcgaccaggtgttgcttacaggtttaacatcattaactgtgaaaagtccaacagtcagtttaattatggaatgcagccactcatgcattcgcgtccaggaagcattacatgccataccatggtgcactcgactgggcatagacactagttactcttaatataatcagtcaataaggtcatatccctccccgcccgcccttataaaccttccattcttgtaacatcaaaacgtcccagttctcccccctctgcatgctcacactctgatcgttttttaaacaccactatctcgtatatccccc

SEQ ID NO: 84227 - DNA, 488 bp, Homo sapiens
tcgaaaagagggaagcataggagttgggagctggcggtcgttcccggggaagaactgctaaaacatgagaccaaggcacagaccttactgtatgagaagcaatgctcctcaaaccttctgcgtgctgacatagaccttcccagaagcaaaactgttggcggcgacctgagcgctggaagccgaaggggaagaggaaggagacgcgaagccagggcggccggcacaaaggcggcggactcgcggcggcagcgcctgcccggccgggagcacaacccacggccctactccagcgaagtcccgcaccggcttctaggaataaagtttacgttctcctgaggccgcaccccccacctcccacccaggacggcacatctccgtgtcctcctcccccaaactccacttcgggaccccgagaaccaccccagcctttccggccaccacaacaaagagccgcaccgaccggcgaggataaacagcgggcggagggc

SEQ ID NO: 84228 - DNA, 737 bp, Homo sapiens
aggcatgacttcatctggatccaggcctcacctatcagcgcttccttcctgggcagggctgaggattcactcactgcccacggccggctgagcagggacaggagaatgagaggcctccgctggcgttacactcggctgcccagccaggtggaggacaccctgtctggggaggagggtaacgaagaggaagaggaggaggaggcagctccagacccagctgctgctcctgaggatcccacggtgccccagctgacagaagccagccaggttttgagtgcctcagagattcggcagctcagctttcacttcccaccaagagtcaccggccatccctggagtctggtcttctgcacgtcaagggacggtttcagcctgcagagcctgtaccggcggatggagggctgcagcgggccagtgctgctggtgctcagggaccaggacgggcagatatttggagccttctcctcctcggctatccgactcagcaaaggcttctatggtactggcgagacattcctcttctccttctccccacagctgaaggtctttaagtggactggaagcaactctttctttgtgaagggagacttggattcactgatgatgggcagtggcagtggcggtttgggctgtggttggatggagacttgttccgcgggggaagctccccttgcccgaccttcaacaacgaggttctggcccggcaggaagcaagttctgcaatccaggagctggag

SEQ ID NO: 84229 - DNA, 431 bp, Homo sapiens
  misc_feature (1)...(431): n = a,t,c or g
cagccgancgggcgcctatgcctttgagaccaacggcttccccatcatgctggtgctcacgaccgacaagatcgagggcgacgtcggcattgcgggcctgtacgacatgcacactctccctgcctatggcgttcttactgcgaactttagtaagatgcacctcatatatcataccagtcacccatgtgctaagcacaccagtgacctgcctgaggcggcgtgagaaggacggcgtcattgtggacgtgctgagcgacacggcgtccaatcacaacggcttccccgtggaggagcatgccgatgacacccatcctgcccggcttcagggcccgaccctgcgctctcagcccatggggcctctaaagcacaaggcgtttgaggagcgtgccaacctgggcctggtacagcggcgcctgaggctagaggactcn

SEQ ID NO: 84230 - DNA, 692 bp, Homo sapiens
ccctccctcatcaccagcagtgaaaatctagagctggagctcagcctctgggaaggcccagcatggaggcagccacagctccggaggtggccgcaggatccaagctgaaggtgaaagaagccagcccagcggatgctgaaccaccccaggcttcacctggacagggggctggcagccccactccccagctcctgccccctatagaagagcaccccaagatctggctacctcgggccctgaggcagacctacatccggaaggttggggacacagtgaacctactaatcccattccagggcaagcccaaacctcaagccatctggacacatgatggctgtgccttggacaccaggcgtgtgagtgtgcggaatggggagcaagactccatcctcttcatccgagaagcccaacgtgctgactcaggtcgctaccaactccgcgtgcagctgggtgggctggaggcaccgccaccattgacatcctggtgattgagaggccaggcctcctcagagtattaagctggtggacgtttggggcttcacgctacactggaatggacaccgccccaagatacggggaatacagcacttctgggatacacggtgcagaaggctgacacaaaatccgggctgtggttcacggtgctggagcatatcaccgcaccagctgcatcgtctctgacctcatcatcg

SEQ ID NO: 84231 - DNA, 489 bp, Homo sapiens
agaatccataaaaagtaataaatgagttcaacaggttgcaggatacaagatcagttttatttctctactaacagcaaacattctgaaaatgagaataaagaaatcctatatacagtagcatcaagaataaaactccaacacgtttaaagaaattaagatccagataaatggaaagacatccatgttcatggattggaagactgaatattggtaagatggcaatgctgcccaaattagtctacatattcaacaattcctatcaaaatcctagctgtattttttgcagaaattgacaaactggtaaaattggtagggaaacgcaggggacccagaatagccaaaaaaccttggaaaagaacaaagttggaagacgtaccaatttcaaaaagtgctaccaagctacaataagacagtgtaggcatatggatagacatatcgatcagaggaatggaactgaacatccagaaataaacccatacatttctggtc

SEQ ID NO: 84232 - DNA, 470 bp, Homo sapiens
  misc_feature (1)...(470): n = a,t,c or g
ncgctggaaaactggccgcttcgagcntctncggaaantcgggncgacccacgcgtccggaagacgtccaggactaagaccattccatagtgtccaaactgattacacagaaatacctcaataggtcacctaaaattcctattagtaatagtggatcacctcactcactgggtagaagctattcccttttcaaatgcaactgctaataatgtagttaaggcattaattgaaaatattgtacccaggtttgaaataataaaaaacattgattcagataatggaactcgtttcagtgcaaatattgttaaagggcttactcaaactctaggaataaattgggaatatcatactccatggcatccaccttcatcaaggaaggtagaaaaaaatgaaccaaactttaaagaatcatttaaatcgattttgaaaacttcattgccttggaccaagtgctccccattgccctgctc

SEQ ID NO: 84233 - DNA, 420 bp, Homo sapiens
taatagatcgttcaattagaccgctctttccagctggctacttctatgatacacaggttctgtgtaatctgttagcagtaaatggtgtaaattgagcctgatgtcctaccaattaatggcgcttccgtagccctctcattatcatatattccttggaatggacctgttggggcagtacgaataggaataattgatggagaatatgttgttaacccaacaagaaaagaaatgtcttctagtactttaaatttagtggttgctggagcacctaaaagtcagattgtcatgttggaagcctctgcagagaacattttacagcaggacttttgccatgctatcaaagtgggagtgaaatatacccaacaaataattcagggcattcagcagttggtaaaagaaactggtgtaccaagaggacac

SEQ ID NO: 84234 - DNA, 2307 bp, Homo sapiens
aaaatcacctcgggaccctgatgcaaaactgggattcttcttcccgtgtacctttttcaagtgggcagcactcaactcaatctttcccaccctcattgatgtcaaagtccaattcaatgttacagaaacccactggcctatgtgcggcccatggacggacaggagtccatggaaccaaagctgtcctctgagcactacagcagccaatcccatggcaacagcatgactgagctgaagcccagcagcaaagcacatctcaccaagctgaaaataccttcccaaccactggatgcatcagcttctggtgatgtgagctgtgtggatgaaatcctaaaagagatgacgcattcatggcctccccctctaacggctattcatacaccatgcaaaacagaaccttccaaatttccttttccaactaaggagtctcagcagtccaattttggcactggagaacaaaaaagatataatccttctaaaacttcaaatgggcaccagtctaaatctatgttaaaagatgacttaaaactaagcagcagtgaagacagtgatggggaacaggattgtgataagacaatgccgaggagtacaccaggaagtaactctgaaccttcacaccataatagtgaaggagcagataactccagggatgattctagtagccacagtggatctgaaagcagctctggatctgactcagagagtgaaagtagttccagtgacagtgaggcaaatgagccatcccagagtgcatctcccgagcctgaacccccgccaacaaacaaatggcaacttgataattggctgaataaagtgaacccacataaagtgtcacccgcctcttcagtggacagtaacatcccatcatctcaaggctacaaaaaggaaggccgagagcagggcactgggaatagctacactgatacaagtggacctaaagaaacgagttccgctactccgggacgagactcccaaacccatccaaaagggatcagaaagtgggcgtgggaggcagaaatctcctgcacagagtgacagcacaacacagagaagaactgtaggcaaaaaacaacccaaaaaggctgagaaggcagctgctgaagagcctcgtggaggcctgaagatagaaagtgaaacccctgtagacttggctagcagcatgccctccagcagacacaaagcagccaccaaaggctcaaggaaacccaatataaagaaggagtctaagtcttcccctcgacctacagcagagaaaaagaaatataagtcaacaagtaaatcttcccagaaatcaagggaaatcatagaaacagatacctcatcctcagattcagatgaaagtgagagccttcctccttcctcacaaactcctaagtaccccgagagcaataggactcctgttaaaccctcctcagtggaggaagaagatagcttttttcggcaacgaatgttctctcctatggaagagaaggaacttctttcacccctcagtgagcctgatgacaggtacccacttattgtgaagattgacctgaatcttttgactagaataccaggaaagccttacaaagaaacagagccgcccaagggggaaaagaaaaatgtgccagaaaagcacacgagagaggctcagaaacaagcctcagaaaaagtttccaacaaaggcaagaggaagcataagaatgaagatgataaccgagccagtgagagcaagaaacccaaaacggaggacaagaattcagcaggccataagccatccagcaacagagagtcatctaagcagagtgctgcaaaagaaaaggatttgttgccttctcccgctgggcctgttccttcaaaagatccaaaaacagagcatggctctcggaagaggactattagtcagtcttcttccttaaagtcaagcagtaacagcaacaaggagacgagtggcagcagcaaaaacagttcctccacatcaaagcagaagaagaccgaagggaagacttccagtagctccaaggaggttaaggtaaaggctccaagtagctcctctaactgtcctccatctgcaccaactcttgattcttctaagcctcggagaacaaagcttgtctttgatgacagaaattattcagcagaccattatttacaagaagcaaaaaagctaaagcacaatgcagatgcattgtctgataggtttgagaaagctgtatactatcttgatgctgtggtatctttcattgaatgtgggaatgcattagagaagaatgctcaggaatccaaatccccattccctatgtattcagagacggtggatctcatcaa

SEQ ID NO: 84235 - DNA, 395 bp, Homo sapiens
  misc_feature (1)...(395): n = a,t,c or g
ccagcccgggcttcctgccctgtggccgcaggtgggtggaaggcagagcctggggtggatgagtctgtcgcccacccaggccaagccaggctgttcttggggtggaggctgcgggcctgctcccttacccctctgctgcccgcctaactgcccctcaggacctccctggcccacccgcctcccagctccatctcctgctggcagctcctgcctgggggcagacacctccctccctcctgggctccctcagtctggctgcaggtggcactgtcgggccccacaatggcctctgccctgtcccttggagtgggacccangagtctggtgggtgatggagctggcgagcccgtcccaggcaagcagcttgaaggccatggggtaacgccctgcccccc

SEQ ID NO: 84236 - DNA, 482 bp, Homo sapiens
ggcacgaggattaccagcaatgtgcagtacctgaaaagcaggatattatgaagaaactgaaggagattgcattcccaaggacagatgaattgaaaaacgaccttttaaagaaatataacgtagaataccaagaatatttgcaaagcaaaaacaaatataaagctgaaattctcaaaaaattggagcatcagagattgatagaggcagaaaggaagcggattgctcagatgcgccagcagcagctagaatcggagcagtttctgtttttcgaagatcaactcaagaagcaagagttagcccgaggtcaaatgcgaagtcagcaaacctcagggctgtcagagcagattgatgggagcactttgtcctgcttttccacacaccagaacaattccttgctgaatgtatttgcagatcaacctaataaaagtgatgcaaccaattatgctagccactctcctccctgtaacagggccttaacgcca

SEQ ID NO: 84237 - DNA, 421 bp, Homo sapiens
  misc_feature (1)...(421): n = a,t,c or g
catcttggagcgcagagcatgctatggccttcaacttcttactgcagagccggggcagctacaattttctgacatcacccagcctcaggtacgaagagatgtcttctgtgcccagaggagcagtactcaagccgcaccagagatggctgcctgcccaggacagagaccttcctggcctttgacgaccccctgggactcatgctcgccttggtggcgctcatgctggccagcctggcagtgctggtcctcagactgttctgaagcaccgagacacacctgtggtcggggccaacaacagagctctcagctgcacgccgctcacctccctgaccctctgtgccctctgtcccttgccttgccttggttgtcccacagntgccacctgccgcctctaccagaccacagttgctgttgtgttcan

SEQ ID NO: 84238 - DNA, 515 bp, Homo sapiens
acgccaagcttggcacgaggcctcgtgccagcgaggaagccggaagccaggtgcggggagcctcccccttcgactgcagcctcgctccgtgccttctgcgcgcctgggatcccggagcctgcctaggttctgtgcgctcccgcccaggccggtgcccgccgcccgcctgcgcctcagccccgagtgcgagatcgagcgtcctgagcgcctgaccgcagccctggatcgcctgcggcagcgcggcctggaacagaggtgtctgcggttgtcagcccgcgaggcctcggaagaggagctgggcctggtgcacagagtacctttcactgcgcgcggctggccgcaggggctggactgcagctggtggacgctgtgctcactggagctgtgcaaaatgggcttgccctggtgaggcctcccgggcaccatggccagagggcggctgccaacgggttctgtgtgttcaacaacgtggccatagcagctgcacatgccaagcagaaacacgggctacacag

SEQ ID NO: 84239 - DNA, 411 bp, Homo sapiens
cctcggcgagcttgcttactgcacaagatgcgcggcctcctatgagatgactgagccaccctcaccgtccgtgtccccggcacagacaggcaccatctcctgctctgcatattatttcctggataagtatacttcctgggttcatcacaaagcaggccactctactgcgttgctcatttttcaaaagagtaagcggacctcacagatctctgcgcgattgtctggctccgactttgggaacacagccactctgaccatcagcgggacccaagctgtggacgatgctgactattactgctcggcgtcagacacaaacactgttacatgggcgttcggcggaggcgaccaaactgaccgtcctatgtcagcccaaagctgtgccctcggtcactctgtatccgccctcctctg

SEQ ID NO: 84240 - DNA, 863 bp, Homo sapiens
cccacgcgtccgcacgaagttttgggagggggtcggtttggccaggtccacaggtgcacagagaagtccacaggcctcccactggctgccaagatcatcaaagtgaagagcgccaaggaccgggaggacgtgaagaacgagatcaacatcatgaaccagctcagccacgtgaacctgatccagctctatgacgccttcgagagcaagcacagctgcacccttgtcatggagtacgtggacgggggtgagctcttcgaccggatcacagatgagaagtaccacctgactgagctggatgtggtcctgttcaccaggcagatctgtgagggtgtgcattacctgcaccagcactacatcctgcacctgggacctccaagccggagaacatattgtgcgtcaatcagacaggacatcaaattaagatcattgactttgggctggccagaaggtacaagcctcgagagaagctgaaggtgaacttcggcactcctgagttcctggccccagaagtcgtcaattatgagtttgtctcattccccacagacatgtggagtgtgggagtcatcacctacatgctactcagtggcttgtccccatttctaggggaaacagatgcagagaccatgaatttcattgtaaactgtagctgggattttgatgctgacacctttgaagggctctcggaggaggccaaggactttgtttcccggttgctggtcaaagagaagagctgcagaatgagtgccacacagtgcctgaaacacgagtggctgaataatttgcctgccaaagcttcaagatccaaaactcgtctcaaatcccaactactgctgcagaaatacatagctcaaagaaaatggaag

SEQ ID NO: 84241 - DNA, 402 bp, Homo sapiens
ccaattggtcaggagcatgcaccctagtgtctcaatctccagacattaacatcctgccaaacaaccagaccatccaggttcctttagtgacccctatctcatcctcttccacatgcagtaggcagggtctgcatctcattcccttgttaagagggttaagcatctctgccacactcagcaccagaacagcaggtgtatcaacctcgccggcctatatcaaaaaatctccacagtcctttatagtaccctagaggacatgcatacctccattacaaacctccagaggcagatagactccgttgctggagtcgtcctccaaaactggagggccctagacctgctaatcactgagaaagggggcacatgtatatgcctccaaaaagaatgctgcggacgcgtggg

SEQ ID NO: 84242 - DNA, 415 bp, Homo sapiens
aagatttttaggcacagttcgctgctcattgaacaccaggctcttcatgctggagaggagccttataagtgtaacgaacgtgggaaatccttcaggcataactctaccctaaagatccatcagagggttcacagtggagagaagccttacaaatgcagtgagtgtgggaaggccttccaccggcacactcaccttaatgaacatcggcgaattcatacaggctacagaccccacaaatgtcaggaatgcgtcaggagtttcagccggccctcacatctgatgcgacatcaggccattcacaccgcagaaaagccctatagctgtgctgaatgcaaggagactttcagcgataacaatcgccttgtgcaccaccagaaaagcacactgtcaaaaccccatatgaatgtcaggagtg

SEQ ID NO: 84243 - DNA, 441 bp, Homo sapiens
  misc_feature (1)...(441): n = a,t,c or g
gaaaagccttcagtttcaccacatctcttattggacaccagagaatgcatactggagagagaccttataaatgcaaggaatgtggaaaaacatttaaaggtagttcatctcttaataatcaccagcgaattcacacaggagagaagccctataagtgtaatgaatgtgggagggccttcagtcagtgctcatctctcattcagcaccacagaattcatactggggagaaaccgtatgaatgtactcagtgtgggaaagccttcacttcaatatcgcggctaagtaggcaccatcgaattcatactggagagaaaccctttcattgtaacgagtgtggaaaagtattcagctatcactcagcccttatcatacatcagagaattcacactggtgagaaaccatatgcatgcaaagatgtgggaaagccttcaccaaagctcn

SEQ ID NO: 84244 - DNA, 419 bp, Homo sapiens
atatatatggctggacatgcacgtatatctatagaagtacacccatttgctggaacagccctgtgtaattagtcgagacgaagtctgcctggtttaaaaagccttttgtacacatatttttaataaagatctctcccctgtgtctgcctatcctcctgccaagccgaggagctgcttacgttcaccctgactttttcctgtaaggtgggcccccagggccattcctggcacacacacatgctggactccaagccccaggccccctccttgccccagctggggacgagggggacctcctgctccttgcagtgcaacagagctgcctggcagaccatctgctgacagcgtcatgggggggcaaaatccaatcccaaccaaggctcttggagagggacaagaagggcttcccttgactgtgg

SEQ ID NO: 84245 - DNA, 400 bp, Homo sapiens
ttcacagcagaatttgtattttaatgggatgttagataactacagaaacctgggcttcctgggtattgctgtctctaagccagacctgatcacttgtctggagcaaggaaaagagccctgcaatatgaagagacatgcgatggtagccaaacccccagttgggtgttctcattttgcccaagacctttggccaaagcagggcttaaaagattcttttcaaaaagtgatactgagaagatatggaaaatatggacatgagaatttacaattaagaaaaggctgtaaaagtgcggatgagcataaggtgcacaaaagaggttataatggacttaaccaatgtttgacacctcccccaaaccaaaaaatttcattggtgaaaaatatggtaaagtccttcata

SEQ ID NO: 84246 - DNA, 343 bp, Homo sapiens
ctgcccactgtgagattatatgtcatgcttatagacctttgttacactccatatggtgttcgaagtgccttgcctctcgagtgtgcctgtactgaccactgtgcttgaacctggaaggcggcattcacactggtcttgcttgatgaaatgaggaacatgctgcgcactgcatgcagaggtgtaaatctaataggcggcagatgagacgggctttcaggaaggaagtccacttcttctgcaggatcttcttccctcccaggtctccctggggaggtagaggcacgggataaggggccagggtcagaggtccagcctcttacccgtgccccacggcagcccaatc

SEQ ID NO: 84247 - DNA, 270 bp, Homo sapiens
tgggctccatcctgaactccatggataatccacccaaccttggtgagcaggaaactcggcgcaagggcccagaacaggccggccgcctgaaaaaactacaagagcatgagattcaccttaaagtggagtttcgtgaaaggaaggacaatgaggggtcatgatttcatatcggaaccgtgggcagatcaagaaagagtttctgccgatgaacaccattgagaggagcatactacatgatggggcggatgcggctggcctgacatcattgtc

SEQ ID NO: 84248 - DNA, 378 bp, Homo sapiens
tgatggcaagtcagagaattggggaaattttatagctaaagaggaggaaaaacccaatcaccaggaatgggactcaggagaacataccaatgcctgtgtccagcagaattcatcctttgtagacagaccctataaatgttccgaatgttggaaaagcttcagtaatagttctcatttgcgtactcaccagaggacccactcaggagaaaagccttataaatgctctgagtgtgcaaaatgtttttgtaacagttctcacctgattcagcatctaagaatgcacacaggagagaagccctaccagtgtggtgaatgtgggaaaagcttcagcaatacctcccatcttattatccatgagagaactcacacgggagagaa

SEQ ID NO: 84249 - DNA, 373 bp, Homo sapiens
acgccttcttatgacaatgaagagacatttttgctctcttacttttatgaaatcgacaaaggacatcgttactttgatgccccggaactgctttcctttgataaaaggtccacccctgatttcacagaacgttgccatgctgatgataaagctgacctgcctgcttccaaagctcgatgaacttcgggatgaagggaaagctccgtctgccaaacataaactcaagagtgccagcctccaaaaatttgcagaaagagctttcaaagcatgggcaatagctcgcctgagccacacatttcccaaagctgaggttgcagaaggtgcccagttattgacagatcttaccaaagtccacacggaatgctgccatgga

SEQ ID NO: 84250 - DNA, 368 bp, Homo sapiens
cgacgtctcaagaggtaaaagtggagagtcctctgtggagagagtcctctgtgggagagagtcctctgtgggagagagtcctctgtggagagggtcctctgtgggaagagtcgtctgtgggggagagtcctctgtgtgggagagtcgtctgtggggagagtcctgtgtggcgtgatgcccatgtggagagagtcctctgtgggggagagtcctgcgcgggggagagtcctctgtggggagagtcctctgtgtggagagagtcctgcgtgggagaaagccctgtgtggggagagtcttctgtctgggacagtcctctggggagagagtcctgcgtgggggggagttctctgtggggagagtcctctgtg

SEQ ID NO: 84251 - DNA, 361 bp, Homo sapiens
aggaactcaaatgccctaggccactccctggcctcccaaaaacccactgctgctcctcaccccagactgctacagtgagaccgaagcagaggacccggacgatgaggctgggtcccactcagcctcggtgagtggggggctgccgggggtaggaggtggggataaacaacagggcgtggagctcagacagaaaccctctgtgctttccaccctgcctgcagcccagccctgctcaagctgggagtcccctccatggagacacatcacctgcagccacccccacacagcgcagcccacggacctcctttggctctctgacaggtgctgggctggagttgggagctgggctgggggctggggt

SEQ ID NO: 84252 - DNA, 2172 bp, Homo sapiens
ataacttctttgtggatgattatgctagatttactatcttggattcccaaggcaagactgctgctgtagccaatagtatgaactatctgacaaagaaagatgattcttttattaggccagtaactttttggattgttggggattttgatagcccttctggacggcagttactgtatgatgccatcaaacatcaggcaattcaaaaatatctacaatatgactcccgtttcccattttgtgaacagaaatccagtaacaatgttagaataagcatgatcaataatcctgccaaagagataagctatgagaacactcagatctccagagcaatctgggcagctctccaaactcagacttccaacgctgctaagaacttcatcaccaaaatggccaaggagggggctgcagaggccctggctgcaggagctgacattgcggagttctctgttgggggaatggatttcagtctttttaaagaggtctttgagtcttccaaaatggatttcattttgtctcatgccgtgtactgcagggatgttctgaagctgaagaagggacagagggcagtgatcagcaatggaaggatcattgggccactggaggatagtgagctctttaatcaagacgatttccacctcctcgaaaatatcatcttaaaaacctcaggacagaaaataaaatctcatattcaacagcttcgggtagaagaagatgtggcaagcgacttggtaatgaaggtggatgctcttctgtcagcgcaaccaaaaggagatccaagaatcgagtaccagttttttgaagacagacacagtgcaatcaaactgaggccgaaggaaggggagacatactttgatgttgtggctgtcgttgaccctgtcaccagagaagcacagagacttgctcctttgctcttggttttggctcagctgataaacatgaatctgagagtatttatgaactgccaatccaaactttctgacatgcctttaaaaagcttttaccgttatgtcttaaaaccagagatttctttcacttcagacaatagttttgctaagggtccaatcgcaaaatttttggatatgcctcagtcttcactgttcacctctgaatttgaacacaccttgagagctggatggtggacagtgtagtggctgctgagtatgagctggaatacctgttactggaaggtcattgctacgacatcaccacaggccagcctccacggggactacagtttaccttaggaacttcagccaacccggtcattgtggacaccattgttatggccaatctgggctactttcagctgaaagccaacccaggagcttggatcctcagacttaggaagggacgctctgaagatatttatagaatttacagccacgatggcaccgattctccccctgatgctgatgaggtggttatcgtcctcaacaacttcaaaagcaaaattattaaagtgaaggttcagaagaaggcagatatggtgaacgaagacttgctgagtgatggaacgagtgagaatgaatctggattttgggattccttcaaatggggctttacaggacagaagactgaggaagtgaagcaagataaagatgacataattaatattttctccgttgcatctggtcatctctacgaaagatttcttcgcataatgatgctatccgtgctgaagaataccaagactcctgtgaaattctggttcttgaagaattacttgtcccccacatttaaggagtttataccttacatggcaaatgaatacaatttccagtatgagcttgttcagtacaaatggccccggtggcttcatcaacaaactgaaaaacagcgtatcatctggggttacaagatcctcttcctggatgtacttttcccactagttgttgacaagttcctgtttgtggatgctgatcagattgtacgaacagatctgaaagagttaagagatttcaatttggatggtgctccttatggttacactcctttctgtgacagccgaagagaaatggacggctacaggttctggaagtcagggtactgggccagtcatttagccgggcgaaagtatcatatcagtgcactatatgttgtggatctgaagaagtttaggaaaatagctgctggtgacagactcaggggacagtaccaaggtctgagtcagga

SEQ ID NO: 84253 - DNA, 324 bp, Homo sapiens
ctttgcagttccatatgaattttagaacaagcttttgatttttacccaaaaatctgctgtgattctcattggattgtgttaaatcataaatcaatttgggaaggactgacattttaataatgttaatttttctgatccatgaacatagtacgtcttcctagtttgctaagaatatttttcaggaatcaatgttagatttttgtcaagtgcattttctgcatatttcaaggtgattatatggctcctctttggtctgttaatgcggcgaatttattgattttcaaatgttgaattagttttacattcctggaaggaacatacttg

SEQ ID NO: 84254 - DNA, 842 bp, Homo sapiens
  misc_feature (1)...(842): n = a,t,c or g
ttttttttttttgacggggtatcagctttattcttatttccttaaaaaaaataaaaggctgaattcctcatttacctattccaggcaaagtgattggaaagaacgggaaagtgatccaggagattgtggataaatctggtcgtggtgagggttcgagtggaaggtgataatgacaagaagaaccccagggaggaggtatgggtacggggcaagtgggcatagagattggtttccagaagtaaatgggattgtcctctgagggctgggattgttctttgagagggtgggagtacggaaagttgtttaacactagtagattttagagccccagaatgatccccacctngggcaggctcccctagggagactggggcgcgttaatccttccatttcattttcctttctgatccatcgtttctgctctctgttctctagggaatggttcccttcatttttgttggcacccgagagaacatcagcaatgcccaggctttgctggagtatcacctctcctacctgcaggtacccaggccgggagagaaaaatgctgggtgtgaaaagggaactaagactgctgtgggggtcagctcagggattttggttctctgtttgtctctccgtgtagaacagaaaacatctgtggaaatttggggctatagggttgggtcccagaattttccttgtttagccagtgtcttccttctccctgcattcctgagaggttagatatagagggacagtcagggtgcagaagcatgaagcaaggcactgatcttatttctccttccccttcttccatcttttacccaaccaggaggtagagcagcttcgcttggagaggc

SEQ ID NO: 84255 - DNA, 388 bp, Homo sapiens
ggcacgagccataaatggctctctcatcagcaaactccttcaagctgccaggcttctacagaaaggtgccatcatttattgcagggcccaccaaaccccggatgatcctatatcagctggaaataggctagcagatcagataaccaaacaagtagccctccaacccatgcaaggccagtttctgtccctgtcctttttctctcctctttactcctcagaagaaaaggaggacttccaagcccaaaaccttcaaaagcaaggaccatggtatgtcaaggaaaggtgctttattcttcctcactctcaaagccttcctcacctccaaagcctccacaaccctttccatatcagttacaacctctcttgcaacttctctgccctattctca

SEQ ID NO: 84256 - DNA, 466 bp, Homo sapiens
  misc_feature (1)...(466): n = a,t,c or g
ccccgcccnttttttttgatngccctagaacctgcccanaaccccggncgacccacgcgtccggcgatggcgaaaactggaagagcagcggcagcgggttgaccaattgagagctgctgtggaagagaaaaggaaacagaggctccgggaggaggaggaacggctggaggcgatgatgcgccggtccctggagcgcacacagcagctggagctgaaaaagaagtattcgtggggagcaccactggccattggacccggaggacatgatggtttatcagccagcaccctccctccggatgcagggaccactgccgcagctgccgagtccaccaacgcatgtgacaaactttcaacatcaactatgagtttgccaaagccaacggagcctcccatgaataaacgcctgtcttcatccaccgtggcaatatcctattccccagaccgagtattccatgtctgtcctcgt

SEQ ID NO: 84257 - DNA, 750 bp, Homo sapiens
ctgggtaggggtggatgccattggcgaacaatttcttccgcagcaggttgcccattggcctgaggttggggtcataggtgcggccgccaggccattcatgttgagggccgccatctgctgcatttgggcggcagcgaaggcagccatggggttcaggtagccgccctgcgcgactgatgccatcagggccgcttgctgctgcatcagtgcctgagcgtaggcgccgtaggccccgaaagggatggccatggggttgaacatgcccatctggccagccatctgctgcattcgccgcatcgtgcgctccttgtcggtgtcggcgaacttgaccaccagactggacgaggctcccggcatggtctggctgccgtgtagcgcgttgatggcggcctgcgcctcggcgtgggaggagtacttcacaaaggcgcaccccttgctgttgccgtcgggcccgcgcaggatggttgcaattccttcgatgttccccaaaggccttcgaaaagggcgggcgcaagttcgttcctcggattttttgtttttttgaagcattgcccacgaagagttttctatcttctcctcggctctcgctgtccgcaggcttcacctggatcggccggttcatcccgggcagagtcttctgctcgtgcagcgcgctctgggccttcagcgctgactcacgctcgcagtaggtgaggaagcgcagcctctagccacacttgaccatgggctgtctttctggccggtaggagc

SEQ ID NO: 84258 - DNA, 385 bp, Homo sapiens
  misc_feature (1)...(385): n = a,t,c or g
agaggcacagtcgggcacacctgtgccagccatttcatctggtcatgcgggacctgctgcaactgggccaggacataccccagggatgccactacctggaggaaaatcacttgatccacagggatattgccgcccgcaactgcctgctgagctgcgctgcacccacccgagcggccacgatcggggactttgggatggcacgatatatctaccggaccaggtattaccagttgggggaccgggccttgctccaaggaagtggatgcccccagaggccttactggagggcatcttcacatacaatacagattcctggacttttggggtgctgctctgggagatcttctcactgggctacatgccctatcctgggcgcaccaaccan

SEQ ID NO: 84259 - DNA, 859 bp, Homo sapiens; identical to SEQ ID NO: 68004
  misc_feature (1)...(859): n = a,t,c or g

SEQ ID NO: 84260 - DNA, 437 bp, Homo sapiens
ggcgcactttgtggattacaagaacctcattctgttggatctgggcaacaataacatcgctactgtagagaacaacactttcaagaaccttttggacctcaggtggctatacatggatagcaattacctggacacgctgtcccgggagaaattcgcggggctgcaaaacctaaagtacctgaacgtggagtacaacgctatccagctcatcctcccgggcactttcaatgccatgcccaaactgaggatcctcattctcaacaacaacctgctgaggtccctgcctgtggacgtgttcgctggggtctcgctctcttaaactcagcctgcacaacaattacttcatgtacctcccggcggcaggggtgctggaccagctaaccttcatcatccagatagacctccacggaaacccctgggagtggtcctgcacaatt

SEQ ID NO: 84261 - DNA, 489 bp, Homo sapiens
  misc_feature (1)...(489): n = a,t,c or g
ggaacctggagaaggaactagcactactcaagcaggagctggctatccatgacagcctgaccaaccgcacctttgtgacctatgaccccatggatgaaatccagattgctgagatcaactcccaggtgcggaggtacctggaggggacactggacgagatcgacataatcagccttagacagatcaaggaggtgttcaaccagttccgggtggttctgagccaacaggaacaggaagtggagtccactttgcgcaggaagtacaccctcattgacaggaatgactttgcagccatttctgctatccagaaggcggggcttgtggatgttgatggccaccttagtgggtgagcctgaaggacaaaactttggactcgggagtcgcccctttcttttacccaaacctggggaagaaagccaagttccaaggaagacatttcaaagagccattnagttnctttggcaagaaagggaaggttncccagcagcc

SEQ ID NO: 84262 - DNA, 615 bp, Homo sapiens
ttcaagctttgctaaacataagaggattcatacaggtgagaaaccctttatatgtttagaatgtggtaaagcgtttactagttccacaacccttactaaacataggagaattcatactggagagaaaccctacacatgtgaagaatgtggcaaagcctttagacagtcagcaatcctttatgtacataggagaattcatactggagagaaaccctacacatgtggagaatgtggcaaaacctttagacagtctgcaaatctttatgcgcataagaaaattcatactggagagaaaccctacacgtgtggagactgtggcaaaacctttagacagtctgcaaatctttatgcacataagaaaattcatactggagataaaaccatacaagtgtaaagaatgtggcaaagcctttaagtcatactacagcattcttaaacataagagaactcataccaggggaatgtcttacgaaggtgacgaatgtcgcggtctttaaatgctcctcaatcctttctaatcataagataattcataatgaagagaaactctaaaatgtgaaaaatgtgagaaggcttttaatcacacctcaatctgttgtagacataaaaagaatt

SEQ ID NO: 84263 - DNA, 945 bp, Homo sapiens
ttttttttttttgtcatctttttgtttactaattaatttagctgtgatacttggagtatctgacactctgtcaagaacatctgataatgttgttgagactggcaaatgaagagtacggaatttgtggcctgctccatacattgggatgctggatgacgtggctagtagcattaattctacctttgtacagtggacatggagactgaagaaacattgtcactttctcatcttccagcatcaactgtaaaaataatcttccgtataaaccctggaaatgttcccagatgttggaaggttccctctttgaggagatgtctgaaatagttcacaaagaacctgtgccatcagcttttgattattaggatggcatgaatatgcactgtagaaaagaacgcaacagttgcattcttcaattgctgtgcgctgttgagtagtcagtcctgttgttagccagctgaagaaagagaagctgatcttgcactggtcctgttgtgcaccctaaattattggcttccagaagtggacccagagtgacacaataaaaacagaagtgctgtccatagtggattgacttcagaaccaccaagccaatctttcataatatggctattgccaacttctgtcaaaaacctaagaataggagcaactaggtcggctgtgataggcatcttattacattgttgtgggacatgatggcgcctgagtttgtcctgggaaatatctattgactgggcaatgctttctgagctagaaatgtggctaaagcagaaactagccagactcctcacaagaagagaaggcaaacctgagtctagtaattgtttaatagcttcaggagattgagaagaggaagcaagggtagccaaatgtgattcagttaatgcgagaggtgcttgtgcatttttagagtcatctgttaaagatgaactaagatcctgctttttg

SEQ ID NO: 84264 - DNA, 362 bp, Homo sapiens
  misc_feature (1)...(362): n = a,t,c or g
cagacttctgacactcaccccctcccagacttctcacactcaccccctcccagacttttcacactcatcccctcccagacttctcgcactcacccccccagacttgtgacactcaccccccccagacttttcacactcaccccctcccagacttttcacactgacccctgccagacttnttacactcacccctcccagacttgtcacactcgccccctcccagacttatcacactcacccccacccagacttctcacactcacccctcccagactgctcacactcaccccctcccagacttctcgcactcacccctcccggagttctcacactcacccccccagacttgtcacactcgcccc

SEQ ID NO: 84265 - DNA, 528 bp, Homo sapiens
agtggcccctgctggaccgtggatcccgggcgggcgtgcgggcggcagcgtacgaggccttctactcgcccgggtgtccggtgcctcgcttctccctgggaccctgtcgtcaacatcgaggtctccaacaccaccttgctttggtgccgggcccactgactgtcctcggtgtatagtgcgaccgaatctccatcatcccgtcctcagtgtacaggatgccccagcgcccccaaccgtctccctcagcattcagggtccccaaatcctaatgccttgtcctgagcttcacagccccacattcacctgttcttggtacttagcgtttccgcccatcctgtcctcctctatcagaacccccacaattgctctgtcctcggtgcccacagtctccaaaacaccagtgcaccggcccgcgtcatcccccgctctcagtcgtatcaaggactccagggcctcacccatagttctggatagggaagctgaacttgcaagccataacttcttttggggcatggcgatgaaggaggg

SEQ ID NO: 84266 - DNA, 324 bp, Homo sapiens
ggcctggttacccaaattcatcggttctaaacttacaagcagctttcgggggagagggtaggtcggagcattcattacatattctactgtgtaatgccttaaccgcgggcctttgaatttgtacacactgaaatgattgtggggctgtgcaaaacattcacctatttaccttgcaagttttagaagacagggcactttttaccatgagtgttgggtccagcctgtggtccacttatctaatacacgtgatggctctccccgccgggagctgctcaagcccaacgcctcagtggccctccacaagctcagcaatgcactggtggg

SEQ ID NO: 84267 - DNA, 365 bp, Homo sapiens
  misc_feature (1)...(365): n = a,t,c or g
tgcacgagatttctcgaagagaatgcctttgctgttttcaacatatagattttgtcactgccatagcttttcatccaagagatgacaggtattttctaagtgggtctttggatggaaagctccgcctttggaacatacctgacaaaaaagtggctttgtggaatgaagtagatggtcagacaaaattgatcacagctgcaaatttctgtcagaatggcaaatatgcagtgattgggacatatgatggcagatgtattttctatgatacagagcatttgaaataccatacacaaatacatgtccgatctactagggggcgcaacaggttgggaaggnaaattactggcctttgagcctttacccgg

SEQ ID NO: 84268 - DNA, 281 bp, Homo sapiens
cacgagcggacgaggcagttgtaccaggaaggacaagaacttctggggtcaaactgggggagctgccaagctggatcttgatgcgggacttcagtcctagtggcattttcggagcgttaaagaggttctaccggactacaacaagtacatcaatgtgaagaaggggagcatctggggattaccatgggctggcatgctacggcttttactctccttttctacagcatctaagcacgagcggtcgcaaaccactgagagaccatctgcacccccacccagag

SEQ ID NO: 84269 - DNA, 363 bp, Homo sapiens
ggcacgagagtttgtgtccagagtgagatataatatacctgtgaagagatgcatgacatatgaagacttttccacacattctgcatacacatgggtttactttagtagaaactttcttgttcagattaagatttgaattctggctgaaggtttctccaccttgactattttgtttaccttcacacagtctctctaccatatgacttacatttctcccatattttctgacttgatcgtcaacattctggtcttcccatttgttttctgtagaagccaaattcctgaaggtttcctgcgtcacatctctataagagtttcttctgggaaaaatccagcaacgcccactcctgaggggtgaaggtt

SEQ ID NO: 84270 - DNA, 496 bp, Homo sapiens
gtcaggacctggaagaacataagaccatgaagttccgctatcaaaccagatgtccaaaatatcctgacctggcacatattccaaggcatcagggccaccaacctcagataagacttcttttggaagaagttgttcagggggaagagtccaccagatatcactgccgtgttgttccactagtttaacaatatgctcagtggtttggctgttgatcaagtattcatccttggtcttatgatgaaacacaggaattggaacaccccaaactctttgccttgatatacaccaatatggccgcctgtccatcatttcaaccatgccattcagtgctgatccaggaataaatttcaccttttttaacaattccttggctgcagtcttaatatcccgtgatgtttataaaccactgccttgctggcacgatataaccacaggtttcttgggtcctccagtcatacggatagctatgcaccaatttctcgtcttgcaacaaatt

SEQ ID NO: 84271 - DNA, 70 bp, Homo sapiens; identical to SEQ ID NO: 84225

SEQ ID NO: 84272 - DNA, 513 bp, Homo sapiens
  misc_feature (1)...(513): n = a,t,c or g
cattactaatctgcgtgacacaccccccttcctttccaatccttaaacgacggcccgacccaaggcccccgttgaaccctttnaatgacccttcggaccgcccgaatccgggcgaccagcgtgcgccacgcgtcggacctggaggtcccagatgccactcctatcactggagctgatcccagagtgaccatacctatcactggagctgatcctagagtgaccgtccctatcactggcgccgatcccagagtgaccgtccctatcactggagctgatcccagagtgaccgtccctatcactggcgccgatcccagagagaccgcccctatcactggagctgatcccagagggaccgtccctatcactggcaccgatcccagagtgaccgtccctatcactggagccgatcccagagtgaccgtccctatcactggcgccgaacccagagagaccgtccctatcactggagctgatcccagagtgaccgtccctatcactggagctgatcccagg

SEQ ID NO: 84273 - DNA, 802 bp, Homo sapiens
  misc_feature (1)...(802): n = a,t,c or g
ttttttttttagcgtttatcgaaggctttactggcaagcaggaaatgtggggaagtgtggatgttagctctgagattggggtgtggtcagacatctggccaggtccatctctgaccggctcctggtcaacccccagggagctggaagagtgccagcgaaaccacgagggtgatgaggacgacagccacgtccgggcccagcaggcctgcattgaggccaagcacgtgagggtgccccccacccacatgtgggtctgtgtgtgtgcacgtggcgtgggagcatccccgccttgtgttgggtctgtgccccatggaggagggaggtggggtgtctcccccaagcacagcactcaactcttcacaggacaagtacatggcggacatggacgagcttttttctcaggtggatgagaagaggaaggtgagtgtgtgtcgcttgctgccgatggctggcaggtgctcgtgcagtgccccttttcagcctctgaccgtgtgcccctgtgccacagaagcgagacatccccgactacctgtgtggcaagatcagctttgagctgatgcgggagccgtgcatcacgcccagtggcatcacctacgaccgcaaggacatcgaggagcacctgcaggtgcacatgcggctgggggagcagggccagtggcatggtcctgggccccatgactgccctctgcccttcttgtcactgcagcgtgtgggtcattttgaccccgtgacccggagccccctgacccaggaacagctcatccccaacttggctatgaaggaggttattgacgnattcatc

SEQ ID NO: 84274 - DNA, 493 bp, Homo sapiens; identical to SEQ ID NO: 67966

SEQ ID NO: 84275 - DNA, 397 bp, Homo sapiens
  misc_feature (1)...(397): n = a,t,c or g
gagaataaggggattttnctgagnacgctgataacctttaccccgctggacgaggtacatgcacgatccatctgccacctggccttggacatgatggaaattgctgccaggttcaagtagatggtgaatctgttcacataacaatagggatacacactggagaggtagttacaggtgtcataggacaggggatgcctcgatactgtctttttgggaatactgcaacctccaagccgaacagaaccacaggagaaaagggaaaaaaaatgtgctgaatatacatacagatgtcttatgttcagaaattagattccaattccacttggagcacagagcccttgtgatgaagggaaaaaagaaccatgccgtttgttttttccagaaaaatacggatcag

SEQ ID NO: 84276 - DNA, 352 bp, Homo sapiens
ccttggggccccttcctttggtgtacatgggtggactagcaaactgctgacaggaatacactgcaaaatcttcaggctccactctgctgatggtgacaatgaagtctgttcctgacccacttccactgaacctgtctgggatgccaggggccctgttgaatgcaccatagatgaggagcctgggggactggccacgcttctgctggtaccaggctaagtatctgctgtcaacactctgactgcgcctacaggagagggtggctctttcccctggatacaatgacagggtgcctggagactgcgtcaacacaatttctccagtgttatctgggacccacatagcaggaagaag

SEQ ID NO: 84277 - DNA, 400 bp, Homo sapiens
actatagccatgcagctgacaacattttgcaaaatctctcgcctctaacagcctttctgaaactgacttccttgggtttcataataggagtcagcgtggtgggcaacctcctgatctccattttgctagtgaaagataagaccttgcatagagcaccttactacttcctgttggatctttgctgttcagatatcctcagatctgcaatttgtttcccatttgtgttcaactctgtcaaaaatggctctacctggacttatgggactctgacttgcaaagtgattgcctttctgggggttttgtcctgtttccacactgctttcatgctcttctgcatcagtgtcaccagatacttgatatcgcccatcaccgcttctatacaaagaggctgacctttaaa

SEQ ID NO: 84278 - DNA, 415 bp, Homo sapiens
gctgcgagaagacacagaagggggtgatggggcacccgggcggatccgagccgcagcagcctggggaaccgcggggctgcgcgtcgggagggggcggaggcaggggacgccgcccacctgctccttgttttgcagtgaggggtccagcccctgagtgcccgcaggggtcagctgctccgtgcgcccagccctgcccaaagagccccctccctccacaccctggccccaagcgcaataaacaccctgaatgcctgtggcgctgcgcccctccgggtcccccagctccccagcccctgactcctggctccaggacccgccccagaggcctggctgttccggagaccaacgaagcgctcccaactctgacccagggcctgtccacggagagtggagggcgaggaggacaggaggagcc

SEQ ID NO: 84279 - DNA, 401 bp, Homo sapiens
  misc_feature (1)...(401): n = a,t,c or g
cctggcttgaccacntgctagataggtgaccttgcacaagctgccgctttaaccagtcctatgtgtcctcattggtggagaggtgtcctcctgcggcgggcatggtaagtgcaatgtgaggctgcagttggggtgccgtgcgcttgggggctggagagctgaggcttgtcccttcccgtgtcatctggcctcctgaggaggagctttatggaaacagaagtggaggcacagttagaatagccagcttcttccaaaagaagtgccaccattggggcaggtgtcagctgcatcaggggatgctgggcctgggaacaggtatcccagcagagacggaggggcaaaaaggtgggaggtgaggcctgggtgccctgtggcggcagcacctgtggcggacgcgtggg

SEQ ID NO: 84280 - DNA, 983 bp, Homo sapiens
ggcttactcactatagggctcgagcggcctttctgaacacctaggaaaagtgggcagcatcctgaagcagtagaggttcagagagctccacccaacaatgcaggcaggcagtatttacagaaagaggaagtgacacccagaaacagcttgattggttacagcttagcaattgtctttaatgggcatggtctgatcacttgacagcctgtggttgcctgaagatcagctggtatggctggctgagatggagctacctgttgcaagaatatactcctaagttaggttgcagtttgattactgagtttttggtacctcttagattttgtacctgggacaggttcctcacctcactcaccctggccctgttcctgagacaaggaatagctccttttaagatgctgattatcatgcttctgccttgctgggcacacccacactggttgtaatactcaccatctcttcccattttcacatctggactcttcttctcatgcccctcaacccttaatccctccctttctttgtactcttgcttctcttctgtccaatctttgtgtccatctcccaaggccatctcccatggtatattccccacctccccacacctgccctctccatccgccatgctccctgcttctctccagtctctcttgtgcccagatagaccagccagagtttgatgttcccctcaagcaagatcaagaacagaagatctatgcccagatctttcgggaatacctgacttacctgaatcagctgggaaccttgctgggaggagacccaagcaaggtgcaagaacactcttccttgtcaatctccatcacttcacggctgttccagtttctgaggcccctggagcagcggcgggcacagggcaagctcttccagatgggtcactatcgaccagctcaaggtgcctggaactgggggccagaagactgtgggcatggggatcttcctctcaaacattacctccttttctt

SEQ ID NO: 84281 - DNA, 835 bp, Homo sapiens
ggcattcgagcctcctacgagtgcccccagaagacatcagagtatgcaaatttggcaacaagtttttccaggatggagatatgtggtcctctatcaattgtaccatctgtgcttgtgtgaaaggcaagacggagtgtcgcaataagcagtgcattcccatcagtagctgcccacagggcaaaattctcaacagaaaaggatgctgtcctatttgcactgaaaagcccggcgtttgcacggtgtttggagatccccactacaacacttttgacggtcggacatttaactttcaggggacgtgtcagtacgttttgacaaaagactgctcctcccctgcctcgcccttccaggtgctggtgaagaacgacgcccgccggacacgctccttctcgtggaccaagtcggtggagctggtgctgggcgagagcagggtcagcctgcagcagcacctcaccgtgcgctggaacggctcgcgcatcgcgctcccctgccgcgcgccacacttccacatcgacctggatggctacctcttgaaagtgaccaccaaagcagcctccgcctcacttacccgttcagcagcactgctcggttagagcactcaggagatgtggttcctcctccgagcaaaaacccaaggcagagccaggttccaactgcgggacttgcctcatccccactcacagggaagtcacatcctgaagatgccacaaacagctggagacattcggaccgtatggagtcttgcaattggatgccagtcccaccagtcttgcaatcttcccacatccagaacctttccatcctctgtctaaaaatagcagttgtactctccaaa

SEQ ID NO: 84282 - DNA, 395 bp, Homo sapiens
ctttgcctgtccgagcctgtttcttcatctgtattatggggataggagaaggccccaccacctccgagggctgtcgtgagagtgttgagtactcacatcagaaatcagagctcccgctcagtggtgagcagagtggagggaagaggggtgctgggtggcgggtttggggctccagccatggctttcttccacctcaggagacagccaggtgccagggcccataggctgcaactgtgacccccaaggcagcgtcagcagccagtgtgatgctgctggtcagtgccagtgcaaggtcagtccgaatccctgtccctgcggggcctgctctgccccgctgcccagaccctgcggggaaatcaggcagcatctggtggaagccgagacctgggcatggg

SEQ ID NO: 84283 - DNA, 850 bp, Homo sapiens
ttagcgtggtcgcggccgaggtaccacctagtggacaagatagtgcactgcatgagaccattgctacagccagaaaacagggagatcttgaggcatggcaatatccggtaatgttacaacagatgccggccgggaaaggcagtcaagcaggagttaaacaatatggacctaactctccttatatgagaacattattaaattccattgctcatggaaatagacttatttcttatgattgggaaattctggctaaatcttccctttcaccctctcagtatctccagtttaaaacctggtggattgatggggtacaagaacaggtacgaaaaaatcaggctactaatcctgttgcttatatagatgaagaccaattgctaggaagaggtccaaactgggacactattaaccaacaatcagtaatgcaaaatgaggctattgaacaactataagggctatttgcctcagggcctgggaaaagattcaggacccaggaacctcacgcccttcttttagttcaatcagacaaggctctaaagagccatatccagacttcgtggcaaggttgcaagatgcggctcaaaaatccattgcaggtaataacgcccgaaaagttattgtagaaacaatggcttatcaaaacgcaaatccagagtgtcaatcagccataaagccattaagaggaaaggtttcagcaggagttgatgtaattacagaatatgtgaaggcttgtgatgggattggaggagctatgcataaggcaatgctattggctcaagcaattacaggggttgctttaggaggacaagttaaaacatttgggggaaaatgttataattgtggtcaaatcggt

SEQ ID NO: 84284 - DNA, 534 bp, Homo sapiens
  misc_feature (1)...(534): n = a,t,c or g
gatggtggggnnnattgcgtcggctgtangaannnngcacnatttcgcaccggctgcaggaattcggcacgagctccactcccagccccaccagcagcctctctagcgaagacaagcagcacctggccgtagagctggccgacaccaaggccaggctgcggcgcgtcaggcaggagctggaggataagacagagcagcttgtggacaccagacatgaggtggaccagctggtgctggaactgcagaaagttaagcaggagaacatccagctagcggcagacgcccggtctgctcgtgcctatcgagacgagctggattccctgcgggagaaggcgaaccgcgtggagaggctggagctggagctgacccgctgcaaggagaagctgcacgacgtggacttctacaaggcccgcatggaggtagggagccttgctgtgaggcccctggatggggctgctggaaattcctgagaagcacattcagactgacctgtccttgngggcttggaggagcggagccacagctgtttcagca

SEQ ID NO: 84285 - DNA, 1890 bp, Homo sapiens
  misc_feature (1)...(1890): n = a,t,c or g
atggggaagatcagtgctacgggtataaacatgggtactaaatgcagctgggcactggtttggcatttggaatcctatgatccaaagcactatgaaagggaagggatgcaagattggaaaacagcctctggccaatcagaagaagcaactcaacaaagcagtcagaaacctcagccacattatacaacttaccagtcttcctcttttctgaaatacagcagtgaaagccatctccttgcctggagggagaactcatcagaagggtcctttcagttcccgggccggagccgggcccgtcctccgcgaacgcggcaacaaaggcgaggagcggcggcgggtcctggacgcggggcagtcaggctcggccacccccagagcgcagcgcagccccagctgcgagcagccgcacggatcccagagtcgcccgccgcgttcccagcccagccccggccggggtccgcccggaacagcgacgcctcaggcccggcaagtctctctcggaccctgggccgagcctcctcgccccgcccgccccaggccccggatgtgacggcaccgtcgcccgcagcgctcgccccacgggccgcgcgtggagggtcccgcgccgccgccctggctggagccgaggccgaggagccactgcgcacgctcgcgccccggccgacccgcgccgccgcgccgccgccgccgccgccgccgccgccgctgccgccgggcgcgcccccgccaccagttcgctgcgtgtcgaggcgagcacgcgctccgccctggaggctgcggcgacgggtcctcctccgccgtccggtcgcgccctcgcggaagctcggcagtgcgcgtgcgcccgcacccgcactccaaattagaaaggggacgtctagtgggttgcccgggaggggtggcgggagcggtcctggaaataatctgtcctctgtcgccgggaactggcgaggtagttccttcgcggtggagagacctggaatggccaaatatcaaggtgaagttcaaagtttgaaactggatgatgattcagttatagaaggagtaagcgaccaagtacttgtggcagttgtggtcagtttcgctttgattgctaccctggtatatgcacttttcagaaatgtacatcaaaacattcacccagaaaaccaggagctagtaagggtacttcgagaacagcttcaaacagaacaggatgcacctgctgccactcgacagcagttctacactgacatgtactgtcccatctgcctgcaccaagcctccttcccggtggagaccaactgtggacatcttttttgtggtagccttactcctaacagtatttggtgaagatgatcagtctcaggatgttctgagattgcatcaggatattaatgattataaccggagattctcagggcaacccagatctctcactctgctccagccatccagccctccttgctgtcctttgagcaggctgaagacgcccagcctcaggagctctgccctggccagtccctctgactgctaggctcctccgccgggcatcctcacagccaactctcaccaactccagatcttcgcacaatagccatttcctctgttaggcctgtcctgtccaccataaggaaacttgcaactccctcagcccacagagcacctctcaccggctaacatactctgtggtcacgtgtttgctatctgcctccctaatgtctttgagaacattagctccctgagggcagaaatctccttcactgacatatcccaagcccccagaactatgcgtgcagcatagnnnnnnnnnnnnnnnnnnnnnnnnnnnnnngaaaacaatttcagggaactctaagttgaaatacactttctcagttcacaatgttatccattctgacctttatcagacac

SEQ ID NO: 84286 - DNA, 466 bp, Homo sapiens
ttttgatactgcccggctgcacgaattcggcacgagtataactcagatttttgcagttgacaatagagaagatcttcagaagtggatggaagccttctggcagcatttctttgatcttagccaatggaagcactgttgtgaagaacttatgaaaattgagattatgtcaccacggaaaccacctttgttcttgacaaaagaggcaacctcagtctaccatgatatgagcattgattcacctatgaaacttgaaagtttaacggatataatacaaaaaaaaattgaagagacaaatgggcagttccttattggtcagcgtgaagaatccttaccacctccttgggccacactctttgatggtaaccatcaaatggtcatccagaaaaaggtactgtatcctgcaagtgagccattacatgatgaaaaagggaaaaagagacaagctccccttcctccttctgataaa

SEQ ID NO: 84287 - DNA, 708 bp, Homo sapiens
tggaagatgaggctcaccttctgcacagccaataggtcattgtcatgggaacactgaccaccagcaccaacctccatcccccgccgggggcacgtgcctttatcacccatttcctaggttttgttgtggttcccaggcggtgccttcgagactggctcagcctccatcttcgatgggtcctccctggctgcctatgaggacatgctggttgtgatcgtccagtaccggctgggaatatttggcttcttcaccacatgggatcagcacgctcccgggaactgggccttcaaggaccaggtggctgctctatcctgggtccagaagaacatcgagttcttcggtggggaccccagctctgtgaccatctttgattctgtctcccatggccgaaggcttattccacaaagccgtcatggagagtggggtggccatcatcctttacctgaaggcccatgattatgagaagagtgaggacgtacgaatactgttaacaccttgccagcttcctctcctcagttaggggagaatgtgttcaggcaccttctcaccatgtgccatctatcccacgatatttgtcatctgtctcttaattatctactacagagtgaggccctagagaccaggatctctctgtccttcaggcccccagcataataagtggtatatatcaggcagctataaatgttctggatgaatgagctaaaaaaa

SEQ ID NO: 84288 - DNA, 448 bp, Homo sapiens
  misc_feature (1)...(448): n = a,t,c or g
natctgagacaatagtagagcgttgnggaangcctcgcggtaacaccaaaggatgtagttcactcagcacacaggaactttctgaatcgtgtctgggatctgcaacattactctcatcatctgggcaaaggaacaggatatattatccatggataatcttctggcccacagcaacagtattgtgaaaaaagatctctcctgagaattcataatctcaaacaaggcttcacttatctttgcagtacaattttatgccacctgcatggttcaaaaaaacccctcaaaccaagactagttgaaagtggtttcccaggctgatgatgcctactggtacctggcagaaagagaaaaagatctctagggcacagttgtcctacatacctttggagttgacagaaatattttacaactgtgctgtccagtgtggtagtagccaccaccctcctat

SEQ ID NO: 84289 - DNA, 426 bp, Homo sapiens
ggaattcacttaactaagcatcagatcatccataccggagaaaagcctttcataatgtaatgaatgcgtcaaggttttcactcagtattcacacttagcaaatcatcgaagaattcatactggagagaaaccttacaggtgtgatgagtgtggcaaagcctttagtgtgcgatcaagcctaactacccatcaggcaattcatactggagaaaagccttacaaatgtaatgactgcggtaaggtcttcacacaaaattcacaccttgcaagtcatcggggaattcattctggagagaaaccttacaagtgtgatgaatgtggtaaagccttcagtcaaacatcacaacttgcaaggcattggagagttcatactggagaaaaaccttacaagtgtaatgagtgtggcaaagcctttagtgttcattc

SEQ ID NO: 84290 - DNA, 698 bp, Homo sapiens
  misc_feature (1)...(698): n = a,t,c or g
ttttttttccgaaaatactttaatgcgaggtcctcgtgtgggtcgtgttttggagagataactggccttggactggagggtggctgccttcttcctttgccaggtcatgcgaggggctgctggccaccccatgcacatgcccctgcccctccatgtcagatgcgtgcccctcggggctggccgtgtccgatgcaggccccttccggctgttgatcttgatggcggcgcgcagcgccgacttgaccgccgtctccacccagccgtgcgggtaggcggtgtgctcgccggcaaagtagatgcggccataagggaccgtccagtcatccttttcggtttgccagagcgccggcggctgtaccacgaagccaccctggctgtgctggtcctccgcccaacgcttgacgacgccggtgccgtcccagagctggcgcacgacaggcccgtgcaatgccgccacgtcgtcgagcgccaagcgcaacgcctcttcccggctcaagccggcgaacgctgccgccgcgtccgaccacgtgtacgaggccagcagcagcgcgccctcgcgcggcggcgggtagaaaatcatgcgcgacgggcgatcggtgtttgagtggccgccttcaatgtgctcctcgcgccagaagggcctgcggaagcttangaacaacctttgtggcccgcacgtagtgcagccttcgcagcgc

SEQ ID NO: 84291 - DNA, 1254 bp, Homo sapiens
cctctagcctcctgagtagcgtgggactacagagtgtgcgccaccacgcccagctaattttttgtatttttcgtagagacggggtttcaccatattggccaggctggtctcaaactcctgaccttgtgatccgtccgcctcggcctcccaaagttctgggattacaggcatgagccaccgtgcccggcctgagtttctataatttaagcatctttaaggtaaagaaaaattgaaaatgagattacaggcaatttaacgcacaatttaatgaccagttcaatgagctggtttatttgcttgtaaaattattttatctaatgtaaaaatacttggtaaagaaaagttcttaatggggctggaagacaaaaagtctgcatttaaaaaaggttaacaaaatcaataatatatgggtaagcataggcacagaagaataaaaaatttaaaaatgttaaaatcaataataaagccactaataaccacaaaaggaaaactatggttctttttactttgtcaaagttctgcatctgttcccggttggtcagccaggattccatgtcctgcgcagtctgaatgaccaaatgcttcgtaatctgcaaacatctgtgtaaaaccggttagcaaaagacctctcggagctgtacattgagctggtagtcccttagttctgcctcttcacaatgcagttttaaatccttgtctttttcaccccagagaagccagagaggtcccattttttccacagcccacaccagtacgcttggccagagcctgcaaagcgggctatggtttcattgcccttcagtaactcatacatgctgatgttattagtacagacattgccgttctttttgtcattgaccaagtctttcagaaccatattcttcagtttgctggtactctcactgcaatgtaggctgccctcaggagggatcccaaattgaacaagaacctcagagagttcttggataaaatccactttattggggaactgtggaaattcttcaggcaactcaataaaatggttgtcaatgtccacaaaacacaaattagcctcttgaggaagttctagtttagaacggtcagttccttcttttgactgaaggcccatcagataagggacaggagcatcaagaaaatgtagcagagaagcaggtagaatgggcacataaacatgttgccattgaaatgggaacaaaagtgtggtgatgccttctgccacagtcatcaggcgttgataatcttgtggtgatgcct

SEQ ID NO: 84292 - DNA, 331 bp, Homo sapiens
  misc_feature (1)...(331): n = a,t,c or g
tgaagacagatggtgcagccacagttcgtttaatctccagtcgtgttccttggccgaaggtgaacggggagtctgtagagcttgcatgcaggattgaaccccaaaatcctcagcctccactctcctgattttcagtgtaaagtctgtgcttgatccactgtcactgaatctgtcagggaccccggaggcccgattagaacccaaatggatcaggaactgtggagactgccctgccttctgcattttccaatccaaatcattgtgtccattactctgcaggaggctctgactagacctgcaggagatggaggccggctctccaggggtgacn

SEQ ID NO: 84293 - DNA, 355 bp, Homo sapiens
gcaaagcctataacaagttctcatatttagtaagagtagaggggtggtcaaaggctttccaacagtcatcacatttatacggtttctctccagtatgaattatcttatgtttattaagggttgaggaatatttcaaagatttgccatgttcttcactatgtaggctttctgtccagtatggattctcttatgtgtactaaggattgaggagagcttgaaggctttgccacattcttcacatttgtagggtttctcttcagtatgacttatcttatgtacataaaggatcgaggatgaaataaatgctctgccacatttatcacacttgtagggtttctctccagtatgaattctc

SEQ ID NO: 84294 - DNA, 489 bp, Homo sapiens
  misc_feature (1)...(489): n = a,t,c or g
aaatgtaaaannnnactgagacttagnagcactagtccgngnggtggaattcggccccttcccttatggctggtggccgtctgactgcagacttggctaacagactggcctcaggtgggacccctggcgcagctcttccagtgggccctgggccgtttctgaggagatgggaacctgagcctgcactcccagggcctcacactctgacctgtgtccgcagggtcccctcctgtgcaagcaaagcaggagccccagggcagggcctcgcacctccaggcccggtcccgctcccaggagccagatacacatgccgtacaccaccgcaggtcacaggtgctggtggaacacgtcgtgccagcctcggagcctgctgcccgggccctggacacgcagccccggccgaaggggccggagaagcagttcctcaagtcccccaagggctccggtaagacgactggggtgccagccagcatcaagtccgggtaagcn

SEQ ID NO: 84295 - DNA, 764 bp, Homo sapiens
cgggccctaatatattcataaaagtagccaattagaagctgaggggaacaaacggaagtcccgagcgtccttcagagaagtagattcccccggaaacaaaacagggcgggcgcgcacctcctgcggcgacacgcctagcagacggcggaaggcgggaagaactgtctacggaagtggaaggttggtaacgaatcaaagaacaaggatcggaagatccgttccacggacttccggacgcggccctgccccgggaactgcgggtgttcaggaccctgtggtgcgcgggacgccgcccgcgcatgcgccgcgccggctcagccccgttttcgcaagctctgcgtggtcttgggtggcgagttcgagccttagaacggccgagtgccctggaaccggtttcggctctggcgtcctcgcgtgtcctccggctccaggttacaacgtcagtattggcgccttggcgcggacccgtcctgctctcgtcctccgttccgtggaccccggggctgttctggcgcctcgcaggccgggcccctcccatcgactcgatgggcagggctctgcgaggctcggggaccggggacgcgcggccttcctgacaaggagcccgagggtctgcacagcctggggcaccacccggcctggtgaggatgatcgctgtgcgcgcgatgcacatgcgccctcaacacctctgcacattcatgcacgtgtccatacatgggtgcacacacgtccttacacgtatgtacatacgcatgtgtacacac

SEQ ID NO: 84296 - DNA, 524 bp, Homo sapiens
agaggcaggtgagcgcgatgcagccggcgccgggtctggggctcggggactcctccctgcaccgctacctggacggcgacttctggagcctcaagaacgagctgcgcggactcctcggcggcgcccgctcttccggcaaaggtatgatttaagcttggatgaaatgagagctttgacagttcagagagtgaagtttgccatggacctgcctctgttaaaacgtgcaggtcaggatctggcagagaaaacaaagaattttgtcagccgaagccttgtcataggagaagtcctctccatggcggacatggccacaggagtgaagtgcggaataatttattggctatttggtggtgctatcaggaatctcggaagccctgaacatgttactaagtggtttcagccactccaggtatggtattttcctcaacattggtcttctatggagagccttaaaaatctgtagtagatagatatgcatgtgtgtatgtgtttgaagaaaaataaaataaaacagaatttgtatc

SEQ ID NO: 84297 - DNA, 374 bp, Homo sapiens
gaaccctttcagtcccatctcttgtctgaggctgaaacctgggctgatgctgtctaactctgcacctttgctatgacccatgccacccctccttgtcacactctgaagcttttcccaggggcttctcaccccacctgccatattcctcccagctccccaacataatgcagccaagatctcagcccatccccatatccaaaatacagaacaccctcaacctaataaaaaaaaagtatctacaaaaacatgcagttaaaatcatacttaacagtgaaaaaatgaatgcttcctgctaagatgcgcaccagacaaggatgtcttctcttaccacttctattcagcattatactggaggtcctagctagagcaattaa

SEQ ID NO: 84298 - DNA, 385 bp, Homo sapiens
tcagaaacaaactctgcagaatgggtatttagattcaagtatggatatactgtatctgggcagcctgcctccagaactccaggtgagctcagatgagcctccagggcctcctgagcaagctggactttctcagttccatctagagcctgaaactcaaaatccagaaaccactgaagagatccagtcctctactccagcaagaagctgcagcgcagcttccacagctccctgaggtggtagaactttcttcaaccaaagctggaggccccagctctgccttcacagtcccttgagggggtccactcttcaacagagcagaaggctccagcacagcagctacctgcctttgaagagatcctagccccactattgatacatcatgagg

SEQ ID NO: 84299 - DNA, 464 bp, Homo sapiens
  misc_feature (1)...(464): n = a,t,c or g
ntttgagagtcgatcgcctgcgcaaccgcnccggaantcccgggtcgaggatttcgtgtcagggccagggccagagagccggagagaggatcccttgaccgagagcccaggtgagcccacccttcctgcccagcccagccccagcccagcccagcttggcccagtctccataacaacatctcctggagcccgcagagagatcccagccctgcccaatcccttcaccaccacaagcccctgcctatctcggggacccccaagaactgggagacttgtggctggaaggcacagacccccctcccccagcccagaccctccctcacatatccagaaaggcacacactgtggggaggtagatacccagccagagaaaggtcccacttctgagggaggtacaggaactgtcacaccctcctggaaacggacacacgacatggggggacagacacggagggtggggcacn

SEQ ID NO: 84300 - DNA, 410 bp, Homo sapiens
ggatttcgtgtggtgggtcccagatgtgactcactctcattatgtagcgtggaaggagccttcggatgggtgagcctgggcgcgtctgaggaagggcaggcgggggccgggccacctccctgcagaccctggccggctgctggggccggggaggagagccaggtaaaagtggggtgtggggatggagtgtcaccagtcctagtggcttgagccccaggggacggggctggacagtgggtgggaagcagctcacccggcagcctggcctgggagtgcactgggcagggtctgggctgggggagtaggaggctccgtgagcctactgggcagatggctgggagaggcggtccttcaacaggggaccagaggcgacttgtcactggcttttcccagcctgacaagaaagtgcg

SEQ ID NO: 84301 - DNA, 441 bp, Homo sapiens
  misc_feature (1)...(441): n = a,t,c or g
tttcgtaaagaagggtgctgaggccggngctgtttgaatgcagaggacacgtttgacgatggcactgccaggagacgggaccacgggtgtggggctgtgggctcagacaccctcacccaggagacgcatgctcgaggcagcacttgggtgtgaggcatcacggccgacccgcacggggcccggagaggacgcagtgctccttgtgtgactcacaactttcctgaagggccacccagacggtgtacagggccaccagcttgaaaacgtgaagctccagcagccgccgcaggaacacctgcacgcgtgagaggacgtccgagaagccggctgtcagctccagcagccgctcagccaccaggccccacttggctgcccctgtgatggtgagaggagcagtgcggtgcacaaacggggattaccgggtcccctgtgaggaagagg

SEQ ID NO: 84302 - DNA, 395 bp, Homo sapiens
ctgggagcgagaagtcctgggtgggtgttagcatgggtctcgccaggggcggactaaccaagtggggggcggggccgtgggctgagtcctgggcctcttaccgaggggcgaggcgttggatctcggaggagagggggcggccctgtggaagcggaacccgggagcccggctttggggagggtagaagggcctacaaaagaaggggttgagggggtgctgcaaggcggaagcagcgcggtcggacgggcatggcccaagcacgcgaagggcggggcccgaggggaatgggaccaatgagtctttgaggatgaacggcaaggcgggcggttccggattggagccctgcgaggaatgtggagccgggagcctgtgagcgtgagcgtgagcgtgagcgt

SEQ ID NO: 84303 - DNA, 394 bp, Homo sapiens
tttcgttgaggggtaacgacggcgggacgttttgaggtttgaggggcaacgacggcgggacgtggggaggactgaggggtaacgacggtgggacgtggggaggactgaggggtagtaatgatgggatgtggggaggcgtgaggggacaggatgggtgatggtgacagtgacagggtggggacggcgtctgaggtctccatcctgttcgtgggacaggccgcctgcatggccgccgagagccgtcttgttccccgcgggcacaggagggcgcgtcgctgagggtgaaagggaagcggcatggccatggggcttccccttgctgcccacgagcacctgagcctcggtgggagatcccgtcggggggcggaaagttcctcggtgtgtcccccggcca

SEQ ID NO: 84304 - DNA, 415 bp, Homo sapiens
  misc_feature (1)...(415): n = a,t,c or g
tttcgncnnnnnnttaatcctatttcccagccatgtgagctggtgcctcagtcagcctcatctctatgctggagttaatcacaaaagccgtctcgaccaccctccgcagaaaaggcttcactccggctccaggctgaggaaccaccgcacctggcacagaaggggctgcatcagagttggctccacccaggcctgcaactttgacccagggagttcggggatagccatcgtacctgcagacactcctaagccaccaactcctgggacaccaccaagcccagcgcctgcagagccaggacaggtgaggcattgcgtaaggaacagtggggaggcagaagggcccggggctgcatgctgagggcccagcattgaggtctggccccgttactaacccaccttcagactgggcacagct

SEQ ID NO: 84305 - DNA, 412 bp, Homo sapiens
tttcgtgggtgattgtgtttccatggtgggggtgactgtctgggtttccgtggcggggtggctgtctgagtttctgtggtgtgattgtctgggtctccctggtgggggtgactgagtttctgtggtggggtgactgtctgcgtgtccgtggtggggtgattgtgtttccatggtgggggtgattgggtttccgtggtaagggtgactgtctgggtttccatggtggggtgattttctgtgtttccgtggtgggggtgactgtccccgtggtgggggtgactgtctgagtttccatgttggggtgattttctgtgtttccgtggtgggggtgactgggtctctgtggtgggggcgactgtctgggtttccatgttggggtgattttctgtggttccatggcgggggtgactgt

SEQ ID NO: 84306 - DNA, 906 bp, Homo sapiens
cacgcccaatatgtgggcccctatcggctggagaagacgctgggcaaaggacagacagggctggttaaactcggggtccactgcatcacgggtcagaaggtcgccatcaagatcgtgaaccgggagaagctgtcggagtcggtgctgatgaaggtggagcgggagatcgccatcctcgaggctcatcgaacacccacatgtcctcaagctccacggcgtctacgagaacaagaaatattttcccccggatgaactgacatcaggtccgtcgatgctggcgcaggtttcaccacacgggaagctgtctgcccggcgctcatgggacctgctctcaggctttcccaggtacctggttctggagcacgtctcggggggtgagctattcgactacctggtaaagaaggggagactgacgcccaaggaggcccgaaagttcttccgccagattgtgtctgcgctggacttctgccacagctactccatctgccacagagacctaaagcccgagaacctgcttttggatgagaaaaacaacatccgcattgcagacttcggcatggcgtccctgcaggtgggggacagcctcctggagaccagctgcgggtccccccattatgcgtgtccagaggtgattaagggggaaaaatatgatggccgccgggcagacatgtggagctgtggagtcatcctcttcgccctgctcgtgggggctctgccctttgatgacgacaacctccgccagctgctggagaaggtgaaacggggcgtcttccacatgccccacttcattcctccagattgccagagcctcctgaggggaatgatcgaagtggagcccgaaaaaaggctcagtctggagcaaattcagaaacatccttggtacctaggcgggaactttatctcctt

SEQ ID NO: 84307 - DNA, 802 bp, Homo sapiens; identical to SEQ ID NO: 68003

SEQ ID NO: 84308 - DNA, 601 bp, Homo sapiens
gttaggggtgaggcaaacgagcggccgcgccatgtggctgctggggccgctgtgcctgcttctgtgtagcgccgcggagagccagctgctccccgggaacaacttcaccaatgagtgcaacataccaggcaacttcgtgtgcagcaatggacggtgcatcccgggcgcctggcagtgtgacgggctgcctgactgcttcgacaagagtgatgagaaggagtgccccaaggctaagtcgaaatgtggcccgaccttcttcccctgtgccagcggcatccattgcatcattggtcgcttccggtgcaatgggtttgaggactgtcccgatggcagcgatgaagagaactgcacagcaaaccctctgctttgctccaccgcccgctaccactgcaagaacggcctctgtattgacaagagcttcatctgcgatggacagaataactgtcaagacaacagtgatgaggaaagctgtgaaagttctcaagtcttcaggccccaggtcagtgagtggcaagccaggcccagagatctctgcgcccgttggaacatcccctttctcgggaggcttgaaaggccatggtcattcacctcttcccagcag

SEQ ID NO: 84309 - DNA, 446 bp, Homo sapiens
  misc_feature (1)...(446): n = a,t,c or g
tttcgttggagatcccactggtgccatcctgcgcagtgtttatcaccatgaacccgggctacgctggccgcacggagctgcctgacaatctgaaggcaagtgcaggcccagagtggcccaggaagcaccagagctctagcctgagttcagagatgctaagccacttatgcaaggacacagttgcttggactccagggactgtgattccctatggtagccccttagccatggaggggaggcctcagggcctcagacttgtcctcagggcatgggagaagtcaggctgcctatggatgtggtgtggagggggaatctaatgagacctgttcaccctgggccttcaggagaaacaggaaaacaggagccaagaggggcatctcctgggagtcatgtggnggcaggtttggatcaacaccaaggatccactctaatggcagagctaccan

SEQ ID NO: 84310 - DNA, 422 bp, Homo sapiens
tttcgtctcccctggtcgcccgtcctcggaggaggaggtaaggatcgcatcttcacccaagagcaccgggcccagaccaagcctgcgcccactgcggctggaggtgaaaagggaggtccgccggcctgccagactgcagcagcaggaggaggaagacgaggaagaagaggaggaggaagaggaagaagaaaaagaggaggaggaggagtggggcaggaaaaggccaggccgaggcctgccatggacgaagctggggaggaagctggagagctctgtgtgccccgtgcggcgttctcggagactgaaccctgagctgggcccctggctgacatttgcagatgagccgctggtcccctcggagccccaagactctcccaggtgcctcatgctggccttgtcacaaagcgacccaacttttggaa

SEQ ID NO: 84311 - DNA, 413 bp, Homo sapiens
tttcgtccctgcctgctccgagggctgcgccaacgataacgcgcacctgtgggcaggggccaggtgccggcacccgaaggagtgcggctcggcgcacggcggcccctcctaccaggtgtggcgtgtccagccaacagctactatgactcctgtgggccacccttcccggccacctgtgctagcctcaactcctccgcgccctgcaccctccagtgcacagtgagctgcttctgcctcgagggctttgccctggaggcgggcatcttcggtgccccacgcttgctgcggctgccacctgcagggccgctatatccgcctgggtactgaggtgctgcctgcagccccctgtgatcagaggtgaacggctcccaggctggcctgcccctgaccctggctggggggcacactccaag

SEQ ID NO: 84312 - DNA, 420 bp, Homo sapiens
ctggaccctcacccagatgctcctgcagaaggctgaactcggcctccagaatcccatcgacaccatgttccacctgcagccactcatgttcctggggctcttccctctctttgctgtatttgaaggtacgttgggccttccctctcaagggcacctcagtgcagcagaccacagatcctcgccctgagcccaacacagtggtagctgcagagattattgagatcaaagatgcagtccctcccctggaagcgcatggtttggggtccagcatgataaacgctacagagaaagcacatataaaattcagggaacagtaacagtaagtgtgcacagagccctgaaagtgcaccaaggctgttctgatctttttaaacataggaactcatttcatccttccaaaaacctgggggtgcagtactt

SEQ ID NO: 84313 - DNA, 411 bp, Homo sapiens
ctcttcaacatagtactggaagtcctagccagagcaatcagaaaaaagaaggaaatagaggaaatccaaatcggtaaagaggatgtcaaactgtcacttgttgctgatgatataatcttttgcctagaaaaccctacggactcctctagaaacttcctagaaccgataaaagaattcagcaaagtttccagatacaagattaatagacacaaatccgtagctcttccatacatcaacagctaccaagaagagaatcacatcaagaactcaaccccttttacaatagctgcgacaaacaacaacaacaaaaaaacaaaacttaggaatatacctagcaaaggaatcaaaggacagctacaatgaaaattacaaaacactactgaaagaaatcatagatggagccaagcacgg

SEQ ID NO: 84314 - DNA, 415 bp, Homo sapiens
acttttcaatgaaaaaccatacagacaggagggagtggaacaacatattcaaagtgctcaaagaaaaaaaaagccatctaagaacaaaaactgcctacaagatatagaaaattacctcaaaaaccaaatctaagaattcttgatgttcaaaagggagctgagcaaaggcagagggcagaaagaaaaaaatacaaaattttccagagcttgagaaagatataaatctccagtacgggaaggtctgataatacccaagagattcaacccaaataagactaccccaaggtatgtaataaccaaactctcaaaggtcaaggacaaagagaggatctcaaaagcagcaagagaaaagaagcaaataacatataaaggacctccaattcttctggtaacagacttttcaatgaaaaaccat

SEQ ID NO: 84315 - DNA, 542 bp, Homo sapiens
  misc_feature (1)...(542): n = a,t,c or g
ccgagccccttgttcgatattaccacccaccgtcttatttcctttccgccacttcacttttatactattcactactcacagagcaggnnnnaccntttcgagacctttgtaagccctcggaannccgggggnggnggtggnggggctgggacaggngatgggggnggaggaggaaacaccttgctgctttcaggagggggaggagggaagtccggagaagggactgggatggagctgggctgccacttgggctttgcttttactgcaggaggggactgtggagctacatttgctgggacaggctttaagggctgagattccatggcagggggagttggagggggtggaaactggctggctatctgcttcacgaccgagggcaccggtgacagtggagagggagggggttttgcacagaagctctgttgcttgggtaatgttggcggcggtactggaacaggaggggtagggggagagggtggaatgtaagaagcagggaaagctggctgcttttttgctgtgggcactggaggagtacgtgn

SEQ ID NO: 84316 - DNA, 512 bp, Homo sapiens
  misc_feature (1)...(512): n = a,t,c or g
tgaaaggcacggctggaagaagagttgctgtctgtgaggggaacaccaagcagagctctggccgagagattgagattggaagagagaagaaaagagctgctacagaaacttgaagaaactactaaattaactacttatttgcattcacaacttaaaagcctctctgccagcaccctgtccatgtcatctgggagcagcctgggttccctggcatcgagtcggggctctctgaacacctccagcagagggtcactcaactccctcagttccaccgaactctattacagcagtcaaagtgatcagatagatgtggattatcagtataaactggacttccttctgcaagagaaaagcggttacattccttctggacccatcaccaccatccatgaaaacgaggtggtcaagtcccctagccagcctggccagagtggactctgtggagtggcagctgcagcaacaggccacactcctccanctgctaaggccccgaagtctgtggcctccctgtc

SEQ ID NO: 84317 - DNA, 601 bp, Homo sapiens
ccttaaacccccaggccccaagaaattgcgaggccctcatccgcttttttgaacagcgagcagcgggacctagcgctgcagagacacaagcaccacatggcgtccgctatattgaggtgtataaagcggacaggggaggagtttgtaaagattgcagggggcacatcactagaggtggctcgtttcttgtcacgggaagaccaagtgatcctgcggctgcggggactgcccttctcggctgggccaacggacgtgcttggcttcctggggccagagtgcccagtgactgggggtaccgaggggctgctctttgtgcgccatcctgatggccggccgactggtgatgccttcgccctctttgcttgtgaggagctggcacaggctgcactgcgcaggcacaagggcatgctgggtaagcgatacattgaactcttccggagcactgcagccgaagtgcagcaggtgagcgcccagggctccccacccccagatgtactgttactccagggcggccctctgtgtccctgccctacttggcatgaccagcctgttgctgccttccttactaggtcttgaaccgctatgcatcccgcccactcct

SEQ ID NO: 84318 - DNA, 480 bp, Homo sapiens
  misc_feature (1)...(480): n = a,t,c or g
aggtgatggcngcaactgaganncctagnnangctgacgtaangccgcggaanncanccttccgggagccatgtctgctggtcccaggcgaccaccagcctctcagagaggcgtcttggctagcccacctcccattggtctgtggggcacagattctcctctgtgctgtgtggaagtcgccatcccgtgcaacaagggagctcactcagtgggcctgaaggggtggctgctggctcagggagttctgggcatgcgtgacaccatcccccaggaacacccatgggagtccacgcctgacctctgcttctgcagagaccctgaagagattgaggtggaagagcagcctgctgctgatgcagctgtggccaagggggagtttcaggggaacagattgctccagtgcctgctgatcattgccgcccatcctgaggctgcagacccagcccctgtgcatactaccgctcatcccaagggtgcaga

SEQ ID NO: 84319 - DNA, 462 bp, Homo sapiens
  misc_feature (1)...(462): n = a,t,c or g
cggttgtcgcggncttnnatanttttncggaannatatctncnnnaannnnnnnnngnncgtgggctgttgtactctctgggacctgtcctcttgctcgctgttctgctgacactctctgggacctgtccgcgggggggctgttctgctgagactggtgggggacctgaccccttgctcgctgtcttgctgagactctgggacctgtctgcttgctcgctgtcctgctgagactctgggacctgtctgcttgctcgctgtcctgctgagactctctgggacctgtcggcttgctcgctgtcctgctgagactctctgggacctgtccgcttgctcgctgtcctgctgagactctctgggacctgtccccttgctcgctgtcctgctgagactctctgggacctgtccgcttgctcgctgtcctgctgagactctctgggacctgtccccttgctcgctgtca

SEQ ID NO: 84320 - DNA, 759 bp, Homo sapiens
ttccagttgcattgaaagacttctgtaccagttggtaatattctcctaaatatcccgcatcaccctgtaccctcttccacaatggccccccagtccagccgccaaagaattaaattaaagtctggagctgcatggggggcctccattgtggtgggccctgcctttcagattggcagttgtttagatatattagagtatcacccctggggattgcactcacttgctggtggacaccacctcaaagcagaaccgcctttctgagtcagggcagagtttcactgtgcagagacgaaggtcatccaccaccacagtcacagggtcctggcaggataaggtgataaggggccagatgtccagctgcaggcaagagctgagtctccctggggcccaggcatccaggacccaggtccactcaccttgtacttcttctggtaaaccagttggttgctctgaatggtgaaccagcgtctgtaagagaaggaaatcattacagacataggcagctttaggatgagggacggaagagaggctgtgctttttgcccatgaggatcttactgagaggacagacacctgggctgactgttccacgagacattccagagaagggtggacaattgtgcagattggaacatctaaaggatgctattcctatcttggacaacccagatttcatatagttatgaagacaactttccagcagatggcagtaaaattctttttctaataaaatgtctattgctacaatttaaaaaaaaaa

SEQ ID NO: 84321 - DNA, 460 bp, Homo sapiens
  misc_feature (1)...(460): n = a,t,c or g
gagaaaattcgagtccatatctagtgcggtggaattcgctggctcaatgtgcacacaaatgccatctgggccttcgtggggcctgtgctcttcgtgctgactgccaacacctgcatcctggcccgtgtggtaatgatcaccgtgtccagtgcccgccgccgtgccggcatgttgagcccacagccctgcctgcagcagcagatctggacccagatatgggccacggtgaagcccgtgctggtcctgctgcccgtcctaggcctgacctggctggcaggcatcctggtgcacctgagccccgcctgggcctacgctgccgtgggcctcaactccatccaggggctgtacatcttcctggtttatgctgcctgcaatgaggaggtgcggagcgccctgcanaggatggctgagatgaaaggacctatggccctagaactcctcagcattctcttcatagcaa

SEQ ID NO: 84322 - DNA, 1417 bp, Homo sapiens
atggccgagccgctactcaggaaaaccttctcccgcctgcggggccgggagaaacttccccggaaaaagtcggacgccaaggagcgcggccacccagcccagcgcccagagcccagccctccagagccagagccccaggctcccgaagggtcccaggccggagcagaggggccctccagccccgaggcatcaaggagccctgcacggggagcctacctgcaaagcctggagcccagtagccgccgatgggtgctgggtggggccaagccagctgaggacacctctttagggcctggggtacctggcactggggagcccgccggcgagatctggtacaaccccatccctgaggaagaccccagacctccagcacctgagcccccggggccacagcctggctcagctgagtcagagggcctggccccccaaggtgcagcccccgccagccccccaaccaaagcctcccgcaccaagtccccgggccccgccaggcgcctctccataaagatgaagaagctgccggaactgcggcgccgcctgagcctgcgaggcccccgggctggcagggagcgcgagagggctgcccctgcgggctccgtcatcagccgctaccacctggacagcagcgtggggggccccgggccggcagcagggcctgggggcacccggagcccgagggccggttacctcagcgacggggactcaccggagcgcccagctgggcccccatcacccacctccttccggccctacgaggtgggtcccgcagcccgggcacccccggccgcactctggggccgcctcagcctgcacctgtacggtctcggggggctgcggccagcgccgggggccacccccagggacctctgctgcctactgcaagtggagggggaggccagggcccgaacagggccactgcgaggggggccggacttcctgcggctggaccacaccttccacctggagctggaggccgccaggctcctgcgcgccctggtgcttgcgtgggaccctggcgtgagaaggcaccggccctgtgcccagggcaccgtgctgctgcccacggtcttccgagggtgccaggcccaacagctggccgtgcgcctggagcctcaggggctgctgtatgccaagctgaccctgtcggagcagcaggaagcccctgccacagctgagccccgcgtctttgggctgcccctgccactgctggtggagcgggagcggccccccggccaggtgcccctcatcatccagaagtgcgttgggcagatcgagcgccgagggctgcgggtagtgggactgtaccgtctttgtggctcagcggcagtgaagaaagagcttcgggatgcctttgagcgggacagtgcagcggtctgcctatctgaggacctgtaccccgatatcaatgtcatcactg

SEQ ID NO: 84323 - DNA, 484 bp, Homo sapiens
  misc_feature (1)...(484): n = a,t,c or g
aggaaaaaaaanaattcgtagaccactgtacgtcgcggggaattccacaccccgaacccgggtgtcaatgccgccctggaacatgcacagacttatctgtcacccaagccgcttgagccactaagtactaccaaagccaagcctcctgccctgagctccctagaactgctcaggacatccccacatctctgggactcaacaggtcctgggccatctcccaagcagatcaaggagaaacttgtgtgccacctcctcctcctcagccctggctgacaccctaacaccacctgctggcagcgctttatgcggatctggatgatgggccagaagcggttcaggttctccaagaggatcacccggctggcagagggcatcacattcacctggtagggcaggggagaagagggagagaactgtcacctccagaaacaaggttggaaaaattgttgacagtaaccaagtcggtcatggtgtgtgcccttcn

SEQ ID NO: 84324 - DNA, 529 bp, Homo sapiens
  misc_feature (1)...(529): n = a,t,c or g
aacgtgcctttgattcactcgggagcctggcatggtgccgggacacaaaccctgcttgggaagtgacggtggtgcatgctgtcaccttcatgggcaccgcgggctgctacagactgggtggtggggcccagagaggtgagcagggacttcctgcatcccagaaggtgcagagccccccatgccagcaggatatagggatggtagacccagagcgtgtcgttaagccagtccatgccattgtcctgctgtagcagtcgctcgtaggtgacacacaggaagcggatgtcctcctcatcgatgccaccgttccagatgtcatacaggatggtcatctcctcaaactccgagcggggccggaagaggggctggggtggcgagagttcgggcgagcctgcaggtggcaccaggtcctcatggcgcttcttaggtggccggcgccacggcccccggctcttggccaactccatgtattcctcagtgaccgaattccaccacagggactaagatctcgattnnnnnnnnccgctct

SEQ ID NO: 84325 - DNA, 477 bp, Homo sapiens
  misc_feature (1)...(477): n = a,t,c or g
ntcgtagaccttcctagngaggcggaattccccgccacagtacaacgtggtccagctatgggcccctgnnnnnattctttagaggtgacccattgtgggcctgctccaggccctcctgtagtgccctcagacagcgctgacgccagtcccgggggacctggcccaggggggttgttcgtccagtctccacctccgccacacgcacagcagccaccaacagggctgggtcctcccgtgccagcttccctgcggcccctgcagctgcttccacagcctggcccagtgcctcgaacagaaggtccagcccctggaagactggcaactccaggccccccaggggtgccccgtatcctctcgcagctgctccagctcccgaaggctcacatatgcctccaagaactgttggccatcaatcagagtctgtgtgtgggacactgcagccggcactaatgagagtgaaaaggagacggccctggc

SEQ ID NO: 84326 - DNA, 413 bp, Homo sapiens
cccattccctcaccagcacccccaagagcccacagggcagctgctggcctcagagtgcactgcgtggtcagtgtccaggtccagtcctgggggtgaccacaacatctgacctgtgttccctgcaggtcccagtgtccagccaccgcaaccccctgctggacctggctgcttacgaccaggagggccgccggttcgacaacttcagctctctgagcatccagtgggagtccaccaggccagtgttggccagcatcgagcctgagctgcccatgcagctggtgtcccaggacgatgagagtggccaaaagaagctgcacggtttgcaggccattttggttcacgaggcatcaggaaccacagccatcactgccactgccactggctaccaggagtcccacctcagctctgccaga

SEQ ID NO: 84327 - DNA, 407 bp, Homo sapiens
taccctagagtgtaaaaactttatcatagtcctaattttatttttggaaactggtatgttcccagccatacaggaggtgcacaatacacacgtactaaataaagtaatggtcatttgaaagagtaaatggtgaatacacagcaattctccaatctttgtgtttatgcaaacacaagaattaactttattggcctaattcaaacgttatcttgaaatttattcaaagttcccattttccatgaattaaccagacattttttgttactagattttcactaattaaccagttaaatctcttttgtcttatatcattttaaaagagcatgtggaacaaattcaaacaacttaggtagttcacgtctgtttagctcactattttaaggagtgaagttcaccggacgcgtggg

SEQ ID NO: 84328 - DNA, 477 bp, Homo sapiens
  misc_feature (1)...(477): n = a,t,c or g
ggcccagccncccgcccgcgcaatggaaaaactganacccttcgnannnncnacngnnntggggnnaanggnccgacccacgcgtgngnnnntccccagccttgagttaatttttatgtatgatgtaagggaggggtttgaattcatggttttacatgaggctctcctgttgtcccagctctgtttgttgagaaaactattcttttccccatggaatggtcttggcctccttttcaacaattaattgaccatgtatgtatgagtttaaatctggatacctattcatctatatgcccagccttatgccagtgccatgctggcttgattactgtagctttatagaaaattttgaaatctgtgctttgaaattttaaaaactctatattgggggaaaatgcaaacacttgtgagggcctggcaggtgctgtaaatgaaggtgacttattttaaggcaatagggaagggtgaagaatttac

SEQ ID NO: 84329 - DNA, 680 bp, Homo sapiens
catggaccttgtgccagatgaaagcaaggttcactcattggctggacaaaaatcggaatctccaagcaaagattttggtccaactctgggtttgaaaaagtccagctccttggagagtctgcagactgcagtggccgaggtcaggaagaatgaccttccctttcacaggccccggccgcacatggttcgaggccgaggctgcaatgagagctttagagcagccattgacaaatcctacgatggacctgaagaaatagaagctgacggtctgtctgataagagctctcactctggccaaggagctctgaattgtgagtctgcccctcaggggaattcggagctagaggacatggaaaataaagccaggaaagtcaaaaaaaacgaaagagaaggagaagaaaaaggaaaagggcaaattgaaagtcaaggagaaaaagcgcaaagaggagaatgaagatccagaaaggaaaataaagaagaagggcttcggcgccatgctgaggtatgggcctgctttgaaggcaaagttggttctcattttgtctctcctgaaaaaagcgcacgcttttcctcgtcttcagccaaatgcatacggctctcaattctgtgctcgttctctttctgcagaggcagaggagctttttggggaaagttacagtgatgacaggacactgtcttaa

SEQ ID NO: 84330 - DNA, 397 bp, Homo sapiens
agaagatggaaaaacatttgagcacaatgcacttataggcaagagtgatagctaagaaaactaatatgatagcaatatctgatgattcgggtctagaagtagatgcgataggtaaaaaacctggggtatactcagcaagatttgcaggtgaaaatgctactgatgcagaaaatagagaaaagttattaagaatgatgaagagcgttcctgctagccaaagaagtgcaagatttgtatctgcagtagcagttgtatttcctgatgggaaagagtttgtagtaagaggaacttgtgaaggtaatatagcatttgaagaacaaggaagtaatggttttggatacgataacttgtttatagttaataaatataataagacatttgctgaaatgccatcatc

SEQ ID NO: 84331 - DNA, 399 bp, Homo sapiens
gggtgatggtgatggtgatggtgatgatggtggtgatgatagtagtgatggcgatgataactgtgatgatggtggtgggaatgatagtgataccaactctcctgcttgtcggtgttgtggaccctgtcagcccgtgctgaggacttctgtcctgtctgctctgaggccccagtgctgctttgcttggagctgtttgggaggcacaccggggttgatgttacaaagaacaacacatgcttgcgtgtgtgaacaaacacatttgcttgacgacacgctggcactacttggcactgtacctctgcagcggcagcgaccagagtttatccagccttccccacaggctaactcatttgattggcatctactccatatgaggagtagggcggcaggattcctgtg

SEQ ID NO: 84332 - DNA, 422 bp, Homo sapiens
  misc_feature (1)...(422): n = a,t,c or g
agggcctctgccttcctctagtctatgcagcatagagtggagacggccctgtggcaggggctccgcaggctcaccgagttgcaggcgttggctctctccaccttcgagaggcttctcacatccgtgttgaacacattcatcttctccaccagggtggtgagtgctgtctcggtggcctcgccgaccttctcatagacacctttggcctgagatgggcagaggaggaagaggaagtcggngccccaggctcctacctgtcataccgtccttccacctagcgtaagaaggaagcaaaccactgcctcccttgcaccctggagcgtaagtggagccggtgatggagaactcattcaggaggcagatgtccccatccaccttgtcaatgataaacatctgcaggggagaagggcaggcacacagan

SEQ ID NO: 84333 - DNA, 366 bp, Homo sapiens
cggacgcgtggggaaacatccaatattttgtcctttcagcttttagaggctcttttgtttagagttcagctgcacatatttactggaagatgccaaagtgcactggcaattttacaggtaagcacttggtacagcatttaattgcattttgcagaaaaagtttaaaaggtctacaccgttatccatagcattatttaatggttgaaagcacaagatttggatttgaatccttgtttttccacttactagtaagtcatgtgacattgggtaagtttatgactttatttcctcatttgcctgatgggtgtaatatctttagagtttttataagttttcaatgaaaatattttatgttaagtatccgca

SEQ ID NO: 84334 - DNA, 410 bp, Homo sapiens
gcgtacgtacaattttggagtttttggtgtctgttgacccataatttcagccccagcccaagatgatccaattctgttgagtttcatccactgtctgcatgctaacctgctttgtgtatggcgtcgtgatgtcaaaccagattgcaaagagatatggatattctggtggggagatgaacccaacctagtgggtgcaatacatcatgaactgcatgttgtggaagaaggactctgggaaaatggcctttcctatgaatgtaggacgctgctcttcaaagagatccacaatctgttagaaaggtgcctaatggataaaaacttcgtattgattgggaaatggtttgtccgaccctactataaggatgaaaagcccgtcaacaaaagtgagcatttgtcctgtgctttcacac

SEQ ID NO: 84335 - DNA, 410 bp, Homo sapiens
  misc_feature (1)...(410): n = a,t,c or g
caagatgcaaatgttcagattcaaaatgggttcccatgtgcggngaaaatggaatcacatatgtatcagcttgtcttgctggttgtcaaacctccaacaggagtggaaaaaaatattatattttacaactgcacttgtgtgggaattgcagcttctaaatccggaaattcctcaggcatagtgggaagatgtcagaaagacaatggatgtccccaaatgtttctgtatttccttgtaatttcagtcatcacatcctatactttatccctaggtggcatacctggatacatattacttctgaggtgcattaagccacagcttaagtcttttgccttgggtatctacacattagcaataagagttcttgcaggaatcccagctccagtgtattttggagttttgattgatac

SEQ ID NO: 84336 - DNA, 406 bp, Homo sapiens
cgagggaccatcaatctggacagagacgcttgttttcttcacctgctccttatccgccagaatttcgcggagggacctgccccaccttccttgctgggggtgcattccccacagctgagagtggaccctcgtggcagatcccagccccttgggcgaggccaggatagatccggccacaccttcttactggaaaactccgtggtctggacacagctggaaagggcctgagattaggaggggagcttatccggggccatggtcggagctcagcttgggcttggggtcagggcttggcctaaagccaggattgggggtcctgtgggaccagggtcagcagggtcagggttcagcctgggattaggctcagggcttgggctggggttaagctttggcttgagaccaccgc

SEQ ID NO: 84337 - DNA, 398 bp, Homo sapiens
  misc_feature (1)...(398): n = a,t,c or g
taattnnnnaaagcctttggatcccttcctctacgttaacccaagggagatcaggcatttccatcttcctcatagtaggccatttttaatgcatatttcaactaaccaaacatataaactgttaggaccttttttaactccccgagctgcaacattaaaaatagactccctacttagtgggcccaaatcagtaaattcagcctgatccaattttatgtttcttccaccattatcccatacccttaatatccattcccatgcctgttctccagatttatgtttatataaattagataactcaaacagttcaagtgtagtgcacctcctcatgggtcacactctcaactttacctctaggggctcgccgggacttcagactattataggtctagaagcaa

SEQ ID NO: 84338 - DNA, 273 bp, Homo sapiens
atggctattatgggctggactcaggccatggctgccggccctgcaactgcagcgtggcaggctccgtgtcagatggctgcacggatgaaggccagtgtcactgtgtcccaggtgtggcagggaaaaggtgtgacagcctgtgactgcccacacactcagaatacctgcgacccagaaactggagagtgtgtctgcccccctcacacacagggtgtgaagtgtgaagaatgtgaggatgggcactggggctacgatgcggaggtggggtgccag

SEQ ID NO: 84339 - DNA, 389 bp, Homo sapiens
agataggctattcaagagtacacagtcagaagagatgaaggaaaaaggaataaaaaaatgaatcatgcctacaagatttagaaaatagcttcaaaaaggcaaatctaagaattattggtcataaagagaaggtacagaaagagatggggtacaaagtttattcaaagggataataacagagaacttcccgaacctagagaaatatatcaatatccaagtacaagaaggttatagaacaccaagcagatttgacccaaaggagactacttcaaggcatttaatagtcaaactcctgaaggtcagtgataaagaaaggatccaaaaagcagcaagagaaaaattaataatatacaatagagccacaataccactggcagcagacttttcag

SEQ ID NO: 84340 - DNA, 393 bp, Homo sapiens
  misc_feature (1)...(393): n = a,t,c or g
cggacgcgtgggcggacgcgtgggatcggcctggccatccacctgctggatggtggcaacacagagatccaggtgtggggggcctggggcctggacatgccctcctttgcctccctccctttttggaggaggtgggccttgagttgggcactgaaggccgaggagggtgtgaaagaggagaggcctgagcagtggctgagaggtgagaagagtgggcatgatgggggcagggtggtgaggagacgggctcaggcctggctggggcagaggggtatgcgggggtgatgaaaggacaacgtgacacaggagcagatatggggcatggagccgcccatgggtggccatggatgctagccaccagcacccaggcctgcagccaggcccctgcagccn

SEQ ID NO: 84341 - DNA, 773 bp, Homo sapiens
ttttttttttttgtttctatgtccaaaacatttatttcacggaaatatttgtgcctgcacaacaaggggaactttgtggggtgtctgtggcttgctacagtgacatctggcaggactaactgggtcatcagagccacagaataaggactgggaaggtggccacaactgcaaggactggggccatgtggggggaggactctgagactgaccacttgggctggtaacttgggctgtccagtgtatggggaatctcagtgagttcctgggcctgaagtcagactctgtctctgacgcagacgtgagaggtcggagtgggcaggaactcttcagctgctcatcccgggaacttgtcctccaaggggctttgccatttgttttcttcctgtaccttttccacttgtctgaagacccgcagcaggtttccacgaaggacaccctgaagctcttcctcactccagccacgactcagcaactcctctatcaggaccgggtatgtggacacgtcttccagcccctgagggaatctgtgtggccaccagctagtgggtttcagacctgattccctgatcatgactcagaaccacagtccagggtctatgaaaccccagccctggtcaggtatgggaagtggagacttggagagagtaggtaattctcctctgctctttatccttcagaaggaggcctcaaaacctccttgaatatttatcaaaacttattgaatcatactattaagatctatgccttttactgaatgcaaatgatcccccaaa

SEQ ID NO: 84342 - DNA, 449 bp, Homo sapiens
  misc_feature (1)...(449): n = a,t,c or g
ccacgcgtccgtgcatttgagtttgtctttgggttccggaggtgaagaatcagacaaagaaaaacaggaaatgtttgcagttcattctgtcaacttgctgttgaaaagcataggtgctactctgactgatgtggatgaccttatattcaaacttgcttattatgaaattcgatatcagttctacaagagagatcagcttatatggagtgttgttaggcattacagtgaacagttcttgaaacagatgtatgtccttgtattggggttagatgtacttggaaacccatttgggattaattagaggtctgtctgaaggagttgaagctttattctatgaacccttccagggtgctgttcaaggccctggaaggaatttgcagaggggttagtgattgggagtgaggaagcctctttgggacacacagtaggntggtnccagcagggagttg

SEQ ID NO: 84343 - DNA, 398 bp, Homo sapiens
accatccatccttcatcatccatccatccatccttgatccatccatccacccatccatccatccatcatctgtccatcgcattatctatccattcatccatccattcatcatccacccacctattcatcagctatctatccatcatccatccatccatcatccatccatccatccgtccatccatccatcatctatccattcattgtctatgctttcatccatccattcatcatccatccacccattcgttagctatttatccattatccattcctccatctatccatcatccattcatcccttatccattcaaccattatgcatttcttcatttatccattatttatccttccatccatcatccatcatctttccatccactatctatccattcatg

SEQ ID NO: 84344 - DNA, 424 bp, Homo sapiens
atggagagcaacctgagccgcggggatcaaatcctggaagtgaactccgtcaacgtccgccatgctgctttaagcaaagtccacgccatcttgagtaaatgccctccaggacccgttcgccttgtcatcggccggcaccctaatccaaaggtttccgagcaggaaatggatgaagtcatagcacgcagcacttatcaggagagcaaagaggccaattcctctcctggcttaggtacccccttgaagagtccctctcttgcaaaaaaggactcccttatttctgaatctgaactctcccagtactttgcccacgatgtccctgggccccttgtcagacttcatggtgggccggttctgaggacgaggatcacccgggaagtggtctgcagcacgtcggaggagggcagcctgcctcccagcacct

SEQ ID NO: 84345 - DNA, 389 bp, Homo sapiens
gggaagttgggggcaagggcgatggcatccatgctgagacatgggcagagccaggccagggagggccatcatgactgcgggacggagcctgcaggcagagccaggacggagaggagtcctggaggctggagctgctggcagagccatgccagccatgaccactggacaggtgtgagctgggcaaggagctggtgaccagtgcccaggaggagtgacagtggctggtgccctggctaaggtaggagggatggttctgaggggccggagggagctgtgaccagatttgctgtgtgttggaggtcgctgccagggaggaggagaggtcacagcagggcacggctggcctccgcagaggccacatgaccacggccccacactggtctcaggag

SEQ ID NO: 84346 - DNA, 471 bp, Homo sapiens
  misc_feature (1)...(471): n = a,t,c or g
cggcccccccccattganaagcattgacaagctgttacgcctgcacgcaccgtcccggaactacccacgcgacccacacattagagcagggctatgcagcccaggttctggtttatgatgatgagacttatatgatgctccacgctggccagcaacaggacttgataccgagaatgtggaaacagggaggtataagatcgacatgaaaaactggggatctgaaaacgagcccctatcctaggattacctgaaggtgaaacagattgagccagaacgaagacaatgctggtgggttgttttttaatttattaagaatgcctgtaattttatatttcattaaaagtatttcatctacctttaccatatttttgtttaaagggtgacaatgattcctccttaaggaaggagaagtaatacgataatatttttcctccaagatagcttgctgaattatcccttgccatattcttg

SEQ ID NO: 84347 - DNA, 385 bp, Homo sapiens
  misc_feature (1)...(385): n = a,t,c or g
attaaccctgtaggggagtgtttattagggaaaataaacaattggatggaatattgggtgtctatgcgaactagttgcctttgggaaatagcttgttctatttcttcaatttccctttgtgctgcaggagttaaatatctgggagagtccagggctgtattgccctttaagatacaaaacaggttttgcaacttatcaatagatacgcccaaggtggggcgaagccagttaatatcgcccagtaatttttgataatcatttaaggtgtgtaagttgctagtatttaatttaaccttttgaggacttactgattgaggaagttagtatgtatccaagatatttccaaggagaggacattggtatcttctcaggtgctatgattaan

SEQ ID NO: 84348 - DNA, 372 bp, Homo sapiens
atttggtgaacgatataaacttacagattcaagaagcctggcaaacctcattgaggataaaatcaaagaatactatgcctacacacattagattcaaactgctgaaaatggaagctatagggaaaaaatataagcagctagagaaaaacaacgtatttttacaggggaataccaattcaaacaactgtggatttctcatcagaaaccacaaaggctacaaaacagtggaataacactctgaaagtgttgaaagacctattgatgcagaaacctatgaacagtgaaaatatcctccaggattgaaggtgaaataaagttttcagatgaagtacaaattaagaatattcatcaccaacagatctgctcaaaaag

SEQ ID NO: 84349 - DNA, 389 bp, Homo sapiens
ggacctgggggtgtctgaaaaagcccctttgaacttgaggccagtttggggaacgtggcgtccactcccactgccctgcagcagctctggtcggggagcaacgatcagaaaccaaaccccagccacgccagagccgcctggagacagaccagacgtggggcagtctgtgagggcgcctggcaaaccaatcacccgccgccaggcacctgccaccagacatccacccccccagccggggacagttcattcatgcgatcctttgccccccaggcatgggccacctgctgccttgttctcgggaccaaggcccgcccaggacaccttctccctcaccatttttgctctgggctgaagcagctgggggtgtgggtggagggtagcagtggtgg

SEQ ID NO: 84350 - DNA, 1293 bp, Homo sapiens
atggctgagagcgcctccccgccctcctcatctgcagcagccccagccgctgagccaggagtcaccacggagcagcccggaccccggagccccccatcctccccgccaggcctggaggagcctctggatggagctgatcctcatgtcccacacccagacctggcgcctattgccttcttctgcctgcgacagaccaccagcccccggaactggtgcatcaagatggtgtgcaacccgtggtttgaatgtgtcagcatgctggtgatcctgctgaactgcgtgacacttggcatgtaccagccgtgcgacgacatggactgcctgtccgaccgctgcaagatcctgcaggtctttgatgacttcatctttatcttctttgccatggagatggtgctcaagatggtggccctggggatttttggcaagaagtgctacctcggggacacatggaaccgcctggatttcttcatcgtcatggcagggatggtcgagtactccctggaccttcagaacatcaacctgtcagccatccgcaccgtgcgcgtcctgaggcccctcaaagccatcaaccgcgtgcccagtatgcggatcctggtgaacctgctcctggacacactgcccatgctggggaatgtcctgctgctctgcttctttgtcttcttcatctttggcatcataggtgtgcagctctgggcgggcctgctgcgtaaccgctgcttcctggaggagaacttcaccatacaaggggatgtggccttgccacccatactaccagccggaggaggatgatgagatgcccttcatctgctccctgtcgggcgacaatgggataatgggctgccatgagatccccccgctcaaggagcagggccgtgagtgctgcctgtccaaggacgacgtctacgactttggggcggagcgccaggacctcaatgccagcggcctctgtgtcaactggaaccgttactacaatgtgtgccgcacgggcagcgccaacccccacaagggtgccatcaactttgacaacatcggttatgcttggattgtcatcttccaggtgatcactctggaaggctgggtggagatcatgtactacgtgatggatgctcactccttctacaacttcatctacttcatcctgcttatcatagtaagtgtcagggagcctgggctcctaggtggcagcttcagcacagcacagtccccaaaatgtcaaggtgattcattcccaggagtcgctgctgaatccctgctgctgcgaggttgggttctctggcttcctggtggtgggag

SEQ ID NO: 84351 - DNA, 405 bp, Homo sapiens
attcatcaagaaggtataacgattgtaaatatgtatttgcccaatgttggaacacctaaatacataaagaaaatattaatagaactgaaggatgaaacaaatagtaacacagtagtagtaagggacttcagaccccactctccacaatggataaatcatccaggcagaaaatcaataagaaaaacagctgacctgaacaaaactagtgaccaagtagacctaacagacatatgtataacattccattcaacagcagcagaacgcatgatatttttgaatgcacatggaacattacccaggatagatcatatgttaggtcacaaaacaagtcctaacaaatccaagaagattgacataatattaagtatcttcttttacctcaatgctatgaaactataataacaa

SEQ ID NO: 84352 - DNA, 412 bp, Homo sapiens
  misc_feature (1)...(412): n = a,t,c or g
acttcatcagagtatattccaagtcttgataaactaatatgtggctgtgaagatgggacaattatcattacccaggctttgaatgctgccaaagcaagacttctggaaggtggttctttagtaaaagattctccccctcataaagttcttaaaggccaccaccaaagtgtcacttcattactctatccacatggtctctcttcgaaattagaccaaagttggatgttgtctggggacctggactcatgtgtgatcttgtgggatatcttcactgaagaaattttgcataaattctttttggaagctggtccagtaacaagtcttttgatgtcaccagagaagtttaaactaaggggtgagcagataatttgctgttgtgcggtgaccattccgtggctctccttcaccttgn

SEQ ID NO: 84353 - DNA, 430 bp, Homo sapiens
  misc_feature (1)...(430): n = a,t,c or g
ttctcatcctttatggaacatcaaaaaattggtactgtagagaaagcgtataaatacaatgaatgggagaaagtctttgggtatgactctttccttactcaacatacaagcacttacactgcagagaaaccctatgactacaatgaatgtgggacgtctttcatctggagctcttaccttattcaacataagaaaactcatactggagaaaaaccctatgaatgtgataaatgtggaaaagtttttaggaatcgctcagcccttacgaaacatgaacggactcacactggaataaaagccctacaaatgtaatcattgtgaaaaagcntnntnattantattaatatttatcaaaaattatgtggtgtggtcaattctgtggtacacttatcgtctgtaggcgtgggcaagcattattattttttgttgg

SEQ ID NO: 84354 - DNA, 446 bp, Homo sapiens
  misc_feature (1)...(446): n = a,t,c or g
cctaatgacttcttcaaggacatgttccctgacctgccgggggggcctctgggacccatcaaggcggagaacgactacggtgcctatctcaacttcctgagtgccacccacctgggaggcctcttcccaccctggcccctggtagaagagcgcaagctgaagcccaaggcctctcagcagtgccccatctgccacaaagtcatcatgggggccgggaagctgccgcggcacatgaggacccataccggggagaagccatacatgtgcaccatctgcgaggtccgcttcaccaggcaggacaagctgaaaatccacatgcggaagcacacaggggagcggccctacctgtgcatccactgcaacgccaagttcgtgcacaactacgacctcaagaaccacatgcgccntccaccacgggcgtgcggccctaccagtgcgagttctgc

SEQ ID NO: 84355 - DNA, 412 bp, Homo sapiens
  misc_feature (1)...(412): n = a,t,c or g
gaaagaattatgcattatatataatcacatggagtttattaccagaatgcaaggctggttcagtgtacaaaaaataatcagtataacccaacatatcagtaggctaaagaagaaaaatcacatcatcttatgtcagttaatacacaaagagcatttgaccatattcagtacccattcatgataactcagaaatctaggaatagaaaccttacttgataacaagcatttacaaaaagtctgcatggaatattatacttaacagtgaaagactgaatactttgccactgaggtcagaaacaagccaaggatgttcactcttaccactcattcaacacagtcatagccaatgcagtaaggcaaggcaaggaaaaaataaaactatctcattntccagatgacacagttgtccatg

SEQ ID NO: 84356 - DNA, 488 bp, Homo sapiens
agtcactcaaacagctctattcagatggattgtccgcttctcagggccccaaaatatcatcacctcctccctgcttaacaaacagaccaggctttgtaatggcaaacatactccctgcatgaccattcacccctggatcccctgcagcagctcccccaccactagtaatgttttctcatcccctttcaatcactctcttgaatggttcctagtagacacagaacggttttttctccaatgggaaaatagaacacacggagccactcagtttgctcccaacacccctttccagccactcaccagagctaccttggcaagtactctaggagtatgggaaaatgaaaacaacaaacacacacctttttaacatacacaaccagttccatctactgagccaagggttcaagcagccaaaaatggaagacaagatagcagctgagggtagacatacatctggactggagcatggatacctgccaatcatctaa

SEQ ID NO: 84357 - DNA, 459 bp, Homo sapiens
  misc_feature (1)...(459): n = a,t,c or g
ggaggccgnnnnattgaaaacatgagaacgctctgaccatgcttacgccaagagggcacgaggatggtctgggcctcccgcaggcgccgggcgccgtctgggtctccccgcggcgggccggccgcccctgccttccgtgcgcgttcggatcccgccaggtccaccaggtgcagcgtgcctgcggtgcctggagcgcgcggtggagacgccgcgcgcagcgtcagcgtgaccagggcatgcgagcgggagctgcgctggttcatggcggtggcggcggtggcccggttgctcctccccagtttcagcatctggtgcaatgtctccaggttgggcacgtcccagtgggtgaggccagccacctggatcccgccctggccttctgggccctgcctcacggccaggcgctcgggaggccctggagcaaggaggtccctgacagcctcattgtagatctccacn

SEQ ID NO: 84358 - DNA, 817 bp, Homo sapiens
gccggagcccgcaggctggagctaggcgaggccctggcgctggggtcgggctggcgtcatgcgtgccacgctctcctctacgcgccggaccctgggatgctcttcggccgcatcccgctgcgctacgccatactgatgcagatgcgcttcgatggacgcctgggcttccccggcggattcgtggacacgcaggacagaagcctagaggacgggctgaaccgcgagctgcgcgaggagctgggcgaagcggctgccgctttccgcgtggagcgcactgactaccgcagctcccacgtcgggtcagggccacgcgttgtggcccacttctatgccaagcgtctgacgctcgaggagctgttggctgtggaggccggcgcaacacgcgccaaggaccacgggctggaggtgctgggcctggtgcgagtgcccctgtataccctgcgggatggtgtaggaggcctgcctaccttcctggagaattcctttattggctctgcgcgggagcagttacttgaagctctccaggacttgggactgctgcagtctggctctatttcaggccttaggattccagctcatcactagaggcagccctccatggacccatgaaaactgagatgaggaccttggtactagggagggagggaaggacctccgaatgttctcccatcgtctcctcctgtcgcatcgtggggtcatctgctaacaccgcgctcatctccccctcaggttctcgctcttagcacccccgtccctacgccgtccatccctcttcctgcttccatcgtctctcaacaacccctttgctccgcttcgc

SEQ ID NO: 84359 - DNA, 440 bp, Homo sapiens
cctttgatttccctaggccaagtggaggaattcgttgccgcaggccatccacctccatgcccagcagcgcggggtcgcggaggtttagcagctccctcatggcgagcagcaccggcgcgcagtgcgcgttctcctccaggccctgagcacgtcggggtaaggtctcgcgccagccctctctcccacccagccactgagactctcgcccgtctgcccgcccaagaagctctcaccaaactgaggaaaagctgctgaagctgggcagcatcgtgccgcaggcgctcggccgcctgggtcctctcgtcggctccgcggcacaccaggcggccttgcatcagcgcgctcaggtactggagcaccacggcacgctcggcctcaggccagcagcagctgcggggaggcaatcaggcgggtgcaggtcgcctctcacccgcgccgcc

SEQ ID NO: 84360 - DNA, 457 bp, Homo sapiens
  misc_feature (1)...(457): n = a,t,c or g
attgctgaaannaacccanttaaccgngatagcacgagtcgnggaannnatggngngtgcacgtgtgcactgtgtatgcatggtgtgtgcatgtgtgcactgtatgcatagtgtgcacgtgtgcactgtgtgtggatgcatggtaatgtgcacgtgtgcactgtgtgtggtgtgtatgcatggtgtgtgcacgtgtgcacggtgtgtggtgtgtatgcatggtgtgtgcacatgtgcactgtgtatgcatggtgtgtgcacgtgtgcactgtgtatgcatggtgtgtgcacgtgtgcactgtgtggtgtgtatgcatggtgtgtgcacatgtgcactgtgtatgcatggtaatgtgcacgcgtgcactgtgtgtatgcatggtaatgtgcacgtgtgcactgtgtgtggtgtgtatgcatggtgtgtgcacgtgtgcactgtgtatgcatggtaatg

SEQ ID NO: 84361 - DNA, 468 bp, Homo sapiens
  misc_feature (1)...(468): n = a,t,c or g
gaggtggtcactctcctttggggtgagatgaacgagctttcccagcagctttctcagcaaggaggtcggggcgcctctcagtgtccctcacctccggcccccacgcttccaaacccaactcctctctgccagctccagctccagcgtgtgaacacgggactgcccaccccaccatgccaccccggagccggcgccgcagggccatgcctccgaggacatgcagcctgtccgtgcctgctgagagcctgatggttctaactcaggaccgagctcagcagggacagcgggtgtggcccctgccctcgcccaggcgccctgcacagcgctcgctctgaagatctgtgggggttccctcgagcccgactggctgaagtggggaccagagagcggggggnnngtgagaggctcttgtgcttgtgctgcttgntantttnnttccnccgcntggnctaatgactcgacacgccc

SEQ ID NO: 84362 - DNA, 467 bp, Homo sapiens
  misc_feature (1)...(467): n = a,t,c or g
ntctgaagactacgnacgtgcgnangnncnnnaannnnnacgtcgacgatttcgggcggagttggacatcgggcagcactgccaggtggggcattgccggcagcgaggtgatccgggagcttccagcccccatccccggccgcgggagaccagggctccgctttggctccgcggatggtggcggcgggtgaagggaggccacaaggctgggcagggcctgaggagcggggtgggagcgtttcttctggggctgcagtgagatcggttggtgcgggttttttttggccgtgagcttttgaaatgacgtgtggtctccttggaaggaagccatgcaattcctgaggcagggcctgaggagcggggtgggagcgtttcttctggggctggagtgagatcggttggtgcgggttttttttggccgtgagcttttgaaatgacgtgtggtctccttggaaggaagccatgcg

SEQ ID NO: 84363 - DNA, 407 bp, Homo sapiens
  misc_feature (1)...(407): n = a,t,c or g
tttcgtaccagcggaccctggagcagagggccaagaaatcggggccggcaccggcaaacagcagcacccgagcaaaccccagcaagatgcggaggctgcctcggcggagcagaggaaccacacgctgatcatgctacaagagactgtgaaaaggaagttggaaggagctcgatcaccacttaatggagaccagcagaatggtgcttgtgatgggaatttttctccgactagcaaacgaattcgaaaggacatttctgcggggatggaagccatcaacaatttgcccagtaacatgccactgccttcagcttctcctcttcaccaacttgacctgaaaccttctttgcccttgcagaacagnggaactcacactcctgggcttctagaagatctaagtaagaatggtn

SEQ ID NO: 84364 - DNA, 411 bp, Homo sapiens
tttcgtacatgaagctaccggccagggttttctttattttttggtcccggctgccctgtggcctcgctcctcggagggtaaggcggccgggggcgcggggagcgaggacagggcgtctcgacgcgcaaagagagaggacagggcgtcacgggggctcggggagcgaggacaaggcatcctggggcgcaaagagagaggacagggcgtcccgggggttcggggagcgaggacagggcatcccgaggcgcagagagagagaggacagggcgtcccggggcctcggggagcgaggacagggtgtcccggggctcaaagagagaggacagggcgttctggagcgcttagagagcacataagcaaccccgcgagcgagagagaggacaggacgtctcggggcgcaagaaaaagggg

SEQ ID NO: 84365 - DNA, 583 bp, Homo sapiens
  misc_feature (1)...(583): n = a,t,c or g
tttcgtcgcagcccaagaaaagaaagcttgagtctgggggcggcggcgaaggaggggagggaactgaagagcaagatggcgcggagcgggaggcggccctggagcgaccccggaggactaagcgggaacgggaccagctgtactacgagtgctactcggacgtttcggtccacgaggagatgatcgcggaccgcgtccgcaccgatgcctaccgccctgggtatccttcggaactgggcagcactgcgaaggcaagacggtactggacgtgggcgcgggcaccggcattctgagcatcttctgtgcccaggccggggcccggcgcgtgtacgcggtagaggccagcgccatctggcaacaggcccgggaggtggtgcggttcaacgggctggaggaccgagtgcacgtcctgccgggaccagtggagactgtagagttgccggaacaggtggatgccatcgtgagcgagtggatgggctacggactcctgcacgagtccatgctgagctccgtcctgcacgcgcgaaccaaagtggtgaaggatggcgggtttttcttgccggnctccagcgaacttttcatg

SEQ ID NO: 84366 - DNA, 716 bp, Homo sapiens
ggatttcgttgatgctgctcggaaccttcccctggagtccaccaagtcaccagcagaaccaagtaaatcagtgccctccttggagggacccacgggcttccagccaaggactcccaagccagggtccggttcagaatcagggaaggagaggagaacaacgtccaaagaaatttctgtcatccagcacaccagctcctttgagaaatctgattctctcgagcagccgagtggcttggaaggggaagacaaacctctggcccagttcccatcacccccacctgccccacacggacgctctgctcactccctgcagcctaagttggtccgccagcccaacattcaggttcctgagatcctagtaactgaggagcctgaccggccggacacagagccagagccgccccctaaggaacctgagaagactgaggagttccaatggccccagggcagccagacacttgcccagttcccagttgagaagttgccacccaaaaaaaagaggttgggcctggcaaagatggcccaatcatcaggggagtccagtttcgagtcctctgtgcctttgtttcgcagcccgagccaggaaagcaatgtttctttgagtgggtccagccgctcagccttgtttgagagggatgaccatgggaaagccgaggcccccagtccctcatttgacatgggccccaaacccctgggcacccacatgttgactgtcc

SEQ ID NO: 84367 - DNA, 1082 bp, Homo sapiens
tttcgtcagcctggctggcagcagccttggactccgcccgtggagccctgggcctgttgacccaccagcttaggagcacccaccaagctctgggtcaacgtggaggtaccaggccaccatgctcagtctcaagctgccccaacttcttcaagtccaccaggtcccccgggtgttctgggaagatggcatcatgtctggctaccgccgccccaccagctcggctttggactgtgtcctcagctccttccagatgaccaacgagacggtcaacatctggactcacttcctgcccacctggtacttcctgtggcggctcctggcgctggcgggcggccccggcttccgtgcggagccgtaccactggccgctgctggtcttcctgctgcccgcctgcctctaccccttcgcgtcgtgctgcgcgcacaccttcagctccatgtcgccccgcatgcgccacatctgctacttcctcgactacggcgcgctcagcctctacagtctggtttcctggagctggaaagccctgggctcagtaaggtcctccgcacaggagccttcgcctatccattcctgttcgacaacctcccactcttttatcggctcgggctgtgctggggcaggggccacggctgtgggcaggaggccctgagcaccagccatggctaccatctcttctgcgcgctgctcactggcttcctcttcgcctcccacctgcctgaaaggctggcaccaggacgctttgattacatcggccacagccaccagttattccacatctgtgcagtgctgggcacccacttccagctggaggcagtgctggctgatatgggatcacgcagagcctggctggccacacaggaacctgccctgggcctggcaggcacagtggccacactggtcttggctgcagctgggaacctactcattattgctgctttcacagccaccctgcttcgggcccccagtacatgccctctgctgcagggtggcccactggaggggggtacccaggccaaacaacagtaaggccccatccctgaccctgtcctggagggggcagaggccacgcctcagtgctgact

SEQ ID NO: 84368 - DNA, 779 bp, Homo sapiens
aggattccttcttctccgccaccgagctctttgagtccctgcagactggagattacccgatcccactctccagacccgccgctgcctatgaggaggccctgcagctggtgaaggaggggagagtgccttgccggaccctcaggacggagctgctgggctgctacagtgaccaggactttctggccaagctgcactgtgtgcggcaggccttcgaggggcttctggaagagcaagagtaaccagcttttcttcgggaaagtgggccgacagatggtgacaggcctgatgaccaaggctgagaagagccccaaaggcttcctggagagctacgaggagatgctgagctatgccctgcggcccgagacctgggccacaacacggctggagctggagggccgaggggtggtatgcatgagcttcttcgacatcgtgctggacttcatcctcatggacggccttcgaggacctggagaaaccctccggcctcggtggctcgccggtcctgcggaaccgcttggctgtcagacagctttcaaggagacggtgggtcactgccctgctctcagacccacacttgctcacatcagaccgagtggttgcctggctccgtcccctctgtccctagcactggcaccaaggctgggcccccaccccctagatccgcggctgccaggcctgggagaccagagtctgccctggagaagccgccagggtgccccgttgctgcctggtgccccagtttagaaccaacatggtgtgcgctttcttcctaaaaaaaa

SEQ ID NO: 84369 - DNA, 1644 bp, Homo sapiens
ggcaccaggatcaaatcagagcgggcttccctacgcttcctccctctccctccctccctccagaggaggtggtgggacacacgcaggggccactagatgggagcctgtatgctaaggtgaagaagaaagactccctgcacggcagcaccggggctgttaatgccacacgtcctacactgtcggccacccccaaccacgtggaacacacgctttctgtgagcagcgactcgggcaactccacagcctccaccaagaccgacaagaccgacgagcctgtccccggggcctccagtgccactgctgccttgagtccccaggagaagcgggagctggaccgcctgctgagtggctttggcttagagcgagagaagcaaggcgccatgtaccacacccagcacctcaggtcccgcccagcagggggctcggctgtgccctcctctggacgccacgttgtcccagcccaggttcatgtcaatggtggggcgttagcatctgagcgggagacagacatcctggacgatgaattgccaaaccaggatggtcacagtgcgggcagcatgggcacactctcttctctggacggggtcaccaacaccagtgaggggggctacccagaggccctgtccccactgaccaacggtctggacaagtcctaccccatggagcctatggtcaatggaggaggctacccctacgagtctgccagccgggcggggcctgcccatgctggccacacggcccccatgcggccctcctactctgcacaggagggtttagctggctaccacagggaggggccccacccagcctggccacagccagtgaccacctcccactatgcccatgaccccagcggtatgttccgctctcaatccttttcggaagctgaaccccagctgcccccagctccggtccgagggggaagcagccgggaggctgtgcaaaggggactgaattcgtggcagcagcagcagcagcagcagcagcagcctcgcccacctccacgccagcaggaaagagcccacttggagagtcttgtagccagcaggcccagccctcagccattggcagagacccccatccccagtctccctgagttcccgcgagcagcctcccagcaggagattgaacagtccatcgaaacactcaatatgctgatgctggacctggagccagcctccgctgctgccccactacacaagtcccagagtgtccccggggcctggccaggggcttctccactctcctcccagcccctctctggatcctcccgtcagtcccatccactgacccagtccagatctggctatatccccagtgggcattcgttgggaacccctgagccagccccacgggcctctctggagtctgtccctcctggcaggtcttactcaccttatgactatcagccatgtttggctgggcctaaccaggatttccattcaaagagcccagcctcttcctccttgcctgccttccttccgaccacccacagccctccagggcctcagcaacccccagcctctctccctggcctcactgctcagcctctgctctcaccaaaggaagcgacttcagacccctcccggactccagaggaggagccattgaatttagaagggctggtggcccacagggtagcag

SEQ ID NO: 84370 - DNA, 373 bp, Homo sapiens
cccacgcgtccggaaatatgctctatttaaatgttaaagacatgagcaaatccttaaccaattactcacaagtctatgggcctgtgttcactgtgtattttggcctgaagcccattgtggtgttgcatggatatgatgccttgaatgaggccctgattgatcatggtgaggagtctctctggaacaggaagttttccagctgctgaaaaagttaacatacgacttttaatccttttcatcaatggaaagagatggaaggacatccggcgattctgcctcatgactctgtggtattttgagagggggaagaggagcatcaaggaccgtgctcaagaggaagcccgctgccttgcggaggagttgataaaaacct

SEQ ID NO: 84371 - DNA, 480 bp, Homo sapiens
  misc_feature (1)...(480): n = a,t,c or g
cgccggtgagccgcatggagccccgggcggcggacggctgcttcctgggcgacgtgggtttctgggtggagcggacccctgtgcacgaggcagcccagcggggtgagagcctgcagctgcaacagctgatcgagagcggcgcctgcgtgaaccaggtcaccgtggactccatcacgcccctgcacgcagccagtctgcagggccaggcgcggtgtgtgcagctgctgctggcggctggggcccaggtggatgctcgcaacatcgacggcagcaccccgctctgcgaatgcctgcgcctcgggcagcatcgagtgtgtgaagctcttgctgtcctacggggccaaggtcaaccctcccctgtacacagcgtcccccctgcacgaggcctgcatnagcgggagttccgaatgtgttgaggcttcttatttgacgtcggggncaatcttgaagcgcacgaatttcattttggggaaccctctt

SEQ ID NO: 84372 - DNA, 529 bp, Homo sapiens
  misc_feature (1)...(529): n = a,t,c or g
cccgcagcctgtgatttcctgggtgacaccccgaagcgtttcatcaccaccaagtccaatggaagagccaccgggttgggtgatggcaccttggaaatccgctttgcccaggatcaagacagcgggatgtatgtttgcatcgctagcaatgctgctgggaatgataccttcacagcctccttaactgtgaaaggattcgcttcagatcgttttctttatgcgaacaggacccctatgtacatgaccgactccaatgacaccatttccaatgggcaccaatgccaatactttttccctggaccttaaaacaatactggtgtctacagctatggggctgcttcacattcctgggagtgggtttattttgttttcttctcctttttgtgtgggagccgaggggaaagggcaaggcacaaaaacagcattgaccttgagtatgtggcccagaaaaaacatgggtgctgtttttggaaggggaggtagctggacccagggggtttcaaccatgaaatgattttgaaggncccaa

SEQ ID NO: 84373 - DNA, 435 bp, Homo sapiens
  misc_feature (1)...(435): n = a,t,c or g
nacgcccccttgaaccctcngttgacacactgaanatcttacgccagcttggcacgaggctgagcccgaaaaggtctgaggaggcttctgcacctccttttcccttgggggggacaggagcagcccctacccgagccagtctccccgagcaaatcctgctgcccagaagctgcctggaagccagaaagagccagccagatgaaaagttgctgtctgctttgcacaactccaggacctggaattaagagccacgccggagccagcacagactggtgtccccagaggtgcatcccggaagacgaggcagcagccctggagtggctgaatgcaaacttacatcggcatacttcagaacaggacgatcgccctgcccctcgcttccggggacaacacgaacgaactccttgctacaccaattctgcgctgacaagcctc

SEQ ID NO: 84374 - DNA, 435 bp, Homo sapiens
ggtataatgtgcgcgcagcggggggcgcagtctgtgcgcgcttggcagtggcaggagtccttcccggagcacaggaggcacgaggggagcgtggatgagaggggagcggcctcccccgccccagggcgggaacctttgggtacatagcgggttctagaatgcggagggggctgggtttcctgccagagctggcagtaggtgcgcgtgggcccggaggaccgaggccatgtctatctgctcctgaggagggagaggtggtgtcctgttccggagcgagtggttgggaggggggcatttgcggacaggagtgggtccccgcaaagagcggaaaggaggtggtgtgtgtgtccatgttggagttccaacccagggcagacgggaccatgggggtgttgcggggtgcgtgtaaactccttgagcgcccaagccagtcgt

SEQ ID NO: 84375 - DNA, 505 bp, Homo sapiens
  misc_feature (1)...(505): n = a,t,c or g
gaatggccccnnnnaattgtaaattgatgaccctattacgnccaccttggcacgaggatggtacttcccatnnnnccccgatgacttttatgtggaagatggaattccctgtaaggagaggggctactgctatgaaaagagctgtcatgaccgcaatgaacagtgtaggaggatttttggtgcaggcgcaaatactgcaagtgagacttgctacaaagaattgaacaccttaggtgaccgtgttggtcactgtggtatcaaaaatgctacatatataaagtgtaatatctcagatgtccagtgtggaagaattcagtgtgagaatgtgacagaaattcccaatatgagtgatcatactactgtgcattgggctcgcttcaatgacataatgtgctggagtactgattaccatttggggatgaagggacctgatattggtgaagtgaaagatggaacagagtgtgggatagatcatatatgcatccacaggcactgtgtccatata

SEQ ID NO: 84376 - DNA, 581 bp, Homo sapiens
tctgaccatgactacgccaccttggcacgaggcatgaagagatgcatgctctttttgtaaatgctaattgttttaaaagttgaaaagaaaacctttggaaaactcagaaatcttccttgaaataattttactcagagcattggcctctccctggtttaggaatcattcttgccagagattcaatctcgaaattaacagccaggtccttgcctgctgtgcagtctgatgaaagacttcagcctctgctcaatcacctcagtcattcctacactagccaagattacagtacccagggaaatgttgggaagatttctttagatcagattgatttgctttctaccaaatccttcccactttacatgcatcagttacataaagccttgcgggaaaatcaccatctttgtcatggaggccgaatgcagtatgtcctatttctgaagggcattggtttaactttggaacagacattgcagttctgggaaggcaaggaatttatccaaagggaaagatgggtccagacaagtttggataaaggttactcttaggaacatccgtcacagctttgggaagggaagggcaag

SEQ ID NO: 84377 - DNA, 421 bp, Homo sapiens
  misc_feature (1)...(421): n = a,t,c or g
gggtcttcccgacctggacnnnnaatagggggcactggatcctgtcttgtcctttgcctgcaagccctgggcgcagaccacggggatgctgatcttggcggaccacttggacgtgccgtccagcacgctctgcttgaccgccttcatctgctgcgtgtgcgccgtcttggtcaccgcgaagatctcctggatgagctcgaagatctcgggcttgttgcgctcccggatcttcatgcggtccttgagcaccatgatgatgttctgtgtccggtcctccgccccgtgcttggagctcttctccgcagcccgctgcaggcagtcggcgttgagcaggtcctggcacttctcgtggcacttgacaccgcactcggtgcagcgcatgccctgcctcgcgatgccccacagcagaccctcgcactcg

SEQ ID NO: 84378 - DNA, 408 bp, Homo sapiens
  misc_feature (1)...(408): n = a,t,c or g
gggcgcgggatggtggatgacttgtcaaactcgggcgggccctcgctgtccgcatccccattcacggagtagcagtcgtagtcggagccttgggaggggatggtgtcctcaaagcaggagggcgtggtggtctgcgtgctgtanccgctggagtactgcagcgagtcccggctgctcttctggtgctccaggctcaggccccgcgtcagcaccatggccaggtcactggcggcgggggacacctcctcaccgtgcttggctgcgatggtggcaggggacatccggggtcgggtgcctcttccccgctggggcccagggtgcccccactggcagggcctgggcttgtgtctcgcaggagctccactcggtccttcctccgctgcagagtggcgcctgagggctgctcat

SEQ ID NO: 84379 - DNA, 462 bp, Homo sapiens
tttcgttccgactggagctcagccgcgcttgtccggtgctaggtcatcctgccaaacacccgaggccccaaagatggtgcaaagtgaacttcagctacagcccagagcaggcggacgagctgaagctgcaagctggggagatcgtggaaatgataaaggagaccacagaggataagggctggtgggaaggagagtgtcaaggacgaagaggagtttttccagacaactttgtactcccaccacccccaatcaagaagctggtcccacggaaagtggtatctcgggaatcaggaggaagagcacagcagcccggtaaaggccccctctgtgaagagaacccccatgccggacaagactgccaccccagagaggcccccagctccagagaacgcccccagctccaagaagatcccggctcctgacaaagtcccctccccagagaagaccctcactctacgggac

SEQ ID NO: 84380 - DNA, 410 bp, Homo sapiens
aagatgatgatgatgaggaggacgaagaggaggaggaggaagaggaggaggatgacgatgatgacacggaggactttgctgaccaagaaaacttgcctgacccccaggacatcagctgccaccaaagcccttccaagacagaccatctcacagagaaggcctattcagacacccccagggacttccctgactccttccaggctggcagtcctggccatctgggggtgatccgggacttctccatcgaatctctgctaagggagaacctgtaccccaaggccaacatccccgacaggagaccctccttgtctccattcgccccggacttctttccacacctctgggccaggggacttcggtgcctttggcccagctgcctgagcagcccatgggacagtgggccactggat

SEQ ID NO: 84381 - DNA, 403 bp, Homo sapiens
cgacccacgcgtccgcgacacttcctcagcatccacaggttacgccacctctcttcctgtcaccgacacttcctcagtatccacaggtcacaccacccctcttcatgtcactgatgcttcctcagcatccacaggtcacgccacccctcttcctgtcaccagcctttcctcagcatccacaggtgacaccacgcctcttcctgtcactagcccttcctcagcatccacaggtcacaccacccctcttcctgccacccgccctttctcagcatccacaggacacgccacccctcttcctgtcaccggcgcttcctcagagtccacagagcacgccacccctcttcctgtaccatcccttcctcagcatccacaggtgacaccacccctcttcctggcaccgacg

SEQ ID NO: 84382 - DNA, 469 bp, Homo sapiens
  misc_feature (1)...(469): n = a,t,c or g
cctccaacagccaggtggctttggannnaaggttacccagnangntcnnccggnnngaatcccgggacgacccactcgagcgatactgaaaattgccactggatttaatggtatcccttttactattcagcgactatgtgaattggtaacagatccaaggagaaactatacaggaacagacaaatttctcagaggagtagaaaaggtatttattttattattggaattatattatgctgtggtgtaatagcttttattttagaaaagaacattgagtaagatctgtttcgggtaccacttcttgaaatatgtttttcagcctaccttgagtttcccaaattgttttccaaattgcattctgttttacagagagatttaataggaccgggtagaggagggtttgtgtgttggtcattgaagtttggtgaaagcagcttattatttcttggaaattcatagtgtatatcaa

SEQ ID NO: 84383 - DNA, 413 bp, Homo sapiens
agagcggccgcccgggtgtctctccaggtctctcacctctctccaggcctctcacctctctccaggcctctcgcctctctccaggcctctcgcctctctccaggccttcacactcgcctgccaggtctctcacctccctccaggccttcacactcgcctgccaggcctctcacctctctccaggccttcacactcgcctgccaggtctctcacctctctacaggcctctcacctctctgcaggtctctcacttctctccaggcctctcgcctctctccaggcctctcacctctctccagggctctcacctctctccaggcctatacactctcttgccaggcctctcacctctctccaggcctctcacctctctccagggctttcacctctttccaggccgctcacctccctcc

SEQ ID NO: 84384 - DNA, 427 bp, Homo sapiens
  misc_feature (1)...(427): n = a,t,c or g
ggaggcaggaggctgggtagggagaagcaggcaccacctggagagtgggaggccctcgcgtgcctgccacatccaccggcaggtggcagccgagtacaggctagtgcaccggaccatggcccagccacccgtccacgactacgtgcctgtctcctggactgccctggtgcatgtcaaggccgagtacttccgctccctggcccactaccacgtagccatggccctctgcgacggctcccgtgagtgcccaccgcacttgcccatggtactgccaaggcccccccgcgcagggctcacagcctctctgtcccccagcagcgaccgagggagagctccccacgcacgagcaggtcttcctgcagccccccacctcctctaagccccgaggccctgtgctgccgcangagctggaggagcgcangcagcn

SEQ ID NO: 84385 - DNA, 435 bp, Homo sapiens
ggggaggcaggagaggacaatgggctgggacgcttatgctgtgtgggaagagcagggacaatgggctgggacacccgcagagggtgggaagagcagggacaaagggctgggacacccacagcgggtgggaagagtagggacaactggctgggacacccactgggggtgggaaaagcagggacaacgggctgggacacccacaacgggggggaaaagcagggaccattggctgggacacccacatagggtgggaaaagaatagacaactggctgggacgccctcttggggggggaagattattgacaatgggctgggacgcccacaacgggtgggaggaagaaggacaattggttgggacgccctctttcgggtgggaagaaaatggacaatgggcttggacgcccttctgcgggtgggaagagcacgtaccctgg

SEQ ID NO: 84386 - DNA, 441 bp, Homo sapiens
gcaaggaccctctagagcggccgcccgggcccccccacagcacgtgcactcaccgactccacccaagacgctcccacagcacgtgcactcactgactccacccaagacgcctccacagcacgtgcactcacctccacccaagacgcccccacagcacgtgcactcaccacccaagacgctcccacagcacgtgcactggactccacccaagacgccccccacagcacgtgcactccacgactgcacccaagacgccgcccacagcacgtgcactcacctccacccaagacgccccccacagcacgtgcactggactcctcccaagacgccccgcacagcacgtgcacgcgactcctcccaagacgccccgcacagcacgtgcactcaccgactccacccactgtctacccagggcgcagccgctccagcagctcttccctg

SEQ ID NO: 84387 - DNA, 478 bp, Homo sapiens
  misc_feature (1)...(478): n = a,t,c or g
cgcctcccaaattttgaagccgtatggatgcacgttccggaccggcattcccgggtcgacgggaggcaggaggtgctgttgaagagagagatggtgggggaataactggtggttgccctgcagaagacagggaaggtggggggagaggtggtggtggccctgcanaagagagagaaggaggcatccctggtgggggaacagaggttggtagagaaggtggcataacaggtgggggcatgccaggtggtggcactgtagcatggagggcagggggcatcactggtggtggcaatgaaggaggcaacactggagggggcattgtaggtagaggtggaggcatctgagaatatggaacaaaaggagggggcattgacatgtcccccatatactgggtcttcatggtctgaaatgaattgactttctcctggagatagctctgagtggctctcatatgtccctgccatgttttccactgctt

SEQ ID NO: 84388 - DNA, 412 bp, Homo sapiens
gcgccggggcatggtagaagcaagtagaatgtttggtagaagcaggtttaatgcgtggtagaagcaggtagaatgcatgcataggaagcgtggtacaagcaggtagaatgcatgcataggaagcgtggtaggagcaggtagaatgcatgcataggaagcgtggtagaagcaggtagaatgcatgcataggaagcgtggtaaaagcaggtagaatgcatgcataggaagcgtggtagaagcaggtagaatgcatgcatagaaagcgtgggagaagcaggtagaatgcatgcataggaagcgtggtagaagcaggtagaatgcgtggtagaagcaggtagaatgcgtggtagaagcaggcagaatgcatgcatagaaagcatggtataagcatggtagaatgcatgcataggaa

SEQ ID NO: 84389 - DNA, 419 bp, Homo sapiens
ggaggcaggagaggacgagagacgtgtgtgggatccgctgtggaatcccacggtgcagaggggctggtgtgtgtgtgatccactgtggaatcccacagtgcagaggggctggtgtgtgtgatccggtgtgaaatcccacggtgcagaggggctggtgtatgtgtgatccgctgtggaatcccacggtgcagaggggctggtgtgtgtgtgatccactgtggaatcccatggcgcaaaggggttggtgtgtgtgtgatccgctgtggaatcccacggtgcagaggggctggtgtgtgtgtgatccgctgtggaatcccatggtgcacaggggctggtgtgtggggtccactgtggaatcccatggtgcaaaggggctggtgtgtgtgtgatccgctgtggaatcccacagtgcagagggg

SEQ ID NO: 84390 - DNA, 444 bp, Homo sapiens
  misc_feature (1)...(444): n = a,t,c or g
attgaaatctatagctctgccgaccggnccggnnnnnncggtcgacgatttcgtgggaaaaggtggggtgtgaggcgcgttcagggcctgtggggcagatggggtgatgtccgggctacaagctggaactaggggtggagctttggagggaacctttgaggtatcccttgttggagagggaaaattttgggtgtgaggcgtgttcagggtctgggggacagatggggtgatggcagggctacaagctgaaactggggacagagctttggggggagcctttgaggtgtcccttgttggagtgagaaaaggggagtgggtgtgttcagggtctgggggacagatggggtgatggtggggctacaagctggaacttggggcagaactctaaggaggggtgggcctgaaggggctgatacacttaccgatagtagtgccttttggagg

SEQ ID NO: 84391 - DNA, 399 bp, Homo sapiens
gcctgtgaggctggaaggaaatatgtttctttgtctaagaaccatttgccttgtgtgggaagagattgataagtggaagtttcggcgggggaataggtgggagtggccagatgagaaggagaaaaactgaaagtgaggggtataagttggaatgctagctgcttttttagctatcttatcagtatgagcattgtcctgagcgatgggatctgatgccctttgatggcctttgcagtgaatgactctagcttcctttggaagtaaagcagctttgagaagcgtttttattaaagaggcattaatgatagaggacccttgtgtagtgaggaaacctctctcatggtggtgcagaatatggaaggcatatttagagtcaggataaatattgacttttagtgg

SEQ ID NO: 84392 - DNA, 801 bp, Homo sapiens
tcccaggccctcccggtgatggcatcaagggccctccaggggacccaggctatccaggaatacctggaacgaagggtactccaggagaaatgggccccccaggactgggccttcccggcctcaaaggccaacgtggtttccctggagacgccggcttacctggaccaccaggcttcctgggccctcctggccccgcagggaccccaggacaaatagattgtgacacagatgtgaaaagggccgttggaggtgacagacaggaggccatccagccaggttgcataggagggcccaagggattgccaggcctgccaggacccccaggccccacaggtgccaaaggcctccgaggaatcccaggcttcgcaggagctgatggaggaccagggcccaggggcttgccaggagacgcaggtcgttgaagggttcccaggacccccagggttcataggaccccgaggatccaaaggtgcagtgggcctccctggcccagatggatccccaggtcccatcggcctgccagggccagatgggccccctggggaaaggggccttccctgggagaagtcctggggagctcagcccgggccacggggagatgttggtgttgcctgggacagcctggggtttaaaggctttccccggagacagaggcccccctggattcagagaatctgtacaggtggtatgaagaaaagatgggccctggccatgcttagtcagaggtgaagaaggaaaatagaaataatctggaatgcaattctattggtgtaaaaattaatacattttttaaaatgtcaa

SEQ ID NO: 84393 - DNA, 802 bp, Homo sapiens
gcggccgctggtcaaccgcagcgtgcccaggtcgctctcgggcgtggtggtcttgatgaagtagtgcgtgtccttgccctcgatggtgaagtgcaggttctccaggtagaaggcgttgttgagcacggccgccaccttgatgcagtcctcgttggcgatgttgagcacgttggtctgcacgcggccctggctgacggccagcatgacgcccttgccgatcagcgacttgaccgtggcgaaccacagccaggactgcgcaccgccggcccggcgccggctcagcctgcacctcggccatcttccccagcgacaggaaaggccttgcctgcccgcggcactttgctgctggactccgaagatgggcggtatatcatcccactgctgactcttcacaagttcgtaagaaggttctgttaaatcaaatttgggaacagggaatccaggaatagcattgtgcagatggaaaccaaatgtcaccagccagctgttaacatctgtgatgtaatctttcacgtcatggattttgcttgcagggttgttattcctaaacatgtacaagttaaaaggagctgggtccttcccaattcttttccagatttctatgtcaggtgttgtccaccgtcctgccaaaatgtcataatctctttctccaaagtggattaatttggtgagtgggtcatacaggccaccatgaaatccaattaccagttgaaagtcaatattagagtcaaaatagatttccccatatgcagtgtactgaatctgtttcagcataagcccattgctactgcccacgcgtccg

SEQ ID NO: 84394 - DNA, 408 bp, Homo sapiens
ttctccccagccacacatgtgggaacccagggaggctgcccaatggcatccagcagggttcaaccttcaacctcggtgacaaggtccgctacagctgcaaccttggcttcttcctggagggccacgccgtgctcacctgccacgctggctctgagaacagcgccacgtgggacttccccctgccttcctgcagagctgatgatgcctgtggtgggaccctgcggggccagagtggcatcatctccagcccccacttcccctcggagtaccaaaaacaatgccgactgcacatggaccatcctggctgagctgggggacaccatcgccctggtgtttattgacttccagctggaggatggttacgactttctggaagtcactgggacagaaggctcctccctctggtaa

SEQ ID NO: 84395 - DNA, 964 bp, Homo sapiens; identical to SEQ ID NO: 79646

SEQ ID NO: 84396 - DNA, 653 bp, Homo sapiens
tttcgtcgcaggggctggtacgcgctgggcggcgagagcctcatggcggaggaagagagcgaccaagaggccgaacgcctcggagaagagcttgtggccattgtggagtccccgctgggccctgtggggcttagagctgcgggcgacggcagaggcggcgctggcagcggcaactgcggcggcggcgtcggaatcagcagtcgggattactgccgacgcttctgtcaggtggttgaagattatgctggaagatggcaggtccctttgccacagcttcaggttcttcagactgccctttgttgttttacaacagccagtgcatcattcccagatgaatgtgagcatgtacaatatgttttgagtagccctgctgtggagtttctttgagttgctgctgttctttggaagagatgagttttatgaagagcccttaaaggatattcttggatcattccaggaatgccagaatcacctccgcagatatggaaatgtgaatctggaactggtgactcgaatcattagagatggtggcccatgggaagatccagtgttgcaagctgtccttaaagctcagccagcatctcaggagatagtgaacaaatatttaagttctgaaaatccactgttctttgaactacggtgccagataccct

SEQ ID NO: 84397 - DNA, 534 bp, Homo sapiens
ccggaattcgggacgacgatttcgtgcgggtacctgatggccacagatgtctctaggaggccgagcgtccacaaagcagtggaaatcgagcaggagcgggtgaagtcagcgggggcctggatcatccacccctacagcgacttccggttttactgggacctgatcatgctgctgctgatggtggggaacctcatcgtcctgcctgtgggcatcaccttcttcaaggaggagaactcccccgccttggatcgtcttcaacgtattgtctgatactttcttcctactggatctggtgctcaacttccgaacgggcatcgtggtggaggagggtgctgagatcctgctggcaccgcgggccatccgcacgcgctacctgcgcacctggttcctggttgacctcatctcttctatccctgtggattacatcttcctagtggtggagctggagccacggttggacgctgaggtctacaaaacggcacgggccctacgcatcgttcgcttcaccaagatcctaagcctgctgaggctaaa

SEQ ID NO: 84398 - DNA, 437 bp, Homo sapiens
tttcgtgcagcagcaggtaggggaggcgcgcggccccggccccgggcatctgggggtcccgggctgatttgagtccttcctctcccttccttcccggtcctatctcgcccgcgcctggagctcggcccggccgcgggggcatcgctggaaaagggcttcctcgctcacttttcccgtcttccaagggaccaaagagtgtggatgggagttgggggatggggagacgccggagcaggagaggagaggggccaggcctccaccccgtgattccactgtgctgctagcacctgagctaataacctcgaccccgcccccgggatgggggaactggcccggggtcacccctgcacttgggttgtctgacccgggcatgcaggggaccaccagctacggtctgggcggtgactctgctggggagtccactcagaggacccttg

SEQ ID NO: 84399 - DNA, 373 bp, Homo sapiens
aatgtcaggaatgcagcatggcctttaagcagagagcccatcttagtcaacatcaaaatattcatactggtgagaaaccctatgagtttaaggaatgtgggaaggcctttgcttgtttcctaccttaatagaaatcagagaattcacactagtgagaaaccgtatcagtgtaaaaaatgtagaaaatcctttattgattgttcaactcttaacaccagagaattcacactggtgagaaaccctttgaatgtcaggaatgtaggaaggcctttaggcagagggcgcatcttactcaacatcaaagaattcctactggtgagaaaccctatgaatgtaatgaatgtgagaaggcctcttcttgtctttcataggt

SEQ ID NO: 84400 - DNA, 812 bp, Homo sapiens; identical to SEQ ID NO: 68207

SEQ ID NO: 84401 - DNA, 432 bp, Homo sapiens
  misc_feature (1)...(432): n = a,t,c or g
tttcgtctgggaacggcccagctcgggacagcacggggtgtcactgaggaacatgcgggggcctcccgggcagagctggggtcagtcctgtcctcacggccctgtgcgccgccgccccagcttgcaggtccctctgcccctaggtttctgcggtcctgtgcctgcaagggaggtggactcatcgtgtgaggctctgctgggtctcccttggagggtgtgcgcgccctggggtgggagatggagacaagtttgctcccacgggaagttggacaccaccaggtcctgtgtgtcggggcggaacctgagaccttggtcccccgcccggatgctggacaagggtgcaccctccaggcttgaggcccacccgactttgtgtggcctctgtgggctgccagccagaggtcccccatagggtgacctgcccatggncag

SEQ ID NO: 84402 - DNA, 743 bp, Homo sapiens
atgggcttcgacgaggtcttcatgatcaacctgaggcggcggcaggaccggcgggagcgcatgctgcgggcgctgcaggcacaggagatcgagtgccggctggtggaggccgtggacggcaaagtagggatgctcacccgtagcaacgctgcccccgggagacacttggcaatgctggagacattggtggttgtcgcacccaggtttgtagatgcggacaacctgatcctcaaccctgacacactgagcctgctcatcgctgagaacaagacggtggtcgcccccatgctggattcccgggctgcgtactccaacttctggtgtggaatgacttcccagggctactacaagcgcacacctgcctacatccctatccgcaagcgagaccgccggggctgctttgcagttcccatggtgcactcgaccttcctgatcgacctgcggaaggcggcgtccaggaacctgggccttctacccacctcaccctgactacacctggtcctttgacgacatcatcgtctttgccttctcctgcaagcagggcagaggttcagatgtatgtgtgcaacaaggaggagtacggattcttgccagtgccattgcgcgcccacagcaccctccaggatgaggccgagagcttcatgcatgtgcagctggaggtcatggtgccttcatctccaagctcagctcagagcatggcggtggtgtctgctgatcatattggtttagtcatcagctattta

SEQ ID NO: 84403 - DNA, 374 bp, Homo sapiens
  misc_feature (1)...(374): n = a,t,c or g
tcctgctgtgaggttttcatgaggtttcaggtgccactcacagactccggcctcctcaggacccagccccactcccgcgggaggtctgctgtgattctccatgccccctgacgccccaaagcctggccctcccgtgctccagcttctgcccccgagtttgtcagtttctgccggggcctcccgtacccccaccaccattcacgcgcctctgccagcctggnctttccctgtccatttcctcctggccttgctgccaggtgggcctccttggccagtttggctcggccttgccccagatctgcgggcttagctcccacaccttcagaacataaaaagcatcccacagatggcccaagacggggcaggagccccag

SEQ ID NO: 84404 - DNA, 512 bp, Homo sapiens
agcttggcacgagggcgactcccgaagtgaccagtgccaccatccatataattatgggtttgactactactatggcatgccgttcactctcgttgacagctgctggccggacccctctcgtaacacggaattagcctttgagagtcagctctggctctgtgtgcagctagttgccattgccatcctcaccctaacctttgggaagctgagcggctgggtctctgttccctggctcctgatcttctccatgattctgtttattttcctcttgggctatgcttggttctccagccacacgtcccctttatactgggactgcctcctcatgcgggggcacgagatcacggagcagcccatgaaggctgaaacgagctggatccattatggtgaaggaagcgattttcctttttaggaaagggcacagtaaagggaaacttttccttctcttttttcttccttttcttcaagtgcacaaaactttccccaccacggacggatttcattgggcacct

SEQ ID NO: 84405 - DNA, 508 bp, Homo sapiens
ggagaagaatttctccttcctttccaaggggcaggtcataccaacatgcctaatctacttaacacaatgatggagttgcgcaagtgctgcaaccacccatatctcatcaatggtgctgaagaaaaaatcctaacagaattccgtgaagcttgccatattatacctcatgactttcacctgcaggccatggttcgttcagccggcaaactggttcttattgacaagttgcttccaaagcttaaagctggtggccataaagttctgatcttctctcagatggtacgctgcctagacatcctagaggattatttaatccagaggaggtaagaaaagagtcatcctagcctgtggttactctgtcctcataaagcagcaaaaagtaggagggcctggatttaattagagttcaccaattgcaataagagaagtttttaagattctcactctcaacttgggtttttgaccagctttgatatgggaagactggaattgatcctagcctgctgtg

SEQ ID NO: 84406 - DNA, 349 bp, Homo sapiens
gaataaaaccagcttcatattctatctcaaaaacatagtggttgcagacctcataatgacgctgacatttccatttcgaatagtccatgatgcaggatttggaccttgggacttcaagtttattctctgcagatacacttcagttttgttttatgcaaacatggatacttccatcgtggtccttgggctgataacaatgaccgctattgaaggtggtcaggcatttggggactcttggatgaccggcataccttcacgagggtttatctgttggggttgggggccaggcttgtttggtttggcaaacttatccttgcaaagggcggccacggaggcatttcctggctgg

SEQ ID NO: 84407 - DNA, 531 bp, Homo sapiens
atgctgtcccctggatttgacagctccgtgtacagtgacctctgtgaagccacggaggctgtccggccggaggaacgcaagacatgccgcaacccagcctgcggaccacagtgggagatgtctgagtggtcagagtgcactgccaagtgtggagagcgcagtgtagtgaccagagacatccgctgttccgaggacgagaaactgtgtgaccccagcaccaagcctgtgggagagaagaactgcactgggcctccctgtgaccgccagtggactgtctcggactggggaccgtgcagtgggagctgtggacagggccgcactatcaggcatgtgtactgtaagaccagcgatggacgggtagttcccgagtctcagtgccagacagagacaaagcctctggctatccaccccctgtggggacaagaactgcccagcacactggctggctcaagactgggaaaggtgcaataccacctgtgggcgtggtgtgaaaaagcggttagttctctgcatggagctggccaacgggaa

SEQ ID NO: 84408 - DNA, 457 bp, Homo sapiens
  misc_feature (1)...(457): n = a,t,c or g
cgtcgactttttttttttttgtatttagtgaagacagggtttcactatgctggccaggctggtcttgaactgctgaccctgtgatccgccgacctcagcatcccaaagtgttggggattacaggctntgggccaccatgcccagctgcagatggatgatttaaaaagggttatggcattagctcctcttcaagaagccaaagtactactaaggcattcataaaaagctcctgagagaatttagttatactactaatgttggggttcagtctgttaaaccttaattttatgaaacgatgtcctagggcaggaaagcttggaaaataattaagtgggctactaaaatcattagggtcactttaacccagtagtggttaactgggaatatataaccccgtttttcagggtaaatggttcagaaccatagcagaaaaacctcagttgacaaaaaaaaaaaa

SEQ ID NO: 84409 - DNA, 394 bp, Homo sapiens
  misc_feature (1)...(394): n = a,t,c or g
tcccagcacacccagaactggtcnnnnnnttttaccaaggacagcatgcgtcggtacaagcgctgggtcaaagcgttgacagacccagagactggtaccggagaatgttccagcagattcaccggaaaatgccaggtaagatacccttccagggccctctccctgccaaagtggattctggcccctggggcttggagagacagggaaagaaaaggggacttagctgctcaaggggttcttctccaccttctcccaggctctaatgagtagtcctgaaaataggcagtcccctccctgtactcggngccagcagcggtctccagagcatccccaagaagaacattgaccagccactgtcccacagtgtcctctgaggggactgagaagccattcc

SEQ ID NO: 84410 - DNA, 378 bp, Homo sapiens
atctcagacagaatagacttcagagcaaataaaactagcagagacaaaggaagatataacgataataaaatgatcaatttaccaaaaaaatgtaattttaaacatgtgcacttaacaggttttcaaaatatatgaagcagaaactggcagaactgaaaggagaacagacaaatatagttggagactttaatatccctctttcaataattgatggaagcattagaccgaaaacaaacaaggtcattcatcatgaccaagtgggatttatccctgggacacaagaattgttcaacatacacaaatcaatcattgtgatacatcattatcaacagaatgaatgacaaaaaccgtatgatcatttcaattgatgctgaaaag

SEQ ID NO: 84411 - DNA, 533 bp, Homo sapiens
gcgtccggctccatctgtcatccagccaccatagcagccgccagctgtgcccactgcttcccctccattccatccacaggacccccgcctgcccacaggcgctaaccacctgccctaccatcagtgctgatgcctaactctgcctctgccctcccagggggcggggctggggctggggcaggagaggggccaggccagctgagcagttgagggggtggggctggcagactcacggggctcactctcttttggcacaagcagggcctgcaccctgctggaggatgtgcggtaggtgctgggcagcctggacagggtgttgcagggtgagtgagttgtccagccagcggtcagtgtagacatgccagctgagggagggaggtcagggggcagcactgtgactcccactgagaccctagcccctgcatctctggctgactgcggcctcctgtccccagactctcgcctgactgctggtgtgcccgacacgcccacccgcctggtgttctctgccctggggcccacatctctcagag

SEQ ID NO: 84412 - DNA, 423 bp, Homo sapiens
tgtcgaccacgcgtccgctattttaaggggaacctgcccccagactacagaatcagcctgattgacatcggcctggtgatcgagtacctgatgggcggggcttatcgctgcaactacacgcgcaagcgcttccggaccctctaccacaacctcttcggccccaagagggatgatattcccttgaggcgaggaagaaagacaaccaagaaacgtgaagaagaggtggacattgacttggatgatcctgagatcaaccacttccccttccctttccatgagctcatggtgtgggctgttctcatgaagcggcagaagatggccctgttcttctggcagcacggtgaggaggccatggccaagcccctgtggcctgcaagctctgcaaagccatggctcatgaagcctctgaaacgacatggttga

SEQ ID NO: 84413 - DNA, 401 bp, Homo sapiens
  misc_feature (1)...(401): n = a,t,c or g
gggtcgacccacgcgtccgaccgtatcggcgacaaacctatgatttatcagactcgntgncttggntgggcccgtgggagtagggctgaatgaactgaaacgaaagctgctgatcagtgacacccagcactatggcgtgacagtgccccataccaccagagcaagaagaagccaggagagtgatggtgttgaatacattttcatttccaagcatttgtttgagacagatgtacaaaataacaagtttattgaatatggagaatataaaaacaactactacggcacaagtatagactcagttcggtctgtccttgctaaaaacaaagtttggttgttggatgttcagcctcatacagtgaagcatttaaggacactagaatttaagccctatgtgatattta

SEQ ID NO: 84414 - DNA, 389 bp, Homo sapiens
cccacgcgtccgcactatattaataattgtagctttataatcagtcttgaattctggcactgttattcctccaactttgttctttcttttcttttaaaatttccctggctagtctagattcattggatttccacattaatttcaaatcagcttgttgatttctaccaaataaacaatgcccgctgtgagtttggtttggattttattgactctgtaaatcaatttggggaaaattgataactttactaagttatcaatttatgaagctattataaataatatttaatttcaatttaatggaagttatttttatattgatattgtatgctgcagtctcactgcatgcaattatttctattagatatttatgtagatttcattggaattta

SEQ ID NO: 84415 - DNA, 385 bp, Homo sapiens
aagtctccaactgtaattgtggatttgtctatttctcctttcagttctatttgttttgcttcgtgtattgtgaaagccactaaagctatggctttctgttgtggtaaaggcattgatgaattggagaattccctcaggcaaaaagatagaaacttgtagtgagatgcatatacatctaagattgtttatgcttgtcttcttggagaattgcttcttttataattatataatgtcctttttagttctgacatcattcctggttctaaagtcttctttgtctagtatgaatgcaactatttcagctttcttttgcttggtatttatgtggggtatctttttgtatccttttacttttagcccctctacgcctgtatatttaaagtaa

SEQ ID NO: 84416 - DNA, 1672 bp, Homo sapiens
cacattcttcacatttgtagaatttctttccagcatgaattttcttatgtttgttaaggactgagacccagctaaaggctttgccacattcttcacatttgtagggtttttcctccagtatgaattctcttatgagtagtaaggtgtgaggattggttgaagtctttaccacattcttcacatttgtagaatttctttccagcatgaattttcttatgtttgttaaggactgagacccagctaaaggctttgccacattcttcacatttgtagggtttctctccagtatgaattctcttatgttcactaagtcttgaggaccacttaaaggctttgccacattcttcacatttgtagagtttctctccagcatgaattgccttatgtgtagtaaggcttgaggaccagctgaagactttgccacattcttcacatttgtagtgtttctctccagtatgaattactttatgtttagtaaggctcgaaaatgtagtaaaggctttgccacattcttcacatttgtagggtttctctccagtatgaattatcttatgtttagtaagtgttgaggaccacttaaaggttttgccacattcttcacatttgtaaggtttgtctccagcatgaattctcttgtgttcagtaaggcttgagggccagctgaaggctttgccacattcttcacatttgtagggtttctctccagtatgaattaccttatgtttagtaagggttgagaagttaccaaaggctttgccacattcttcacatttgcagggcttctctccagtatgaattctcttatgttccataaggtttgaggaccggttgaaagctttgccacattcttcacatttgtagggtttctctccagcatgaattgtcttatgtgcagtaagggttgaggccttactaaaggctttgccacattcttcacatttgtagggtttctctccagcatgacttctcttatgttcaataaggcttgaggaccgggtgaaggctttgccacattcttcacatttgtaatgtttctctccagtatgaattaccttatgcttagtaaggattgagaacttactaaaggctttgtcacattcttcacatttgcagggtttctctccagtatgaattctcttataagtaagggctgaggaccagttaaaggctttgccatgttcttcacttttgtaggaattctctctagtataaattcttttatgttgagataggtgtgaaagcatgcaaaatgatctgacatattctttacatttcaaaagtttctttccagtatgccttatcttatgtctttttgaatttgaacatttatgaaagatgtttgcatatttgccacattgaaatactttgctttgtgtagttgtcaaactctggttaagcttattataaccttttttgtgcaccttacactcatccacattggtacaaccaatttttaactgtaaattctcatgtccacatttttcatatcttctcaatatcactttttggaaagaatcttctctgccctgctctggccaaaggtcttgagcaaaatgagaacatataactggcggttctttcaccagctcatgtctcttcatattccagggctcttttccttgctccagaaaaatgatcaggtctggcttaggggcagcaatacctggtttta

SEQ ID NO: 84417 - DNA, 394 bp, Homo sapiens
cacgcgtccgccctcttccgccttcctcaatgcatctcccctcttcccccttcctcaaagcagctcccctcttccccccttcctcagtgcatctcccctcttcctcagggcatctcccctcttcccccttgctcagtacatctcccctcttctccccttcctcagagcatctcccctcttccccccttcctcagtacatctcccctcttcccccttcctcaatgcatctcccttcttccccccttcctcaaagcatctcccctcttccccccttcctcagggcatctcccctcttccaccccttccccaatgcatctctcatcttccccccttcctaaatgcatctccacctgctcctcagttccagcctgaccccctcccatcctttgggcgg

SEQ ID NO: 84418 - DNA, 382 bp, Homo sapiens
ttcctagtcgtgctcctgttccccctgcccctcctttacctggtgactctggcactattattccaccaccacctgctcctggggatagtaccactcctcctcctcctcctcctactgctggaacccgacatgttttggctggaggggtatgcttctactcaaccccttttttacctggagagactgcgatctatacaacctcttctttgtatggagaagctttcattcctgcacccccttcgttggctgagggtgttggcctcccttcaccctcttttttgtctggagggggaaacataccttcccctttttctttttcttgttgtggtagaaacccaccaccaccaccttctttgcctgggagtgaaggaaaacaccacca

SEQ ID NO: 84419 - DNA, 411 bp, Homo sapiens
  misc_feature (1)...(411): n = a,t,c or g
cctttccatgcacataggggataggaatcaccgggccgacccacgcgtncgtgtagaagcagaagttagtatttatgatgtatggtaccttgtttgatggtcgaccaatagagtctctgtccctgatagatgccgtaatgcctgatgtagtacaaacaagacaacaagcttatagagataagcttgcacagcaacaggcagcagctgctgcagctgccgcagctgcagccagccaacaaggatctgcaaaaaatggagaaaacacagcaaatggggaggagaatggagcacatactatagcaaataatcatactgatatgatggaagtggatggggatgttgaaatccctcctaataaagctgttgtgttgcggggccatgaatctgaagtttttatctgtgcctggaact

SEQ ID NO: 84420 - DNA, 420 bp, Homo sapiens
tttcgtggcgggggaatagcggcggcagcagccccagccctcagagagacagcagaaagggagggagggagggtgctggggggacagccccccaccattcctaccgctatgggcccaacctcccactcccacctcccctccatcggccggggctaggacacccccaaatcccgtcgcccccttggcaccgacaccccgacagagacagagacacagccatccgccaccaccgctgccgcagcctggctggggagggggccagccccccaggccccctacccctctgaggtgtgggcgggaaagggatgggaggaggagggaagagggtgctgaaagcgactatgatgaagggaaggggagagattgggtctgggaaggccgactgggggagagggttgctggagaaaggagaggggcccc

SEQ ID NO: 84421 - DNA, 2367 bp, Homo sapiens
caactgataacagatattttcatccattttggtttggaaaaaaaagtctgtaaaaagaaaatatcacctttggaaagtgatatttgaattaattgtatgcgttctaaaaattagcatattgtgaacagatttatttagaatttgttggtaccagtatactgtggcatggtgcaggaaactggattaaagtgattactgtgcttcagtcattatatcttcaaagaaacagaagctaagggtattttgcttatgtatcttttagtggacatttttataatttttgaaacatattttatcattcctttccctaagatgaccttgcagcaggtctatgccagtgtgaacaaaattaaaaatctgggtcagcagctctacattgagtcaatgaccaaatcatcatttcaagccagtgacggggacacgcacagaaccgaatggtggtggtgagtcagcgaatggtggtggtgaatgtaagacctttacttccttccaccaaacactgaaaaacaatagtgtgtacactgagccctgtgaggatttgaggaacgatgagcacagcccatcctatcaacagatcaactgtatcgacagtgtcatcaggtatgagaccgcaagtttggataccatatacctgaagagctacaacattccagctttgaaaagaaagtgtatctcctgtacaaatacaacttcttcctcctcagaagaagacaaacagaaccacaaggcagatgatgtccaagccttacaagctggtttgcaaatcccagccatacctaaatcagaaatgccgacaaatggacggtccatagacacaggaggaggagctccacagatcctgtccacggcgatgctgagcttggggtcgggcataagccaatgcggttacagcagcaccattgtccatgtcccacccccagagacagccagggatgctaccctcttctgtgagccctggaccctgaacatgcagccagcccctttgacctcggaagaatttaaacacgtggggctcacagcggctgttctgtcagcgcacacccagaaggaagagcagaattatgttgataaattccgagaaaagatcctgtcatcaccctacagctcctatcttcagcaagaaagcaggagcaaagctaaatattcatattttccaggagattctacttccaagcagacgcggtcggccggctgcaggaaagggaagcacaagcggaagaagctgccggagccgccagacagcagcagctcgaacaccggctctggtccccgcaggggagcgcatcagaacgcacagccctgctgcccctccgcggcctcctctccgcacacctcgagcccgaccttcccacctgccgccatggtgcccagccaggccccttacctcgtcccagcttttcccctcccagccgcgacctcacccggaagagaatacgcagcccccggaactgcaccggaaggcctgcatgggccgcccttgtccgagggcttgcagccttacccagctttcccttttccttacttggatacttttatgaccgttttcctgcctgacccccctgtctgtcctctgttgtcgccatcatttttgccatgtccattcctgggggcgacagcctcttctgcgatatcaccctcaatgtcgtcagcaatgagtccaactctggacccacccccttcagtcaccagccaaaggagagaggaggaaaagtgggaggcacaaagcgaggggcacccgttcattacttcgagaagcagctcacccttgcagttaaacttacttcaggaagagatgcccagaccctctgaatctccagatcagatgagaaggaacacgtgcccacaaactgagtatcagtgtgttacaggcaacaatggcagtgagagcagtcctgctactaccggtgcactgtccacggggtcacctcccagggagaatccatcccatcctactgccagcgctctgtccacaggatcgcctcccatgaagaatccatcccatcctactgccagcgctctgtccacaggatcgcctcccatgaagaatccatcccatcctactgccagcacactgtccatgggattgcctcccagcaggactccatcccatcctactgccactgttctgtccacggggtcacctcccagcgaatccccatccagaactggttcagcagcatcaggaagcagcgacagcagtatataccttactagtagtgtttattcttctaaaatctcccaaaatgggcagcaatctcaggacgtacagaaaaaagaaacatttcctaatgtcgccgaagagcccatctggagaatgatacggcagacacctgagcgcattctcatgacataccaggtacctgagag

SEQ ID NO: 84422 - DNA, 413 bp, Homo sapiens
  misc_feature (1)...(413): n = a,t,c or g
tttcgtgtcagggggaagcggaaacggaagggtggctctgagcccaccgcaggacccaggagacaggatgggctggccagccacaggtgggccgtctgtcctgctggcaaagggtggcgcaggctctggctgcccagccggcgaggagccgcggggtgagggaactgagctccatctggggccgagcggagaagctaaagaggtgcaggagacccggaacctggggaggggccccgggggtagcactgtgctccctacccttcctcccccacccaaacgaacaggaaggaaaatgtcagctgggctttgtgctctgttcctcaggctgccgcagctcccatctgttggagccaacgcagcttctaactgggcgactggcagggttggagggggtgggctgggcacagcgctcn

SEQ ID NO: 84423 - DNA, 411 bp, Homo sapiens
  misc_feature (1)...(411): n = a,t,c or g
tttcgtccctggcgcccgagaggattcctggttgggggtgggcgtggagggccgggggctggagaggcactcggccccggagagtgcagcagacagggctggtcccgaggtggatgcggccccggaaaatgggcggctggggggtgtccagggagtagggtcgggtcggagtatatggaccaccgggcccggagggtccgagccgagagcggagcctgcaccctccacctcccgcccttcgggaaatatcaaaactgagccaggaggcaggtgcaccgggaaaatgtgtctgagtcctgcttggcagaagagaaactgagtcaccagcttatgagtcgcagggtcagcgggcctgaagggggctgggtctgtctgcggtgcggaggattgggtgggcctgtgtgagccgan

SEQ ID NO: 84424 - DNA, 2598 bp, Homo sapiens
gcctgggcagctcagacgtgcgggcaccacagcgctcagagctgggagccgagtcaccatcgcggatggtggcgtcccaggcctacaacctgacctctgccctcacgcccatcctcacgcgctcccgcgtgctcaacgaggagcccctgacgctggcgggctttcagcagggccccggccaacctcagtgacgtggtgcagctcatctttctggtggactccaatccctttccctttggctatatcagcaactacaccgtctccaccaaggtggcctcgatggcgttccagacacaggccggcgcccagatccccatcgagcggctggcctcagagcgcgccatcaccgtgaaggtgcccaacaactcggactgggctgcccggggccaccgcagctccgccaactccgttggtccagccccaggccttcgtcggtgctgtggtcaccctggacagcagcaaccctgcggccgtgctgcatctgcagctcaactatacgctgctggacggccgctacctgtctgaggaacccgagccctacctggcagtctacctgcactcggagccccggcccaatgagcacaactgctcggctagcaggaggatccgcccagagtccctccagggtgccgaccaccggccctacaccttcttcatttccccggggaccagagacccagtggggagttaccgtctgaacctctccagccacttccgctggtcggcgctggaggtgtccgtgggcttgtacacgtccctgtgccagtacttcagcgaggaggacgtggtgtggcggacagaggggctgctgcccctggaggagacctcgccccgccaggccgtctgcctcacccgccacctcaccgccttcggcaccagcctcttcgtgcccccaagccatatccgctttgtgtttcctgagccaacagcggatgtaaactacatcgtcatgctgacatgtgctgtgtgcctggtgacctacatggtcatggccgccatcctgcacaagctggaccagttggatgccagccggggccgcgccatccccttctgtgggcagcggggccgcttcaagtacgagatcctcgtcaagacaggctggggccggggctcaggtaccacggcccacgtgggcatcatgctgtatggggtggacagccggagcggccaccggcacctggacggcgacagagccttccaccgcaacagtctggacatcttccagatcgccaccccgcacagcctgggtagcatgtggaagatccgagtgtggcacgacaacaaagggctcagccctgcctggttcctgcagcacatcatcgtcagggacctgcagacggcacgcagcaccttcttcctggtcaatgactggctttcggtggagacggaggccaacgggggcctggtggagaaggaggtgctggccgcgagtaaggcctcgttccgtgttcccactccgtcacgcagccctgttgcgcttccggcgcctgctggtggctgagctgcagcgtggcttctttgacaagcacatctggctctccatatgggaccggccgcctcggagctgtttcactcgcatccagagggccacctgctgcgttctcctcatctgtctcttcctgggcgccaacgccgtgtggtacggggctgttggagactctgcctacagcacggggcgtgtgtccaggctgaacccgctgagcgtcgacacagtcgctgttggcctggtgtccagcgtggttgtctatcccgtctacctggccatcctctttctcttccggatgtcccggagcaaggtgggctggggctggggaccggggagtactgggaatggagcctgggcctcggcaccatgcccagagccgccactttccagtgctgcagccagagggaaaggcgtccaccaaaggctgctcgggaagggtcaacacacttgagcagccttagctagactgaccagggagaaagagagaagactcagaagccagaatcgtgaaagaacgagggcacttcgctaagcagacgccacggacaactgcacagcagcacgccagataactcagaagaagcaagcacgcggctgtgcacgcttccgaaatgcactccagaagaaaatctcagtacatctatagcaagtgaagaggccgagttagtcccttagaaacctcccagtggccgggccgggtgtggtggctcacgcctgtaatcccaacacttcaggaggccgaggtgggcggatctgagtccaggagtttgagaccagcctgggcaacatagcaagaccccatctatataaaacattaaaaagggccaggcacggtggctcacgcctgtaatcccaacactttgggaggccgaggcgggcagatcagttgaggtcaggagttcgagaccagcctggccaacacaatgaaaccccatctctactacaaatacaaaaacttagctgggcatggtggcgggcgcctgtagtcccagctactcgagaggctgaggcaggagaatggcatgaacccaggaggcggagcttgcagtgagccgagattgcgccactgcactccatcctgggcaacggagcaagactccgtctccaaaaaa

SEQ ID NO: 84425 - DNA, 660 bp, Homo sapiens
  misc_feature (1)...(660): n = a,t,c or g
tttcgtctttgatgaggaaaatattctcaatgaactcaatgatcctctgagagaggagatagtcaacttcaactgtcggaaactggtggctacaatgcctttatttgctaatgcggatcctaattttgtgactgccatgctgagcaagttgagatttgaggtgtttcaacctggagattatatcatacgagaaggagccgtgggtaaaaaaatgtatttcattcaacacggtgttgctggtgtcattacaaaatccagtaaagaaatgaagctgacagatggctcttactttggagagatttgcctgctgaccaaaggacgtcgtactgccagtgttcgagctgatacatattgtcgtctttactcactttccgtggacaatttcaacgaggtcctggaggaatatccaatgatgaggagagcctttgagacagttgccattgaccgactagatcgaataggaaagaaaaattcaattcttctgcaaaagttccagaaggatctgaacactggtgttttcaacaatcaggagaacgaaatcctcaagcagattgtgaaacatggacagggagatggtgcaggcaatcgctcccatcaattatccttcaaatgacaaccctggaatttccacattcgtcttacttacgganccccgaccct

SEQ ID NO: 84426 - DNA, 398 bp, Homo sapiens
  misc_feature (1)...(398): n = a,t,c or g
cgcccacgcgtccgctagtcccagcggatcatgctgcctttccacatcaacatttacccgctagctgttctgtttgaagatgctttactccttggcgctgtcaatagacactttgctctatgattctttatatactcggaacaaggctacagaacagctggaggtgctcttccctttctgcgtagcggagagaacctctcaaatctacctccaccacattctacgtcaacttctggtcagaaaccttggggagcaagccttgctcttggcccagacctgtgccacattaccttacttccctcatgggctggagctcatgctccatgaagtactggaagaagaagctacctcacgggagcccattcccgagcctctgattcccactgtggcaaacattn

SEQ ID NO: 84427 - DNA, 663 bp, Homo sapiens
ttttttttttttctgatccagcaactgcagggctttaatgtggactctggtggcaggaatgcaggggctgcgaggtaatgtggaggagcccgaggaaggggtggctgccacgtgctgcaatgggaggctctgggctcgggcttaaccttggaaggagccagcagagactcaagttctgatgatgtgacggtggtcagaccagctgtcagtggttgggctgatcatggaggctggtccaaaggcagtcaggctgagcagggtgcccacagggtgggccagtaacctcagcaggagacgaggagggggttggtgagcgccttgcttgcagaggctggtgccgagggctgtctccgcaacagctggcaggcagccaaggcttggtgcagggcatccaggatggctgcagggctgggccttccctcgtgggtggggtccctgaaagcgtccagcgtgctcagcaaaatcttccccagggctcttttcgatatgttcaggtcccggagcctctgcaggagctgcagcacgtccaccagcttctcctccagcagggacagccgcaccctctcggtctctaccatctgcagctccagcctcaggtgctcattctcttccaccttctgctgcaactctgcctcctcctcagaggtccccagggtcctcccc

SEQ ID NO: 84428 - DNA, 1141 bp, Homo sapiens
gcatgatgtcattgatttggagtttctaagtcagtatatgtgcgttggtaatcttgaggtaattttgacagatattgtcagaatggcccacacagagattgcaacccacgtgaggaattctcaggttccaacgatcccccagagtcagttctgggtttccgtggtgatgccagctctaaacggtaccccctcccccaggtggcccatcccctgcacccctgcaccccaaacgcagcccgacgagcacgggggaggcggagctgaaggaggagcggctgccaggccggaaggcgagctgcagcaccgcggggagtgggagtcgagggctgccccccctccagccccatggtcagcagcgcccacaaccccaacaaggcagagatcccagagcggcggaaggacagcacgagcacccccaacaacctccctcctagcatgatgacccgcaggaacacctacgtttgcacagaacgcccgggggctgagcgcccgtcactgttgccaaatgggaaagaaaacagctcaggcaccccacgggtgccccctgcctccccctccagtcacagcctggcacccccatcaggggagcggagccgcctggcacgcggatccaccatccgcagcaccttccatggtggccaggtccgggaccggcgggcagggggtgggggtggtgggggtgtgcagaatgggccccctgcctctcccacactggcccatgaggctgcacccctgcccgccgggcggccccgccccaccaccaacctcttcaccaagctgacctccaaactgacccgaagggtcgcagacgaacctgagagaatcgggggacctgaggtcacaaggaggccaaggcaggaggatcacttgagcccaggaggtcgaggctgcagtgagctgtgattgcactactgcattgcaagaccctgtctcaaaaaaactaagaagtggccgggcactgtggctctcgcctgtaatcccagcactttgggaggccaaggcaggtggatcacctgaggccgggagtttaagacctgcctgcccaacatgttgccatctaccttgggatcaaacggaaaccgccccccggctgctccgattcccctggagtgtgaagctgaccagctcgcgccctcctgag

SEQ ID NO: 84429 - DNA, 442 bp, Homo sapiens
gggtcatgagacgggcttgtagagtgagttccctgcatatgagggctcaggtggggcagagtgggcccgtcctgcaccccatggtcctggggccccacccccacgctggctcacgggccctggccatgttgcctgctgctggtcagcgtacagcttcccagggccagccacctcggcttcacacctgcccagagctggcttctgtctgcctggacactcctcccatggctctggggctagggacacccagggctgccttggacacctggggctctcgtccagccagagcctctggcagtgcctggggtcggggtcggggccggggccgagtcaggcctgcctgtctcgtggagctcagcaggttgccctcctgttgcatgagcctgggcagccacacacagctggggggcccctcacgcccctctttgtcgctcagcaccac

SEQ ID NO: 84430 - DNA, 376 bp, Homo sapiens
cttacctcctggaagtggtagtggtggaagtgggttccctttaatgtgtcccagcccaccaggagacttaatagaaagggactgtggacacaacaagaaatagaggaggatttggggttttggtgactgtgaagctgggaagacacttcttgactttgggagtgggccccaggggcagctttctactgtgagcagggatgtaagtcatatgcggcactgcagcagcttttggcagccgccctaattagtcgtggactggaatgggtatccagcggccatgataccaaagccttacaggacttcctcctcagtgtgcatatgtgcccaaactctgaagaggctaaatcggagggatgaggccactgctctctggtgg

SEQ ID NO: 84431 - DNA, 382 bp, Homo sapiens
cttgaagatacaggccatactgccactggccaaaattgagcgactggtcttttcactcatgacgatagagaagttcgatgcacaaaagctcctaattctgaggcatctgactttatttcttctttgcctttcatagaaagacaaaaaagcattgtcgaccctattctcatgaagcttttctcctatgtagtcttctaagagttttatagttttaacacttactttagatctttggtccactttgaagataatttgtgtatatgctataagctgagggcccaactgaattcttttgcttgtggatatctggcttttccaacataattttgttgaaaagacgatcctgttggaaagggtgttggcgtcccaaaatcagttgacg

SEQ ID NO: 84432 - DNA, 462 bp, Homo sapiens
cacatctcccacaagcaccatgcgggcgacttcattggccttctttgtgaatcaaggcaaagtccacattcagcctgtctgcaatggaggtcactctcttagctccaccagcatcagatgaaacactagtgcagttcttctgctcagagatattctcccttatccacttcaggacacctggctctgcatacagatagtccactgggttatcaaaaaagccctgaatttgagaagcatgtaggtccatggcgataatatgatctgcgcctgccacagatagcatgtttgcaacaagcttggctgagattgccacctgactctttattatcctgctgggcataaaggaagcatgggatgactgcagctagctggctcgctgaagcagtcttgcaggtattagtcatgatcaaaggcaccattaaattgtcattgattttgccacaaccactctgaatgatggag

SEQ ID NO: 84433 - DNA, 428 bp, Homo sapiens
attgacgtgcccgaccggaatggaagtcccgggccgacccacgcgaccgggccggagaggtcgaacgcccttagatcttttagcccacaggagccctctccccgttcgcccccggtgagtctgatcagcgccctcgacagggcccatgtcgactccaacccggctatgaccagcctggactattccagggtaagaagctggcgggggggatatcatgtggacaaaccgacagatgggcaggacccctccccacatccgtcattaactctcagattcaacgggggtaaagaaggcaagcaaggctgtatatgcctcgcagctctggccagggccttaagattcagatcttcacacaatccatgtagctgggggcatatacatgatggcaggatggaggaaggaggagagggacacgccacaggggttgg

SEQ ID NO: 84434 - DNA, 390 bp, Homo sapiens
tttcgtcttaacagcagggccaccaggcagagcgggacagccaggaggaagggcagcttggcagagcctcaggtagagtatcccggggaggctggggctgtagtgggccagcagtcgggccagagtccagctcagcaactccgggttacaggcagcccaggcgggcctagccaccggcagctgcactcagaggccactgtgtcctggctgagctcatctgcctgcctgctgggggagaaagcggaaggaggagaggcagatctggggagtggcagcgaggtcccgggcacccccctggccagcaggcacccttccgttgtccgagctgggttgccaccgcctccttttcctgggattcccggacaccctccaagggaaccaagggaacag

SEQ ID NO: 84435 - DNA, 408 bp, Homo sapiens
  misc_feature (1)...(408): n = a,t,c or g
tttcgtagagcttcctctgtatccttaaggataaatatatctttctgaactcggagatactgatcccgtttctggtgtgttgcaattgctttctgaataatgtggtctaaatgaagactataaggcttaggtcctcgtttcttcatttcatggaagcgttttaaacagttcaaggctgcactggctcgcagtctcttttccttggggatatcaaaggatgcagccatattcattagggttggcaagcagtgtaaatgatggctatgtgaatgaggaagaattgtgtttgccatatgtaaaagctctcctaaaaggatggtagctctaactgagatatgatcatcactgtttgttatcacttcaactaggaccctctanaagtccattacgaataaatgcagagagtan

SEQ ID NO: 84436 - DNA, 407 bp, Homo sapiens
tttcgtgatgctgggtacgctgcgcgccatggagggcgaggacgtggaagacgaccagctgctgcagaagctcagggccagtcgccgccgcttccagaggcgcatgcagcggctgatagagaaggtgcggcccccgccggtccgccgggaggggaggcctgcgtgtcggagtgaggctgggaggggacgtaggacgggaagggaaggggctctgaggactcggagcgggggttggggaagcgggactggggcttgaatgcggagagaaggtggaggcggagctgggggctccggagagggaaaaaggaggcagcgccgaaggcttcggtgcggggacggggaggaaagactggggcctccggaacggggagtggggaagcaggcctggggcttcggtgcagagagga

SEQ ID NO: 84437 - DNA, 405 bp, Homo sapiens
cgcattgacgacccttctgcagaggggctttctgttaggttcctgtggtgattgaggatctggggggggtgttcgaggatgcggtagcgtatttcacccgggaggagtggggcatgctagacaagcggcagaaggagctgtacagagacgcgatgcggatgaactacgagctgttggcatccttgggtaaagacgcaccgagcctcttattcaccaccctcctttgacttgggaagcccacaaggggagctgtggcttgtggttatcttcccattcctgcccccttcctgtgtgtaggcagagaccgatcctgtcttttgcacctcataactcccctgcttggggtaactgtgctttatcaccttctcatccacccacctggtcatccattcgtcccccaccaat

SEQ ID NO: 84438 - DNA, 633 bp, Homo sapiens
gcttggaggaggttgcagaattcccggggcgacccacgcgtgcggtcattttaaggtgttgagagagaaaagaattcctccctggatggaagtggtccttatacccatgacaggagaaccgcggctgaacccaggattgttcctttgtaccacaccttgtagactggcacggtctgtgcagaacttagcattgggcaaagaagagctaattggaactatggaacagatcttcatgaatgtcgctatctttgaggatgaagtttttgctggagttaccacacaccaggaactctttccacacagcctgctgagtgtgattgccaacttcatccctttctctgatcacaaccagagtccacggaacatgtaccaatgccagatgggtaagcaaactatgggctttccacttctcacttatcaagaccgatcggataacaaactgtatcgtcttcagactcctcagagtcccttggtgagaccctccatgtatgattattatgacatggataactatccaattgggaccaatgccatcgttgctgtgatttcttacactggctatgatatggaagatgccatgattgtgaataagggcctcttgggaacgaggctttgcccatggaagtgtctaca

SEQ ID NO: 84439 - DNA, 416 bp, Homo sapiens
gagaaaaaccctatgaatgcagtgactgtgggaaatcctttattaaaaaatcacaactccatgtgcatcagcgaattcacacaggagagaatccctttatatgttcagaatgtgggaaggtcttcactcacaagacaaatctcattatacaccagaaaattcatacaggagaaagaccctatatatgtactgtgtgtggtaaggcctttactgacaggtcaaatctcattaagcaccaaaaaattcatactggagagaaaccttataaatgcagcgactgtggaaaatcattcacctggaagtctcggctcaggatacatcagaagtgtcatactggagagagacatatgaatgcagtgaatgtgggaaagcattcattcagaagtcaacattaagtatgcaccagagaattcatg

SEQ ID NO: 84440 - DNA, 385 bp, Homo sapiens
tgaaattttcccagtggggcctgaccaaacccaagctatcaaacgcctcgccaggatctccttggtgaagaagctaatgaagaagtggtctgtgactcaaaacctgacatttcgagaacagctggaagctgggatccgctactttgacctgcgtgtgtcttccaaaccaggggatgccgaccaggagatctacttcatccatgggctttttggcatcaaggtctgggatgggctgatggaaattgactcgtttcttacacagcacccccaggagattatcttcctggatttcaaccacttctatgccatggatgagacccatcacaaatgcctggttctgcggatccaggaggcctttggaaacaagctgtgcccagcctgcagg

SEQ ID NO: 84441 - DNA, 418 bp, Homo sapiens
caagttggaatttgctatctacccagtcccccaagtgtccatgacagttgtagaaccctataactctatcttgaccacccacaccaccctggagcactcagactgccttcatggtagacgaggccatctatgatctctgctgccacaacctgcgccctacctataccaacctgaactggctcatcagccagattgtgtcctccatcactgcttccttgtgttttgatggtgccctcaacgtggacctcacagagttccagaccaatctggtgccctaccctcgcatccactttcccctggtgacctactcacccattatctcagctaagaaggcctaccatgagcagctctcagtggcagagatctccagtgtctactttgagccctccaatcagatggccaagtgtgaccctcgccc

SEQ ID NO: 84442 - DNA, 400 bp, Homo sapiens
gtgttcagcaaggataagatgggcaaaggagtggatgggacatataaaaaagctcttcaggaagctgcagcaaggtttgaggaattaaaggcccaaaaagagctaagacagctgcaggaagaccgaaagaatgacaagaagccaccaccttataaacatataaaggtaaaccgtcctattggcagggtacagatcttcactgcagacttatctgaaataccccgttgcaactgtaaagctactgatgagaacccctgtgggatagactctgaatgcatcaaccgcatgctgctctatgagtgccaccccacagtgtgtcctgccggagggcgctgtcaaaaccagtgcttttccaagcgccaatatccagaggttaaattttccgcacattacagcgggg

SEQ ID NO: 84443 - DNA, 677 bp, Homo sapiens
ggcatccccctgcccatccagaccttcctgtggcggcaaaccagtgcatttttgaggcccaaactggggaagcaatatgaagcttcttgtgtgtcctttgagcgagtgttggtagaaaacaagctgcatggcctctctccagctctctctgaagccatccagagcatttccagatgggaactggtgcaagctgctttgcctcatgtcctccactgcactgcaaccctgctttcaaaccgaaacaagctaggccaccaggataaattgggtgttgctgagacaaagctccttcacactctacactggatgcttctggaggccccccagggactgcaacaatgagcggtttgggggtacagaccgaggctccagctggggtggaagcagcagtgctttcatccaccaggttgaaaaccagggttctccagggcagccttgccaaagcagctctaatgacgaagaagagaacaaccgaagaaagatcttccagaactccatggctactgtggagctcttcgtgtttctgtttgctcccctggtacacaggatcaaggaatctgacctcaccttccgtctggccagtgggcttgttatatggcagcccatgtgggaacacagacagcccggagtctctggctttaccgcactggtgaagcccatcaggaacatcattacag

SEQ ID NO: 84444 - DNA, 404 bp, Homo sapiens
aatacagtgcgagggtgtggccgtgactcagcaactgaaagaacacaggagctacccagctccaggggtgtggtgaaggcagcctgtggggagctggagaggagcaggtgcggaagtggctccgctcctgtgggtgtcggggcaacgtgggacgctcggagcaggtgcggaagtggctccgctcctgtgggtgtcggggcaacgtgggacgcttggagcaggtgcggaagtggctctgctcctgtgggtgtcggggcaacgtgggacgctcggagcaggtgcggaagtggctctgctcctgtgggtgtcggggcaacgtgggacgctcggagcaggtgcggaagtggctctgctcctgtgggtgtcggggcaacgtgggacgctcggagcaagtgcggaagtgg

SEQ ID NO: 84445 - DNA, 425 bp, Homo sapiens
ttcgccattcgtgcctcagccctgcctccactctggtgccctccggagtcttcattcccagcccactcggcgcccgcacttcagccctgcctgtgctctggggcctgcaggcatcttcattcccagccgactctaatgtccgaagcatgttttgcaggcacaactcctacattatcaggcggcaggggcacaggagcagatcacggtgccacacggtgggtcccctcacagctgagcacagtccaacgtgtcctcacctccagcttccaacccccaacagcaaagcacgcccagaggcctcaggcttgggacacatgtaccaaacaccccctctcccacaatgtgctcaaggcctgcagagacccccgaggcccaaggcccacctcctccctcggtgctcccagcactggaggacacggagggct

SEQ ID NO: 84446 - DNA, 1709 bp, Homo sapiens
ggacacgttttgaaagcatggcttgatattacaagaggaaaagagccttacactaaaaaagcactgaagtattttgaagagggactccaagatgggaatgatacttttgctctgctgggtaaggcacaatgccttgagatgcgccagaattattcaggtgccctggagactgtgaaccagataatcgtgaattttccgagcttccttcctgcttttgttaagaaaatgaaattacaactagccttgcaggattgggaccagacagttgagacagcacaaaggttgctgctccaagatagccaaaatgtggaagcactgagaatgcaggcactctactatgtgtgtagagagggggatatagagaaggcttccaccaagctggaaaacttgggaaatacattggatgccatggaaccacagaatgctcaacttttctataacattacactcgccttcagcagaacttgtggacgtagtcaacttattcttcaaaaaattcaaacgttacttgagagagcttttagtttaaaccctcagcaatcagaatttgctacagaacttggataccaaatgattttacaaggaagagttaaagaggcactgaagtggtataagaccgccatgacacttgatgagactagtgtgtctgccctagttggatttatccaatgtcagttgatagaagggcaattacaggatgcagatcagcagctagaatttttaaatgaaatccagcaatccattggaaaatctgcggaattaatctatttacatgcagttcttgccatgaagaaaaataaacgacaagaagaagttattaatttgttaaatgatgtcctggacactcacttttcacaattagaaggtttgcctcttggcatacagtattttgaaaagctaaatcctgatttcttgttagaaattgttatggagtatctgagcttctgtccaatgcagcctgcaagtcctgggcaacctctttgtccacttctcaggcgttgcatctcagtcctggagactgtagtaagaactgttccaggtcttctgcaaacagtcttcctaatagcaaaagtgaaatatttgtcaggtgatattgaagcagctttcaataaccttcagcactgcttagaacacaatccctcttatgctgatgctcatctgctgctagctcaggtttacttgtctcaagaaaaagtcaaattgtgttctcagtctcttgaactttgtctgagctatgattttaaggtgagagactatcctttatatcatttgataaaagctcagtcacaaaagaaaatgggagaaatagcagacgcaattaaaacactgcatatggcaatgagtttaccaggaatgaaaagaattggagcttccacaaaatcaaaagacagaaaaactgaagttgatacaagccatcgtttatcgatctttcttgaattgatagacgttcaccgcttaaatggagagcagcatgaggcaaccaaagttttacaagatgccatccatgaattttctggaacatctgaagaagtgcgggttaccattgctaatgcagaccttgctctagcccaaggagatattgaacgggctttaagcatccttcagaatgttacagccgaacagccttattttatagaggccagagaaaaaatggcagatatttatctgaagcacagaaaagataaaatgttatatatcacttgttttag

SEQ ID NO: 84447 - DNA, 1094 bp, Homo sapiens
atgagattagcgcccacgtcccagcctggaccctgcggagaggcctctggggtctctgggccgtgcctcggggagaaagagccagaagctcccgtcccgctgaccgcgagccttcctcagcaccgtcccgtttgcccagcgcctcctccaacaggaggccctcaggagccctccctggagtggggacaaaaaggcggggactgggccgagaagggtccggcctttccgaagcccgccaccactgcgtatctccacacagagcctgaaagtggtaaggtggtccaggaaggcttcctccgagagccaggccccccaggtctgagccaccagctcatgtccggcatgcctggggctcccctcctgcctgagggccccagagaggccacacgccaaccttcggggacaggacctgaggacacagagggcggccgccacgcccctgagctgctcaagcaccagcttctaggagacctgcaccaggaggggccgccgctgaagggggcagggggcaaagagaggccggggagcaaggaggaggtggatgaagaccgcgacgtcgatgagtcctccccccaagactcccctccctccaaggcctccccagcccaagatgggcggcctccccagacagccgccagagaagccaccagcatcccaggcttcccagcggagggtgccatccccctccctgtggatttcgcgctccaaagtttccacagagatcccagcctcagagcccgacgggcccagtgcagggcgggcccaaggggcaggatgcccccctggagttcacgtttcacgtggaaatcacacccaacgtgcagaaggagcacgcgcactccgaggagcatttgggaagggctgcatttccaggggcccctggagaggggccagaggcccggggcccctctttgggagaggacacaaaagaggctgaccttccagagccctctgaaaagcagcctgctgctgctccgcgggggaagcccgtcagccgggtccctcaactcaaagagccaccttcctctcctaaacacgtctcttctgtcacttcccgaactggcagttctggagcaaaggagatgaaactcaag

SEQ ID NO: 84448 - DNA, 412 bp, Homo sapiens
aatacagctcgccgtcttttccaaactccattaaaactgttgcccagactgccatgaaaacagcagagaagacagtggctccattgtcaaaaaggtgggttaccttggcatatacacagctgtctgacagcctcatgaatggacagtatttatcacacacaggacacatgatgatatctgtagcttggcagacttctttactgacttggctgtgatccacagtggtgacgccatacaaaaagacaaacaatccaatgaaggcagctgggaaaagcatgccggtgtaccaacccaaccaagcaaaatataacccaatcttctctccaaagtaccgccttacaagatccaaaggttggtatttataccacacgccccaggaggcccagcactcatagagtagatgtcggtggtt

SEQ ID NO: 84449 - DNA, 661 bp, Homo sapiens
cagccggctgcccatctcaatccaggcatctacatgctggcgggggatgtgacggatgaggatgggtgagaacttgtagaagagctgggggtcacggtggcgggcgagcacggccagggcctcctcgtaggcctcgtgctgacagtggtaagccaccacccgctcatagtcctgcatgatcactgcaaagtacaccatgtgttctgtgtccccatgactggcgagcagctcatggatagaggcccggctggcaaagagccactctttgtggcgggggctgctgaggaaggttcgaaagcattccttggtttctcggtagagagtcagggcctctgggtcgccctgcagagccccaagccggctcaggtagagctctgtcagccaggtggtcagcagtgtggcctgggtacgttcggctggcttcaaactggccagttttcgctgcaggaactcagccagagcctcctcctgtcgggcctccaggaacttgagggcaatctcctcaaagtagctctgggtcatgggcatatgcagcgtgcgctctccaggtagcgacgctggcgaaagcagaaatcggcctcccgggccaggaccgtgttcaggcagtcgggccgctctcgacaatactctttggccagatcgaagcgggtcatgtccagat

SEQ ID NO: 84450 - DNA, 429 bp, Homo sapiens
ccgctacctggtgcccgcaggtgcctgcaggagtcctggggccagctggcctcgatgtacgtcagcacgcgggaacggtacaagtggctgcgcttcagcgaggactgtctgtacctgaacgtgtacgcgccggcgcgcgcgcccggggatccccagctgccagtgatggtctggttcccgggaggcgccttcatcgtgggcgctgcttcttcgtacgagggctctgacttggccgcccgcgagaaagtggtgctggtgtttctgcagcacaggctcggcatcttcggcttcctgagcacggacgacagccacgcgcgcgggaactgggggctgctggaccagatgggcggctctgcgctgggtgcaggagaacatcgcagccttcgggggagacccagggaaattttgaccctgttcggccagtcggcg

SEQ ID NO: 84451 - DNA, 1389 bp, Homo sapiens; identical to SEQ ID NO: 68347

SEQ ID NO: 84452 - DNA, 1489 bp, Homo sapiens
actgtccagatttcctacatagatgatcacatcacctgtgaacaaagacagttgttgtttcgtttttccttcctaatctgaatagcttttatttccttttcttgttattgcattagaagtttgggaagttgatgaacagatcaagaagcaacaggaaacacttgtgaggaaagtcacatccatctccaagaaaattctgataaaggaaaaagtcattgaatgtaaaaaagttgcgaaaatatttcctctgagttcagacattgttacttcaagacaaagcttctatgactgtgactcacttgataagggtttggaacataatttagacttacttagatatgagaaaggctgtgtaagagagaaacagagtaatgagtttgggaaaccattttaccattgtgcatcctatgttgtaaccccctttaagtgtaatcagtgtgggcaagacttcagtcataaatttgacctcattagacatgagcgaattcatgctggagagaaaccttacgaatgtaaagaatgtggaaaagccttcagtaggaaggaaaatcttattacacatcagaaaattcatactggggaaaaaccgtataagtgtaatgaatgtggaaaagctttcattcagatgtcaaaccttattagacaccacagaattcatactggggagaaaccttatgcatgtaaggattgttggaaagccttcagtcagaaatcaaatctcattgaacatgagcgaattcacactggagagaaaccctatgaatgtaaggaatgtgggaaatccttcagccagaagcaaaatcttattgagcatgagaaaattcatactggggagaaaccttatgcatgtaatgaatgtggtagagctttttctcgaatgtcatctgttacgctacatatgagaagtcacacaggggagaaaccctataaatgtaataaatgtggaaaagctttctctcaatgctcagtatttattatacatatgagaagtcacactggtgagaaaccctatgtatgtagtgaatgtgggaaagccttctctcagagttcatccctaaccgtacatacgcgaaatcatacagctgagaaaccctatgaatgtaaggaatgtggaaaagccttcagcaggaaagaaaatctcattacacatcagaaaattcacactggagagaaaccttatgaatgcagtgaatgtgggaaagcttttattcagatgtcaaacctcattcgacaccagagaattcatacgggtgagaaaccctatgcatgtacagtatgtggaaaagcctttagtcagaaatcaaacctcactgaacatgagaaaattcatactggagagaaaccttatcattgtaatcaatgtgggaaagctttcagtcagagacaaaatcttcttgagcatgacaaaattcatactggagagaaaccattcccctgtaatgaatgtggtaaagccttctctcgaatctcatccctcattctcatgtga

SEQ ID NO: 84453 - DNA, 510 bp, Homo sapiens
aatacagctgctggtatccgaagtggtcagagggctgaaggtccccaccggctggtccgagggcaaggactgggccttggccaccaggcttggggggttgtctttctgcggcggtcggaaagaggagttgggcttgctctgtggtggagggcctggcttgctgctgcttggaggggctgtggcagcagtggacaggaacatgcttcggaatagcctgcgcttcaggctgctctcccgggtcttagggctagggctgccttccccacctggcctgcctgtggctgagcccaccaggcaggactgtggccgggcctcctcagagccatgcttggcagccttcattccatgcctattggtgcccgtggggggcgaggctcctggtggggagctctgcaggcaggcacccagctgcagacagcgctgcgaggcaccctgaaactcggcggggcccagggactgtgcctttgcagccagcccattggcaggacccgtgggctctgtggctcgggc

SEQ ID NO: 84454 - DNA, 404 bp, Homo sapiens
  misc_feature (1)...(404): n = a,t,c or g
aatacatccagggtcagggtcaggtggcaggtcttgaagctctcctcagtgagtgagaagagcggggcgccctcgacttcaggagggccccggcactcagccagctgagaatctgctgtacagcgctggatccggtttcgcagccacttcagcaggggttccatggtgcagccacacacccagggattgccaccgatctgcagggtcaccagccccggtaggccctcaagagcctccaggctgaggaaggccaggcccccataactgaggtccaggtctcggagctgcatgaggccctgaaaggcctggggatgcaccctccgcagccaggggttgtggctcaggtcgatgtggactagcccatgggcctcctggaacatgtcggctggcacacggctganatt

SEQ ID NO: 84455 - DNA, 392 bp, Homo sapiens
aattcccgcggcgaccgcacgcgtccggatggacttcctgaaaactcgttgttttacacactctctgaccagattaagaaaattcagaaagtggttaatacatacactccaggaaagaagatttggcttgaaggtgtggtgaccacctcagctggaggcacaaacaatctatccgattcctatgctgcaggattcttatggttgaacactttaggaatgctggccaatcagggcattgatgtcgtgatacggcactcattttttgaccatggatacaatcacctcgtggaccagaattttaacccattaccagactactggctctctctcctctacaagcgcctgatcggccccaaagtcttggctgtgcatgtggctgggctccagcggag

SEQ ID NO: 84456 - DNA, 416 bp, Homo sapiens
tccagagttcaaacatcattttttcccagggagtgcatcaagcgttctttccaaaacgaaagtgtttcgtctttgaccggccaacaaatgacaaagaccttctagccaatattgagaaggtgtcagaaaagcaactggatcccaaattccaggaacaaacaaacattttctgttcttacatcttcactcatgcaagaaccaagaccctcagggagggaatcacagtcactgggaatcgtctgggaactctggcagtgacttatgtagaggccatcaacagtggagcagtgccttgtctggagaatgcagtgataactctggcccagcgtgagaactcagcggccgtgcagagggcagctgactactacagccagcagatggcccagcgagtgaagctccccacaaacacgcctcag

SEQ ID NO: 84457 - DNA, 391 bp, Homo sapiens
tgcagggagaggagccacccctcggtgccttactatgacttccagaagagctggcgtcatgaatgtcatctaccccaaatcacccaccgtttcatcaccaaggaggcatcttctcccactggaccaagaggaagcctgtcctggaggggcaagtagcctccttcaccacactccaccaaaaacatttaatctgtggatcctgcctctgccacatgccaggtggaactaagattcctttctgccccactctgaggacacttggagccgtctcagtcctcaagacttgaaggggagcggagggggtgccctgtctccacctccactctctgagtaatccacagcattttggcattcaccccacctccaggtctgtcaagtggcctttgcccct

SEQ ID NO: 84458 - DNA, 549 bp, Homo sapiens
tcctcctggacggtgaccgaaagaaagaccctggagtgaaagttcccctggtattacaaaaattttttgagaaagttgaggaatcaggtctggaatctgaaggaatttttcgactttcaggatgtactgctaaagtcaagcaataccgtgaagaacttgatgccaagtttaatgctgataaatttaaatgggacaaaatgtgccatagagaagctgcagtaatgttgaaagcgtttttcagagaactacccacctctctcttccctgtggaatatatacctgccttcatcagtctaatggaaagagggcctcacgtcaaagtacagtttcaagccttacacctcatggtcatggcgctgcctgatgccaacagagatgcagctcaggccctcatgacattcttcaataaagtgattgccaatgaatcaaaaaaacccgaatgagtctgtggaacatttctacagtgatggcaccgaaccttttcttcagtagaagcaaacactctgattatgaagaattactggtagcaaacaccgcggcccacatcat

SEQ ID NO: 84459 - DNA, 391 bp, Homo sapiens
  misc_feature (1)...(391): n = a,t,c or g
taataccatcctcagctgttttaaagataattccatttttgcctgggaatgtgacacacttttttgcaaatatcaattgccagctccacctgaaagctctagtatattatacaaagtgtttgctgtaaccagagatggccgaatcctggctgctggaggcaagtcaaatcatcttcatttgtggtgcttggaagctaggcagctctttagaattatccagatgcccactaaagttcgagccattcgccatctggaatttcttcctgatagttttgatgctggttctaatcaggttcttggagtactaagtcaagatggtattatgagatttatcaatatgcagacttgtaaacttctctttgagattgggagcctcgatgaaggaattacn

SEQ ID NO: 84460 - DNA, 592 bp, Homo sapiens
cagacttatcagtacctttttagcatgtccattttcttttactccttctctattttaggccatgctgtcatgagaaagtggcttcttctcaatgacccggaagataccagttcaggttctaaaggttatatgaaagtcagcatgtttgtcctgggaaccggagatgagcctcctcctgagagacgagatcgtgataatgacagtgatgatgtggagagtaatttgttactccctgctggcattgccctccggtgggtgaccttcttgctgaaaatctaccgagctgaggacatcccccagatggatgatgccttctcacagacagtaaaggaaatatttggaggcaatgcagataagaaaaatctcgtggatccttttgtagaagtttcctttgctggaaaaaggtttgtacaaacataattgagaaaaatgcaaacccagagtggaatcaggtcgtcaatcttcaagatcaagtttccttcagtgtgtgaaaaaataaaactaacaatatatgactggtgagttgaaaatacgtatgtgtctaattcaacataaaataaacattggatattgtgaaacattaaaaaaaaaa

SEQ ID NO: 84461 - DNA, 550 bp, Homo sapiens
agggcccagggacaaccctggacgaggaccctaggttcgaaatcgtggagcactttggcattgcctggttcacatttgagctggtggccaggtttgctgtggcccctgacttcctcaagttcttcaagaatgccctaaaccttattgacctcatgtccatcgtccccttttacatcactctggtggtgaacctggtggtggagagcacacctactttagccaacttgggcagggtggcccaggtcctgaggctgatgcggatcttccgcatcttaaagctggccaggcactccactggcctccgctccctgggggccactttgaaatacagctacaaagaagtagggctgctcttgctctacctctccgtggggatttccatcttctccgtggtggcctacaccattgaaaaggaggagaacggagggcctggccaccatccctgcctgctggtggtgggctaccgtcagtatgaccacagtggggtacggggatgtggtcccagggaccacggcaggaaagctgactgcctctgcctgcatcttggcag

SEQ ID NO: 84462 - DNA, 662 bp, Homo sapiens
caagaaaacaccatgctgcggagagagatcgggaagctgacagaggagctgaagcacctgacagaggcactgaaggagcacgagaagatgtgcccgctgctgctctgccctatgaactttgtgccagtgcctccccggccggaccctgtggccggctgcttgccccgatgaagccggggacactcctctgcccagcaaggagccttggtcattttcatacctgggaggaaggcttttccttcacaattgtatacagggggcacctgtggccaggcctcctcctgggagctccaggaccagccagctgtgttccctgcagactgggctcagcccgacatccaacaggcgccaaactcacagagcccttgtgcagatccagcatggaggccaccctcaggagtgacttctcatccaccctggcagctagtaggttctgctgttatgcagagccatttcctctagaatttggataataaagatgcttattgtctcaaaaaaaaaaaaaagggggggcccttttaagggaaccaattttaagtcccggggggggggaaggtaaaattttttttatggggccccaaaattaaattccggggccggggttttaaaacgggggggggggaaaaacccggggggtccccaatttaaagcgtctttggaga

SEQ ID NO: 84463 - DNA, 458 bp, Homo sapiens
  misc_feature (1)...(458): n = a,t,c or g
atcgtccttctgaccnngcangttccggnnnnttcttcccgaggcgacccacgcgtgcggtgcatccttacgccaagccctgccgtgtggtccccacaacgtcccacgaaggccatgggcatgggagggggctctggttgggtggaaagacttccctgatctgccacctgtggactgggggacatcaagggggctgtggcccctccagcccagagggccccacctgacgataggagggtctcacctgaggataggagggacccacctgaggataggaggggctcacctgaggatagcaggcgctctccttatgataggagggacccacctgaggataggaggggctcacctgaggataagaggggctcacctgaggataggaggggctcacctgaggataggagggacccacctgatgataggaggggctcacctgctggggctgcttacctggcctt

SEQ ID NO: 84464 - DNA, 424 bp, Homo sapiens
tttcgtggaggctggggcttcccagagcccatgctgtggcccagggcagacaggcctggccactgcatgggcggatggaggccactctggagaggatggaggagaggctggaccccagggagagaaaggcaggggattggtctcccccagtaccagattttcggtgcttggctgaggttgccaggggagctgaggcccaggggctttctgcagaggtgggaaggagcgtgttggactgccgggctcatctgaggcttcagaagagggattcagagtgaaccacagagctcagaggacagcaggcttccgtcccaccgtgccgaggtgcaggcacagagggaggcgggcagcaggttcatcccgtggacccggtctggcaggatgaaagggaggccagggatggggcctgctgcagagtgggcag

SEQ ID NO: 84465 - DNA, 415 bp, Homo sapiens
tttcgtgaaactcaaagggcagctggaggagatgacatttagattggccacactacacaatctttcatctgaagatgatgtcttggaaaacgggacagacatgcatgtaatggacctacaaagtaaatgccaattcttgtgtagaagaaaatgctttcacatgtgctgttttagtatacttgtgctggcagagaaaactgtcacggcaaagaatgccctcattccctcacatccccacaaaagcccttaaaaataaaagcacaaggaggggtaggtagacagaacaatggtgtttctctctgagcctatgaaatagaacaggtacccaaaaacgtgcaccaagataccaccacatgttgtgccgatggaaaccacacttactttgctggaaacagcaatctttcgatctgttgat

SEQ ID NO: 84466 - DNA, 1719 bp, Homo sapiens
gcggccgcggcacccgtagggacgggggtgctgccaccaccggaggaatcacaaaggccaccctgtcaataacatcctgcagagactctccacaccgacaaagcgtcaacatcagctcacttggactttctgaggatgaagtgtaactgtgcgctggcccggcctccttcccacgacggccatccagggacccacgccactgtacccttccatggctaggcagggcacaaatccttagcaagtctctgccatagactggagcttgagaacagcgccgctcgttgactaaataaatctgatccaggcgctctttcaagagtctggtcttttcctcctgggtcggccctccaatgggagaagctggtttggaggccgttccgggttctcctacagccaaggcattcaccgccacgcggcccggaacgccaacttgtggggtcaagggtgcagggctgggaccgccggccgggggcttgcttcccagggcgccgtgcacagcgcccgcctgagacacggtctgcatcaccacagggccaggggctcgaatgtagggctgcccgggggcggacacgatctggaggacgctgccttgcagctgcagcggctggcccgctgtgagctgccgggagctgcctgtgtgacagggtgaacttgctgccctggaactgcagtgtcaccggcgtctctggctgagccacgcggctctgtggtcctgtgatggatgccagctgagctattttcactacctctccactgggcaagcgggccttcatttgcttcctcctcttcaattgtttcctcttcatcgtccacttcgtcatcagtcaaagatatgctagcttttctttttcttccagacattcctgaatccagagaactttcctgtaatgcgtcaaatcctttaggtctcaattctttccctctcctggaaactttctgtaaatttaaggccttcttccttttttcttctaattctactcgtagttttatttccacaacctgttcaatattcgaccaaaagcactctatctcccgggccgtggaggcggctatccgcctcagtctgctctgctcttccttcttccccctttcttcacggagctgcttctcctcgtgatggcgcaccacagttctaacgagcttcttcgcagcagccaccttccacctcctctcctgggcaaagtctgtggccatccactgcatctcctccagcagatagtcccagtgggacttggggcgtggggcctcctgcagctttggcagacgcctctgggaccacagacctgctttcctcagctccgcaatgcgctgatgcacctggttctccagagttatttgttctgtcagcgtatcctgagaactgtcttgggacgaggtggcattctgagcaggactctgtggtttggtgggggcagatgccaccacccctggggtccgggaagtgactggagatagtgccttattggtggctgaggaaggtctatttactggagaggatcgagcaggggagggtcctgggccggagccactcacaggcgcgagggacgaggtagaagaggtgggcagaggccgtgggcagggcggggcagggtccacagggagccttgtcgatgctaccatctcgtcattgataacctcagatttttcttcctcctcttcctcctcctcctccttttcttcaatgtccaaatcattctgcctaagatatgcttgtaatgg

SEQ ID NO: 84467 - DNA, 426 bp, Homo sapiens
tttcgtggaggaactgagtgtggaactgtgtggaactgtgaggaactgagtgtggaactatgaggaactgagtgaggaagtgagtgaggaactgagtgtggaactgtgaggaactgagtgtggaactgagtgagggactgagtgtggaactgagtgtggaactgtgtggaactgggtgggaacatggaggtgctgttggggacccgtgaggagccgtgtggagcgctgtgtgtaggaacggggtgcacacgggcgaatggcctgaggaagtgtgtggaaagtgtgtgtgcacccgtattggggatggcgtgaagggttgtgtgaggaacgtgtgaggaagtgtgtgagccatggcgggaggagctgtttgggaaacgtggggagcggtgaggaaccgtgtgtggaacggtgcgcacaatcgtgagg

SEQ ID NO: 84468 - DNA, 4086 bp, Homo sapiens
cgaccacgcgtgcgcccacgcgtccgactgtgtacagtaaatggcttatccagctggtgagtgatgcggcagattgagttttcttctgtgattcggtggagactatcagcccaagatgctttaagtgcacaacattacagggaatgcctgagtgcctggccaaagggatatttggtttggccatctctggatgcctgattgccaagctcaggaccaggcaatgtgactttgcatcagcaacaaccagcatcccttgaccaggcctgggccagagtattggtctcctctcagcccctgatcctgtgaagtaaggatgtgggggaagacctggcaaggacacagatgaaacacaaacaatagtaattctcaggccatcatcagtggagccatgttaatgtaatctgatggcttctccagggtccacaggaagtgaagaatctgtttcccagcagtggactcaaaacccatctgggctcctaaccttcctgtaaacccctttagtggcttcattagagcaggcgttcagctcactgttctattcatctcaaggaataatgggcttaaagcagtttctgtcctgctggttaacttgtttggcctattccattctggattttgtcaagcagtagacaagcaattagacaagaacttggaggcaccatttgtatccactttttagacttaatagaaacattgaagatgaacataatctaccaacgaaagacgtgattcaattcaacactcccttcccatgacccaggctgggcaaggaggccacgtgatgtggagggcacattccttgcctgcacaaactcaccatctgtgcacgcagtggccttccctaaaatcagggaattgttttaagtcttatcaagcagccaagggatgaaagagaaggtgggttttcatcaagactggaaggtggggacagggatgagcatggagctggccgtgggcctggggtaccaagagactccttgagagaccaggcaaagcaagtgattgggacagaggttatctgtcccaggttatctgggcatagatgcaggtgagcccatggccctcccagtacctcctgtctctggcctgttttagaaggttctctcctccccaaggagacacaacaactcctagggccactgaagatataactattgcccaggtttctggtctctaggctggggaagtcctctgggtaggaatcagcaagaagatcctaaaacaaaagctcatccatttgcgttccatgatgctgggatttacacttgaggcttagctttgctctgccaacttcttcagagctgacacaggatgaaggcaatgccatcctcaaacactgcaggcatcacagctaacaattgtgaagtcgtcttaactcaccataaaaaggaatccactcccaggcagccctacttctttgctttgcccagcattttactgattcatacattatctcacttgtgccaacactcaagaagcaggctacactgacactggtattcctgcctccatattttctttaaaagacaaatcaaagcagatatattaagtgactgttcaagagcacacttggcccaagtggcagagcttggactggatgcatgttttccagctcctcatccagggctctgaccagtttaacctgatgcagtcacgtggaggagcagtgcaggcacagtatgtcccataggcccagtgagatgcattcttggttggctggccttccacttggctacacagggatgtacaaggcgatcccatcttgataagaccaccacctcagagtatggagctcagagagggcaggcatgaagtttccttggctggtgcacctagaattggctgaactcatgagaagttgatatagaacagtgcttgccacagagcggggactcggtaagcacttaacgaatgaatgaattctaagtcaatccaagagtctgatgatttcttgaaaagggtgttagctaaaggatcttaggcatgactgtagaatttgtagttgcaatagaacagagaaagaggaagctttctgtctccttaacactgagctgtcatgttttaaagcttgctcacatcttggcacatttaagagacagtcaccccaggactcaaaaatagggaagtaacagtaacgcaggggaaacgttttctgtttggaggagcaaaggctgagaacactgtgaaaacattttgcgcgcacaatagtaacctgggtaaatgcagcgtgaagggattttagtcacacgtggtctttcttacaaggaaggtggtgggggtgcagatgaggttgctagagaatgttagaggatccctctctggattggagatagggaaagaaagttgcacggctgctgaggccccttctaggtggcaaggctgtgctccctggttctgatgatgtgcctgggtggacatggcccctgtgagtttgtacagtcttgcagcaggatctaagagggggggatttccagccagggctgctagacggaggcctactcttccatctttccctgaatggccaggatggccctgcccagggccctggaaagacagagaccctccctgcctccgccctcagtaagacgacaaggaaaggcaaatggcccaagggaaagaaaaggaaggctcttctcccccagagttccccatgcagacatgagtgcgtgctcagttcagaatcacttccgagaactcatcccataatgctgcagatttgggctggaacagattcacactgtctggtttcaccgaggacatgaaactccaccttgcggggataaagagagcaacaccaaattcatcaaatggaagacacattgaaagtgtttttccttaatgcttatcctgtttttaaaccattatttccaagttgacaccttttttaaggaaaaataaatattttgcggcattaaagccatatacaaggtctatatcagaaaaatatatttggggggctgcagcacaggactgagggagcggtacatgcttaaaaggcaacagggcctggttttcagtggcgatgatgattctctatgacagtcagggaaacgtggtctctgagagtgatgggcacataaagccttggtgccagagtgcatcgcatggtgtccaggccgagtctctgtcagatggttagaggcctgggtctaccctgccaggagaggcgtgtttgggtaacaggcagatggagtttggaacacatgaatggctcatcacacgccaaccctgagtggggcaggaggcaggaagggtgggctgccgcctctggttggcattctcagagatgcgcagtccatcagcttgttccaaagagtgaacacaggcctctgcgtgctcccaggctccttggtgtcccaacagctggagctcctcgatgagtcacgggagttctttgccaagaagtaacgatagcattactcatggaattgcttcactgctttctgaaggttggcataaaaccgggtcatgctgcgggggaagaaggagtccaccacgttctgtgggaggtaaccgctgaggtcggtatggaagaatgtgaccaggttggtcttggtgggttcccctggaagaggttcacagaagcaaccacaaggatggttaaatcctctcacaaaacctggcttcgggggacataacggatgctccacatgggtggcgttggaactgatggtcccatcctcatatctcttgactagcaccaagtccacaaaatctctgggagaaatgagcttcatggcagcggagggagtggaggttctgcttacacacagggtgtcagtgatgctttggataatttcaaaaccggtcacattctcatcccacttcactcgtaggcctccaacagctggcttcacacagtcccacacctcctctagtgtcccatatacaatgccttctcctcggtacaggttccctggaaactccacagatggcctccaggaaactgaaactccattgccttcccggcaaatcttccagcctgctgtgtcccgccggtactggagcatcttttcggccacagcctcgctcatttgggctgccagcgccgggtccattgcgtcgggagctgcgcttagctgcggg

SEQ ID NO: 84469 - DNA, 445 bp, Homo sapiens
  misc_feature (1)...(445): n = a,t,c or g
tttcgtgaaagaggaanaagtgaaggaggaagaggaggaggagaaagaaaaaagaggaagaggaggcagaggaggaagaggaaaaagaaaaggaggaggaggaggaagaggaaaaagtggaggaggaagaagaggagaaggaagactttttcgaaagggctgaagctgctcctctcctaacaggcagcatcccaggttaaaggatgctgaagcatccccgtctgtagcatatcagaagccccctgggatgtgagcctagcagcacagtgctccaggtgggagctggcgatgcattttgttccaacgaagcctcacaggcagcangcaggcatgagtgcagaggagggagaggtcctcaaagaccaagtcctaccagaaggctgagcagaggaggcagagcctgaacctggacccaggaagggtcctgacaggtgggaagccctgn

SEQ ID NO: 84470 - DNA, 417 bp, Homo sapiens
  misc_feature (1)...(417): n = a,t,c or g
tttcgtctgggtagccggactcccagctgcgccgttttcacggaagcggtgctgatgcgggacctgggggactgcggtgctggggactggccagtcctaccgggggcggggcttgtggaagacggggcgggattttgaagacctaggtcttgtggatggtgaactcacttggggcggggagggaggtggggctaccctggggtcttgggcaaagtcctcgcctggccggcttcgctacccttgtgcttgcgttgcccacaagcttgtagtcagaagaactcgcctgggagggatcgctcctgggagatccgaacgcgggagggcctggagcgcggcggcagctggatagcattcgggcccatccgaataagcggtaaatggatcatttctggggcctccctgcctcagcctnccgag

SEQ ID NO: 84471 - DNA, 437 bp, Homo sapiens
  misc_feature (1)...(437): n = a,t,c or g
tttcgtggagggaagcgaggacaaggcgcgctggcatctcactctgcttctggtgctggaagaccggctgcaccggcagctgacctacgacctgctcccaacggacagcgcccaggacctcgcctcggagctcgtgcactatggcttcctccacgaggacgaccggatgaagctggccgccttcctggagagcaccttcctcaagtaccgtgggacccaggcctgacccggagccccagccccaggggaccatgccggggtgctgcccgggcaggccatgttggggagactccagcaccgtggggctgccctcctccatgcgcctgggagcacaaaggccccggtagtgaaggaaccccccgtctcctgagagtggggctgaccctgccttgggcgccnaggggttggggggtgggtggtggggagtcgttaggccc

SEQ ID NO: 84472 - DNA, 498 bp, Homo sapiens
ggaggcaagaatgtagggggctctggcctaagcaagagtagactctatccccaggcccagcactcccactacccccactacgcggcctcagccacccctaatcaggccgggggcgcagccgaaatccaggagctggcctccaaacgagtggacatccagaaaaagaggttttacctagacgtgaagcaaagctcccggggccgcttcctaaagatagccgaagtctggatagggagaggccggcaggacaacatcagaaagagtaaactgaccctctccctgtctgtggcagcggagctgaaggactgtctaggggacttcatcgagcactatgcccacctgggcctgaaaggccaccggcaagagcatggccacagcaaagagcaaggctccagaaggaggcagaagcactcggcaccctccccaccagtctcggtggggtccgaagagcatcctcacagtgtcctgaaaacagactatatcgagagggactgtatt

SEQ ID NO: 84473 - DNA, 1456 bp, Homo sapiens
caactattgccaccctccaacagggagaatgctgggctgctggtgggaagatgtctgtgttctgctgcccttaggcctgtcggggatttgatcacaagctcaggtcaagttgcagttaggaatgcacctcaggctggaagtgccaaggcaggaaaaggaaagtttcaggacaattttgaattcattcagtactttaagaagttttttgatgcaaactgcaatgaaaaagactataaccctgtggctgccggacaaggtcaagaaactgaagtggctccctctattgttgctccagttctgaataaaccgaaccagtgtccagaaggatacatctgtgtgaaggctggtcgaaaccccaactatggctacacaagctttgacacctttagctgggctttcctgtctctatttcgactcatgactcaagactactgggaaaatctttaccagttgacattacgtgctgctgagacaacatacatgatatttctgtcctgtcatcctcttgggctcattgtatttggtgactttgatcctggctgtggtgccatggcctatgaggagcagaatcaggccaccttggaagaagcagaacaaaaagaggccgaatttcagcagatgctcgaacagcttaaaaagcaacaggaggcagctcagcaggcagcaacggcaactgcctcagaacattccagagagcccagtgcagcaggcaggctctcagacagctcatctgaagcctctaagttgagttccaagagtgctaaggaaagaagaaatcggaggaagaaaagaaaacagaaagagcagtctggtggggaagagaaagatgaggatgaattccaaaaatctgaatctgaggacagcatcaggaggaaaggttttcgcttctccattgaagggaaccgattgacatatgaaaagaggtactcctccccacaccagtctttgttgagcatccgtggctccctattttcaccaaggcgaaatagcagaacaagccttttcagctttagagggcgagcaaaggatgtgggatctgagaacgacttcgcagatgatgagcacagcacctttgaggataacgagagccgtagagattccttgtttgtgccccgacgacacggagagagacgcaacagcaacctgagtcagaccagtaggtcatcccggatgctggcagtgtttccagcgaatgggaagatgcacagcactgtggattgcaatggtgtggtttccttggttggtggaccttcagttcctacatcgcctgttggacagcttctgccagaggtgataatagataagccagctactgatgacaatggaacaaccactgaaactgaaatgagaaagagaaggtcaagttctttccacgtttccatggactttctagaagatccttcccaaaggcaacgagcaatgagtatagccagcattctaacaaatacagtagaag

SEQ ID NO: 84474 - DNA, 2277 bp, Homo sapiens
gatacaaactcagctgcctaccaagtcttctcagcagcttcgtaaaggaggaaattgtgtcaggtgtaagatgcaaatgaattttattgctgaggaagttttattgaagtatcgtatcacgttttataataataataaaggcccaaatatgctgtatatagaaataaaagcatttgtacattttatgattaacagatatttaagctatggttccggtcccaaacgattccccttggtagatgttcttcagtatgcattggaatttgcctcaagtaaacctgtttgcacttctcctgttgacgatattgacgctagttccccacctagtggttccataccatcacagacattaccaagcacaacagaacaacagggagccctatcttcagaactgccaagcacatcaccttcatcagttgctgccatttcatcgagatcagtaatacacaaaccatttactcagtcccggatacctccagatttgcccatgcatccggcaccaaggcacataacggaggaagaactttctgtgctggaaagttgtttacatcgctggaggacagaaatagaaaatgacaccagagatttgcaggaaagcatatccagaatccatcgaacaattgaattaatgtactctgacaaatctatgatacaagttccttatcgattacatgccgttttagttcacgaaggccaagctaatgctgggcactactgggcatatatttttgatcatcgtgaaagcagatggatgaagtacaatgatattgctgtgacaaaatcatcatgggaagagctagtgagggactcttttggtggttatagaaatgccagtgcatactgtttaatgtacataaatgataaggcacagttcctaatacaagaggagtttaataaaaactgggcagccccttgttggtatagaaacattaccaccggatttgagagattttgttgaggaagacaaccaacgatttgaaaaagaactagaagaatgggatgcacaacttgcccagaaagctttgcaggaaaagcttttagcgtctcagaaattgagagagtcagagacttctgtgacaacagcacaagcagcaggagacccaaaatatctagagcagccatcaagaagtgatttctcaaagcacttgaaagaagaaactattcaaataattaccaaggcatcacatgagcatgaagataaaagtcctgaaacagttttgcagtcggcaattaagttggaatatgcaaggttggttaagttggcccaagaagacaccccaccagaaaccgattatcgtttacatcatgtagtggtctactttatccagaaccaggcaccaaagaaaattattgagaaaacattactagaacaatttggagatagaaatttgagttttgatgaaaggtgtcacaacataatgaaagttgctcaagccaaactggaaatgataaaacctgaagaagtaaacttggaggaatatgaggagtggcatcaggattataggaaattcagggaaacaactatgtatctcataattgggctagaaaattttcaaagagaaagttatatagattccttgctgttcctcatctgtgcttatcagaataacaaagaactcttgtctaaaggcttatacagaggacatgatgaagaattgatatcacattatagaagagaatgtttgctaaaattaaatgagcaagccgcagaactcttcgaatctggagaggatcgagaagtaaacaatggtttgattatcatgaatgagtttattgtcccatttttgccattattactggtggatgaaatggaagaaaaggatatactagctgtagaagatatgagaaatcgatggtgttcctaccttggtcaagaaatggaaccacacctccaagaaaagctgacagattttttgccaaaactgcttgattgttctatggagattaaaagtttccatgagccaccgaagttaccttcatattccacgcatgaactctgtgagcgatttgcccgaatcatgttgtccctcagtcgaactcctgctgatggaagataaactgcacactttccctgaacacactgtataaactctttttagttcttaacccttgccttcctgtcacagggtttgcttgttgctgctatagtttttaacttttttttattttaataactgcaaaagacaaaatgactatacagactttagtcagactgcagacaataaagctgaaaatcgcatggcgctcagacattttaaccggaactgatgtataatc

SEQ ID NO: 84475 - DNA, 440 bp, Homo sapiens
ggcctgcggaccttgagactggctttgctgagcacatcagtgttgaatgcacgaggcgttcttatgacaattggcgtgcagctaacaagaacgcctttaccacttactgcactaaatggctcgatgaggatggcatgaggcagctggagaatgacttcagcagcatgaagaagtactgccatgtcgtccgtgtcattgcccacacccaaatgcgcctgcttcctctgcgccagaagaaggcccacctgatggagattcaggtgaacggaggctctgtggccgagaagctggactgggcccgcgagaggcttgagcatgaggtacctgtgaaccaagagtttgggcaagatgagatgatcgacgtcatcggggtgaccaccggcaaaagctacaaaggggtcaccagtcgttggcacaccatgaagctgccccgcaagacc

SEQ ID NO: 84476 - DNA, 403 bp, Homo sapiens
agagacgctctgaactgactgccccgcatcaccggagcgtcccagctgcgaggaggtaagtgccctgacgtgacggggaggggccgcagcactgcgtctcagcttccactgccggtctggccgcgggcggttttccccgggcccgcccgccttgggtcgcgtcgtctcccgacgcctcctgcctgggccgggcctgggcctctccgcgcccccttatctgccgcggcctgtgcctgctggagctccgagctccacgctctctccccttcccgccttcccgtcctcccgcggacccccgccccgtctcgctcctccgccgtctcccgcccagcggcagcttccccttttcgccctccttggccgccctttgccccttccagtcctttctctctcgcctcggagg

SEQ ID NO: 84477 - DNA, 804 bp, Homo sapiens
accacgccctaaccgcatgcaggcgggctgacgtgcctcctaatgaactgccctgccccctgtacccactcggcaggaaaacatcatcggccgtggggcagtgtctcatctatgggctgacagtcgtcctccgcaagaaattcctcggccagccgcttctgggacgactgcatcaagtacaactgcacggtggttcagtacatcggggagatctgcccgctaacctgctgaagcagccggtgcgcgaggcggagaggcgacaccgcgtgcgcctggcggtggggaacgggctgcgtcctgccatctgggaggagttcacggagcgcttcggcgtacgccaaatcggggagttctacggcgccaccgagtgcaactgcagcattgccaacatggacggcaaggtcggctcctgtggtttcaacagccgcatcctgccccacgtgtaccccatccggctggtgaaggtcaatgaggacacaatggagctgctgcgggatgcccagggcctctgcatcccctgccaggccggggagcctggccttcttgtgggtcagatcaaccaacaggacccgctgcgccgcttcgatggctatgtcagcgagagcgccaccagcaagaagatcgcccacagcgtcttcagcaagggcgacagcgcctacctctcaggtgacgtgctagtgatggatgagctgggctacatgtacttccgggaccgtagcggggacaccttccgctggcgaggggagaacgtctccaccaccgaggtggagggtgagcttagccgccttgctgggcctaagagag

SEQ ID NO: 84478 - DNA, 423 bp, Homo sapiens
cccacgcgtccgcccacgcgtccggtaaacatctgttaagtccatttgttctagggtatagtttaagtccattgtttctgtgttgactttctgtcttaatgttctgtctagtgctgtcagtaaaatactgaagttcctcactattgttgttgtcatctgtgtcatttcttaattgtttcataaatttgggagctccagtgttaggtgtatacttatttaggattgtgatattttcttgtttgactaatccttttatcattaatgaatggccctctttggctttttttgctggttttgtctgttttgaagtctgttattgtctgatataagaatagctactactggttgcttttggtttccatttgtgtggaatatctttttccacccctttatcttaagcttacgtgagtccttatgtgttaa

SEQ ID NO: 84479 - DNA, 404 bp, Homo sapiens
ggaggtctgtaatatagtggcaggacagcgatgtttcaagtatctcacagacaatcagacttccacaatgatcgagagctacagcaagatctgctcctgacagacaggaagagatcagtagactggtgaagagcaacagtatggggggtggacctgatccataccttaaagaatttggtattgttgtccacaatgaaatgacagagctcacaggcagggtacttccagcaccaatgctgcaatatggaggccggaataaaacagtagccacacccaaccagggtgtctgggacatgcgaggaaagcagttttatgctggcattgaaattaaagtttgggcagttgcttgttttgcacctcagaaacaatgtagggaagatttactaaagagtttcactgaccag

SEQ ID NO: 84480 - DNA, 429 bp, Homo sapiens
  misc_feature (1)...(429): n = a,t,c or g
tccgggtcgacccacgcgtccgaggccattgagaatatcaggcagatgggtgggaatatcaaacacaggcgcagcactgaatttcacactgagtctgttgcaaaaagcaaagaagcagcgaggaaacaaagttccatgccaccttgttgtcctgacaaatggcatgtccaaggatagcatcttggagcctgcaaacagactgagagaagagcacatccgagtttatgctatcgggatcaaggaggccaaccaaacacagctgagagaaattgcaggagaggaaaagagagtgtattacgtgcatgactttgatgcattgaaagacataagaaaccaagttgttcaagaaatctgtactgaagaagcttgcaaagagatgaaagctgacatcatgtttctggtggacagttctggaagtataggacctgn

SEQ ID NO: 84481 - DNA, 430 bp, Homo sapiens
aaaccaaccgtttttcctccatgcttcgtaaacggtaaggcggcccgccttcatggggtttccgggggcggttgtagggaaggcttcccagggccacgtggccaaggcaggcggggggcactttttccttttggctgtccagccgttcctgggcaaaaaagcggaatacccgcaaaggggcagttctgcttcgggggggttggggccctgggtcctgaggaaccactggggaagggagaagggagccatggcccccaaattcaaaagggggggccaaaaagaaccctggtttttcagggccttcctcaaagggcggttgtggggccacaaatgtgatttccagggaaaactcattcgttcaaaagctgctgggggactgaaggctccctggtcatcctcagctgacccagttttttggcccagttctgcc

SEQ ID NO: 84482 - DNA, 404 bp, Homo sapiens
ctcccagttacggcgcctgggcttacgttggccttctttggtttctccctcaccgcaccttgtctcaggacccctggccgttgggatggagggggacggagttttggggtcctttggctcagggtctggggccgcagcactccctgtggaaaccagcttagctccctgcgggcccagcatgcacctgccgggcacacctggggagactggtgagcacgcctgggaagcagcacgtcccgggtgggtcacaggccccgggggggtcacaggacaggtctcaggtgggtcacaggtcctgagtgggtcacaggtcccgggtgggtcacaggcatcccgggtgggtcacaggtcccgagtgggtcacaggccccgggtgggtcacaggccccgggtgagtcacaggt

SEQ ID NO: 84483 - DNA, 455 bp, Homo sapiens
  misc_feature (1)...(455): n = a,t,c or g
gaccgcgctggaattnnncgtcgacccacgcgtccgctccaagaccagcctcctggggggaccacgcacccggccttcactggcacccagggagccgtcctcagcagcgtcaacatgtcagggcccagcagcagagccatttacttgcaccggaaggagtactcccagaacctcacctcagagcccaccctcctgcagcacagggtggagcacttgatgacatgcaagcaggggagtcagagagtccaggggcccgaggatgccttgcagaagctgttcgagatggatgcacacggccgggtgtggagccaagacttgatcctgcaggtcagggacggctggctgcagctgctggacattgagaccaaggaggagctggactcttaccgcctagacagcatccaggccatgaatgtggcgctcaacacatgttcctacaactccatcctgtccac

SEQ ID NO: 84484 - DNA, 394 bp, Homo sapiens
acatctcagtcccagggcagcaaagtgttcctcttcactggagtgtgcaaactctgggacttggtgctgactggctcgctggtgccacccaatggcagccagaagctctccacgtacctgaaaggccgcccacgtccatcttcttgaggttcttagcctccaggatgcagacagtgagcttcccggccgtgggcacatagcgcagggaggtgcagatgtcgcccagcttctccggctgtccaggggaagagcaggacttgggtcatctcacccatcctagtgcctctctcatggctgacctctttcttgccaaaattagcaaggcagggatgtgtccctgcctccctcatcaccagtccccatatatgtgatggccgagaaggtcttccagcat

SEQ ID NO: 84485 - DNA, 1660 bp, Homo sapiens
cctgcggctacttttgtcacacaacctgtgccccacaggccccaccctgccccgtgccccctgacctcctccgcacagccctgggagtacaccccgaaacaggcacaggcactgcctatgagggctttctgtcggtgccgcggccctcaggtgtccggcggggctggcagcgcgtgtttgctgccctgagtgactcacgcctgctgctgtttgacgcccctgacctgaggctcagcccgcccagtggggccctcctgcaggtcctagatctgagggacccccagttctcggctacccctgtcctggcctctgatgttatccatgcccaatccagggacctgccacgcatctttagggtgacaacctcccagctggcagtgccgcccaccacgtgcactgtgctgctgctggcagagagcgagggggagcgggaacgctggctgcaggtgctgggtgagctgcagcggctgctgctggacgcgcggccaagaccccggcccgtgtacacactcaaggaggcttacgacaacgggctgccgctgctgcctcacacgctctgcgctgccatcctcgaccaggatcgacttgcgcttggcaccgaggaggggctctttgtcatccatctgcgcagcaacgacatcttccaggtgggggagtgccggcgcgtgcagcagctgaccttgagccccagtgcaggcctgctggtcgtgctgtgtggccgcggccccagcgtgcgtctctttgccctggcggagctggagaacatagaggtagcaggtgcccaagatccccgagtctcgaggctgccaggtgctggcagctggaagcatcctgcaggcccgcaccccggtgctctgtgtagccgtcaagcgccaggtgctctgctaccagctgggcccgggccctgggccctggcagcgccgcatccgtgagctgcaggcacctgccactgtgcagagcctggggctgctgggcgaccggctatgtgtgggcgccgccggtggctttgcactctacccgctgctcaacgaggctgcgccgttggcgctgggggccggtttggtgcctgaggagctgccaccatcccgcgggggcctgggtgaggcactgggtgccgtggagcttagcctcagcgagttcctgctactcttcaccactgctggcatctacgtggatggcgcaggccgcaagtctcgtggccacgagctgttgtggccagcagcgcccatgggctgggggtatgcggccccctacctgacagtgttcagcgagaactccatcgatgtgtttgacgtgaggagggcagaatgggtgcagaccgtgccgctcaagaagggtgcggcccctcaatccagagggctccctgttcctctacggcaccgagaaggtccgcctgacctacctcaggaaccagctggcagagaaggacgagttcgacatcccggacctcaccgacaacagccggcgccagctgttccgcaccaagagcaagcgccgcttctttttccgcgtgtcggaggagcagcagaagcagcagcgcagggagatgctgaaggacccttttgtgcgctccaagctcatctcgccgcctaccaacttcaaccacctagtacacgtgggccctgccaacgggcggcccggcgccagggacaagtccccg

SEQ ID NO: 84486 - DNA, 376 bp, Homo sapiens
cggacagctcagtaaattggaggcctctaactggctgactcacatcaaagagattctgacaactgcctgcctagcggctcagtgcatcgacagggaaggagcatcaatattgattcacggaacagaaggaactgattccacactccaggtgacctccttggcccagatcatcttagagccaagaagcaggaccattcgtggttttgaggccctgattgaaagagagtggctgcaggctggtcacccattccagcagcgctgtgcacagtcagcctactgtaacaccaagcagaagtgggagagctcctgtatttcttctcttcttggactgcgtgtggcagatccttcgtcagtatccctgttctttcgagtttaa

SEQ ID NO: 84487 - DNA, 550 bp, Homo sapiens
gcggccgccggcctgggcctcgggcctggcctaagccctgcatccatgatgaggccggggcaggtctccctcctgggtcctgatgctgtttctgtgctcggctctggcttgggcctcagccctggcaccagctctggccgcaaccctgaccctggctctgggccgggcactctgccggatcccagctccaaacccctccccggctccagatccacccccagccctactcctgtggaatcttctgacccaaaggctgggcacgacgctggtcccgaccttgtgcccagcccagaccttgatcctgtgcccagcccagaccctgatcctgtgcccagccctgatcccaaccctgtgtcctgccctgacccctgttctcccactcgtggcactgtcagcccagccctccctaccggcgagagtccagagtgggtacaggagcaaggggcactgctggggcctgatggctgaaggagacgccggcatcctcgggggcctggggaagttgtgtgttgtgcagtcagtaaaatcctcccactggtcgacgcggccg

SEQ ID NO: 84488 - DNA, 427 bp, Homo sapiens
  misc_feature (1)...(427): n = a,t,c or g
gtacccataaatatgtgattgttagtttctttgcctcagttgtagtctgatccttacagcttttaaacaacagtagagttcaccgtcaagaactaaggatggttggcaggcagatagaaaggtagcaagttgacccaactatctctggggaagtgggaacaaagaaaggttacatcagcactgtcatcacatagctctatagttctaggcctgcaggctcaatcaagtagccttgtataagattctctggaggaggtgctgaaagttgcttatacttgctatggaatttgattntacttcggatatctttttaccataggtacttctccctccaagccacacatnctcttggatttgatgatgttgtacgattagaaattgaatccaatatctgcagggaaggtggcgcactcccaactgtttcaca

SEQ ID NO: 84489 - DNA, 438 bp, Homo sapiens
cagtagacttaatgaggcctgtttcaaggttctgcaataaacagagtaagcaaagtcaccaacaatattgataggctgagtggaaaagttctccaggccaatattaaggcttcaaccccagctctctgagtgctagtaaatccagaacaagtgagggaattatgtggtctccaccaaatagccacttttccatttttaccagagccgtcagtaaaaagcattaaagtgttaggtatgtgcctacttttgtaggcacaattacaggagtacaagataagaactgaatgagtttgtcagcagtaaaggcatgctctatatggcctacataattagaaagtgttatctgaagatttagagatggggcaatgctgcttcaaattgctttttactcaaaggaattcttatgacatcagggtcataacctagcaactgattgca

SEQ ID NO: 84490 - DNA, 891 bp, Homo sapiens
tttgcccgctttttacgacttactatcagtgaagctgggcgcctggggtcctgcacgtatttttccggttttacccacgcgtcccaaggaaacctgttccttggaaggaggaagaagttccaccaccaccaaaagtgccagctctgcctatgaaacccgtcccagaggataaagttgctgaagaaaggaaacctgttcctcggaaggaggaagaagttccaccaccaccaaaagtgccagctctgcctaagaaacccgtcccagaggagaaagttgcagtgccagttcctgtcgctaagaaagctcctcctccccgagctgaagtctctaagaaaactgttgtagaagaaaagagatttgttgctgaagaaaaactatccttcgcagttcctcaaagagtggaagtcacgcggcacgaagtatctgccagaggaggaatggagttactcagaagaggaggaaggtgtgtccatttcagtttatagagaagaagaaagagaggaggaggaagaagcagaggttacagaatatgaagtgatggaagagcctgaggaatatgttgtggaagaaaagctgcacattatttctaagagagtggaagctgagccagctgaagtgacagagaggcaggagaagaaaattgtactgaaaccaaaaattcctgctaaaatagaggagcctccaccggctaaagttcctgaagcacctaagaaaattgtgccagaaaagaaagttcctgctccagttcctaaaaaggaaaaggtgcccccacctaaagtgccagaagagccaaagaaaccagttccagaaaaaaaggttcctccaaaagtcattaagatggaagaacctctcccagccaaagtgactgagaggcacatgcaaattacccag

SEQ ID NO: 84491 - DNA, 458 bp, Homo sapiens
  misc_feature (1)...(458): n = a,t,c or g
caggcaagggcaaaaaccngtaannttnncgtcgacccacccgcccggtttcattttcttgaatacctttgtctggtttttgcttttgagtaatgctggnctcagaaataattggagaagaaaataatttgagaagtatgcccttctcttctatttcctggaagaccttgtataaaattatgtcttccttaaatgtttggtagaattcatcagtaaagctatctggacatgtctttttgtaataaggtttttaactatgaatttaatttctttactagctatagggctactcagattatttctttttttttgagtgagctttaatgctttaatagtttgtattttctaagagactgacctctttcagctaagttgtttaacttattgccataaagttgttccttattgtccttttaagagctgtagattctatagtgatatcacctctcattcatgat

SEQ ID NO: 84492 - DNA, 446 bp, Homo sapiens
  misc_feature (1)...(446): n = a,t,c or g
tgggtcgacccacgcgtccgaatggaccaaactccctagtcaaaaggcagagaattactgttacaaaactatatgctttccacaaaagacttactttagatttagggacacacatagattgaaagtgaaagaatggaaaaagatatgcaaatgacaactaccaaaagagggaaagaatggccatacttacgtcagacaaattgactttaagtcaaaaattgtcactagcgaaaaagaaggacattatataatgataaaagaatcaattcaccaggaagacataataattatacatatatatgtgtatatacacatgtggatatatacacatacatatatgcaaatattagagcatctaaagatacaagagaaacattcatcaaactcaagaaagaaatagaaagaagaaatataagtagatagcaacacaataatagtaggaaatn

SEQ ID NO: 84493 - DNA, 448 bp, Homo sapiens
  misc_feature (1)...(448): n = a,t,c or g
cgggtcgacccacgcgtccgcccacgcgtccgcgcagctctgtgagtctatcttggggcaatgccagcctatgactgcggcagccctatcattggttatctcgttgaagtaaaacgggctgactccgataactgggtgaggtgcaacttaccacagaatctacagaaaacccgctttgaggttactggcctgatggaagacacacaatatcaattccgtgtgtatgccgttaataagattggatacagtgaccccagtgatgtgccagataaacactatcccaaggacatcttaattccacctgagggagaacttgatgcggacttaaggaagacactcatattacgtgctggagttactatgagactatatgtaccagtaaaaggacgcccacctccaaagattacttggtctaaaccaaatgtcaatctaagagacaggattggan

SEQ ID NO: 84494 - DNA, 526 bp, Homo sapiens
  misc_feature (1)...(526): n = a,t,c or g
atggacacgacttcnnnnnnacccacgcgtccggaaataccctggcaaaaatggcctccaaatgatgctgcatgcagtcttcaaggtggctcgacagctccagccctccgtggtgtggattgaagacacagaagaaaccttctacaaaaagttcccaacgcagaaaagatgaatgaacctaaacgcctgaaaaaacaccttccccaaatcctgaaactcctgaaaccagatgaccggattctgattgtggggaccacacggcgtcccttcgatgctgaactccaatctttctgcaaagtttaccagaaaattattttggtgcccagaccagactatgcttccagatacgttctgtggaagcaaatcattgaacgcaatggaggagtcctcaccagtgccttgaatgtcagctgcctggcgaaggtcactgacggcttcacccaaggacatatagtcgaagtggttaaaggcgtgctcacagatcagagaatccggcggcaaaatcataaacctctcactgcaggtg

SEQ ID NO: 84495 - DNA, 395 bp, Homo sapiens
gccaaccttcccaactgtcgcacccatgatcaggcggtggcgacactgatccactaggtgctggcaatactggatctcagccctgaggtcacgcaggtcctggcactcgctgcggtactgcttcttgaggtctttgagcttgaggatcagcaggaattcttcctcatcgatgatcatcagccccttgttttcgtacttgcctgcatggtgacggaagaagtcaggaaatgacgaggtgtccacctgaaattgggggaggaagggattccagaatgtgggcacagagctggcaaatcatgaagacaggagaccacaggcagggctggcccatggcaaggagatgggcatagcacaagaaggccaggctgccagggcataatctcacagggaggggg

SEQ ID NO: 84496 - DNA, 723 bp, Homo sapiens
ctagctgtgaattcctttggacaattgatgatatttatcattgtgcccagtttctacaaataaaagatgggtggattattttctcgatggagggtaaggtacttttctttacagctagttcttgagtctaatataaaagtgtcacataaagctatttgtgaaagtctcctttgattatagccttgaatagtagtttgctattttccttaacttttttcttctcttttgaattacttttctatttttttattttaatacttccatttgttctgtaggtgtccaatgcctctgtttaacagaattatttcacttggatgtatgaattatttttatttctgtatttctgtatttgtgtgcaaatggctatcttgttttcttttacttcctaagtttcaagcttatttgaaaggtagttgaaagtaagtattctaggccgggtgtggtggctcacatctataatcccagcactttgggaggctgaggcgggcagatcatgagttcaggagttcaagaccagcctggccaacatggtgaaaccccgtctctactaaaaatacaaaaattacctgggcgtagtgttgcgcgcctgtaatcccagctactcgggaggctgaaacaggagaatggcttgaaccccagaggggaggttgcaccgaaccaccttggggcccctgccctccagccttggggacggagccagactcaatctcccgaaaaaaaaaa

SEQ ID NO: 84497 - DNA, 916 bp, Homo sapiens
aatacagggcctgtgcatcccctttctccatccccaccaagtggcccccagagactggatgctgtcccacacgtcctgctctcccaccctcagccccccacgtggcctcagcacatctgctgtctccctgtgtcccaccggttcctcccccacccgttgctggcgcctccatacacttggatgcctcctacacatcccgcatcacccagacctggttgctgtccacccggtagccgtgcctcagggcgaagatcttccccagtgagatggcaatggcaaacccaaccacagcgatggtgaaggcgctgcccacgagctttgagaacagctgggtgttgggggccactgggggcaccagcctcaaatctgtgctttagacccatgccataggagatgcctgtggccccgatgagcgtgagcagctccccgggtatcggcatgggcagctgctgctgcagcttgtcattcaacagcttcaccaccacgagcaccaccccagccacagctgcagtgaccacggtgccaaccttgctctggggcagcttccagcagacctccagcactgtatagatgagggacagtggcccagagtggctgctcagatggaggccaaacacatacttgagctgtgagacgaagacctgcacagctgcagctgtggtatagcctcggacaagaggttctgacaggtaggtgaccacgaagccgaagtggatcaggcccagccccacctggaagaggccaaccaggacactgagtgtggaggccacctgtacccgggcagcatctctggctgtctcattgatcatggagtcgttcaaggcctgcggggccagggattctgtcacactgcccaccatcacagacatgacagcaaaggtccctgtgtctactggtcccgggacacagaggctct

SEQ ID NO: 84498 - DNA, 1197 bp, Homo sapiens
aatttggttttcaagggtaagttctttgttttctttttttttcctctctggctttttgctctgcaagatctgctaaccagtgcaagtggtgactgggattctggaggagttaacttgttatctgtgcctacatcactctctgggctgctgccaccatttttctcagacttcggaggagtattttgctgctgagactcaggcatgcacagagaaattttattactgtgattaagaacattctgtaaaacttgagatacaccattcattgtaggaaaatttccaacttgtaaattctgtttgttagtacaatgacaatgggatttaataccatatttttccctaagagtgtgcatggcatctagaagatctgtcaaaacagaaccaggtataatttgggttggcattaaatgtttgtgatcatgaggctgtcccttcacacacttcatccaagcatatagttctttatctctagaactcttcctttcctttgccttgtaacaatctaagcagaccacaaatccacatttttggcagacccagtgaatgttaaacaatgttgcttcacatgcatcacacatctcccggactcctctcactgctcttttccaggcaattttggcatcctttttcacccaggacaaagctgttttttcagatgttactaattgacagaacttatcacctattatatccaagatatatttagaagtctctatatctagttcatcatcttcaaaattttcatgtgtccacaaactcatagcttcatcatcatattggtcaggagaagagaaaccatctattctaactactccgtttttactaaatgacaaccgtctaaagtagtaaaatctacaaaatactggtgagtgagctggttcttctccttttttactgcgaataagtctacattctcgacacttttgtaaattaggccctatctcacagcaggagtcatcctgtaaaaaggattccccagtttgcttcagcttcttgactttacgccaatctttcaatactgaacgaggaatgccagtattactgttgctttgcaacttcagtttacttctttctttggcactcctgctgagaactccattgggtttcaaatcttcttctatttcaccttttctcttttgcaaatcattttgcttctttttgtaagttggcttaggttgtcttttacccacgcgtccg

SEQ ID NO: 84499 - DNA, 399 bp, Homo sapiens
  misc_feature (1)...(399): n = a,t,c or g
cggacgcgtggtatggagccgagggatttatacagcggtatcttttcaaataagcacagctgatgtctactgtggactgatgccttatcttgacccatatattacccaaccgataatacaggtatacatgttccaagttggagtcagtctttcctccaaactgtgcctctttaaaaaaaatggttagagagacctatttttcttaacattttttaagcatttaaattgggctatagcatgtttatattcctttcaagctaattaatgtttatgaaccaagcacctttgaaggtcagaaaagtgcaaaagattattatgttttacatcatgtcatatctaatggagcgtacaggagnncatatattttcttttgcggaanattataaagcatctgttaan

SEQ ID NO: 84500 - DNA, 1470 bp, Homo sapiens
gaatccctttcatgcaagttgcagcaggaggagcccatagttttgtactcaccctttctggagctatgtttggatggggacgcaacaagtttggtcagctaggtcttaatgatgaaaatgataggtatgttcctaatttactaaagtcactaagatctcagaaaatagtttatatttgttgtggagaagatcatactgctgctctaaccaaggaaggtggagtgtttacttttggagctggagggtatggtcagttgggccataattctaccagtcatgaaataaacccaaggaaagtttttgaacttatgggaagcattgtcactgaagattgcttgtggacggcagcacacttctgcttttgttccttcatcaggacgaatttactcttttgggcttggtggtaatgggcagctgggaaccggttcaacaagcaacaggaaaagcccctttactgtaaaaggaaattggtacccctataatgggcagtgtctaccagatattgattctgaagaatatttctgtgtaaaaagaattttctcagggggagatcaaagcttttcacattactctagtccccagaactgtgggccaccagatgacttcagatgtcccaatccgacaaagcagatctggacagtgaatgaagctctaattcagaaatggctgagctatccttctggaaggtttcctgtggagatagccaatgagatagatggaacgttttcttcctctggttgcctaaatggaagttttttagctgttagcaatgatgatcactatagaacaggtaccagattttcaggggttgatatgaatgctgctaggcttttattccacaaacttatacaacctgatcatccgcagatatctcagcaggtaaatgagaaaatgggacagattatacagtatgataaattttatatacatgaagtacaagaattgatagacataagaaatgattatatcaactgggtccaacagcaggcctatggaatggtaggttttctgtgcaatttgtgatttcatttttatgtatatgtatctaataaaaaaagaaacaattgcttggttttgaaatgagaaagttttttcagaacttttatccagaacttactttttaaataataacacattgcaaaggagtgctatatattttacaatatttatatgcaaacattctactcttttaccaaagccaaaccaaagaaatggattacactgtaaaacaaaacaaaacaagacaaaaaaaaacctacaagggtgaaagggatttttaactcttttattttccatgagggtgcctcttatttctccagtgttgaaaatactggcattcttcatactggaactcctaagaatgcattattgttgtgaaattggtgcttcaagactaccaaaagaggactgggtgtggtggctcatgcctgtaatcttagcactttggagcctgaggcaggtggattccct

SEQ ID NO: 84501 - DNA, 394 bp, Homo sapiens
  misc_feature (1)...(394): n = a,t,c or g
ggaggcaggaggggtagaaacagtggcgggaatagaatcaggaggagggggagaaacagtggcgggaagagaagcangaggaggggtagaaacagtggcggnaagagaagcaggaggagggggagaaacagtggcaggaataggagcagaaggagggggaggaaaagtgacaggaaggggaacaggaggacggagaggaagagtggtgggaaggggaacaggaggaggaggagggatgtgggagctggaagtggggtgggaatagcggatgaccctangcggtagcggggagatagtgggggatcttgtggtgaaactatgcgatctgacctttgacggacgctcacgaactattatttgaattaattgtgggaggaagaatggcttcctgttg

SEQ ID NO: 84502 - DNA, 545 bp, Homo sapiens
attctgaattcccgggtcgacgggaggcaggagggtcaaggagttcgccgcggtgctgcaggacgagccactgcagcccctggctctggagccgctgactgaggaggaacagagaaacttctccctgtcagtgaacagcgtggctgtgctgaggctgatggggaaaggggctggcccccccctggctggcacctcccgaggcaggggcagcacgcggagccgaggccgcggccgtggtgacagctgcttttaccaaagaagcatcgaagaaggcgatggggcctttggacgaagcccccgggaaatccagcgcagccagagctgggatgacagaggcgagaggcggtttgagaagtcagcaaggcgggatggagcacgatgtggctttgaggagggaggggctggcccaaggaaggagcacgcccgctcagacagcgagaactggcgctccctacgggaggaacaggaggaggaggaggagggcagctggaggctcggagcagggccccggcgagacggcgaccgctggcgctccgccagccctg

SEQ ID NO: 84503 - DNA, 457 bp, Homo sapiens
ctgcggtaccggcccggaattctcgggtcgacgggaggcaggagagggtggtcaaagactggccagggttgtagcaggagggtgcagcccacgcgggcaggggcgctgccgtgttataaatcaccctcgactcaattagagcctgtgaaaggttgtgcacacccagcagaaagctccgcgcttggcgggcagccagctctctgaggggggctgggggcgagagcttgtgtgtgcctacgtgtgtgtatgtgtgtgcctgtgtcttactgtgcagatgtgcttgtgtgcccttgtgtgtgtttctgtgcctgtgtgtacctgtctgtgcctgacctatgtgtgcctgtggtggggggagagtatacatgcctgtggactcttgcatatgcaatatgctccaatgtccttgtgtgtttggcaccaagtgcatctgtatgcacctgttcatgcctatttt

SEQ ID NO: 84504 - DNA, 416 bp, Homo sapiens
ttgcgtggctgctggagactaactgtgagctactaacacgggtggaagatagcttttgcaatactcggtttgcatgtgctgaaagtcatctgtcttctgagtcaacactcccgacctggtaaacaacctgctcagggctctggtgaacaagctgtagaaacctaaggcaacaacaaagacaaatgccctgccagagaacagcttggataggttgcgacaggcagagaacccccccattccactggagagagatcaagtctcgggttctcatgactcccttagccctctcacctccgcggagtaccccagagcccgacctcagctccatccctcatgacgcagccacggtccccagcttggcggccccacaggctctcacagtctgcctctacatcaacaagcaggccaatgcgggg

SEQ ID NO: 84505 - DNA, 945 bp, Homo sapiens
tttcgtgggatcgcggcggctggacggggctggagctgtcgggagggcggagctacagggcctgcaaggatgttggctgtcccggagatgggcctgcaggggctgtacatcggctccagcccggagcggtccccagtgcctagcccacccggctccccgaggacccaggaaagctgcggcattgcccccctcacaccctcgcagtctccaaaacccgaggtccgagccccccagcaggcctccttctctgtggtggtggccattgacttcggcaccacgtctagtggctatgctttcagctttgccagtgaccctgaggccatccacatgatgaggaaatgggagggcggagacccgggcgtggcccaccagaagaccccgacctgcctgctgctgactccggagggcgccttccacagctttggctacaccgcccgcgattactaccatgacctggaccccgaagaggcgcgggactggctctacttcgagaagttcaagatgaagatccacagcgccacggatctcaccttgaagacccagctagaggcagtaaatggaaagacgatgcccgccctggaggtgttcgcccatgccctgcgcttcttcagggagcacgcccttcaggtgcgctgcggccccacctctgccgactgtggcagggaccccctattttcccctcatccgaaaccgctcccccatcccgtccccgacattggatgggtagccaccgccggagctcagaggtcatcttctccagtaccctcctccctttttgtctggtagagcctgcaccaagccatactgatgggaggggggccgattctctcagctctgctgggaagtccttcctgtgatttgattagtacctccagttccgcagagggctgaagaccaccctccctccaagccagcctgggcaacaagagagactccatctcacaa

SEQ ID NO: 84506 - DNA, 116 bp, Homo sapiens; identical to SEQ ID NO: 68133

SEQ ID NO: 84507 - DNA, 413 bp, Homo sapiens
tttcgtcggggcagtttgtccccaggagtaggagcaggctttgcgccttcccggcctgggccttcggcgtccggggtggtgaagttgcttttcctcagacacgcagaatgggggcgttttcccccggccagggccctccaggctccgcgggaccccgggaaatggaagagttgacgactttcgtgggaagggggaagtttggacaggactagggaggttcttaggcagggagaggccgtgaccccgagtcttgggtcccctgggatggggatgggcagggagaggccgtgacttccgagtcttgggtaccctgggatggggatgggcaaggagagaccgtaaccccgagtcttgggtcccctcggatggggatggatagggagagaccgcgatcccgagtcctgggtcccctc

SEQ ID NO: 84508 - DNA, 479 bp, Homo sapiens
gtactcggccggaattcccgtatcgacgatttcgtggctcagagtctgcagcagcagcgaggccagtacctgggtcacctgaagcagtacgtggccacttatcagcagcaggtggcagcctatcagcagctgacctctgagaaggaggcgctgcacaggcagttactgctgcagacccggctcattggaccagctgcagcagcaggaagctcagggcaaagcagtggctaagatggcccgccaaaagttgcaggagacccaggggagggagttgctgaggacggggccccaagagggacaacctggcaacctctgtgccttctcaccctctttcctggcatctcaggagcacctggaagctaccagccagcagaaccagcaactacaggcccagttgagcctcatggctctccctggggaaggtacgggacaccactcagaggaagaggagagagccccaggaggaaagggggactgtt

SEQ ID NO: 84509 - DNA, 476 bp, Homo sapiens
ttcccgggtcgacgatttcgtgtccctggcggggaacaccatcatgcggctggacgactccgtcttcgagggcctggagcgtctccgggagctggatctgcagaggaactacatcttcgagatcgagggcggcgctttcgacggcctggctgagctgaggcacctcaacctggccttcaacaacctcccctgcatcgtggacttcgggctcacgcggctgcgggtcctcaacgtcagctacaacgtcctggagtggttcctcgcgaccgggggagaggctgccttcgagctggagacgctggacctgtctcacaaccagctgctgttcttcccgctgctgccccagtacagcaagttgcggaccctcctgctgcgcgacaacaacatgggcttctaccgggacctgtacaacacctcgtcgccgagggagatggtggcccagttcctcctcgtggacggcaacgtgaccaacatca

SEQ ID NO: 84510 - DNA, 771 bp, Homo sapiens
aatacacgtggtggagggggacttcgctgttccagaaaaagatggctcgggaatcttggttcacctgaaactcctaagaagaaagggtctcgatcctgaggcgggggtggggctctccactggtcctggagagggagtcgtgggggctggctgaaactgttgggaacaggtccaggtgtatgctgtggaaattctggagggcctgggaatctctggggtcccacggcaggtctcggctggctcggaactggtagcaagggcacttgaacaggcgtgaccaccgtccctttgaagtgcgggttgatgtgtatgttcttgggctgctgtggagtcacgggtggcggggtcatcatcatccttggggtctctagctggggaggcatgtgcattccctgaggcggggatgggtggtgcgggtgctgcaccggaagcagcggctgcagcggctgcggctggaacaggcttctgatcggctgctgctgaggcggcggaggcggtggagggggagcctggggctgtggaggaattaaccttggagaatgagtcacgacaggaggctgtgtaggaagcagcgcaggtctgtggtccttcatcctgcccctctcggtgctctctctcctctggtcccccacaccacgacacatcagcggacctcctcgccgtcctccccgcctggagctgtagcgtccttgtttatgctgtcgctccctttcttcaaattcaagcaatgctgccttggcctctgctgaaagctccaaagtttctggaatg

SEQ ID NO: 84511 - DNA, 493 bp, Homo sapiens
  misc_feature (1)...(493): n = a,t,c or g
atctactcggccggaactcccgggtcgaacatttcgtgttgtgggtgtccctggaggaggccgagcccattcccgacatccactgtggcatccgggtgctacagccacccccagagcaagagaatgtgcagtatggtgagctgggccaggggcagagggatgccttctccaggttccccagcacaaagcctctgcggtgacctttgctacctcctctctcacattgtggggtttctggtgatgacctctaagaggttttctgttcctcttgtggatgggcatgggaagtagcatctagacatctgagcgcctgctctggatatcacctgggcttcaccaggccaaatcatctgtggttggaagacccaggtccaaagaaaataggcctcatacaagcctcagtgaccacacctcatcccgaatgctgttgctgcaggatggggttccctgacgagggcagaagaagtatgagccttctggggtccatgtgtcn

SEQ ID NO: 84512 - DNA, 517 bp, Homo sapiens
  misc_feature (1)...(517): n = a,t,c or g
tcccgggtcgacgatttcgtgttttgaggacttgtgtgttgactgcaccatgcagagcatatagcatggaggcacccctactgccatcggggggcaggtggaggggggaccgtcctgcagctcctccctggggctacccctctcttccctctgcacagacctggcagccacccagacgtcccgcctgctgcctagactctaagaagatgccctatcactccaattaccatacacagtactggcggnggagaggtcctgccttgccgctgaaaactgcactgcttcctccctccagggatgaaaggccaagagaacgagggcagtgtggagtctacgctctcgccagggacctgcagcctctcacttccaagcacaccaactccagctaacaggactgggcttccttacctgccgccttccgctgcctccccgcagacacagcttcagcgacgcccaggctgagacggcagaagaggttcccgccggcccgcggcctgccctcagcagtggctcccaa

SEQ ID NO: 84513 - DNA, 411 bp, Homo sapiens
tttcgtgggcggctttgggaagcgcgagggcagacaggcggttactgttggggccaaaggcgccgtggctgctgatgcaggtgacccggggctccacgaactccgggctgaactcctcaatgggcaccagagtgaccccgtgcaggaagaagcgtgcctgctcggctgtgagcctcacgctggcctccgagtccaggtggaagacagccaggtggtcctgggtatcccgggcagtgccccggcacagggtgctgtacaggcaggggtgcagggagagcaccccctgctggggggcccgctgtggggtgtgcacagccacgcccacctcctggcgggcatcctcaatggcgtactccaccactagggcatagcggcctggctgtggcactgccacttgaagctggacgtccc

SEQ ID NO: 84514 - DNA, 433 bp, Homo sapiens
  misc_feature (1)...(433): n = a,t,c or g
tttcgtgctctctggagaaacgccgtgaggccgctggcggggccttcctggtgtcagggttaccggtaaggcccgggagaggaggtgcattcacgactggggaagggagcgcgggatagagtgaagacagatacggtgggtagaggggaacgggcagggctggatgcagatggatttaagggtggaggagggaacgctagggctggtgagaggcttatagttttgtagaatgaggagggaggatagcctttgccttgagggtggaatcccagcttggccaaactactgttgacaaactctggaagggaagaggcctcactaaagaagataaggactgggaatgaggacctagggctataatgacagtccctgggaggggaaaagggtgttgactgtaagctagaattacaaatgtcagggaggggtacataan

SEQ ID NO: 84515 - DNA, 389 bp, Homo sapiens
tttcgtggcctggcgtggattccgagcggcggagtctgtctgttttagaccggagggtctggcacgcgccagcccgaggtaccatgaaaagccctatctcaggcgaccgcgcccctctccgcgtggagcccacctgcatgtactggctgccccacatgcaccgggacgagcggcgttacaacactcggcactggccacttgccaacccgactacaagaaaaagattggaggaccgatcctatcacggagagaacaagaaagcaacaaaacgaccactgagaacaatgccggtggcaaaacatccaaagaaaggggcccaagcggtacatcgtcatagctggaaacagtcagagccaccagccaatgatcttttcaatgctgcgaaagct

SEQ ID NO: 84516 - DNA, 650 bp, Homo sapiens
  misc_feature (1)...(650): n = a,t,c or g
ggaattcccgggtcgacgatttcgtagcctcaattaaattagtaaattagactctggccaaagacagattatcaagagaaaaacaaagagaaatgtgttagagcgtgcacggcacacgtggaggtggagcacagggttgcatgacacagaggaaggttggagcccggggccacggggttgcatgacgcagagggggtccaaacccagccacggggttgcatggtatgcagtggggtcggagcctggccatggggttgcatgacgcanaagggggtccgaagccggccatggggttgcatgacgcagaggggggtcggagcccggccacggggttgcatgacgcagagagaggtccgaacccggccgtggggttgcatgacgcagagggggtccgaacccgaccatggggttgcatggtgcagagtgggtcggagcccggccactgcagggaccttgctttattgagcttcacttgaccgcacttcgcagatgctgtgtctttacagattgaaggtttgtggcagccctgcaccaagcaaatctgttggcacaattttgccaacagcatgttctcacttcctttctgtgtgtcatgtttgggtaattcttgcaatatttcaaagtttctcattattaaatctgttatggtg

SEQ ID NO: 84517 - DNA, 405 bp, Homo sapiens
tttcgtgggagacagaggcagaggggacagagagagatgggagagagaggcagggggacagagagagtcaggggagacagaggcaggggaacagagaggcagggggatagagagaggcagggggacagaggcaaaggggacagagagaggggacagagagaggcagggggacagagaggctgggggaacagagagagggagaggaggccggtggggaaacagagttgttttttcctctgttagctctcatccctgaaatcaacaaggaaataggaccggttcactttgccatgttggcttgaggtgccctgctaagagctggggttccatccagccttccttggctgtgacactctgtggaactaatcttcaacttcgcagaagttgttccctggcctctggaat

SEQ ID NO: 84518 - DNA, 713 bp, Homo sapiens
cgcgtcgacttttttctcttttttttcaaggtgccaaagctttgcaattttatattgaaccacgtttctaaaaacaagagtaaaggctttatctacagcctgtccgaatgtgtttaccgtgttcgggctcaatgccaccgctgttagcctcaacttcttctgacggtgagttcttcaacggaagcctgagcactctgccttgtgcacgatattcttccagctcagactggagttcatctacttggtcttgtagtaccctgcactgccgctcatattcatttctcatctgtgtcagtctctcttcttgcaggaagaactcagcactgctaggatcgaggtcaccaaacttttctgctaacacattttccaaatttctccgaagtttgtttgtcagattctcatattctgccaacttctctgcattttctagaagctcattttccagacgactgttttcctttaaagagagggcaaggcggtcccggatatagttctcttctgtttttgccttttcaatttcctgttcaagttctaaacgctgcttgcctgcctgctgcaggatctgctctctctcttttcggagttcattttttaaggctgctattcgctccttgtactcttcatccagtttcctgaggttgtactcattccgccgctctatggccgcatggtgatcatccacctccaagggccattaaagacttgaggcttct

SEQ ID NO: 84519 - DNA, 400 bp, Homo sapiens
tttcgtggcacaggcgcggatagaggacctggagatggccttggcggagcaggggcaggatatgaagtggattgaagagaagcaggcactgtgccggagaaatcaggagcttgtggaaaagatcaaacaaatggagacggaagaggctcggctcagacatgaggtgcaggacgccagagaccaaaacgagctgctggagttcaggatcctggagcttgaggagagggagaggaagtcacccgccatcagcttccaccacacgcccttcgtggacgggaagagccccctccaggtgtactgcgaggccgaaggtgtgacggacattgtggttgcggagctgatgaagaagctggacatcctgggcgataacgccgtaagaacctgaccaatgaggagcagg

SEQ ID NO: 84520 - DNA, 380 bp, Homo sapiens
ttacgtgcgacatatttttaagcagactccaacgaaagatattcttactgagctgtacaaactcacaacagagagggagagactgctaaccagtctcctgagctcataccacatcctggggatcacgatggggaaccaggaggggaagctgctagagctgttcgtgagcctggcccccgaggatgactgtttccagagtgctggtgactggcagggagagctccccgtgggccctctcaataagaggagcacccacgggaacaaaaagcctcggaggtctagtggaaggagagagagctttggggcccttccacagaagaggaccaaaagaaaagggcgtggaggccgagaatcagctcctctgatgggcgaggacaagg

SEQ ID NO: 84521 - DNA, 392 bp, Homo sapiens
tttcgtcagaggcccagagagacagagacagagacccagagtttctgtttctgagacccagagagacggggacagagacacagagaaaagcggaaacacagacccaaagagatgaggacagtgacccacagaaaaggggaaacagagacccggagagacggggacagagacccagagagagagggggacagagacccagagagagagggggacagagacccagagagagagggggacagagacccagagagagagggggacagagacccagagagagagggggacagagacccatagagagagggggacagagacccagagagagagggggacagagacccagagagagagggggacagagacccagagagagagggacacggagacagagg

SEQ ID NO: 84522 - DNA, 402 bp, Homo sapiens
attcccgggtcgacgatttcgtgcgggaggagcggctgcaggcccgggaatccggccctgctgcgtgcgtaccaaggaggcgcctggagagggcggccaatgactcaggccaggccaggccagcagtggtacctggggagaaggggtgtctgggctgggcgctggagcggagtagccagggtgtgggagatcctgggggagaggctgagcttgggggtgaagacacccgggggaggagagcggcccatgtggagcccatgcagaggcctctgcagtgcagcctcctgggccccaggcaactctcccctgactccccggcctgctggtcctggcctagagcctcgggtccgcctcccctcgggcctccctctgccagctgcccctgcctcgctcttccctggg

SEQ ID NO: 84523 - DNA, 384 bp, Homo sapiens
tgagaggtgggtggtgaggccgggcccgcaccccgccctgtctggtcgtctcccagcggcttcgccgccggctgcggcccagggcggctgctggagcctggcgtcccttgggcgtgcgcattggggagcgcctggtggccgtggacgcagggacaagtgtgggcctgatgctctggtcctcttttcctggcccgctccggcggggcacgtgcccagctgctcttccagacccgccttccctgtcagggctgccccaaacatctgctcagcctgggggttcccctcctccgaggccgcctcgtcctctgggaggacagacctttgccatctgggagctgcctttttttctggttccttaatcataggacatacggcagtattcag

SEQ ID NO: 84524 - DNA, 418 bp, Homo sapiens
cccagcatgttgtgttgttttcctgttgtgttttcgctgaatagagactaattcttgtagattatgaagggtgggcctctcttcccaagaacctcctatttgattcttgctactaatgtagtcattatttcctggatgtctcctttcttttgtcctgcgccctgattgcatttatttacttatctgtctttctgtcattctcaccgccccaccagcagcagtaggaatggctcctcctgtaatgtgagacaaggaatctctcagctaagtgaactacgaccagcttcacgaactttatgaccaccatcgggagaccgactcgattcattcctgccactactctaacttcttgtccagatattggccaaaccggttttggagaaccaaaaaaaccactagagggtgacccgtcactcct

SEQ ID NO: 84525 - DNA, 292 bp, Homo sapiens
aaactggaaaacataattaatgcagtcgaaaagcaacccttgtcatccaacatgattgaacgatctgtggtggaagcagcatttcatgaatgcactcactctgttgatgaaactattctgttaatgaccaaccaccctgcaccaaatttatttgtaacacttagagataaagcagactatgtttcgtgagctatataccattttgcacctgaggacccactggcatgacttatttactcctccggtgatcggttctcaccctgatgacagcggaagcatattccagcttaaa

SEQ ID NO: 84526 - DNA, 429 bp, Homo sapiens
  misc_feature (1)...(429): n = a,t,c or g
atgagaggcccaccaggtccacagggccccccagggagccctggccgggctggagctgtgggcacccctggagagaggggacctcctgggccaccagggcctcctggcccccctgggcccccagcccctgttgggccaccccatgcccggatctcccagcatggagacccattgctgtccaacaccttcactgagaccaacaaccactggccccagggacccactgggcctccaggccctccagggcccatgggtccccctgggcctcctggccccacaggtgtccctgggagtcctggtcacataggacccccaggccccactggacccaaaggaatctctggccacccangaaagaanggcgaaagaagactgcgtggngagccttgccccccaaggctctgctgggcagccgggggaaacttgccc

SEQ ID NO: 84527 - DNA, 567 bp, Homo sapiens
  misc_feature (1)...(567): n = a,t,c or g
agcagtgcatctacggaacggtagtagcgtttaaactcttcgatcgcgttgttttgcagggctttaaccatgtcctgaacaaagcgctcggagtgcatataaaccactttggcattcggcttgcgcgccataatgccgttacccaccgcatgcagcaggtgagttttacccagacccgtgccgccataaaggaacaacgggttataggcaccgccagggttatccgccacctggcgagccgccgcgcgcgccagttggttagatttaccttcaacgaagttatcaaacgtgtgtttgacgtttacgttagaacgataggtcggttctgccggggccgggacgttatcccaacctgagcgcgtanaaagcgcagcacgttgcggctgcgtttgcgccacctgtgcaggggccgcgacgttgctcgtcactgccgcttgtggccgttgcgtcaccggtttggtgccgacttcaaaacgcagctgtggggcatncgcttcgcagaaacttggtagcaggtcattgatattataaggggactgtccgtacccaatcgagacaaacggtttg

SEQ ID NO: 84528 - DNA, 454 bp, Homo sapiens
attcatagtccagtgcggtggaattccatgaagctgaaataacggtaaaggagctacaggtactgcaagccagacgctttgttttttcccggctactgataattatacatcgcgggtgagggctactgaagaaaagctcttggatcttgatgcacttccgaaagccagttccgaaggtaaatcggaaatgaacaaacttaaacagcagcttgaggcggctgagaaacagattacacatttacagattgaaaagaatgctgaaagtagcaaggctagtatcattaccagagagctccaggtgagagagctaaagcttactaaccttcaggaaaatttgagtgaagtcagtcaagtgaacgatactttggaaaaagaacttccgattttgaaagaaaagtttgctgaagcttcagacgaggcagtctctggtcagagaagtatgcaagaaactgtt

SEQ ID NO: 84529 - DNA, 436 bp, Homo sapiens
taccgtgcggtggaattcttcggagctgatgaagatgccggccagtggatggtacaagttgcttaaccattattatatgtgagtactacaacgtacccattccggaaggggacgaggaaggaaacatggaactcaggcagaaattcgaggtgaggataacaaaatgcccggaaacacctttcctttagaaagcccaacttcaggaacggccgagatgttgtggtcacatttttgaaaagcaaaaaaaaagtaatctcaatgttaatgatctttttctttatttaaaaacatgaatgttgttcgttccctttcctttgcaagctgttgactttttatgactcttaccacttagaaaatggaaactggaaatatcgcagaactgagagcatggttgatttctgcataagagatctgtttgcacatcactggggagagg

SEQ ID NO: 84530 - DNA, 456 bp, Homo sapiens
ccattagcccagtgcggtggaattcgcggagcttcccgggtcgcgctgcgcccggtctcttcatgtctcctctaggctctggcagcggcggtcctctcggacggatacggggccgagcagcgcccagccggatccagcgctgctgccatcgtgccctgggcttgtgcgccccccgcctgcccgtctgttccgcgcgcccgaggccttcctcaggcgtgggaaaaggaaaaactccaggccgtggaagggaccctgcaaacccctccgcggcgtggtggggcggcggcggcctcctctggccggagctgcgtacagggaagccggtcccctcgtggctgggagctggaggggtgcatttcgacctgcccaagatactttctagggctctggctggaattcgcaccaagccctcactgaaatgctgggcgaggccgatttgtccacgatgttgctcct

SEQ ID NO: 84531 - DNA, 442 bp, Homo sapiens
cagtgcggtggaattcctggcattgaacaggctatccagcccaaaagggacctcacctgctttgttgattgttgaatggcccaactacatctggttgcagtggcaaacggctgacctccacgagcagctgaaagtgcctcctgcaagtgaccgactcatccaggccttggaccgagaaaacagctcctcaactgcatcagctggaccatggtacagaccagagacagggcaagaaaagaagcagaggctattggcccgtgcagagaagaaagctgccggcaaagggggcatctccatgaagaccccaactgtcccacgagcagggttaaccccgacagcaccttggtggagaacaagaagcctcagctggtggtgactgcacgtgactctcgtcgagcttgctgtctctctgtctgcgctgtgtcctacagtggggttccct

SEQ ID NO: 84532 - DNA, 445 bp, Homo sapiens
tggtggaattcgaaagactctacttataaaaattagaggtatctgtaaggaaggcttaaagctgagttcatgtgtttatcagttttttatttttaaagtctgggtctgtgataacagcacctgctcccccaacccctcttgtgtttctgaacgttttgttccattttcttctttcattagcacgtggagatggacatgtgaagaaaggtggaaggttaagattggccggatttatttacatacccacttataggaagtccaaaatgctttcaatcagctcgccctgagagtgatgtataggagaacagtgagatcatcacatggaaaccatgcattacaagaagtactaccccgatctggtcatgggacagaatttactaaacagaagcatcttgaagctgctgaccacggacatccaccagcacgaatgtctatatttagcagg

SEQ ID NO: 84533 - DNA, 457 bp, Homo sapiens
  misc_feature (1)...(457): n = a,t,c or g
accctagtgcagtgtggtggaattcattccattcccaccactgattaggcctgttacatggttagaccccatgttaatgatagtatctggatgcctggaccaatagataaccgaggccctactcatccagaggaggaaggaatgttaatgaatgtttccattggttatcactttccttccatctgcctggggccggcagcaggatgtttaaattatgataaacaaagttggatgacttgtgtccctgcaaataatggatcaaaagcccctattcatgcaatcagtggaagaacatttcaatctttggacactattaaataccttgagcacggctatgttatgacacatcgccagattaataaatataaacctaataagaagccctgccctaggaaggccactaaatggtctggaaagctagaggtgctaacctgggaagattgtattgcaaacagcn

SEQ ID NO: 84534 - DNA, 445 bp, Homo sapiens
  misc_feature (1)...(445): n = a,t,c or g
tagtccagtgnnnnaaattcctcaactatctgggaagtagagaataattctttgtagagtgctaatttgagggccaaaataagcctctggatgaggaaatattccaaaagcatgtggatttttactcaggtaaaatcttacctcctacaggctgaattcttttgtcaactttataaaccagaaattgtgatcaatgagctagatttgcaagtgggtcgagtgcggcttctacggaaacaaagtgaggctgttcacctacagagggagaagttcactttcgctgctacacggccgtcctctgttctcgtcgagcagcttgcagtgtgtgtcagcaaaggggagcctgtgttgctggtgggagagaccgggactggcaaaacctctaccatccaatacttggctcacattacaggccaccggttgaggggtgtcaatatgaatcaac

SEQ ID NO: 84535 - DNA, 428 bp, Homo sapiens
ggcaattcgttgacaacctcaccgtccgggaacatttgctgctctttgcttcctaaaggcgcctcagtggaccaagaaggagctgcatcagcaagtcaatcaaactcttcaggatgtggacttaactcagcatcagcacaaacagacccgagctctgtctggaggcctgaagaggaagctctcccttggcattgctttcatgggcatgtcgaggaccgtggttctggatgagcccaccagtggggtggacccttgctcccggcatagcctgtgggacattctgctcaagtaccgagaaggtaggcactgggcctcattctgccttctcttcccacaatattgtgttgcaggaaatgcattgctactgtacagtagaatcaagttgtatcccagtgaggctacattatccttttcagaaaaatataaat

SEQ ID NO: 84536 - DNA, 447 bp, Homo sapiens
tcagtgcggtggaattcgtgagatggcggagaggacagcatttggaaaagtgaatcagatgccagtggcccgtctggggcaagccccttgggttcacagcagccctcactcggagggaacctggaggggagagaagttacggccctcgcggtgggggccgggtcttgaaccctcagcctaagagccccgagcccgagctcccccatgtgtcgcagcctccaggcagttgggcctcaccagcatgggggagcatccccgctctgcctctattcctccctcgaagctttcttttcctcccccagtccctggttgctctcatgcccccacctgcccaccaaggcaggagcccagccctccggtgcctggtctcagccccatgcccccttatgtgtcctcctcaggtggtgtgtgccaggtgctccgactaccgggccgaactgaaatacg

SEQ ID NO: 84537 - DNA, 416 bp, Homo sapiens
gtccagcgtggtggaattcggcaccaacaacacccagacaaagtccccaaactcatgatttatgatgtcgctaagcggccctcacgggtccccgatcgcttctctggctccaagtctggcaacacgggctccctgaccatctctgggctccaggctgaggatgacgctgattattactgttgctcacatgcaggcatgtcttatgtcttcggaactgggacacaaggtcaccgtcctaggtcagcccaaggccaaccccactgtcactctggtcccgccctcctctgaggagctccaagccaacaaggccacactagtgcgtctgatcagtgacttctacccgggagctgtgacagtggcctggaaggcagatggcagccccggcaaggcgggagtggagaccaccgaaccctccc

SEQ ID NO: 84538 - DNA, 409 bp, Homo sapiens
gaacgcgtgcgtaattcgctgacggtgacgcatagacagctgacatctgggggcgctgctgtggattggggtttcttggcatctggtctgtgggagctgacggtggcgcatagacagctgacatctggaggcgctgctgcggattggggtttcttggcatctggtctgtgggagctgacggtggcgcataaacagctgacatctgggggcgctgctgtggattggggtttcttggcatctggtctgcgggagctgacggtggcacatagacagctgacatctgggggcgctgctgtggattggcgtttcttggcatctggtctgtgggagctgacggcggcgtataaacagctgacatctgcaggcgctgctcttgattggggcctttttgcctactgggcctgtgcag

SEQ ID NO: 84539 - DNA, 416 bp, Homo sapiens
  misc_feature (1)...(416): n = a,t,c or g
ggtggatttcgatactgtacaatacatgtaggagaatactgtaggagaatactgtatgagaatacatgtaggagaatactgtaggagaatactgtgggagaatacatgtactgtaggagaatacatgtaggagaatactgtaggagaatactgtagaatacatgtaggagaatactgtagaatacatgtaggagaatactgtaggagaatactgtagaatacatgtaggagaatactggaggagaatactgtaggagaatacatgtaggagaatacatgtaggagaatactgtagaatacatgtaggagaatactgtaggagaatactgtaggagaatacatgtaggagaatactggaggagaatactgtaggagaatacatgtactggaggagaatacatgtaggagaatactgn

SEQ ID NO: 84540 - DNA, 432 bp, Homo sapiens
gtgtgtgaaattccagagagcttattctgtggagggttgacccagttgggccattgtcttttcttttgagtttttgagcttgcccggattaattctgttcatgtttctgccttttccaatgtggcatggctgcccactcttatacccagttattgtctgggtgcatactgcaactctcctagtgcatgctttgtagccagtgatggacaatatctgagattatatgaagcagttattgatgctaagaaacttttatctgagctttctaaccctgaaatttctgtaagtaatgtcttttaaaacagcttaagtatataatattatgttttcagatagtttatatttattgggcatgttctacaattgtgacctataatttgtaataagcatttggatctttgttttattttttcacatttgtactcttgaatg

SEQ ID NO: 84541 - DNA, 446 bp, Homo sapiens
agaccagtctggtggaattccaaagcttttaaccaatcctcaagtcttattatacacaggagcattcattctgaacataaaactttacaaatgtgaagaatgtggcaaagcctttacttggtcctcatcccttaataaacataagagaattcatactggagagaaaccctacacatgtgaagaatgtggcaaagctttttataggtcctcacaccttgctaaacataagagaattcatactggagagaaaccctacacgtgcgaagaatgtggcaaagcttttaaccaatcctcaactcttatattacacaagagaatccattctgggcaaaaaccttacaaatgtgaagaatgtggcaaagcctttacacggtccacaacactgaacgaacataagaaaattcatactggcgagaaaccctacaaatgtgaagaatgtggcaaag

SEQ ID NO: 84542 - DNA, 545 bp, Homo sapiens
  misc_feature (1)...(545): n = a,t,c or g
ngagtagcagaatggttagccttcgtgctttctgcttaaggcagctgtcagtttgcatgtccatgggtcagagtgtggataatcgtggtatagcaaagtgtcactatcaccaaggggaggcaaagtagttgcagtcaaaattaggttgtaccacttaatagtattgagttcatccgaactggtgaggtcgagacaggctgatctgttggtcctgttggttgatgtgatcaagaaggtcatcggaatgacagctaccagtgaaatgatccacaccacagcacaggctacaactgcacatcgagttttgtgaatggaaaagcagctcattgggtgaatgatcacacagtagcggaagatgctgaaacaggtgaggaagaggatgctgctatacaggttgaaatggaagctgaagcggataaacttacacatgaaatctccaaagatccagttttcgccactggcatagtagtgaatcaggaaggggaggctggtcagataacagcagatctgtgcagggccaggttcagcattaatagatgggctgn

SEQ ID NO: 84543 - DNA, 873 bp, Homo sapiens
ttctccacacttgtaaggcctttctccagtgtgaacacgctgatggttaataaagcagaacttctgacgaaaagatttcccacattccccacagtgataagctctctctccagtgtgaccttgctgatgttgaatgaggttacccttttgaccaaaagatttcccatattctctacactcataaggcctttctccagtgtgaacaagctgatggctaataaggctgcccttctgactaaaagatttcccgcactcctcacagggataagctgtctgtccagtgtggactcgctgatgttgaataaggctgctctttcgactataagatttcccacactctccacaatcataaggtccttttgcagtgtgatctcgctgatgattactgaagctgacatatctgctaaaggattttccacaatcactgcacacataacatccatctctagtgaaaagtttctggtgtggaataactgagtgtttggtgctgaaggcttttgtgcgttttccacaactgtaattagtttttccctcctgaaagggtgggccatgcatagtttcactgtctgtcttctctacagcagcttcttcttggcacaatcctgaactgggcagaacgtccttcccaaactcgcggaagacaaatggctcctgtgacaccctgagcttacgtttctttacaaacgatgcttctctgacactctttctgtagaatttctctccaatatgctgcttctggtgctgatgaaggtatgcagtgtcatccaagttttttccacatgctccactcctgttcagcttctgcctgtgatgagtttcctggtggtcagcaaagtgaaaaacatcctccaagatgaggccacacatctcaca

SEQ ID NO: 84544 - DNA, 454 bp, Homo sapiens
gtaccgactgcggaattcccgggtcgagttcatgtgattcgcaaagacttcagcagtgacctttcacccactaagcctgttcctgttggggatggggtgaaaacgttcaactttcctgagactgtgttcaccacagttacggcctatcagaatcagcagattaccagattaaaaattgaccgaaacccttttgctaaaggattcagagattctgggagaaacaggaggcagcacaggcacttccccaaccacctccagcactgggacaccatccccttcggcttcttctcatcttttatctccatcctgttctcctccaacttttcatctggcccccaacactttcaatgtgggctgccgagaaagccagctgtgtaatctaaacctctctgattatccaccatgtgcccgaagcaacatggctgccttgcagagctacccagggctgagtgac

SEQ ID NO: 84545 - DNA, 447 bp, Homo sapiens
gataggccgtttgtatgtgcaccctcttcaaaactgggtctgtgactacaacatattgctgcaatcaggaccattgcaataaaatagaacttccaactactggtaagttgtataaaatttttttcctagatactacaagaaaaactcttcatactctgtgattttagaactggaagggatcataaaaattgtctaatccagctcattccgtttagaggcaagaagtgacttgtccattgttacagacttataagagtaaccaagatcctgcctcctgggtatgtgttgtttaagaaggtggttccagggtggacttcctctgaggtctgttatacctaaaaggatagataaaagcaaactctgacaaagcccacaacaacatcttcagattggctctactttgttctcagagtgaatttcttcttccttggataatgctcctatctt

SEQ ID NO: 84546 - DNA, 671 bp, Homo sapiens
tagctcctgctttgtagctggtgctggcactggctctactgctagtgctagactaggtgtcagaactgtctagctctggagctggatctagggctggtgctagagcaggagcaggctctagcttcaaaactgccattggagctgactctagctctagagctgacaccaaagctgaatatagctctgtggctggcactacaactggcttaagctctggaacaggtgatggagctagttctagagctagcactggctttagctctggaggtggtgccaaagctggcacttcacctggcctaggctctggagctggtgctagagctggctctagcttctcatctggtgctggagctagtgatggagctggctctagctgtgctgctggtgctggagctggcactagctctggacctagaacttcctttagtgccagcgttggtgctgaacctgcttctggctctggagctggcactaaatctggctatagctcacgagtggatgccagagttggtgctggagtaggtgcagagctgtctgtagctctagagctggagctagtgctgcttgtgctgaagctgatggtagagctgacaccggatctggccctagctctggacctggtgtcagaactggcactggagctggaagaggagaaaggtttgccagcatga

SEQ ID NO: 84547 - DNA, 1128 bp, Homo sapiens
tacaacagggcaatgtttcatccccacgctgtcaataagattgcattaagcttgaacaacaagaatccccagatcaaaagtcttgtttttagaactgttggcagccgtttgtcttgtaagaggcgggcataaattattttatctagcatttgataactttaaagaggtttgtggagaaaaacagcgctttgagaagttgatggaacatttcaggaatgaagacaataacatagattttatggtggcttctatgcagtttattaatattgtagtccattcagtagaagatatgaatttcagagttcacctgcagtatgaatttaccaaattaggcctggacgaatacttggacaagctgaaacacactgagagtgacaagctttcaagtccagatccaggcttacctggacaatgtttttgatgtaggagctctactggaagatgctgaaactaagaatgctgccttggagagggtggaagaactggaagaaaacatttctcatttatctgaaaaactgcaagacacagagaatgaagccatgtccaagattgtggaactggaaaagcaactcatgcagaggaacaaggagctggatgtcgttcgggaaatctacaaagatgcaaatactcaagttcacacattaagaaaaatggtcaaagaaaaagaagaagcaattcaaagacagtctaccctggaaaaaaagattcatgagctagagaaacaagggaccattaaaattcagaagaaaggggatggggatatcgccatactgccagttgtggcttctggcacattgtccatggggtcagaagtggtagcaggtaactctgtgggacccacaatgggggccgcttcctcaggacccttgccccctcctccaccaccactgcctccctcatcagacacacctgaaacagtgcaaaatggtccagtaacaccacctatgccaccgccgccgacgccccctcctccacctcctcctccaccaccgccccctccgcctcctcctctcccaggccctgcagctgagactgtaccagctcctcccttagcacctccccttccctctgcacctccgctgcctggaacatcttcacccacagtggttttcaactcaggattagcag

SEQ ID NO: 84548 - DNA, 438 bp, Homo sapiens
gagtccggcccgagatcctggaggaccctgcgtccggctctcaggggtccccataccacctggcattccaggatgacccatcgaccccttgggtccaggcacgcctgggggacccatcatgccacgatcaccctgtgatggagacagcaatgcaggcaggtcacggctatggctgtggggtggctcttttctcccacgattcctggctccccgaccagaccaatgaatcccataaatccctttttctgaaagggtgcacacacagacacacgctgcagctcctgctgctctgctgaactccgctgggtgacaacttgcctctgggttccagggggttcttctaggtggccccagtccttgccgtctccctgagcaagcaaacacgcacacgcgcagcgagggtggacagcctataggtgtcacctgctcttccacagg

SEQ ID NO: 84549 - DNA, 411 bp, Homo sapiens
  misc_feature (1)...(411): n = a,t,c or g
acctcctcaggttggcaactactgtggctactagtccaggaggctcagcctctggagtgggtccaggaccggctccagccgacttccgaccctctggggccgactgagccctggttttcctgctcccccagtctcccacccgaatctccctttgcgcttacccccgacccccgcccccaccggcagaccccggggactttgattacctggggtcctctgcttcctcccagatgtcagctccgcctcaggaatcgactgagactttgaccgagactttggttccattcctggacacagattcagctggagagctggccccggngccagagcagttagcggctgcacaccaggacctgaatgacaagctgacttggcaagaaaaggctccagagggggtctcagtgctggact

SEQ ID NO: 84550 - DNA, 410 bp, Homo sapiens
ctgccatagcacggagtcttcttctgacttcatcctccccggagattacctcctgggaggcctgtgccctctccattctggctgtctgcaggtcttgtagcttcaatgagcatggctaccacctcttccaggctatgcggcttgctgttgaggagataaacaactccacggccctgctgcccaacatcaccctggggtaccagctgtatgatgtgtgttctgactctgccaatgtgtatgccacgctgagagtgctctccctgccagggcaacaccacatagagctccaaggagaccttctccactattcccctacggtgctggcagtgattgggcctgacagcaccaaccgtgctgccaccacagccgccctgctgagccctttccttgtgcccatgcttttggagcag

SEQ ID NO: 84551 - DNA, 551 bp, Homo sapiens
  misc_feature (1)...(551): n = a,t,c or g
ttttcctgcccttctcttgggcctttngcagctaaaatctggtgtctagtgtcaccatgtcgaggaatatgttggagacatccccacagagcttacctcaaacccctaccacaccaacggccccagtcaccccgattacccagggaccctcagtaatcaccccagccagtgtgcccaatgtgggagccatacgaaggcgacattcagacaaatacaacattcccatgtcatcagaaattgccccaaactatgaattttataaaaatgcagatgtcagacctccatttacttatgcaactctcataaggcaggctatcatggagtcatctgacaggcagttaacacttaatgaaatttacagctggtttacacggacatttgcttacttcaggcgtaatgcagcaacttggaagaatgcagtacgtcataatcttagcctgcacaagtgttttggttcgagtagaaaatgttaaaggagcagtatggactgtggatgaagtagaataccagaagcgaaggtcncaaaagataacaggaagtccaaccttagt

SEQ ID NO: 84552 - DNA, 376 bp, Homo sapiens
gtttccagggtcttctccaggctcccaggcctcatagagggcagaacaggatatggaaacgggctgggagcagcggccttcccagtggccggagcccagtcaggtcctgccgctcaaaatggctttggaccaggctttggagggggtggaaaaccccagaagccaggccccaccactcaaaatggctatagaccaggctatgtgggggccgtcaaaccccagaagccaggattccagtacagaattgggctgggagcccagccaggtgaagggggctttagaggggacatgaaggcacaggagccagtcttgacagcccagaaccgatttggatttggagcaggccttggagggaatgtgaagcctctgaagccag

SEQ ID NO: 84553 - DNA, 379 bp, Homo sapiens
  misc_feature (1)...(379): n = a,t,c or g
gcagccttgagtggagtggagcgggaagcctgcctgtgaaagaggcagctaggccaatagctggactgtaggaagaacacggagctggactgattcaaccaagagtcctaccgaccggtgctccccttgccaagagtgaaggcagatgccgtgggattctgccagctgctgagtacatctatttccatgatgctttccggaagaggcgaaatagcacagaatgggtttcagatggacgtaagctaaaaacccataagcccccactttgatgctctgggtctcctagaattactgtcagctcagaaccagtggccagtagtccaaaagatctgatttatttccttttctccaatgcacgctcatactggtgaaaggagan

SEQ ID NO: 84554 - DNA, 406 bp, Homo sapiens
cttttggattccctttgagcttcagaaagtggttgatgaagcttctcattgttatatattattcacatcaacattcatttttccttgcaaatgagcactgtggaaagcaagttcttggttttttcttgatgtcacactttatcttggtcttgtatagcagaagccagtctagaatggtatgattcaatttctttctccagtatttctttgtcttgtttttccttcaatttagaagtgagcattgtgttcttagctatcagaactttaagctgcccactatactgaggtgccctttttgttaatgttttctctttcagttttagggtcatttgaagttcagcattcttttctcttaaaatcttaatgtcctcaaagtatttattttccttctcctggggctgatgtt

SEQ ID NO: 84555 - DNA, 432 bp, Homo sapiens
ggaattcccgggtcgaggaccgctccacatgagcctctggacccagaacatcaccgtctgtcctgtgcggaatgtgacacgggatgggggcttcggcccatggtcaccatggcaaccatgtgagcacttggatggggacaactcaggctcttgcctgtgtcgagctcgatcctgtgattcccctcgaccccgctgtgggggccttgactgcctggggccagccatccacatcgccaactgctccaggaatggggcgtggaccccgtggtcatcgtgggcgctgtgcagcacgtcctgtggcatcggcttccaggtccgccagcgaagttgcagcaaccctgctccccgccacgggggccgcatctgcgtgggcaagagccgggaggaacggttctgtaatgagaacacgccttgcccggtgcccatcttctg

SEQ ID NO: 84556 - DNA, 459 bp, Homo sapiens
ctccggaacttccgggactacccacgcgtccgaaaggacccacactggagagaaaccctatgattgtaatcaatgtgtgaaagccttcagttgttccagttcgtttcgaaaacatgaaagaattcacactggagagaaaccctataaatgtacaaaatgtgggaaagccttcagtcgttccagttacttccgaatccatgaaagaactcacactggagagaaaccctatgaatgtaagcaatgtgggaaagccttcagtcgatccacttactttcgagtacatgaaaaaattcatactggagagaaaccctatgagaaccctaaccctaacgcttcagttgtcccagttctttcatgagcatgaaaggagtcacatagagaaaccccatgaaagtaagaaatttgggaaagccttcagtcctttctgtttctttcaactacgtgaaaggattcacagtg

SEQ ID NO: 84557 - DNA, 453 bp, Homo sapiens
caatgctcagtgtgaaataccccgggctcatatttctgtttctgctccgaaggtttcactggtgatggctttacctgctcaggtgggtgacagtcctgaggtgtgctctgacgggatggtcatagaacactctatatgcttccttatttgaagaaaattataattaaaggagacaaaagtaactacctctttttttatacttgacttgcaggtgactatgtatctttctcttacattaaacacaaaaacctgaatgactttccagatatattgttggaagttttcaaataacggcatttgtaacaatcatgtactgttaatgactcgccattttatcttactcatttgtaacacagtggttaaaaaaacacaggctttgtctggatcagactacctggattcaaatcttgcctatgccattttttgcctgtaactgtaagtgaattacttaac

SEQ ID NO: 84558 - DNA, 396 bp, Homo sapiens
cggactggggcttctatacttaatctttgcagctgttgaaggcgtgatgagagtcattgggggttctaaccatttagctgttgttcttgatgacattattttagcagttattgactccatttttgtgtggttcatttttattagtttggcacaaactatgaagaccctaaggctaagaaagaacactgtgaaattttcattatatagacattttaaaaatactctgatctttgctgtgctggcttctatagtgtttatggggtggacaactaagacatttagaattgcaaaatgccaatcagattggatggaacgctgggttgacgatgcattttggagcttcctttttttcgcttatccttattgtaatcatgtttttgtggagaccatcagcaa

SEQ ID NO: 84559 - DNA, 391 bp, Homo sapiens
agcagtctcggctcgcccaggctgggctccttgggggtcccggggactgggcgagcagtctcggctcgtgccagcggcggaggaagaagagctgctgcgggagatggaggagctgcgctcggagaacgactatctcaaggatgagttagatgaactccgtgctgagatggaagagatgagagacagttatttagaggaagatgtttaccagctgcaggaacttcggcgagaactggaccgcgctaataaaaactgccgaatcctgcagtaccgtcttcggaaagccgagcagaaaagcctgaaagtggctgagacgggtcaggtggatggtgagcttattcgaagcctggagcaggacttgaaggtagccaaagatgtatctgtcagattg

SEQ ID NO: 84560 - DNA, 664 bp, Homo sapiens
  misc_feature (1)...(664): n = a,t,c or g
tcttgaggaaaattgaaggcaatctaaggattgttttacaagaataaaaatcattgctcggggaatactccttgggttgaagtaaaaatatttgtgaaacatgatgtcatatgtttaacctgctctgctttactgaaggggaaagtggagatgacattggaaatcctcaacgagaaggaggccgacgagaggccagccgggaaggggcgggacgaacccaacatgaaccccaagctggacttaccaaagtgagaggccttctttgttctcccactccccaaacacctgcaggctgagagccccccttcccattggcttaatgggatggattagcttttgtggtcctcctaatctggtatttaatagtggtgggtgggggtggagaggttggtgatctggcttcattttaagaattctcctttccaggaaaccaaagttcagcatcttaggaagctgtcataggttaaagagcctttctcagtcaacgaaggggaacaagtatcttttcttgaccttattaatgtgattctttattcctgaaacctgtgttatgctctgggaataaaatatgcatccctcctgagttgggtaggtgatactgtttctttgcaatgcagtccgaccagaaacctccttcctctggttcaccaanccatggcaagac

SEQ ID NO: 84561 - DNA, 537 bp, Homo sapiens
ccccgagtcgggtttctccattcaaggacatgattttatgcttctctgaagaggattggtcccttctagatcctgcccagactggcttctatggagagttcatcattggggaggattacggggtctcaatgcctccaaacgacctagctgcccagccagatctctcccagggagaggagaatgagccacgcgttccagagttgcaggatctccagggcaaagaagtgccccaggtctcctacttggactctccaagtctccagccattccaggtagaagaaagaaggaaacgtgaggagctgcaggtgccagagttccaggcctgcccacagacggtggtgcctcaaaacacctacccagcatggatggccagcatcctggcacagaatcttggaactgggattaaagagcaggtttctggcatactgaagctgcacaggactcttggaaagtgtatgttccattcctgctttcagagaaatagccacagtgtagactctgagtcgtcttggtaaaagtcaccactttcagaagcag

SEQ ID NO: 84562 - DNA, 432 bp, Homo sapiens
gaggatgggcacggaggctggtcctccaggtgccttgtggaccatgctgaggaaggacatagggagccatggaagaggttatgcatatggcagagaggtggtcatgagataagatttgccttttacttccctggtcatccactgttaagcccccagatatgcctggctcctgagaccccccccaggggctgccctcctgtttcaagtctccactttatctcccttcagggctgcccagggattgccaggagctgttccaggttggggagaggcagagtggactatttgaaatccagcctcaggggtctccgccatttttggtgaactgcaagatgacctcagggactttctggacctgcaggacagacagcagggtgttccagaatgccaacccctccaacgcagcccactcagaggatcagccaacgccag

SEQ ID NO: 84563 - DNA, 588 bp, Homo sapiens
cggcacgagaaaaataaaagacttcttaaaaatttaggtaaacaactgatattttaaaattgtgattaatggctgaaactcatttcttttctctcagacttcgaatcatccctgacaccagagaacactaaatgacagtggacaggcagacagtgtaccttttgctcctgatggtcataagaaccacctccttcttcttattgtgaagtgcaaggtgcaaaaaggaggcctgcctgctccttgttcaggactatgtcagcattgtggctcagaagtgcaaaggctttggcatggccttcccttgcagcaaagtgaagtgcagtgttcttttgaagaaacggacacagaaaatgtggtgacaatgcctaatctgctttgtttcatggctgaactgcctaaaagacatttgcaacactaatgatttaataccaaaatacatagcatttaaaactgaaggaaaaaaaaataaaaaaaagagaaagcaaaacaaaagagcggattttttattaggggcgcggaggtttattccttttggggggggggattattaatactggccacggggcccgttcttaaaaacgggggggg

SEQ ID NO: 84564 - DNA, 393 bp, Homo sapiens
aaaagataatcttgcctccaccgtattacctttacttctttgtcaagattcataggccatatttttatgtggatctgcttctgggctgtctgctctgtcaactgatccatctgtctgttcttttgccaacctatcttgatgcctgtagctttatggtaagtctttaaggcaggcagcgtcatttctcctcctttgctcttgcccttcagtactgtgttggctactccagggcagtctccctttccatataaactttagaatcagtttttccgtatccaaaaaacaactcactgggatttttatgaggagtgcattgaatccatttatgaatttgggaagaaccggcatcttggactatattaagtcttcctatccatggaacttggaaaaatt

SEQ ID NO: 84565 - DNA, 720 bp, Homo sapiens
cgaatgtgttcagcatactacactggtacagattgtcaccacgaactgaaatataggctgcatttgggtgtcttcatttcctggggagtaagtatctttctgtgtatttatgaactctattgtttagaattactgttaccttcctgccaaatttaaaagatatgagtgtccctttatttctgtgggagcataatccatagtgaattttttggttattttaaatgtgcttttggttggtctatgtggtcatagatctgttcatcagactctggttaatattggaatctaatgctcaggttgaataacctgttttaaaaacccaagggatgatttatctctgtctaaacaaaccgctgaagcgaaatgagcaagaaagcctgtctttcctgttaccgaatcatggggcagaatcatatcctttctcttgggtactttagtcctcagctcattcagtgttaataggggactgcgaacagagtgcatgcagattaaaagccagcgttttcattttaagaagatttttccagcctgagaaacatagtgagacttcatctctataaaaaagcaaaaattagccaggtatgccggtggtcccagctactctggaggctgagggcaggataattgcttgaccccacgaggtccaggctgcggtgagctgtgaacacaccactgcactcagcttgggcgacagagtgagaccttgtcacaaaaaaaaaa

SEQ ID NO: 84566 - DNA, 749 bp, Homo sapiens
tttcgtatgaaaccaccatgaggagagtattgttggggagagagttcctcttgcatgctggcagtttcttgtggtcgaaacactgtggagccagactgcctgggtttgcatcccaagctctgctgcttcccagctgtgtgagttaagcaagctatttaccctcccagcttctttatctgtaagatgataataacaatagttcctacctcctatagctgcgaggattaaatgagctaatacacgttaagtgcttagaacatggcgtgtgacagagtaagttctgtatacctggaaatgttagctgtcctcatcatcatcagacccagggctgagcaggctgactcctcatactcttcattacccagagcatagttccatttcctctcactgtcccacttaggccttcaggatactttgagatccccggagaagctggccagatttcctgcagtggtagggggtgcccagggagtctgaggctgtgggggaattcttagggtgaaaaggcccagggtctccccctgctaccttcaccctggcagatgatggtgaatgtgccgctcttcgcgggggaacccccaactgcaggagcagctccgcctgcagctcccagtcttcctggcagcagatgcaggaacccagagtcactctccatccttaccaatccccgagccatgcaggcattgctgcagatccaagcagggactacagaccttgcagaccgaggcccctgggctgggtaaccaggt

SEQ ID NO: 84567 - DNA, 981 bp, Homo sapiens
tttcgtgcgggcgctacggagagcactcgcccaagcaggacgcccgcggggaggtggtcatggccagctcggcccacgaccgcctggcctgcgaccccaacaccaagttcgccgccccgacccgcggcaagaactggatagccctcatccccaagggcaacccacgtacagggataagatccggaacgcgttcctgcagaacgcctcagccgtggtcatcttcaacgtgggctccaacaccaacgagaccatcaccatgccccacgcgggtgtagaagacatcgtggccataatgattcctgagccaaaagggaaggagatagtaagcctgctggaaagaaacatcaccgtgacaatgtacatcaccatcggaacccggaacttgcagaaatatgtgagccgcacttcggttgtgtttgtctccacctccttcattgtcctgatgatcatttccctcgcatggctcgtcttttattacatccagaggtttcgatatgcaaatgccagggataggaaccagcgccgactgggggatgcagcaaagaaagccatcagcaaactccagatcaggaccatcaagaagggtgacaaggaaacagagtctgattttgacaactgtgcagtttgtattgaagggtacaagcccaatgacgttgtccggatcctgccctgccggcatcttttccacaagtcctgtgttgacccctggcttctagaccatcgtacctgtcccatgtgcaagatgaacattcttaaagccctagggatcccgcccaatgccgactgcatggacgacttgcccactgacttcgagggctctctgggaggtccacccaccaaccagatcacaggtgccagcgacacaacagtgaatgaaagttcagtcactttggaccctgctgtccggactgtgggagccttgcaggtggtccaggatacagaccccatcccccaggagggagacgtcatcttttaactact

SEQ ID NO: 84568 - DNA, 919 bp, Homo sapiens
actaactcggctgcccagcgctctccgccgcccgttgcggcctctacctgggaccaggctaaccctcctgcgggccggcccacggcgctactaactactccttgctttgttcgtgtcttctaataagagcaagccgatcattaaccttctcaacgcagcgtcttttggtttcttccatttccaaccagcagaatatcttcttggaactttcttttttaacctctgccttcctcacgcacctattttttggagggttccttttccctgctctctacctcctgtttaaattgaaacctgtacactttaagctttttgctcatcgcttggttttgctcttttatgccttaaattatctttgcggcatttttgactcatctgctggggaagaccattccctcaagaaaacttccaacagcaactcaaagcaaactaagatgaaaaaatggggggaaagaatctgtccactgggaacgctttacgtcaccgtgttgctctggaagacagagactgctctgggcacctggcgaggcggctctgcagtgcaggctggggccggtccctgcggcctgctgggctctggcctcgtttggcccatcactcatgctgccgtctcaagcacaagggttgctgtgagtgaaagcagcagcagtagcaacatctccaccatgttggtgacacacgattacacggcagtgaaggaggatgagatccaacgtcctaccaaggagaggtcgttcaaattctggccagcaaccagcagaacatgtttctggtgttccgagccgccactgaccagtgccccgcagctgagggctggattccaggctttgtcctgggccacaccagtgcagtcatcgtggagaacccggacgggactctcaagaagtcaacatcttggcacacagcactccgtttaagg

SEQ ID NO: 84569 - DNA, 1222 bp, Homo sapiens
ttttttttttttgtcttttaatcagcatccatgaaaattcattaaaaggtctgatacgaaaagcaccaggctaacaaatcagtcctgaattcaattttacaaaaacaccctctcctcttccatctcatccctaatattcctacgttatctcgaggtgcagagaaatataaaagggatccttgacataaaaacgtattaaaaagccaccatgagtagaatgtacggtaacagcgtctgactcggccggcaggacaggaaacctacagaaccaccatgccagggctttgtgtgagcaggcgggcactccacatgggcacgtgtgtgagcaggcaggcactccacatgggcacgtgtgagcaggcgggcactccacatgggcacgtgtgtgagcaggcgggcactccacatgggcacgtgtgagcaggcgggcactccacatgggcacgtgtgagcaggcgggcactccacatcggcatgttgtgtgagcaggcgggcactccacaatggcacgtgtgagcaggcgggcactccatatgggcacgtgagcaggcgggcactccacgtcggcacgtgtgagcaggcgggcactccacatgggcacgtgtgagcaggcgggcactccacatcggcacatgtgagcaggcgggcaccccacatcggcacgtgagcaggcgggcactccacatgggcacgtgtgagcaggcgggcactccacatcggcacgtgagcaggcgggcactccacatgggcacgtgtgagcaggcgggcactccgcatcggcacgtgtgagcaggcgggcactccgcatcggcacgtgtgagcaggcgaacactccacatgggcacgtgtgagcaggcaggcacaccacatcggcacgtgtgagcaggcgagcactccacatgggcacgtgtgatcaggcgggcactccacgttggcacgtgtgagcaggcgggcactccacatgggcacgtgtgagcaggcgggcactccacgtcggcacgtgtgagcaggcgggcactccacgtcggcacgtgtgagcaggcgggcactccgcatgggcacgtgtgagcaggcgggcactccgcatgggcacgtgtgagcaggcgggcactccgcatcggcacgtgtgagcaggcgggcaatccacatgggcacgtgagcaggcgggcactccacatgggcacgtgtgtgagcaggcggcacgaattccagcactcgcaag

SEQ ID NO: 84570 - DNA, 2207 bp, Homo sapiens
cggggttggcgcggttggcgggggcagtcccgagcgtgaggaggtcggcgcaggctacaacagggaggacgagtatgaggcggctgcagcacgcatcgaggctatggaccctgccactgtcgagcagcaggagcattggtttgaaaaggccctacgagacaagaagggcttcatcatcaagcagatgaaggaggatggcgcctgtctcttccgggctgtagctgaccaggtgtatggagaccaggacatgcatgaggttgtgcgaaagcattgcatggactatctgatgaagaatgccgactacttctccaactatgtcacagaggactttaccacctacattaacaggaagcggaaaaacaattgccatggcaaccacattgagatgcaggccatggcagagatgtacaaccgtcctgtggaggtgtaccagtacagcacagaacccatcaacacattccatgggatacatcaaaacgaggacgaacccattcgtgttagctaccatcggaatatccactataattcagtggtgaatcctaacaaggccaccattggtgtggggctgggcctgccatcattcaaaccagggtttgcagagcagtctctgatgaagaatgccataaaaacatcggaggagtcatggattgaacagcagatgctagaagacaagaaacgggccacagactgggaggccacaaatgaagccatcgaggagcaggtggctcgggaatcctacctgcagtggttgcgggatcaggagaaacaggctcgccaggtccgaggccccagccagccccggaaagccagcgccacatgcagttcggccacagcagcagcctccagtggcctggaggagtggactagccggtccccgcggcagcggagttcagcctcgtcacctgagcaccctgagctgcatgctgaattgggcatgaagcccccttccccaggcactgttttagctcttgccaaacctccttcgccctgtgcgccaggtacaagcagtcagttctcggcaggggccgaccgggcaacttccccccttgtgtccctctaccctgctttggagtgccgggccctcattcagcagatgtccccctctgcctttggtctgaatgactgggatgatgatgagatcctagcttcggtgctggcagtgtcccaacaggaatacctagacagtatgaagaaaaacaaagtgcacagagacccgcccccagacaagagttgatggagacccagggattggacaccatctcccaaccccagtactcctgctctccggtgccacctcaccttctttggcttcttccctcttgcctccttctgttctttctgctctcccctcttttccctcctcctcacttccctctggctagcccacccctgcactctctctcattgccgctgccactatcacctgtctctctgccagctgatgtgccctgttgccccccaccccatcccgcacagaaccatccctgcattccacaggggactcgggcaagggtgccgaagatagacaagaggcacacagagacagaccaactggcagccaggcagccccagaggagagagacattcagacagaggaaagtctccctgcccctcattccttccaagatgagaaaaacttgccgccaccccccgacactgatgccagggaggtgggaggaagaagtgggaaatttcccttcccagtacccccaagaacgtctgagccttcaatgttgaattttttctttattaaaattacttttatcttataaaatcaactaatcaaaaatgatatagacgacagcactggctctgtgaaggtggcatctttctgggcaggcaggccatggggcatggaggagggtgcaaagatatgggttgctgtcttctggcctccagctgcatggaggccggcccagggtctagggtgtgcactgggcaagggcagggcggcaggtgtcaggccggcttggacaatgaaaccctgaccttgctgcattccttttgcttccaccaccactagcttctttggaatcttggggtgggggtcatctttggggattatggctgccacccgggatttgagtgtagggagtgtgggagcagccttggcagatggggcacccgtgccctgcaggtgttgacaagatccgccatctgtaatgtccttggcacaataaaaccaaatgtcagtttcaaaaaaaaaa

SEQ ID NO: 84571 - DNA, 416 bp, Homo sapiens
aactggatggtcacattgtggattcccgcatggtggaagatttctcgaatttttgtgctggcatcttgatatcccctgtccttaggatacttgatgtgcagggtggcaataatctttccacttacaagttcccagatgtgcacttcatgtacactgctaattccaggcacagcagagagtttactcatcagctcttccatgttgactccttttgggaccatctgtagcagaatggccagcggtctccttgataagcgggaaggcagatgacaaaatgatgatgaccatgaggacagtcaggctggggtcaatgtaacactgccagttacacgggtcctcactcttcaggggaagcacatagaatatgatggccgtgatgacccacaacccacggaccccagggcatctcccatcac

SEQ ID NO: 84572 - DNA, 636 bp, Homo sapiens
ggattaagtgtaaaccagaatacaaggttccgggattatatgtaattgactcaattgtgcgacagtctcgtcatcagtttggaactgataaagatgtttttgggccaagattctctaaaaacataactgccacattccaatatttatatctttgtccatctgaagataagagtaaaatagttcgtgtgctgaacctttggcaaaaaaatggagtgttcaaaattgaaattattcaacctcttttggacatggcagcgggaaccagtaatgcagccccagtagcagaaaatgttaccaataatgaaggctcacctccacctccagtaaaagtttcttctgaacctcccacacaagccactccaaactccgtcccacctgtaccacagttgcccagctctgatgcttttgctgctgaggctccatctgtttaagacaactcacggccaaccggtaaactgtctactcaaaagtgaaattgtttgcaggactaagcactgttggcacttcttgattgctattcttcattaataagcacattgaaaggagaacatacgtctgcttttcacctataaaagcctttacaaaagaagatatgtgggaggatcagggaacctgtaaaagtgataaatccgggaa

SEQ ID NO: 84573 - DNA, 637 bp, Homo sapiens
aatttctcttttctctcacaagcccatccatccatttcaatgacaaagatggcgaccacgaccaaagcttttacatcacagatgacccggatgacaacgccgaccgcagcgaaacgtccagcatagcggacccgagctccccaaatccattcggatccagcaatccctttaaatccaaaagtaatgatcggccgggtcacaagcgttttcgaacgcaaatgagcaatcttcaactcaaggttctcaaggcttgctttagtgactaccgaactccaaccatgcaagaatgtgaaatgttagggaatgagattggtctgcccaaacgcgtagtccaggtgtggttccaaaatgcaagggcaaaggaaaagaaatttaaaattaacatagggaagcctttcatgatcaatcaaggcggaacggaaggcaccaaaccagagtgtaccctctgcggggtgaagtactctgcccgcttgtccatcagagatcacattttctccaaacagcacatttcaaaagtgagggagaccgttggcagtcagctccgatcgggagaaagattactttggctcccgacccacggttcgggcagctgattggcacagcaagaacttgatcgtattaaagaaagctttcagac

SEQ ID NO: 84574 - DNA, 403 bp, Homo sapiens
gaaagatgatactagggtcaggaaatagcatttgaaagtcattctcatctggagggatgaagccaagataaggcggaagccaggaaaagctttaagaaagcaaagaatgaaaatagccctgatacccaaagaagcaaatctcatgcaccgtgggaagaaaatggcccccagagtggactctacaattctcccagtgatcgcactaagtcgccaaagttcccttacacggcgtcgccgaaacccctcctgtggaagtgacaatgattctgtacagcctgtgaggaggaggaaagcccataacagtgggtgaagattcagatcttaagcaaaggaggaggtcacgtttcacgctgttaacaccagcagtggtagtgaatcagaaaattctaatagagaacaccgg

SEQ ID NO: 84575 - DNA, 440 bp, Homo sapiens
gaaacagttaacattcatggagatcactctcttaagaataaagctgagcttgctgattccatgaaaaatgaagcagggatcgatgaagggcatgtgataggagaatctgagtcagtgcacagtggtgcgtctaagcattcagtagagaaagtcacagagctagcaaaaggtcacctccttcctggagtgccagtagaagaccagagcctaccaggagaggccagagccctagaaggatatgcagatagaggtaatttcccagcacatccagtgaatgaagagaaagagactaaagaagggtctgttgcagttcagattcctgacttactggaagacaaagcacaaaagctcagtttttgtgaggaccaaaatgctcaagatagaaattccaaaggttcagatagtttgaataagaaggtagatctgactcttttgtctcc

SEQ ID NO: 84576 - DNA, 629 bp, Homo sapiens
gtcgcactagtgatttcccgggtcgacgatttcgtaggatcaccacgaacgtcagactgaacgagagcgatgccagcgcagtacccagatccagacgttgagcgatcaacgcgccgatgattggggccagtgcaccgcccaatgcgccaacgttgtaggtaaagcccaggcccgctgcacgctggtcggtatcgaaataaccgccaatcagttttggtaagatcccggcgatcccttgtccaagcatttgctggaagaacagtaacagaccgagcacccagacgtttgcgccgccaatcgcaaataccggaataatcagcagctgcgaggccagcaggctacaaacgtacgctttgcgggttcccagccagtcaccgaggaagccactacgcagcatcccaccgccgcgccaaagccactaaaggacagcacattggctacagtatgcgggttataagccagatcggttttcagatacgttggcagcagcgcctgaatcggccatgagtagaggaaagcaaacaacacgaccaccatcagcattacgcccgttggccagcgtttgcctgcactctgcaccataaagctgataaagattgcggcgcataacaacgaaatcgcgacccggg

SEQ ID NO: 84577 - DNA, 371 bp, Homo sapiens
ccaagttggctctatttctgttaatgcttgcgctgccttaaattctgtattaaggagccgcatgatctccggcgaattgaaagttattgatagtcgctggtttgcttttactcccagcctggaaattctcatgatcggagaaaaccctgtgattggaattctggatatgaacttcaaacccctcgcaaatttgagaagcttagctttggcaggaatgtatctcactgatattcctggaaatgctttggtgggtctggatagccttgagagcctgtctttttatgatagcaaactggttaaagtccctcaccttgccctgcaaaaagttccaaatttgaaataatataaacttcaacaaaaacccctgtatt

SEQ ID NO: 84578 - DNA, 802 bp, Homo sapiens; identical to SEQ ID NO: 84273
  misc_feature (1)...(802): n = a,t,c or g

SEQ ID NO: 84579 - DNA, 738 bp, Homo sapiens
ttacaaggccttaatggagccactatacaattctgttccattggcacaggagcgggctggctgctcaaggctgtaaccctggggccctgggttcacctgattaaggaactgcagctgtttgaccaggagcccatgagaaagcctggtgctatctcagagcaagaagctgctctttgccggctcccgctctcagctggtgcagctgcccgtggccgactgcatgaagtatcgctcctgtgcagactgtgtcctcgcccgggacccctattgcgcctggagcgtcaacaccagccgctgtgtggccgtgggtggccactctggatctctactgatccagcatgtgatgacctcggacacttcaggcatctgcaacctccgtggcagtaagaaagtcaggcccactcccaaaaacatcacggtggtggcgggcacagacctggtgctgccctgccacctctcctccaacttggcccatgcccgctggacctttgggggccgggacctgcctgcggaacagcccgggtccttcctctacgatgcccggctccaggccctggttgtgatggctgcccagccccgccatgccggggcctaccactgcttttcaaaggagcagggggcgcggctggctgctgaaggctaccttgtggctgtcgtggcaggcccgtcggtgaccttggaggcccgggcccccctggaaaacctggggctggtgtggctggcggtggtggccctggg

SEQ ID NO: 84580 - DNA, 1240 bp, Homo sapiens
ttttttttttttctggatacaaattgcagtttattaaggctccagagtgagaaatggcacttggttctgggcaggggcaggggcaggggtgtcagtggaacccaaaggagctgggtccaaacatgttggagggacctcctccatccccctacccccaataaataaagtctcagctccatctcagggtgctggtgcagggcagggatccctcactgaggagaacccagggctgctacctccttcatatttctccccacattggacctggtcacaggtcagtgagcaacagggcttctgtggtcctagtactctgagggggctggggagttcagggtggagagctggggcctggtggtggcctccccgtagccagtcatagtccgaggctgcccagggcaggctcagagtggggcctgcgttggggacactgtgcgcatcccaggtcggggcccagcctgggccacagctagatgtgcagctccgtgtcatcaggtggctccaggccagactctgcgctgagtgctgaggctgagggaccctgggccaccccaaatggtgagacaacgggtgagcgagcagccagaggagacagagagggtgagaagctgggggacatggcagctgaggacagggagccttcatggctgatgggggagcggtgagaagctggtgggaagatggcccgggctgcagctgtgtttgctggcttggggggcacagacttggctcctgggtgggccacggcagtgatgaggggtggtgggtcgatacggggagctgggggacatggccgagcttcatccttgagccgagcgatctctgtgaagacactggccagtggttggaactgagggcaccagctcagcaggtagtcccagttatagctgccacggagctcctcctcgccggccacaatggctgtcagcgcacctgccacacatggcttgccatctgctgggaagccatagtccccagtgggtgcagggctcaggccacagccccccaggaaggctgtggcagtggctgggggcccctcctctctgtagagagtggctcctgcacctggcagcagcagccctgcctttcggcccttataccaggtgtcaggggcaggtggttcgcaggatgtgtcactcagaccatctgcatcctgctggatgcctgagtcagggccacgggcagccagagaggaggccacactggccacacgggggaactcattgatcatgcggatctcatc

SEQ ID NO: 84581 - DNA, 387 bp, Homo sapiens
tttcgtatgattgagttttggtggctttacctgacaccagtcacttcagagactgttgtgacggaggttttgggtcaccgggtgactttgccctgtctgtactcatcctggtctcacaacagcaacagcatgtgctgggggaaagaccagtgcccctactccggttgcaaggaggcgctcatccgcactgatggaatgagggtgacctcaagaaagtcagcaaaatatagacttcaggggactatcccgagaggtgatgtctccttgaccatcttaaaccccagtgaaagtgacagcggtgtgtactgctgccgcatagaagtgcctggctggttcaacgatgtaaagataaacgtgcgcctgaatctacagagagcctcaacaacc

SEQ ID NO: 84582 - DNA, 193 bp, Homo sapiens
tgtccgccttcctgagagaatgtatacacacaagaccgaccgcgaattctgaagatatcgatcaaactgcgcggaccacatgagcatagttgaggccatccagcagttggtcaactggctgctactacttgcctgggagcgccaccctaatgcccgcctattgctaggatatttacccctgtatgccttgaca

SEQ ID NO: 84583 - DNA, 357 bp, Homo sapiens
tttcatgttcccattttataagtgagaactcagatttagagagtttagtgaactccaccagcatcccacagctgatgcagaggggttgaaacccctcacccatctgactctgcagcccatgtgcttttaccatgggtggtatcctcaggaaaaccctttggggaaagtgtctccatggagtccagtatgggcaaccagaacccaggctgtttttctttgggctctcacactgagggtatagctaagtagccaatgaaccagagcctctagctgtcatatctgctgtccatgttcctttcaccattatccagacatatacatttatgtggttgggatccgggatcagggtgaagctgt

SEQ ID NO: 84584 - DNA, 380 bp, Homo sapiens
cttgattgtgagtgcttcagactcccagctcttacctttacctacctaggtccaatctaaagtttccgactttgaggaggtatgactaggtactgtatgggaaaaggataggatagaaaggggcatagaattcctaggaaatgaccactgattctggttcagaggcctagcagttgaaagctagagctggaaatctggaagctttattaatggtatttagtaggtatctggcagcacatctggtagcctgcatgtgcattatttacacaggtattcaggtagatgaagtgactaaatgaagaaatatctttatcacacacaatgaatcatgttctaacgtaagggcaaagaaggaaggttaagatgaggaggaatagttt

SEQ ID NO: 84585 - DNA, 381 bp, Homo sapiens
ctgaaatgtccttgaaacttgcagtcttctcccagttgacctacagaagccagtcagagaattagaaaacatcccattatgcccacactcagcccattcagtggcacccagcagacaagaccacactgcctgtaagaatcaaacacccacaaaagcaatcaactcctcaaagtgggctaagcttcccgagggctatgctgagaaaggaaaacagctgtctccagatcagcaggtgtggctctaaaaaccgcacactgggattttcctggggctgtaaccctgagaaggagacgaccatgcaggcctgcctccctgccttcaagcaaacaggtacggaatctgcaagtggctctcagggccttcaaggagacaggcttcatg

SEQ ID NO: 84586 - DNA, 393 bp, Homo sapiens
tccccccagggagggggaccttccaaaaggccgggaataccggttttttttcccccctttcgctttaaaaaagttaatatccccccaaaactttaaaacccctagggggggggggcccaaatttgcccccccccaaaaaaaggggcccccccaaaagtccccaaaaagggggttcccccacaccctcgtgtttaaaaaagcggccagggtcttgttaacaaaagcaacactttttaggatcatgctttatatttaatggattagaactataagggatcccgcaaggactatccaacatatagctccgctttcaaagttaagcatcttttatagttctaatccattatatctaaagcaagataataaaaaatgttgctttatatttaatggatt

SEQ ID NO: 84587 - DNA, 318 bp, Homo sapiens
attcatcaccccttgatccctggcccagccttcaccacagtgagactgtatgggagagatcaccagcagctccttgtccacacatccagtgtccggcagcgccccacaccctcctggctcctgccttcttcctgctagcctgtgatgctctctctcgccttctgttgagtcccttcttcctcgctgtcccacagagcagagccccctgcgtgattcaggccagtgactgtcaagtcgagaagggcatggaccagcatctgcaggggcccctgctctggggaagcctcagaaaacgtacagtcatagcagaaggcaaag

SEQ ID NO: 84588 - DNA, 289 bp, Homo sapiens
tgaagtccttgcttgactgattgctttctattagcagaaagaaaacaggtccatcctatgtatctgagaaacaacatcatcaccctctcgtatgtggtttgtattccctgacgcggcggacatttttgcagcagaaatttctccatcactgtccagattctggccctggtgggcaggtctccatgacacctttagtccctttgttcaacattcttaaaccatggacctttttgtttgtttgtggccgggggaggtggtgagaaacaaacaaaaaggtccatggtttaag

SEQ ID NO: 84589 - DNA, 341 bp, Homo sapiens
tgctacgaagctgcggggaatggcttaatatcacgctgagacactattttcttaaaaaggcatttaaaatgttgtgggtcatatataacacgagctatcagatattctgtataaccattgccatgtttccttacatctattgaacatcttacttgtctagaaaatgatgcctaaccacatctttttttgccttatggtgataggcataattctaacaatcttattacatgactcctgacgtgttcgtgatacccactgaatctgagagtcaagcactgttgcctcggtcatacaacatgtatgtgttgatcctgactttgcaccaggtcctattctcaccg

SEQ ID NO: 84590 - DNA, 437 bp, Homo sapiens
gcccggcttggggtcgactttcaggggccgccgagatgtgtcaggctcctgggagcgggaccagcaggttgaggcggcgcagcgggccctggtggaggtgctggggccttacgagcctctgctgagtcgggtgcaggcagccctggtgtgggagcggccagctaggagcgctctgtggtgcctggggctgaacgcggctttctggttttttgccctgacatctcttcgtcttgtgtttttacttgcatttggcttgatgatcattgtgtgtattgatcaatggaagaacaaaatctggcctgaaataaaagtgccaagacccgacgcattagacaatgagagctggggctttgtgcaccctcggttgctcagcgtgcccgagctctgccaccatgtagctgaagtctgggttagtgggaccattttcataaggaatg

SEQ ID NO: 84591 - DNA, 309 bp, Homo sapiens
tgtcttttaagagagcaaatatgaaatgtaaaacagaaaagacttgccatgtcagctcattgctacgttggttgattatctttatagtaaatattctagtattgcctttttactagtttattttaatgtaaataatatcaaaatgaaacagtgttatcaaaggcctttttaatccaggtgactgaagtagcattaaggcatagcatttgacaaaattaaaatatttttttaaagtgctgttctgaagtaaatcaagaaaatagtattaacatatatgatatggattcttaggttatttgcaaagaatgg

SEQ ID NO: 84592 - DNA, 344 bp, Homo sapiens
tactcatgttatcaaaatccctgaataaattagatacctataagataaatgacatgtgtataaagtcctgaaacatatataagccattaaaaatatctgcagaaaaggtgattccaatgatgccagttttttcctatactagaactctaaaaccaagcaacaatccagtttccagttgccacactgcaaatttacttatgacattactggaagagatgtaggagaaatacatactaataaccaaatatctaagtctgctttttggattttagtttgtcagatacagacaaacctaaattatactccaatatgaacgtgcccctgctttaaagaatcctcgtgcc

SEQ ID NO: 84593 - DNA, 322 bp, Homo sapiens
ggcacgagctggattaattaattaagctttcgcaacctgatcagcatcactgaggggccatagaatcttgacacttgacttcgcataacattgctcgttactgacagatcttaccaaagtccacacggaatgctgccatggagatctgtttgaatgtgctgatgacagggccgaccttgccaagtatatctgtgaaaatcaagattctatctccagtatactgaatgaatgctgtgaaaaacctctgttggaaaaatcccactgcattgccgaagttgaaaatgatgatatgcctgctgacttgccttcattagctgctgag

SEQ ID NO: 84594 - DNA, 318 bp, Homo sapiens
cttcaatactccactgacagcactggacaggtcatcaagacagaaagccaacaaagaaacaatagactcaaactataccctggaacaagtggactaaaatatttacagaacattctacgcaacagctgcagaatatacattctgttcgtaagcatatggaacgttatccaagataaaccatatgattggccacaaaacaagcctcaataaatttaagaaaatcaaaattatgtcaagtaccctctcagaccacagtggagtaaaactggaaattaaatccaaaaggaaccctcaaaactatacaaacacatggaaatt

SEQ ID NO: 84595 - DNA, 319 bp, Homo sapiens
ctatatcaaggtctgctgaaatgcagcatggaagcttgcgactgtattgaggtaggtaatcgtgcctcacatctgtggatatgctgtttaaatgagccattagagatggctttgtcttttcctttaactccaggaactcgtgtccctgaagccttgtaaagctgcggagctggttgccacccacttttctggacatattgaaacggtcattaaaaaacttcaggtacatattgcaaatatatattggggaaaaatatctagtggagagacaattattaaatcgtcacctaagaagttttgattgtagtgatttcttcag

SEQ ID NO: 84596 - DNA, 385 bp, Homo sapiens
gtcagaacggaccagcgtgcaccagcaactcggaatggttcaatactgccggtggacattgacgttggtagctgccagccttgatgatacactctgcattttcacagacccctgggatcttccggcactcatcagtatcaatgggtaaaccggtataaatgtctatgacaaagcctggcctttgacttccactgagagttgcctactcatctgtacttgggatgggacactggtcacagggcttgttgcacgcccggtcaatggtgtaggaacagcagcacatcttcttgggcatggtgaataacaatactccatcacaggtctggatgtcagcatagtagtttctgtagcacagacttagtctcatatccatgcaattattgcg

SEQ ID NO: 84597 - DNA, 244 bp, Homo sapiens
cgggcatgaagagcccagccatacgtcatgaatatagatgctgctatcagttcttttatgattcctttcccatatcttacttacgacctttgtgactttattttttgcttgcctgggatggttgtcacctgccaaccgaggagcgctgatgacgtgggctgtggtcctgtgggcgctgctgggcacccctgcaggctatgctgctgccggatggtataaaccctttggaggtgaaaaacggccc

SEQ ID NO: 84598 - DNA, 334 bp, Homo sapiens
ggcacgagaagtaaaattttaggccatagagaaattcgcaattgataggccaaggtgactgataaaactctagaggtcaggattggtaatagtggagcgaggaccagatggaatttttggttaatactgtatctgaaattgaggatgggatagataggaaatgacctatcatttcttgaggagctgacttttttgatatagtattacccaaatgactgggtatccacgtctcaatcacagatccttttacttttgccataggcacctgctcttttgccgggtaaccttggaaaagtatttcctgcagttcactgcgatgatagtgctcattctc

SEQ ID NO: 84599 - DNA, 335 bp, Homo sapiens
ggcacgagggaaacgggaatccaggtggagctctactcattccctagagatccagaaatcgagatgagtggtggcctcgtgaatgggagctctgtcactgtaagctgcaaggttcctaacgtgtacccccttgaccggctggagattgaattacttaagggggagactattctggagaatatatagtttttggaggactctgttatgaactcactagagtacgaacgtatgagaatgaccgtaatacttgccattgcttactgtggcactgctcttgagtggcatgcttagttacatagaggagccatggaatcccttctcatacatgagcgggc

SEQ ID NO: 84600 - DNA, 350 bp, Homo sapiens
ggcacgaggatctttccagtcttctgactcgaggaagtgggaaccaggagcgggagaggcagctcaagaagctcatctctctccgggactggatgttagctgagttggcctttcctgttggggttctcgcgacttgtgcctaatctttactctcgtgttagtactgtgttatcctcttcccttgttcttgtttcttctttcattctcctgacgcactgttttctttacttctgttgtcttgctactttccttcgtattgcttcttctattatctcttcttctcttcttctcctttatgtttattattggcttcgtctccttttccactttttattcttttagcttcctta

SEQ ID NO: 84601 - DNA, 396 bp, Homo sapiens
cggacgcgtgggcggacgcgtgggcggacgcgtgggtttgatttttcaaaagtctattggaatcctcgtctgtctacagaacacagccgtatcacagaacttctcaaacctggggatgtcctatttgatgttttcgctgaggttgccccctttgccattccagtagcacagaagccctgaattgtatttgccgatgatctcaatactgagtctcatagatggctggtgtacagctgtgaactctctgaaatggaccagtaggagctcggatataacttggatgggaaagacttcctccaaggaccagtcccagaatagttaatgcagctgctggctctgtctaacgaaagaataccctctgtgcacgttgtcatgaacttgccagcaataactatg

SEQ ID NO: 84602 - DNA, 338 bp, Homo sapiens
cacctccccctttgcagccacttcctggtggttcaggaaacgcaactcatcagcatggtggtacagaagtagggcctgccctttgggcgactgaactacctgcccctggaacagcaccttatgccctgccttgagaggatcctggctcgtgaagcagctgtggcatccctgggtacacctcatacaccgtcgagaacgtaccctgagtgacgatcgcttggagtcatttagcgcatccttgtgtcattctacactccagaagtcacttctgagtttggacctcagcgagaacaaaatcaatgcactccctgtgcagttttgccagctccacgaactta

SEQ ID NO: 84603 - DNA, 350 bp, Homo sapiens
ccccccccccaaaaattttttttttcccccgaggggttaatttttttggggggggtgggcccctattttcccccccccaaaaaagggtttttttccaaaaaacccccaagggggtttattatgccccccctaagggaaaaaaattaatttttccctccccccgtaaatttgggccccccccggggtttttttaaaggccccccccctttttttttttttttttttggggggggaaggaattttttttggctgaaaaattggggcccccccttccccttataaagtttcccccctgttcccaaaatttttttttttgggggggggaattttttttttttttaaaaaaaaaa

SEQ ID NO: 84604 - DNA, 366 bp, Homo sapiens
  misc_feature (1)...(366): n = a,t,c or g
accacgcgtccgctggaagtgaaccctgaggcggggaccctctcttcccatcaaatcatccagctcagtgtggggcgaggcaggtgggtaatatgaagccagccaatgtgttaacctgtctctgtcaacctaagaatgttggccttactgacacacctttgctccatgttcactaccagaagtagctgggatttgattgcgaattgggtaattagtttaaaaatctgtgagtacattattaaatgaaattatcagagtggcctaaattgaggtgattcagataggttcgcgaatataccattttatattgttgagaacgaacatgaagggaatgtccagatgtcctataaatgctagcaacagatn

SEQ ID NO: 84605 - DNA, 344 bp, Homo sapiens
atttactagtactatgacaaaaccatttgagaaggaatctgagcagccagcataagccactcttgcctttggagctcaaactagcactacagctgatcaatgtgcactaaagccagatcttagttacttgaacaacagttcctctagttcaagtacaccagccacttctgctggaggaggtatatttggaagttccacctcttcctccaatccacctgtggctacctttgtgttcggacagtccagcgatcctgtgagcagctatggctttgtgaacactgctgaatccagcacctctgactctttgctattttctcaagatagcaaactagcaaccacatcca

SEQ ID NO: 84606 - DNA, 384 bp, Homo sapiens
aaaaatcaaaggagttagaaaggcagaaacatatgtgtagtgtgctgcagcataagatggaagaacttaaagaaggcctgcggcaaagagatgagcttattgaggagaagcagcgcatgcagcagaaaatagacaccatgacaaaagaggtgtttgacctccaggagacacttctttggaaagatataatgatcggggacctagagaaacgcactgaatacactgcctgccttatgatcgaccgacatcttcttagataggtcctgtctgttctggcattaacagtcttcgtgtgagagagacttgatttcgcttctcattccgttttggcctctccttcttgttctgcctcttgtcgtcatggcgtctccgtgtctatcgccc

SEQ ID NO: 84607 - DNA, 347 bp, Homo sapiens
taaaactttacaaatgtaaagcatgtagcaaatctttctctcattcctcatgtctttctgtgcatcagataactcatacgggaatgagaccatatatatgtaaggattgaggcatctcctttaaccggtcttcaaaccttagacgacatcagacgattcatactggagagaaaccctacaaatgtacagaatgtggcaaattatttaatcgatgctcaacccttactcgacataagagtattcatactagagaatttctatagctggagtaaatgggaaaagagttttatccaaaatttagaacttagaaatcaccatagagcttatagggaaaccgactttacaag

SEQ ID NO: 84608 - DNA, 412 bp, Homo sapiens
agctcccaaactgtataacgaacaatgcctatgagcattctacatgggggttgctcctctgtggatgagaccgatgccattcgccatgatgaagttcgcctgctttgaacgtactgttgaatcactgtacaagtgtgtggttcctaagccccgcagtgaatgttcaaagccagagcagctggctgtaacatttgctgcaggtttcatagctggagtcttttgtgctattggtactcaccctgctgatactgaggcatctgcgttgaataaagaataaggaagcagtgcttctgtggtgctctatagacttgcatttagaggtgtatggaagggactgtttgcccgcatcatactgaatggaaccctgactgcactacagggggtcatctatgactccgtgaaggtctacttt

SEQ ID NO: 84609 - DNA, 359 bp, Homo sapiens
gcttacgctggcatgcgagctcctgcttctatagctatattgacacgaactatgggccattttgtgagcgcgacgactgatcctgagtcatgaacagtgacgtactctgatcaagtcatgacgaatgttactggctctaatgcaagtgccatgcaggtaacatcatagacagctgtacctgctgcacatacatgatgacatgcaggtgcgcatactgacagagatgcatcaagcgagtacactgactatgctggaattgccaatgcacggagccgggggcctttggggagatgtgcgagaagtgcccaacctgcccggatgcatgcagcaccaagagagattgcgtcgagtgcctgctg

SEQ ID NO: 84610 - DNA, 340 bp, Homo sapiens
tacgcgcgcgagccacgccacctgtttatggctattgagcatctgaacatgctctagatggacatcgttgagaatgcacctgccttcggcggcctgactctcaccaactgactgcctacgagcactgaaccttataactgaaacctactgcgttgagccctgtaaggggtccgactgtctacccattctcgttgatctataagattgctaacggagctcgatgacttagaataggatacacacgtgctaacgttctgcaaggatgtggtagtacagaaacagatggcattcatgctaggccggcatggggtgttcctggagctgagtgaagatgtcgagg

SEQ ID NO: 84611 - DNA, 439 bp, Homo sapiens
cttagaaccctgttgtacctgtaccgaacttctccggtcgacccacgcgtccgcccacgcgtccggcaaagagaaatgatgtccaatccttttttgggtagctatggggtcatcatcttagatgatattcatgaaagaagcattgcaactgatgtgttacttggacttcttaaagatgttttactagcaagaccagaactgacactcataattaactcctcacctcacctgatcagcaaactcaattcttattatggaaacgtgcctgtcatataagtgatacataaacaccctgtggaggctgtgtaccttcacgaagctcagaaggattcttttgattggatggctatgcttacctcttacttacgactgttacgtgatacggggtcattcctcatatttctctgatgatgaccccatgttcagtaggtgccttttt

SEQ ID NO: 84612 - DNA, 367 bp, Homo sapiens
ctgcgctgcattcgaacaggtctcatctttatgcctggaaccatacagatgaaatccactgacatactgcatacgtagcaaatgtctaacgccaaggctattgttactgaggatgaatctatccaagaagtgcacacacagtcatccgaatgaccttacttgagaactaatctactgatggctgagaaaagctgatatggttggctgaacttcaagaaactactaaatgatgtatccaccactcatcactgtgtggcgactgctttccaagaaacatctgccatctactttactagcgggaccagaggtattcccaatatgccacaacattcctactctagcctgggccttactgtcaacatggatg

SEQ ID NO: 84613 - DNA, 372 bp, Homo sapiens
cccacgcgtccgcccacgcgtccgaccacgcgtacgacttcgtgaacgacatcctggactacatcgtgtacgagatcctgcacgtgatctggggcgagttcaggaccaggttggacaccgaggacaacctggtggagatcccgcaggagctcgcaaaggacctgttcaagggcgtgttcaggggcatggtcacggacatggtgaaggtcatcatgaacgtcatcctcatcatgttcaacctcgtgctcaagttcctcatccaggtcatgtggcaggcctgggggccccctgggggcccgcggggtgcatatcacctcatgtttgaactcatgcatgagttctagtactacttctagtactacttccactttt

SEQ ID NO: 84614 - DNA, 333 bp, Homo sapiens
ccttcgttgacctctactacatggtttacatgtcccaatatgattactgccatggtaaaatacatggcaacggtaaggctgaaaacggaaggcttgttgtatatggagatcccattaccatgtttcaggagcgagatccctccaatatcaaatggggcgatgctggcgctgattacgtagtggatgccactggcggcttcaccaccatggcgaacgctggggctcattagcgggggggagccagaaggggcatcatctgtgccccctctgatgacgcctgcaagttcgtcatgggcgcgaaccgtgagaaatatgacatcagtctacagattg

SEQ ID NO: 84615 - DNA, 465 bp, Homo sapiens
  misc_feature (1)...(465): n = a,t,c or g
ntttgaaccctatgtaccggatcgaattcgtggtcgacccacgcgtccgcccacgcgtccgcccacgcgtccgctcaccctgtctccactgtatagccatctggccgataccttggctggcctctctgtgctccgggccacaggggccacctacaggtttgaggaggagaacctgcgactccttgagctaaaccagaggtgccagtttgccaccagtgccacaatgcagtggctggacattcggctacagctcatgggggcggcagtggtcaacgctatcgcaggcatcgctctggtgcagcaccagcagggcctcgctaacccagggctggtgggcttgtcgctgaattaagccctgtccttgaccaacttggcttctggtctttgaaaccaatttatctatttcatgaaccagagcttgtgtatgctatccaccgtcttagtgcatataacactcggttgttt

SEQ ID NO: 84616 - DNA, 364 bp, Homo sapiens
ggcacgaggagaagttgttcacgaagtagacactcaagccgaacatcagacagaagatgcagcaggtctcgggaccacaaagggtcacgaagtagagaaagaaggcggagcagaagttgagatcgacgaagaagcagaagccatgattgatcagatagaaaacacagatctcgaagccgggatacactatactctacactgggggagtcgtacggcatatcagtttgaatcttttgctttattgctgttagcctctgtactcgtcgcataatcgcctctctactcctatccttgtcaatcgcttgtatacacgatatattgtgcattctcttcttcttcatgttccgttctcgcgctatacagc

SEQ ID NO: 84617 - DNA, 374 bp, Homo sapiens
ggcacgaggacaaatacttctgtcagaccatactgattcattgaaggagataggggcattcacaggaccaggcatggagataatcatcccaggtctctttcaaccaatataaacctttctgacatacaaaccgaaatcaaactaatgcctccttatccaatttacatgtgcgaactggggtcagacaaaggagtcacatcagcattacctgctgactggaaagaagctggccagatttcttctgctcaccaacgactggaaccatgaactctgccacggattgcaggatgaatacttaaaccttcatgagcagctctgagttcaattccacgatttcatgctctagaaagtctcctgcagaacgaaggggatga

SEQ ID NO: 84618 - DNA, 377 bp, Homo sapiens
ggcacgaggatattatgacacactacgacagactggtggacgaataggccctaaatgctgggaaacaaaggtatgagaagatgatcagtggtatgtacctgggtgaaatcgtccgcaacatcttaatcgactttaccaagaagggattcctcttacgagggcagatttctgagatgctgaagacccgtggcatttttttaacctttcttctttctaacttcttgattgtatgtgtattactgttttatgtttcattttatctttttcaatcttgtattaattttgttctctagactatttttgtttcttattataatttatgatctatttctttatttttcttatttatgttttgtagtagtcttctcttccaatcg

SEQ ID NO: 84619 - DNA, 340 bp, Homo sapiens
  misc_feature (1)...(340): n = a,t,c or g
ggcacgagaccatggctgaccgtcaatgcatatttaacccatgatactgctgagtgtaaggacctgaacctgaatctagtgctacacgctgttatggaatctgaattgacgtttgcctctgaccatgatggactcattgatgccggaggctatgcacaccttacctatgatggatggctgaccacaggcctcagtgcttactgtggagggctgaggctggcatctgtggctgtgatgggccagatggttgctctgcgctggtcacatgacttacaagataagctgtcttctatcctacaacgtgaccattaaccctatganagactgctgtggaatgtcn

SEQ ID NO: 84620 - DNA, 344 bp, Homo sapiens
  misc_feature (1)...(344): n = a,t,c or g
gggtcttcgggagctggggcagactcttgaggggcaaaggggggaggtgtgagatgggaaagtcctgactcatccacgcttgactcagctcgccctgcggcggggtgggagagagggggtggtnntttttttttgttgggtttggttttggtggtgtggtttttgtttggtgtgctctttcgtcttgggcccctttcgggtcttcttttgctgcgggcctgtctttctctctctcctttttcttgttgtttctgttggggtcctctttgttcgtctgcttctttgtttctcttgtggtgttctcgtgtggcttgtgcgtttctctttctcggttttggcgtgcg

SEQ ID NO: 84621 - DNA, 386 bp, Homo sapiens
agaagaataactcacaggccaggctgactatgaagaggcgattaaagagctgaacattctgaagtccatggagtatgggccattctagggcgctgggacacaggatgcggtcaagcccctggatgtgctgttgctggagaagaaccgctcgctgcactgcgagaactccgcgctgcgcatgtccaacagcgacctgagcggacgctgtgctgagctgcaaggccgtatcactgatgcatgggccacagtcactgagcagagagatctgatcgcccgcctggagcatgacctgaacatcattcagtgcatccagcgagccgatgccaacggtgccactgagcaccgactggagaaaattccagaagccatcaaagatgccactgccc

SEQ ID NO: 84622 - DNA, 458 bp, Homo sapiens
  misc_feature (1)...(458): n = a,t,c or g
ctgctttggaggggatgtcctgagcttccaggccagcccaggaaggagcctcccaggccacggggcgggtccccagccctcatgtccccccagggggcctggctgtagccctcatccccatggccctggctggggaggtagagactgccacatcttggagcccaccccttgagtcctggtagctccaggcttacccggctcctgcccctgcccaggctgcaactgcgagtccgacttcacggatggcacctgcgaggacctgacgggtcgatgctactgccggcccaacttctctggggagcggtgtgacgtgtgtgccgagggcttcacgggcttcccaagctgctaccgtgagcacctgccaggggcatccaaacagacaccactgcctgctggactccgggagccctgcanggggtggaggggttccccgggatggaccgtgttatcctgcctgn

SEQ ID NO: 84623 - DNA, 438 bp, Homo sapiens
  misc_feature (1)...(438): n = a,t,c or g
atggaacataaaatatagacctgtatgcatgcatcttgctggacccggagatcatcattactggagtcgacgaacgctaatggcccgtcctatgattaacgaagccccagtggcttatttattggtagaaaaccctaattgatgacgtcatactattcacagaagaagaaatgatactggtgcacagatataaagatatgtccaacgttgctggaaacccaacgaccaagtaaggtccatcttaaaaaacgtgtccgacctttttgtgatgggaggagctcttgtttcataatctgcagctttcttgcactggctagagagggaaggtcacggccctttacgaatgactggaatatccatgggaggacacatggattgcttagacggatccaactggcctatgcccatgccattgattccatgcctgtcttggtcccn

SEQ ID NO: 84624 - DNA, 426 bp, Homo sapiens
gaggaaactcagagaccctctttcggagcactgagtgaattcgttcctgtctctacccatcagctggaacccagcacccgtgcccccttcaccgaaattacccagcacctggaatggatcctggagcagctgcctgagccagccccactcaccaggaccgccctgacacacaatcagggtaagggagcctgaccttgatccagcttgagtcctttggcctttgtcctccctagaattcagaggtgacatgggggaggctaagtatatttattagttgaaaaggctgggggtcgggctggggtaaggtgggaggacatctccaagaagacagattcctaatgctaaagcttgagggagaggaggggaaagaagtaaaaggggcctggagatgacatcactcctttccaaagcaccaggtgggactcg

SEQ ID NO: 84625 - DNA, 384 bp, Homo sapiens
  misc_feature (1)...(384): n = a,t,c or g
agattgctgagagagagcgtttttagcgagaacgcattataataattcgtgaacgggaagaactggaacgcgtacagagagagagagagcgcgtagaaattgaaaggctcaaactatagagagagataatggaacgcgaacgcttggaaagggaactcattcgaattgaacaggaacgtcgtaaggaaactgaacggattgctagagaaagagaggatctctaaaggttgcaacagcagcttcgttatgaacattaaaaaaggaattccttgaaacgcccacgtcatgtagattatacttagatactccatttattactttacagataaccttgctattttattagtgttaggctaagtcttgagctatgtaaggtacaaggtn

SEQ ID NO: 84626 - DNA, 397 bp, Homo sapiens
aaataattcatgctggatataaactctacaaatgtttataatgtggtgaaggggttaatcgatcctcagaacttactacacataagacaagccatactggagagaaaccttacaagtgtgaagaatgtgtcaaagcatttatttggtcctcaacccttactgagcataagaaaattcatactacaaagaaaccctacaagtgtgaagaatgtggcaaagcatttatttgggcctcaacactaactagacataagaggatgcacactggagagaaaccctacaaatgtgaataatgtggcaaagcttttagccaggcctctacccttactacacataagataaatcatactggagagaaacgctacaaatgcttataatgtggccaagctcttaagct

SEQ ID NO: 84627 - DNA, 342 bp, Homo sapiens
gcgcagaactccaaccatgtggaatctgagggcctagccttctaaaacatactctaacatgctgcaggagtctcttggacaaaaggaaagccttctatctgtgacttcagcagatccagcttttcaagtgccaatttcaaaggcagctcaacttactacgaatgatgccatagaaaccactctggtgtttgaattggacatttcaaatacagacttttcctatcagcctggagatgccttcaacgtgatctgccctaacagagattatgaggtacaaagcctactccaaagactgcagcttgaagataaaagaaaacactgcgtccttttgaaaataaaggc

SEQ ID NO: 84628 - DNA, 393 bp, Homo sapiens
  misc_feature (1)...(393): n = a,t,c or g
acaaaaactttcttctttgttttcttctagaagctttgtagttttggcttttatattttatatgagctatctgaaattaatttttgtatatggtttcaggtagagttaaggaaggtttgtttattatctgccccatgtggattcccagtatcatttgttgaaaatacttgcctttccacattaaattactttggtgccacttttaaatgccagttggctttttcaatgtgggcttatttctagactttctattatattccattgagttatgtatttattcctgtgccaagaccaactcttgattactcaggctgtggagtaagctgtttcgtttttctggatcctttgcattttcatgtaaatattagaaacagcttgtccattttcattttn

SEQ ID NO: 84629 - DNA, 402 bp, Homo sapiens
gcttacgaacacaagatgccctatgcgtctgttggtctgcttggcggcacttatttcgcgctcgaggttatggagcaggagatttatataggaggagtgccaactgagctacttgtacattctcatgcgagcctttattgatgagactgctgatgccgaaaagatcaaggtgccaaacgcacggactcagcttggagcgagtgagtttcgctcactgactgtgactcatgattcgagagtaccctggagcttcatactagtggctattctcgctgggatcttgatgcttgctttattagtgtttatactatggaagtgtggattctttaaacgctctaggtacgatgacagtgttccccgataccatgctgtaaggatccggaaagaagagcgagagatcaa

SEQ ID NO: 84630 - DNA, 171 bp, Homo sapiens; identical to SEQ ID NO: 67894

SEQ ID NO: 84631 - DNA, 389 bp, Homo sapiens
ctggcatcataatgttctcagtcacccacatcagaaatccaagaatcccaagtcctgacattttcctacttcccatgcccaatcaaccaccaaatccagctctttcaaattcccctttctttctctattcgatgctgcttctagccaaattctaattctcctcgctctcccccatataattacaaaatgcatctttccctccttcaatattgctctagttcattctctatacttcctccagtgtaatacacataaaatgccaatgacttccagctgataacacctcagtgcttcctgctcaccttcctttcacacatatgcataacttcttactttctcacatgattaaccatcatgtcactgatgcttgccctcctgtttactatcat

SEQ ID NO: 84632 - DNA, 589 bp, Homo sapiens
gcaattaaccgtggataaaatttgaaggtactgacggttaaggtcaatatttctgatggagtgaaggatgaattctgtaggtggtgcatccaaaacaggtggagaccacgtagctttgcaaggccagagttaatgaaaatcttatataattcactgaatgattcctttaaacgccttatttatcctcttctctgtagagaattcagagccaaactaacatcagatgcagagaaggaatcagtaatgatgtttggacggaaccttcgtcagctccttttaacaagccctgttccagggcgcaccttaatgggagtggatcctggttataaacatggttgcaaattagctataatttctcctactagtcagatacttcatactgatgtggtttacttgcattgcggacaaggcttccgagaggcggacaaaatatagacacttttgctgaatttcaactgcagcacagtagtgattgtaaatggaactgcctgcagggaaacagaaacttactttgctgacctgataatgaagaattattttgcaccactggatgttgtttactagatcgccagggaaacaggagcatcat

SEQ ID NO: 84633 - DNA, 392 bp, Homo sapiens
ctggagagaaaccctatgaatgcaagcaatgcgggaaagcctttacatgtggctcacaccttcaaacgcgtgcaaggactcacactgcagagataccctatgaatgttcgcagtgtgggacagccttcacatgcacactagaccttccaaggcatgaaaagacacacactgaggataagccctatggatgacagcagcgagggaaaggctctatatgtgcttcacagcttcaaattcatgaatggacgcacagtgcagagacaccccatgaatgtaaggaatgtggaaaaggattcaagtatttttcttccttgcgtatacatgaaaggacgcacactggccagaagccccatgaatgtaagcggtgtggaaaagcattcaggtatttctcc

SEQ ID NO: 84634 - DNA, 420 bp, Homo sapiens
gcgattgtggaggacaaacacagtggcaggagttatgacataacctcagatcttgggaatgttctcacttctacttcgatcgccaaaaccgttaatggttaagctgaaagcagtgacagtggagccgagtctgatgaagaagatgcccaagaagatttgatgggagcatatcatagtgatattgataagaaaatgatgaagatagtagcagaccataagaatttggaagtcattgttactaatggctatgataaagatggctttgttcatgatatacagaatgacattcatgccagttcttccctgaatggcagaagcactgtacatgtaaagcccattgatgaaaacttggggcaaactggaaaatctgctgtttgcattcaccaagatataaatgatgatcatgttgaagatgttact

SEQ ID NO: 84635 - DNA, 418 bp, Homo sapiens
cttctgcaacaacaccaagatagagagcaagcaagaaaccaaaactctatgtatatgcgtcagctcagcgatctggaatctactgtttctcagctacgttctgaattaagggaagccaaaaggatgtatgaagacaagacagaagagctggaaaagcagttagtccttgccaactcagagctaactgaagcccggacagagcgtgatcaattcagtcaggaatctggaaatttagatgatcaacttcaaaagctgttggctgatctacacaaaagggagaaggagctgagtctgtagaaggagcagaataagcgtctgtgggaccgagacacaggcaacagcatcaccattgaccacctgcggcgggaactggacaaccggaacatggaggtgcagcgcctggaagccctgctcaggg

SEQ ID NO: 84636 - DNA, 539 bp, Homo sapiens
aaaatgttttattttaacaaaatgctcatatatctgttattgggcaaaggtggagggtgggcaagctggctgaggtgtcccaggtctgtggctgcctagctgggtgaggggctggtgagcagctgctccagacaccactggacttcctccaggccccggtaggcccgcttcagaccccggggaaggcagcggcaggactccaggttgaggtagagcaggcccgggcagctgctgatcacagagctgacagtgcttggtgtgacccgggtgcccctgaggttaagagagcacagggctgggtgtgagcccccaggggtgcttaagaaggcagccagggcctgctccaggtccttctcactgaacccctggccactcaagtccagttctcgcagtgtatggcaccacttctgggtcaaaaaggggctgccctccttggctagagtcagccggtctgacgtgccatacaggcccagatgaagctgctccagctcccgacatggcagatcctgaaggccagccggcgtgatgcgcctcgtgcc

SEQ ID NO: 84637 - DNA, 283 bp, Homo sapiens
tggcacactgatgctttgttcaatttttcagtctttttcctctttttgtttcagtttggttagttgttattactattcaagtttacacatcttttctgtagtatctagtatgctgtcactgctataagtatagttttcatttctagaagtttgatttgggtcctttttatatcttctgtgtttctacttaccatgtgcccagtctttcctgtaggtttttgaacatatggaatacaggtataacaactgttttaatgggcttgagtattaattctatcatctg

SEQ ID NO: 84638 - DNA, 413 bp, Homo sapiens
catttaaaagctttaagaccggatttcaatgctgcacgactctctagccctgaaaggcggaacacactaccattccctagaaggaagaggaaccaccccgtagatgaaaaacaaccatggctacatctcaactgctgccatgaacatggctttcctatctggggaaacaaagactaacgtgatggaaaagatcgtgaatgtcctatgtgtaggtctgctggtccctatgttcctctgtggcttggatgtgaagctggattttatgtggacgccggccctccaacccatgcgtttagcccgtgtgggaatgtgtgttcagaaaagacaactgcctattggtcccagatcccacttcctcatggtactcatacttttcatgcagcctgtcccttttgtgcacatcagttggctgg

SEQ ID NO: 84639 - DNA, 406 bp, Homo sapiens
  misc_feature (1)...(406): n = a,t,c or g
ggcacgaggtttaatcaactctgtcttatatcaaaattataaaagtattaccctgtattttcttataaaagttttgaatcttttctttttccacttagatcattaatcaacttggaattggtgttacatagtggtaaatgattgtcccaggaccacatattgaatattttatcatttctccactgatttgtaacaacacagcggttatatatcctgtttatacatgggtctgtctctaggtttccggttctgttccagaggtctgtttgcttacccttctactaatagcacattggcctaattactataactttataatgtggctcaatctctggaaaaccacatacctctcccctcctctttctacaatattcttatattttgcaactggcctttacttgtttgn

SEQ ID NO: 84640 - DNA, 169 bp, Homo sapiens
  misc_feature (1)...(169): n = a,t,c or g
tggacaacatgctggaaccaagggctatcatgccttgcttcaagggatggaaagacacccgtaaggatggcaaggccaaaggaaccaccctgcttgaggctctgaactgaatcctaccaccaactcggccaactgacaagcccttgcacctgcctttccaggataaaan

SEQ ID NO: 84641 - DNA, 375 bp, Homo sapiens
cccagcacctcggggtcgtagagaacacaaaagtcacacaaccctcgccgaggcttgacccccgcgacagagtttagtcattccgttagctggctccacccgccctcctgggcgtggggactcgatttcttgggaggctgcgccttcctacttgtgggacagccaggcttggaggttggaaaggtcgcaggcacacgggtgtgaccgagtggtagagggcgtggctgttccgggtcggagctgcaggtgtcggtccaggtccaggcgctggggtcaccagggcagagagcggcagtggtggcgcggctgggggcctggttcagggagggggacagctgaagaaggtgtgaggtgaggaaagcaatcgaggaaaag

SEQ ID NO: 84642 - DNA, 396 bp, Homo sapiens
aagcaacaagccgtccctgagccacattcctctacgacgactccacaggaacaggagcagaattggtatggacaggacttgcttaatttgcaacagaggacaaaagtccatttgccaggacacaaaacgggtcctgcggtagcaaaggatacaccagagccggtaaaaaaagaatttactgtacctgccaccagtcaaggcccataatctcctttttctgaggagcccccattgccaccttcaaatgaggaagtgccacctactctcccaccttaggaaccccagtctgaggacccataaaaaaatgcctagttaaagcaaatgcatgctgctacaacacactgtcagcagcaccagcaacatcaagtcggctgccagtatcatggaataatgcag

SEQ ID NO: 84643 - DNA, 401 bp, Homo sapiens
cattacagtaattattctccccctgtttccacagggtgagaaaaaagaaacctggatttacctctgggttgagaatttctagcgttgatttcttataatgattcatgttctccacgcctaaattggacactgtgaggaagccaaatcggatccgagagtctttttctaatggccagtactggccacactttctcctgccgccttcctcaaagctgtagactcacagagcccggcgcttctgtgttactccccaatggcaactccaaaccatagatggatagctccctgctcatctttccacatccctgctattcagtatagtccgtggaccaatcacaccagcatcgtatggcagagcgttagaaacatgaatctgcatgtcaacgagatccccacgtgag

SEQ ID NO: 84644 - DNA, 667 bp, Homo sapiens
  misc_feature (1)...(667): n = a,t,c or g
ttttttttttttgtaaccatgatggtctttttaacaagcaagtgactggactgtttgcaaaggaaagaaaacattttccaaggatagtaagtattctacgaattcctagccagcttttgtcttcttgaaaattatcaccataaggaaagaattaaattacactggcatttataagggattaggcacaccaggtaccctatgcttcaatcctgtcctttcatcttccttccatttctctgtcttgggacatggtaatttggaggtgagaccaccctttcttgtccctgacaaagaatcctgtcatctgcagaatctctattcttccagctggctcctagcagggtagggagagacacagaaagagagagtcaccgttccacttcagatgctgcaagttgctgtagaggagctgccccgccgtcccagccgcccgggtgaactcctgcaaactcatgctgcagaggtgctcgccgttgatgtcgaactcttggaaagggatacaattggcatccagctggttggtgtccaggaagtgctggagccactcccacacctggtactttgtccagtactgaagatgaatntcatgcgactggcctgcaagaaacccactggaaacattgcacgtggagtagctgtctgttcaggctgggcgctgtggagggag

SEQ ID NO: 84645 - DNA, 396 bp, Homo sapiens
ctccctccttctccctcctcttccctccctccttctccctccttctccctcctcttgcctccctccttctccctcctcttccctccttctccctccttttccctccctccttctccctccttttacctccctccttctccctccttctccctccgtccttctccctcctcctgcctccccccttctccctcctcttccctccatctatcttcctccttcttcatcctactacgtccctctttatacagcccccgtcctccttctccctgctccctccttcctcttacctgattacagtacaagcccatctcttgtttggacttaaacccactctttgaaaatttcaaaaggccttctgaaaaaagtttgggactccttcgcccaaacttggcagcg

SEQ ID NO: 84646 - DNA, 163 bp, Homo sapiens
  misc_feature (1)...(163): n = a,t,c or g
tgggcnntcaactcccactggctggtgcgggaccttcgagggaagagcgagaaggagtttacagcctatgtgtccctcttcatgcggcacctgtgtgagccggnggcggatggtgcatagaccttncgnacnggcgtgccccgggaggggcctctcaaagcaa

SEQ ID NO: 84647 - DNA, 372 bp, Homo sapiens
cccaatcgtggcagagaagctggtcaactacctgctcattgacctcaaccttgacaacatcggccacaccatggtgctcttcaaggccggcttgatgggcctgctgctggaaatgatggacgaaaggctgaaccacatgatgacccgtatcctcgcccattcccaaggccagctccccagagtgcactccaaaaagctgttggaacgtatagactccctgctagacttcctgcggaacattcaggccttcatgggggcctagaagggggcctggatgaagccctacttgaagatctaccccctgatgaagacggcgcaaagaaagacggaaagggcctccgtgatggcctagtttacacacctgttaaaagc

SEQ ID NO: 84648 - DNA, 373 bp, Homo sapiens
ctaaccggagggttcaaactgaagtgatatttgccccaaaccctctgagcattattagaactgcggggtgattaggccaaagcgaaataacgatgtgccctggctcctgtaattactgcagaaaagtatcttattttggtcctcactttaaacagggaggatctctgccttacttggcaaaaggtcaaagtaacatactgaaataaaatgaacgccggctcctaaattcagaaagatccaccggacattcttttgcactggtaggtggtttaaggtacagcaccttatccttaattttggaggggctatccacacttgctccaaaccattattcccccgaaaacttgactgaggtggcatgcccctaaatgtg

SEQ ID NO: 84649 - DNA, 379 bp, Homo sapiens
actccaaatgggtcgcaggcgcagccgctcttcacggagggaacgtaagcgttcccggtccacatcccgggagagagaacgctggcgccgagaaagggcctggtctcgggagagagatcggataaggagccggtcgcgatccccgcaccgaagacgctcccgatctccaagacgacattgatccacatttccttccccttctcgactgagcgaaggaagagatgaggactggaaagatgcaaacgacccctctagcgtagaacggcggattactgtggaagacttaaagggccaaacagaggaagaaatagaaatgatgacagtaatgggatttgcctcctttgactccacaaaaggtaagaaggtggatggctctgta

SEQ ID NO: 84650 - DNA, 343 bp, Homo sapiens
cgctcttccaccaggtaagctttatgtttgtcgtggagacgcggttgtgctatacagacggctgtggcattgaggtcttgatctagtgatccacttgcatcaagctgggcatgcaggggtagtacttctgctcgcaggaatgttttaaaggaagatgggctactcacaagttactacataagaaagcaagtaagtacaatcacacatttttacaccatttgtcttataagtggcatttgtgccagaaaacaagaattcttctagttctgaaagtgtatatttgaatgttctgaaagtataatcctgaatactagaattatgacatattttaaatttttggggg

SEQ ID NO: 84651 - DNA, 639 bp, Homo sapiens
tcatcccttccacaacacctgccagggcaggacaggttcctaaaccgcgtgtaagatgtgttcgtccaaactgcctgaccacaggaccctgctctgcctcttttctctgtcgtactcggggcctggtggccccccccagagtgttattatctaccacatctgtcatttacccgtctcacccaccaaatggcaagctctgcgaggcagttttagtcactgttgtaccccaagcacgtaggccagtggctacaattgactgatggagattttgcatgaggaaatggacacggtagcaggctgccctgctggggtactctgccgtgaagccgggtccatctggatgaatgaactcactgtgctctgtgttgctctgcagtttgagatgctcacggggtccctgccgttccaggggaaggacaggaaggagaccatggctctcatcctcaagtgagtagtgtgggagccaccccagagacctgcgagcaccttctgatatcaagagctgctgcctctgaacctggaactgtgaagttttaattacattgctaggcttacagtgccaaagtattgtaagctgttttctaaaagtcactggttttacacaaaatggtagcgctcttccaccagtagcagtggtaa

SEQ ID NO: 84652 - DNA, 351 bp, Homo sapiens
ccacttgttttctctgctgtccagatttttcagtcattgctcggggtgtaaaaattttagtcagggtctagagcacacaatccttaaccacttatgctggttttgaatatttcagttccttagtcatttttcttttcagaaatatgaaagcaaatcacgtttttggtaaaactcctttctttctatagagagaaatagcccggtaacttgccaatactaagcaaccaacaaatccttttctagagatggtcaaatttctgttggaaagaatcgcacctgtgcacattgattcagaagccataagtgcactagtgaaattgatgaataagtcaatagaggggacagcagatg

SEQ ID NO: 84653 - DNA, 536 bp, Homo sapiens
aggaagtgaacagtgcagaagagctagaaggtcttattgctgatcctgatgagatgagaatgcaggcactattaatcagagaacgtattcttggtccttctcatcctgatacctcttactatattagatatagaggcgctgtctatgcagactctggaaatttcaaacgatgcatcaacctatggaagtatgctttggatatgcagcagagcaatttggatcctttaggcccaatgaccgccagcagcttattatcttttgcagaactattctcctttatgctacaggatagggctaaaggcctgctgggtactactgttacatttgatgatcttatgggcatactttgcaaaagcgtccttgaaataaagcgagctatcaaacaaactcagtgtccagctgacccattacagttaaataaggccctttctattatttcgcactgaatttgcttgttagagaaagttacttgcactctataacaagaccatttcgaagagcagactatatacaggtttcttaagctgcatactagg

SEQ ID NO: 84654 - DNA, 212 bp, Homo sapiens
gtcctccccaggatcctcgtggacccctaagggaggcgtttccgtaccaatccagtcgtagccggaaccacttgaattactacgaggcaaaacgagcgtgtgaagagtaggacggacgcctggccacctactcccagctctaccaggcttggaccgaaggtctggactgttgtaacgcggactggctgctcaaatgtacagggcgccgccat

SEQ ID NO: 84655 - DNA, 388 bp, Homo sapiens
  misc_feature (1)...(388): n = a,t,c or g
cccacgcgtccgcccacgcgtacgcggacgcgtgggtgcctcattaatgggccatagtcccaattcatccgtttgagtccttgctgactcaaatacctgaaggaactaaatggtttatagccctagatttaaaggatgcctttttctgcataccgtaacatcctgactctcaatacctgtttgcctgtaaggatccctccggccaaaccacacagttaacatggatggcgctgcctcaaggatttcaaaacagccctcacttatttggacaagcactgtcaaaggacccctctaagttttcccgtcctcaggtcatggtcttgcagtatgtagataacactttcctctatgccccaatcaaggaaggctcaggatgatgctacaactn

SEQ ID NO: 84656 - DNA, 340 bp, Homo sapiens
  misc_feature (1)...(340): n = a,t,c or g
gtgactgaagcacccattgctgtagtaacatcacgaaccagtgaagtctatgtttggggtggcggaaaatcccttccccccatactctgtgataatctgagaaggtgtcatgcccagaacctttgtgcagagaatacccacctttctgaacacctcccggacaaggtacacaaccctattttcaacatggtcccacgcacttaacaccctggctaggaggaatcctgagactgaggcttttcttggccgcctgggcatatttctaactctttaggcnnaattctgcatgaggaggtcctgaaagaatacctggccactggggcttatgatgatggaaact

SEQ ID NO: 84657 - DNA, 359 bp, Homo sapiens
gttcctgcccctcctgaaaaggtggctgcagagaggctggagctgatggggaaagaggtgccacgaggcctcctctgggttagggccacacggctcccaaggcccccgtctccttctctggggtgacaggtgcccccagggccacacggctcccaaggcctccgtctccctctctggggtgacaggtgcccccagggccacacggctcccaaggcctccgtctccttctctgggatgacaggtgcccagggccacacggctcccaaggcccccgtccccttctctggggtgacaggtgccccctgtgtcccagaggcttctgcttggccaccagtgaggtcaccgggctgcccagacca

SEQ ID NO: 84658 - DNA, 381 bp, Homo sapiens
ggcacgagtggaggtccaaaacgtgttctcgtgactgagcggtttccttggcagaatccattacctgtaaatagaggccaggctcagcgggtcttgggtccttcaaattctttccagcgcgttcctttgcaagcacaaaagcttgtctccagtcacaagccgggtcagaatcagaagcataagcaattgcaggcaaccagtgtacctcatcctgtctgcatgccactgaataacacccaaaagagcaagcagcccctgccatcggcacctgaaaataatcctgaggaggaactggcttcagatccgaacaatgaagaatcattatagaggccgtgggctttggaagactttgaaattgggcgccctctgggtaaaggaaag

SEQ ID NO: 84659 - DNA, 288 bp, Homo sapiens
ggcacgaggctttttgagcaggccgtggagtacaaattcctgaatgcgctattaggtcgttgcaccaagaagggaccccatgtgggaactccaactcttggtgagggttcctgaaaccttggaaaagtgggcaggaaatgttgtaaacatcctggatcaaaaagaatgccctgagcctaagactatctattctgggcactgaaccagttatgagtgttgtctgacaaaacgcctttcattgacagaatcaccaaaagctgcacagaatccttgctgaacaggctaaca

SEQ ID NO: 84660 - DNA, 402 bp, Homo sapiens
cttcctgggtatcaaggccccacactctgggcaggcacccaattccccagctcatcttccacctctcgccctggctcccagcacccctctccccaggaccctctaaggagacatcttccctgtcaggcccctccactgtctcccagttttgtggcttctcaccctttcgtgtctcagcctctggatacctccctacccacgcccacccgcccccgcaccccggcatcacggcagtctgtgcacttggaaccatgacgccacatgcgttctctctgctcaacaggagcgacaggagccccaggagggcagggctgccctggctcccttaccactaactccccaaaacctccacggaggctcccgagcagggcggccttagtcattctccacagaggagcgcca

SEQ ID NO: 84661 - DNA, 367 bp, Homo sapiens
ctgtgaggattcttcactccctggcaggtctttcctatgccgtgcccctcatccagccaaacctgcggtgagaggaggccgtccagcaaatggcggatgccctgcagtacctgcagaaggtctctggagacatcttcagcagtgattcgcctttgccagtctcatctcgtgtctgctttgttaagttccatgatccaaactcagcagttgtggcacagcatctgacaaacactgtattcgttgacagagctttgatagtcgtaccatatgcagaagtatttcatggttctatcaaagcagcagtaaaaaaatactcttgacgcatgaaaattaactgttcttttccctggttcagcctgaactatat

SEQ ID NO: 84662 - DNA, 387 bp, Homo sapiens
tgaataatcaggaggtgagttctctccaatgatctgttcttcagaatatatgacaggaaagaaacttcctcctggaggaagtttctttcctgtcatatattctgaataaccaggaaaaaaacttcctccaggagaaatacctggcattgacctttcaaatcccaaacaactggcagaatttgctaaaaagaagcctatagaaataagcgaagaggaaactccatgaacaataactggccctcataaagaaagtaatgctagagggagagtgtgcattaaactgttgataaagttttacagagttataacaaatgtgcacttatgcatctgctggagataatttaaatgaagcaaggaactagaatcttccgtttctaaattccaaag

SEQ ID NO: 84663 - DNA, 352 bp, Homo sapiens
cccctgcacgccctctatgacaatgtggagaaactcttcacagtttctatcacaaaacctggaaagagcttcttcacgttgctatatagggcgggcaggggtacatgccggctgtgatactaagggaaagcttttttctcgttatgagatattgaactgcgaatagcaacgctgacgatcctttgtaataatgctcgagagacacggtagatgacccatctaaggattgtgtgactttgatgagggagcttggactcctactggcttgctgacactttgttgatgctgttgaaagaagccattgtgcagtactctctacatatatttagagcagtcatgctatacatgaacg

SEQ ID NO: 84664 - DNA, 385 bp, Homo sapiens
ttacctacttatggctatgagggaaccctcccttttatgaaaagaatgatggcggcctctttgagctgattttgagggccaaggacgagtttaactctccttactgggacgacatgtctgactctgccaaacatttcatccggcccttgacggggagggacccctagaaaccattcccctgtgaccagcccttgcagcacccatggattgagggacatacctgtctagataataatatccaccaggccgcgagcgagccaatcaacaataactttgccgagagcaagaggaatctagcattccttgccacgggtgtggtgcggcacatgaggaaactgtttatgggcgccaacctagaggggcctgggcccacggtgagccatgg

SEQ ID NO: 84665 - DNA, 398 bp, Homo sapiens
ggcacgacgagcaaacaccactagcttgcccggagtttaataagaggaccttttgaccacgatctgaaacccaatgctgccacgagagatcagttaaatattattgtgagttatccaccaaccaagcaacttacatatgaagaacaagatcttggttggaagtttagatattatcttacgaatcaagaaaaagccttgacaaaattcttgaaatgggttaattgggatctacctcaagaggccaaacaggccttggaacttctgggaaaatggaagccgatggatgtaaaggactccttggagctgttatcctctcattacaccaacccaactgtgaggcgttatgctgttgcccggttgcgacaggccgatgatgaggatttgttgatgtacctatt

SEQ ID NO: 84666 - DNA, 350 bp, Homo sapiens
gggggcacgaggagctcctgcctagaaaacctttgaagaacctcacggaacaaaaattgatgggcgatctatttccctgtactatactgcagagaaaggtcaccctcctaactataaaggtggaaagaatagcacttttagtgccgaaacaaaaacactggttttaagcatcctcttctaccgggcctccgaacaaactcttcaggaaggatttgagaaatcaacttttatcaaagtaccccagaaccataatggctgatttaaagggactccctttatatagcttgcttcattcgcagacgctgaagaagctttaaattcctgttatcaaagggaaattgagggcggat

SEQ ID NO: 84667 - DNA, 459 bp, Homo sapiens; identical to SEQ ID NO: 67716

SEQ ID NO: 84668 - DNA, 970 bp, Homo sapiens
gtggatgtatgcacgcctcttcaaaataagaaaagtaagggctggggagccgtccttgaataaacatcccaaggtaggaaataagggaaactaatagtgagatattaatggggcggggtaaggactgaattaaggaagttcggataaaaaaaccctttaacctccgcccgaggccccacccctaggtcaaggttagcccttgcccccctaaggcaggagggtttcctgttttagggacacccacgctttggtgttaaaaaaaaaaaaaagatctgcttatactcctcttctatgctccttcactagctcattaggtataagtgagctggtgaccaggtccctgaaaccatcacagagtggaaggccagcgcattctgcttgtctggaaccacagggtttggcctctctcctatcgtgtctcttcaagccttccagcctttcttcctagaactcacccttccttattctgtggtgcgaggagaagccttcacactcaaagccactgtgtttaactgcttgtccacctgcattcgggtcgttgtgcagctggaggtctcttccgctttcctggctgttccaacagagaagaatgaagaatctcactgtgtctgtagaaatgggcggaaaaccgtgtcctgggttgtgactccgaagtcactgggtgagtagtaatgctattagcaaattccacttcgtgtgcttggatgatttgttttctgcactgaccccaatacacactttttctcctcctttaatattaatcaagaggaagacaaccactggatacactggggaaacctcctccaaatctaaggacatttgatgaaaaacattgtcctgccccactggctgctctgaaaagccgtctttgcattgtgcgtcgtcagcctccttgctcgccgcagccgcctccgccgccgcggactccggcagcattccacaacgctgctctatggtctcgattccccct

SEQ ID NO: 84669 - DNA, 459 bp, Homo sapiens
  misc_feature (1)...(459): n = a,t,c or g
naatgaataccgtcagcctagcaagngcgnggaaancgaaaacaactttaagtacttccctaatttcatgtaattttctagcattaattcactttatcattgtcataagtataaacggctcattaaaccaggagggaacacaatacttttatggatttctgctctcatgttaatgctgttttcctttcctcatgagtaatctcttgatggtttttgtctctacagaacagggataactacatccgttcctgcagattgctccctgatggtcgcaccctaattgttggaggggaagccaggactttgtccatttgggacctggcggctccaacctcacgcatcaaggcagagctgacattctcggcccccgcctgctatgccttggccatcagcctcgattcctaggactgcttctcatgctgcagtgacggcaacatctctgtgtgggatctgcacaac

SEQ ID NO: 84670 - DNA, 375 bp, Homo sapiens
cccacgcgtccgaataatataaaaaaaatttaatacaaaaaagtgaacaaaaaaaataaaatgaggattcagatggaaaaatatcaaaaagcgttttggaaccctaacaggcgagctgcatatgattggcctggataaaggtcataggggtttgggcctaattcttgctgggaacaaagaccgatccacgatgagtgtcttcataggggggattgatccaaatggagctgcaggaaaagatggtctattgcgaattgcagatgagcttctaaagatcaatggtcagattttatatggaagaaggcatcagaatgcctcatcaatcattaaatgtgccccttctaaagtgaaaatagtttttatcagaaataacgg

SEQ ID NO: 84671 - DNA, 360 bp, Homo sapiens
cccacgcgtccgataaatcccacttggacatggtgtataatccctttaatgtgctgttgaattctgttgaggatttttacaaaaatattcataaaggatattgatctatagttttcttttctcatctatatgtcttcatctggctttgatagcagagtaatactggcttcacagaatgagtatggaattgttcctgcctcttcaattttttggaagagtttgagggagactggttttgattatactttaaatgtttggtagaattcacccgtgaagtcatgtaatcgtgagcttttctttgttgggaggtgttttgttttgttaattttaaaaataatggtggccgggcacagtggctca

SEQ ID NO: 84672 - DNA, 338 bp, Homo sapiens
caacatgcatatgatgacatggacatgaacgaatgtgaacaggccacgaaagaagataatgaaacctcatcatagatggtcagagaaatatctggagttgactgacaaagtatatgtgaacatgaaacttctgatgccttgaaatctgttcaagataggtggaaaaggtgtccaaccccataaatactgaaactgtcagccggagatgtgccccatacatctgtgacaggggattcaggttcaggcaagccatttatgattaaaggacaaccagaaagtggaattctaaggacaggaacttttagagaggatactgacgatacctgaagaagtaaagc

SEQ ID NO: 84673 - DNA, 461 bp, Homo sapiens
gtgaaaggacaaattgttattcttgaagagactataaatgtccatgagatggaagcaaaagctagcagagaaacgatcatgaggctggcttcagaagtcaacagagagcagaaaaaagctgcctcctgtactgaagagaaagagaagctgaaccaggacctgctcagtgctgtagaagcaaaagaagctcttgaaagggaagttaagatcttccaagaaaggctgcttgctggccagcaggtctgggatgcctcaaagcaggaagtgagcctcctgaagaaaagctcttctgagttggagaagagtttgaaggccagtcaggatgcagtcacaacctcacaaagccagtactcctcatttagggagaaaatcgcagccctccttaggggcagattgagcatgactgggtccactgaggacaccattttggagaagattcgagaaatggacagccgggaaga

SEQ ID NO: 84674 - DNA, 1357 bp, Homo sapiens
tttcgtgcacaactgagagtggcagaagctcagctgacattgactggggacggcggtgtccttgtcttgcctttgtcgcccccgcccctctcttccctggctggacttgcggagtccccgccgaagaacccgagggtcccctggcgatggcagaaatgaaccctgcacagggtcatgtggtttttgaagacgtggccatatatttctcccaggaggagtgggggcatctcgatgaggctcagagattgctgtaccgtgatgtgatgctggagaatttggcccttttgtcctcactaggttgttgccatggagctgaggatgaggaggcacctttagagccaggtgtttctgtaggagtgtcacaggtcatggctccaaagccctgtctatctacccagaatacccagccctgtgagacatgtagctcacttctgaaggacattctgcgtctggctgagcatgacggaacacaccccgagcagggactgtacacgtgtccagcacatcttcaccagcaccaaaaggagcagattagagagaaactttctagaggggatggaggaagaccgacatttgtgaagaaccacagagttcacatggcagggaagaccttcttgtgcagtgaatgtgggaaagcctttagccacaaacataaactttctgaccatcagaaaatccacactggagaaagaacttataagtgcagcaaatgtgggatattgtttatggaaaggtccacactcaatagacatcagagaactcacactggagaaaggccttatgagtgcaatgaatgtgggaaagcctttctttgtaagtctcaccttgttcgtcaccagacaatccactctggagaaaggccttatgagtgcagtgaatgtgggaaattgtttatgtggagttccacactcattacacatcagagggttcacactggaaagaggccttatggttgcagtgaatgtgggaagttctttaagtgcaactcaaacctctttaggcattacagaattcatacaggaaaaaggtcttatggttgcagtgaatgtgggaaattctttatggaaaggtctacactcagtagacatcagagagttcacactggagaaaggccttatgagtgcaatgaatgtgggaaattcttcagcttgaaatccgtcctcattcaacaccaaagagttcacactggagaacggccttatgaatgcagtgagtctgggaaggccttccttacaaagtcccacctcatttgtcatcagacatttcacactgcagcaaagcagtgcagtgaatgagggaaattctttaggtataactctacacttctcacacatcagaaaggccacactggataggg

SEQ ID NO: 84675 - DNA, 307 bp, Homo sapiens
attgatttggggcctgctctaggaagagttcccgttttagaatagcaacttggtaaggccatagaacatattgataattaccagattcagaccactgttggtctggggaaggatcatgacattctgaggaggaggattggaaatggagctcaagatctctgggttttcctacggagagaattgccgaaattaacgaacttatatggaaatgatctcccaagacatgcagatgaatttcttttggatttaagacatcatgaaaggtctataatgacggatctatactacctgagtcagacagagggag

SEQ ID NO: 84676 - DNA, 1156 bp, Homo sapiens
tcatgggcgagtctcctgcagtgtagggctactttgtcctggcaggaatgaactctgctggcctttcatttggtggaggagccggaaagtaccttgccgaatggatggtacatggttatccctcagaaaacgtttgggaattggacctgaaacgttttggagccctccagagcagccgcacctttctgcgccaccgggtcatggaagtcatgcctttgatgtatgatctgaaggttccccactgggacttccagaccggtaggcagttacgcacctctcctctctacgaccggctggatgcacagggagccaggtggatggagaaacatggatttgagaggccaaagtactttgttccccccgacaaggacctcctggcattggagcagagcaagactttctataagccagattggtttgacatcgtggagtctgaagtcaagtgctgtaaggaagctgtgtgtgtcattgacatgtcctctttcacagagtttgagataacatccactggggatcaggcattagaagttctacagtacctcttctccaatgacctggatgtgcctgtgggccacattgtgcatactggcatgctcaacgagggtggagggtatgaaaatgactgcagcatagcacgactgaacaagcgcagtttcttcatgatctctccaaccgaccagcaggtccactgttgggcctggcttaagaaacacatgccgaaagacagcaacctgctcctggaggacgtcacctggaagtacacagccctcaatctgattggccctcgagctgtggatgtgctgtctgagttgtcctatgcccctatgactccagaccacttcccaagcctcttttgcaaggagatgagcgtgggctatgcaaatgggatccgggtgatgagcatgacgcacacaggagagccaggattcatgctctacatccccatagagtacagatggggcttcaccatgttgtccacgcttgtctccaactcctgacctcaagtggtccacacacctcagcctcccaaagtgctgggattacaggcatgagccactgtgcctggccccagggcgaccacggaacggatcagcgaggccaagtacactaccaccatctggtcattggtcttcaggtaaaaggccttgacgaactc

SEQ ID NO: 84677 - DNA, 306 bp, Homo sapiens
gtgcacagtttttgctggttggatgggatcacattttgtgactcattgtcttgtagacgaatctcacagaactagggcggaccacatgtgaccagaactggccaaattcccccgacgtcttgaaccacggctgtttttacatgcagtgtctatcaaaggactgtaccatcggctatgtgtcccgagaaatgctggtcgcacacacccataccgttgaagaacatacagggacacatctacagtacgtatcatggcctgaccacagtgtgcccgatgactcctccgactttgtggaatttgaaaact

SEQ ID NO: 84678 - DNA, 310 bp, Homo sapiens
gtgactattaaattcctatttaaaagaaaatgattgtgaacacacaattcacgtcggttttgatgctgacacagggggccacaaaggagagtatgagcagtgggcccgcttgctgtacagactacccttccttcactgccaaaaagcgaaaaacccgcaggctgttctggatgtgtcggagctacacttacattaatataaatctatgaaactgatgtctgaattggctttcccttagacaactgacgattacaattcttctaatgccttgaatgcgaaggctgtgtctgagactcctgctgtgacacca

SEQ ID NO: 84679 - DNA, 368 bp, Homo sapiens
ggcacgaggaaaaacctccggtggaaaaatcccactgtattgacagagcggaaaatgatgaaaagcctgatgacttgccttcattagctgctgactttggtgaaagtaaggataatcgcaaaaactatgctgaggcaaaggatgtctccctgggcatgtttttgaatgaatttgccagaagactttctgattactctcctgagctgctgctgagacttgccaagacatatgaaaccactctaaaaaagtgctatggcggtgcagaatctcttgaatgctatgccacattgttttaagaatttaaacctcttgtggaagagcctcccaatttaattaaagcaaaatgatagctctttgatgcacattga

SEQ ID NO: 84680 - DNA, 376 bp, Homo sapiens
ggcacgaggggcactgggggcttcattgattaaacggccgcctgcttagatgctttacggggggttaattctggcttgggcctgaccgacccttcactgggaacagactggtaaaacggtcatgtgattatcctgaaccctcccggccaaataaacgcccgctatgcccctgtattggattgccacacggctcacattgcatgcaagcttgctgacctgaaggaaaagattgatcgccgttctggtaaaaagctggaagatggcccttaattcttgaagtctggcgacgctgccattgttgatatggctcctggcaagcccatgtgtgttgtgagcttctcagactatccacctttgggtcgccttgctgttcgtg

SEQ ID NO: 84681 - DNA, 356 bp, Homo sapiens
  misc_feature (1)...(356): n = a,t,c or g
ggcacgagcaatggcccctaacacaggagaagctagatacctctggtgcttcagcgcaatgctgagagctaattacagtcattcaggttttacagctcacagcttcagatcctatcaacattgtctgtaattcagcttatgttgtaaacgtagccagtcacattcacatggaaactgctacagttaaaagtacactagacccagaactgcttaatttgtttcacttattctcaaatgctgcatgctacatgccaaacaggtgagacagctggtcatgtacagtgacattgtctgtcatcatttgctcatatggggatacttaaacaattaaaaactgacaatggactcgcttatan

SEQ ID NO: 84682 - DNA, 361 bp, Homo sapiens
  misc_feature (1)...(361): n = a,t,c or g
ggcacgagggggtatcacttttacatgaggacgtacaaaacttcccagctcaggaaatcaccaagcaagccttgctgttagggaaggaaacctcccctgcccaatggggcaaatcctttaaagaactaagcccagaggatcagaaatatgcttggtttactgatggatccaccaaatacattggtgggacccgatgcttgaaggccgtggcttataatcctgttaaaaacataagtatttatgatgaaggaaggggtgggagcagccagttagctgaactagtagccatcctctgagctattcaagaggaggccagagggatttgtcacttgtataccaactcttggtctgtagcaaatgn

SEQ ID NO: 84683 - DNA, 345 bp, Homo sapiens
  misc_feature (1)...(345): n = a,t,c or g
tggcacgtggagacttccccacttgctgcaaggtattggggtcacggaactgaatctgccgcacctagaaatgctcaagaaccagctggaccaggaaggttggctgttagtcacgtccattgctcagctcaaagtggcagaaaaacctgttgtgtaagccacagactgtctgaacgtgctgaacaagagcaacgagggtatgggtgttggtgcctgaagggactctgatgtggcgaacctgcttctctcgtcccacctcctaacccagtttttcttacctgaaacgagaaaatccattacatagngcanngcgcttcgtgaacccattagttgagggctgccttt

SEQ ID NO: 84684 - DNA, 351 bp, Homo sapiens
ctcacccacacagaacggaaagaacttaaaacacagtgttcatccccagagggaaacacccttgcaaaaaatatgtcttaaaaaaatcttaaattactttcagtaactacattggtggtagtgttggtattatcattctaaagttgttgtatgtgtaccgtgagataaatggttatcttggaactaacgtatgaattgaaggtctattttatcttaaaagtaaaaataagcaaaaacaaagaaaacaactccaacattttctctagcattgtacactgaaaagacctagaaacaatgaacaattcagtagtagcgaacacctccaacattttctctagcattgctcgtgcc

SEQ ID NO: 84685 - DNA, 355 bp, Homo sapiens
  misc_feature (1)...(355): n = a,t,c or g
caataatattaatttttaccctcatctgtaggaacatttactatctctgtcagcggggacattgatggtttaattactcaggctttgctgacggacaattatgagagtgctgttgacctttgcttacatgataaccgcatggccgatgccattatattggccatttcaagcggactataactcttggctcgcacccagaaaacatacttcgcacaatcccggagccaaattaccaggctcatcactgcagtggtgatgaagaactggaaagagattgttgactcttgagatcttaagaatcggagagaggctttagctgcaatattgacttattctgagccggatgaagttcacn

SEQ ID NO: 84686 - DNA, 352 bp, Homo sapiens
ctaaccgcagggttcagacagcagtgatatttgccacaaacacactgagcattatcagatatgctgggttattaggccaaagtggaagagcagtttgccctgtagcctggaattactgcagaacagtctcttattctggtcctcactttaaacaggtagcatctctgccttacttggcaaaaggtcaaagtagcataatgaaataaagtgtacgttggctcctaaatccagaaagatccaccaaacattcttttgcactggtaggtggtttaaggtacagcaccttatccttcattttggaggggctatccagacatgctccagaccattagtcccccagaaacttcactga

SEQ ID NO: 84687 - DNA, 408 bp, Homo sapiens
caactctcttgagagtcaattgatcctaaaagataagtttattacccaatcagctgcagatatcaggagaaagctccaaaatgagccctgtgccctgaacaaaatctggagccattgttaaacctggcaacctcagtgttctataataggtaccaagaggaacaggccaaaaaggaaaagcaagatcagagaaaggccacagccttagtcatgaccctcagacagacaaaccttggtggttcagagaggacagaaaatagagcaggccaatcacctggtagggcttgttaccagtgtggtttggaaggacaccttaaaaaagattgtccagtgagaaacaagctgcccccttgcccatgtccacaatgctgaggcaatcactggaaggtgcactgcctcagaggacaa

SEQ ID NO: 84688 - DNA, 435 bp, Homo sapiens
cggggacactatataggagtcctggatgagcccttgattacgcctggcatcctgaccacggtagggtctctgtgctacacgcgctggggtatgtgaaacggctgttgacatttttgaaaacgaaccttctttctgcggaggaaacccattgaacagtgtccctacagatgccgattacccacttggagtcctttattgtggaggcggttcattaccaacacaagactgagaatctttgcctgagggagctaaacgtacacaatgggtataaaaaaaattttcaacagaagttgcataagttactgtagaaaattcacccaaacaagaagctggaattagtgagggtcaaggaacagcaggggaagaagaggagaagaaaaaacagaagagaggtggaaggggtcaaataaaacaaaaaaagaagaccgtaccaca

SEQ ID NO: 84689 - DNA, 420 bp, Homo sapiens
aatatgatgaacaaattagataatcgatatgagatgaacatattcctagaaaggcacaaactaccaaaacagacttaagaagtattagaaaatctgagtggatatatctataacaagaaaagggattaaattagtaattttaaaaattctcatagctatatcccaggtccaggtgacttcgctgaagaattctaccatacatttaaaggataattaacaattcttcacagatttttccaaaaaattgaagaggaggaaatatgatttggcaataaaaagtagtacgtattaattcatgctacaacatggataattttttttggaggtcaatatacacaaagcaattttatttgtatgtacttgtggtaaacaattagaacatttcattcataatagcataaaagtataaaatattcaggg

SEQ ID NO: 84690 - DNA, 422 bp, Homo sapiens
ggatgggggatcagcacacacctccatctccacaggggcacgagggagcagcacacacctccatctccacagggcacaggggatcagcacacacctccttctccacaggggcacaggcaatcagcacataccttcatctagacagggtgacgggcgatcagcacacacctccatctccacagcagcaggaggaatcaacacacaccttcatctccacaggcggacgggggatcagcacacacctccatctccacaggggcacgggagcccgactccccactcccctcggggacacgtagtgggcgtgtgttaaatcccacggaagcaagctctggtcactcagcattggtacagctctgtattatttgtcttggaaaatcttgatttctggtatcaaagatcctactttgaaaataaaccag

SEQ ID NO: 84691 - DNA, 410 bp, Homo sapiens
  misc_feature (1)...(410): n = a,t,c or g
atcagatggcgtaaatttaaggaaaaaaattagatgaaaaaaaggtattaaatagtacccctggcttataaaacaagtatgccaaaaagcagtaaagctattaaggacttcagcaacactatcaatgaacttgatataattgacatttatagattgctacaccaaaaagcatcagaataaacattctcttcaagtacatttggaatattcaataggacaaaccaaataatgagccataaaacaaattttaatacatttggaaggattaaaatcatattgggtatgttctgtgacctcaacaaaattaaagtagaaattaataacagatacctggaagattagaaaattaaataacatactttggaataacccatagttcaaagaattgcttacgaagaaatttagaaaan

SEQ ID NO: 84692 - DNA, 420 bp, Homo sapiens
tcgcccacgcgtccggtagagaaacgtgaagcaacacggtaatcttattccacagccaccactaagtgccataaatgcacatataaagttaccggcttgtctgaagggtgtgaatatttcttcagagtgatggcagagaatgaatatggaattggtgagccaacagaaactacagatcccgtaaaagcctctgaagcaccatctccaccatacagccttaacatcatggacataactaacagcaccgtcagcctggcatggcctaagcccaaacacgatggtggcagcaagatcactggctatgtgattgaagcccaaagaaaaggctctgaccagtggacccacatcacaaccgtgaaagggttagaatgtgttgtgaggaatctaactgaaggagaggaatataccttccaagtgatg

SEQ ID NO: 84693 - DNA, 369 bp, Homo sapiens
  misc_feature (1)...(369): n = a,t,c or g
attacattcgatactccctctaaatggcgtgctaaggatatctttgattccaggagaggacccagacaggctgtgcctctagggaggcccagacccatctctaaggactggataagacccacacctgcttctccttgatggagtactgggtaaaccatctctcatttggggagaagaggcctaactacttctttctctggagggcgggccgggcactgccttaagcacaggtggagagatgctctgatttgaagacatccctgccttttccactgggtctggggataactcaaaactgctgtgaccagaggaacttgacgaacgttctttcatgtctagagatggatcttgttccagccgatgaataan

SEQ ID NO: 84694 - DNA, 345 bp, Homo sapiens
aattaaaaatattcttgtactaggtgaaagtttgtgagcatctggtttctataaaaaaaatctagtgaaagtttctaataatcaagtatttaattatctaggtatattgataatatacttaaatgtacaatgtgttcttcaacatttgagatcaactttgcccttaccagtgtgatcttcaagaacaagggtctctggaagaccatcaatgctttccttactagctggtggattggccacctcaacatccactgcaagagactctaaatgggccagagcagtctgaaaaacaaaaggtacagttctttgttagaaatactttaaaacagtaacagaaaactattt

SEQ ID NO: 84695 - DNA, 340 bp, Homo sapiens
ccgggacgggtggaatacaagctgatggatcaacccgcttttaagacatgctggtagacttttcaaatatgccaaaatgtgaagataacttgtgtttactaactcttgtgtgtacatactctgggcgggtggaagcttatccatcgcgaactgtaaaagatggtgaagtaagccgagcgcttctttaagaccttattcctaaggttgaactgcccttacgaactgattcagataacatgcacatcgtttgtcggatcttggtacagaagacagcaaaggtattggggatcacatggatactgcatgctgcctaccaacctcagagttccggaaaggtgga

SEQ ID NO: 84696 - DNA, 330 bp, Homo sapiens
catggattgaacaaacctgcctcagacaaaaggctttcagtttttccccatgcagtgtgatattagctgtgagtctgtcatatatggctttaattacgttgaggtatgttccctctatccccagttttttgagggtttttcaacataaagagatgttaaatttcatcaaatttttttcagcactaattgaaatgattatatggtttttatccttcattctgttgatatcatgtaccatacagactgatctgcatatgctgaagcatccttgcatcccagggataaatcccacttggtcatgttgaatgatctttctaatgtattgctcaa

SEQ ID NO: 84697 - DNA, 649 bp, Homo sapiens
aaaagcaccacagttcgttagatataactgaatattatcttcatttcctactgtagtggttcttagaaaggttgtttcttaagttagaaactgttgcctaagtatttaggatgtggcaggcactgtgctacatgctggggttgacgaatgcatgggattcggctctctcccaggctggtgggaagaggacacatctagaagccagggtatataccccgaaggggtttgaggcagtgcagagttgatgatgatggtctccagcctgcctttcctttacaaaaatgaggagactgcatctcacattgccaacgagctgcttgactctaccgatattccctaccaagcacgattatgggtagtcttaaaattcttaataataaaatagatattgaaaatagtgtttttttttttaacagtgaaagtaatatgtactcatgtataggttttcaatatacaggaaactataaaatgaaaaggattgtacctgtaatcccaccccttacagctaactactgtgacattttatttgtagaagtccattttgctatcagacctcaagttttaaaatcttaactcaccctctgtaacctagttctcagctctattttatgtaaacgtttttaaaagggtttcaaggatttaaaaataa

SEQ ID NO: 84698 - DNA, 335 bp, Homo sapiens
ctgcgtctctgcactgaatgccccagggagactggacccctgaagcccccacatgtacaggggcctctctttccccctcacatggaaggcttactcctggtggtggattattgcttctcgtgaaatcctgagatgacttcctgggccaactcccttatggatgtgtgctgctgccacttaatctccagcttggggctaaggtatccttcgtttgagatgaagggtgagtgccacccattggtgaaaccaaggactcacggtggagaaacactgagttaatccaattaaggagctgacctagcacataagacgtgcccacagaggataatttatgg

SEQ ID NO: 84699 - DNA, 473 bp, Homo sapiens
tgacagtcctattatgtagtctacacgaatgacagttctttatcgtttacatttattttatgtaagaattaatttttcaagatattgttagctgctatcatttagtaatttataaactgatatgctttttttaaaacttgttctatatgtaaatagattattatgacattagcagaggatttgctgtgttctgctgctcaaaacagtcgcctttcagctcagcgcacacaagctggatggttgctgatttctgctctgatgacattaggtaacagtctgtagaaggtttacataccttgaaatactttgtgttttctgagtgaaatgattcttatatgtgatttgatgaaatgaacttttaatacataccagaatttaaatagccacacaaacatttttcttgtagtagtcacctttaaaagccttttactttcgtcattgcttaaaaccttttgagatctctcttgattttc

SEQ ID NO: 84700 - DNA, 340 bp, Homo sapiens
agaactgagaaagacagaggagtagaacgtttactcaaataagtaataacagaaaactttccaaaccagaatatacaggtacaggaaggtcaagggtcaccaatccgagttaactcagacaagaatactccaatttacaaactcataagggtcaaagacaaagagagaatttagaaaacagcaggagaatagaagcaaataacatataagatagatccaatatgcttggtagcagatttctcagcagaaaccttacaggccaagagggagtggggcagtatgttcagagtgttaaaggaaaaaaactgccacctaaaaatactgtacgtggcaaagttat

SEQ ID NO: 84701 - DNA, 391 bp, Homo sapiens
  misc_feature (1)...(391): n = a,t,c or g
cttacatcttgacatttggggcctcaaggcaccttatggcctgagcacatgaaggatgtcaacataacgcgtcttatagttctgggtctatttcctaagcatttaggatgtgactaacactgtcccccttctccacagggcagagatgtaacattgacattgatgagtgtgcctccaatccctgtcgcaagggtgcaacatgtatcaacggggtgaatggtttccgctgtatatgccccgagggaccccatcaccccagctgctactcacaggtgaacgaatgcctgagcaatccctgcatccatggaaactgtactggaggtctcagtggatataagtgtctctgtgatgcaggctgggttggcatcaactgtgaagtgganaaaaaaaa

SEQ ID NO: 84702 - DNA, 653 bp, Homo sapiens
ttaggatcaatgatggttaaaatagacaatgtcaatagctgtcactaagcatatgcatctactgtgacacactgggagacacacactcaacatgatgttcagcatctccgacatcctggggctggcaccagtgagccaacctttgctaggttttcagccgctctctctccccaggatttctagtggagatacagtgtctaggctcttcagcatactttttccatttagagtagcacttaaaacataaactggagaccactattttggaggcaggcttggtgcaccctcccaatcctactcagcttcagcaccgctaccaaggtttcagtgctgggctgaggaatgggagagaaagatctcaggaggaaattcccatgagaactgattctccacacaatcaccagcctcctcccatcattcgggacaggaaagggaactgttaacaccaaagatatttcctcccactactaaaccctggtgcccgaaagattacttctctctccatagtgtgaaatgaatagaaaaaggtcagtgatcaccaaaaagatggccagaaagcagaatcaaggctgggcttttcaaaaaaatactacaaggaactacaaaggatgacaaagctcttctctgaatacaagtatctctggcacagagac

SEQ ID NO: 84703 - DNA, 460 bp, Homo sapiens
tgtctacaaatgtagctcccagaagctctagagcattaatacgttctgtcttgctggtctgtgcatggtgtgtcagaaaatccacaatatttgtgtgaccagtcacacttgctgagagaaggggagtcattccataaccatccttttccatcttggcacaatacataagaagcatcttcatgatgtccaaacttccagattctgcacaatcatgcaatgcagtattaccttaaagagagagagaaaaaaagaaataacctacatagagggacccaagtataatgtaacaaaagaagcccgctccaaccttaatgaaaaaaacgaacagaccatggactaccttgaatttactctggcgactttggatgtcattttacacctaatatggtcatgtcaatcattccataagatggacagcagatactacccttaggtactgggggaaattttgtttattcgt

SEQ ID NO: 84704 - DNA, 407 bp, Homo sapiens
gggtcaaaaactaaaaattagagacaacatcaatgtaaggataaagtggccaatttaccaagaggaattagcaactgtaaatatatatgcaaccattattggagtaattaaacatataaaacatatattaattggtttaaagggagaggtagactgcagtataataaaaggcgactgcagtgtcccattttcagcaatgtacatgtcattaggacaaaaagaaacagtaaactacactctagacctaatggaactagcagacatttatagaacattttttctaatagctgcagaatacacattctcatcagcacaagcagaattctgcagactaaactatatgttatgacacaaaccttaacaaatttttaaaaaatcaaactaatatcaagtatctgaccacactg

SEQ ID NO: 84705 - DNA, 378 bp, Homo sapiens
  misc_feature (1)...(378): n = a,t,c or g
ggcccatcccgtgcggaccctacgccgagtccagcccggggctgctgggccagcgggagcgggaaccggacggcgctcgcgttctgccagagcggagaacgactcggggacggtgcggaggaccaggggaggagatccgcgcccgcacgcaccatcagccgagaggacggcccgcatcgcgccagtgacctaggagcgactcggggacggcttcgggctcccaggccctcctgggccaccgggcactgaggagagcggcggctggaaactgtgggacccgaagggcgggagcccagggcccgcccccgccggagcgcccccgccatggccacgcccccgccacggggatgggcagggcaagcaccggaagtgcgtccn

SEQ ID NO: 84706 - DNA, 197 bp, Homo sapiens
ttttttttttttaaacggagtctcgttttgtcccccaggctggaatgcatgggcggaattttgggtcaatgaaaactccgcctcccgggttcacgccatttttttgccttaacctcccaagaaggtgggactaacggggcccgccatttagcccgggtaaatttttggattttaaaaaaaaaaccgggtttcaccgg

SEQ ID NO: 84707 - DNA, 411 bp, Homo sapiens
ggccatagcctagaaacatgcctaggctgtcttatgcccagtaaatgtttcattgaggaatggaagaaggaatgagtgagcgcagacgcccatccctcccctcttcgtcctgatcgttctgaaatcaggaaatagtacacattcgggagaaataaagaaggaagaccacggaggtcccagggagagccgcggcgggtgggcgccagcactgctcccccctccgcaaaggcctaactgcaccccttctccaccacgcctgggtcccgagtgacccccgctcccgccccgggagctgcacatccctctgcctcttaaagaccctggggtcggtgcaaggatccctgcggcccagcagtggccccgagacagccggggcgcccttcttcccgctccgccttccccaagcgcccg

SEQ ID NO: 84708 - DNA, 408 bp, Homo sapiens
ggggagaaggtgtctactagtactagaaggcatttgtacttaacctggtgtggtttgacttctgtaaaggcaatttcttacttttttcttggcgagggttttcagagacagtggcctgggctgggtttaggactttgtttggcatttacttgggcgcaggttgtgaactggagagctgcttaatctgttaggctttgaagacgggggatcttaaaatggctccgcaggagctgaggcagctttgctctttttaagtgggtggtagactgtaggtgacggactaaattttctttagggttcaggatatgaagcgtctatagtcaggaagaatctactaactttcctgatttttattgactctgagatctgaagccagttttttggtggtgttgttgagtgtacgggatt

SEQ ID NO: 84709 - DNA, 358 bp, Homo sapiens
tatatagtatatggtgtgatacatattatatagtatataatatgatacatattatatagtatgtagtgtgtaacatattatatagtatatggtgtgatacatattgtatagtgtataatatgatacatattatatagtatgtagtgtgatacatattatatagtatataatatgatacatattatatagtatataatatgatgcatattgtatagtatataatatgttttttatgtatatactaaaaacttttttttctgaaattcatatgcaactgagagtcctgtattttttcaggcaatcctaaaacctagctaggcttacacaataaagctcaaaaagtttcctatagcttgtc

SEQ ID NO: 84710 - DNA, 267 bp, Homo sapiens
agtcatagtaatgctttattttaaattatttttgcttaatttcttctattttgtagtttttaaatcttgccatctccttaaatctgtctatgcttcttaaggactcacccaaatattatctcctacaagcaacagaaatctccactagctcaccactacccctaacttcttcctggatttacctatttaggcatcagctattgactttttagtataatacatgagaatttagctcttataccacttacttgtttgtcgacgcggccg

SEQ ID NO: 84711 - DNA, 353 bp, Homo sapiens
ttgacacaataaaaacacttatcacagtggctcatacagatggaaattatttaggaaattcatggcatgaggtataagcactttattttcaactttgcaatttggtttataaaatgagctaatgctaaatagtccatcattgacatgcctaaatgttaggggagaaaattagtacatttcgaataagtacgtttagctttttaaaataatctatagtgtagtctgtggttaagtcctggctgcatatatttaaatctttttgaagatatttttaacatggaatttaacatttttttcctttttgtaattaagattctgaagtgcatcagtcagttggagctggcacagcttat

SEQ ID NO: 84712 - DNA, 425 bp, Homo sapiens
aagggcaggaaggagaaggggccaagatgaagtgaccccttccttgttcacagtaactctgtggcttcagactctaaacagagctttccatttggcttatcttccaataaaaagatttaactaggtctgttttcctttgtatggacagaagtacttgaggagcccaaggacttttcttgtgaaaccgaggacttcaagactttgcactgtacttgggatcctgggacggacactgccttggggtggtctaaacaaccttcccaaagctacactttatttgaatcgtaagttggctctggttacattattgacaacttcttccttgcttgaggagcttgtgacaacatggcaaaaatctacacttagatgttgcaggaaatttgaacaaatatttcagaaccacctgccaaggtcaagaggaaacc

SEQ ID NO: 84713 - DNA, 379 bp, Homo sapiens
  misc_feature (1)...(379): n = a,t,c or g
cttttggacactgggcaataggaactagtcaaaccaatggcccatccaatggaaaagccttatcaaaatttgttaggacaaaacaattactcttcttttcaaaaagcctgtaagtagtaatagtatgctgtgcttcaagaagggaacagatgattcaacagaagtttacaaatcacttaaacatatgatccagggtttctccaagaatttttttcctgactctttcctgcctatgcacatgttacccattcttgtgtggtcctgctcaagtcaaactgcctagcttaccaggtactttgagcccacactaacatttttcttcatcaaattctgtatttctttctcatgtttaagntagcattttatatataattgattt

SEQ ID NO: 84714 - DNA, 566 bp, Homo sapiens
cggcggacgccaagtgccgggctccaggagacgcagggcgacgccacacgccggggtggccgactgggtcagcgcgggctgcgcctcctcgccatgggccccctctcggcgcggctgctaatgcagcgcgggcgccccaagagcgaccggctggggaagatccggagtctggagtaagagccgggcagcggcctgtcaggattggagctgctttccgagcacctggaccccaaactcctgtgccgcctgacgcagctgcaggagcttgacctgtctaacaaccacctggagacgctgccggacaacctgggcctgtcccacctgcgtgtcctccgctgcgccaacaaccagctgggggatgttactgccttgtgccagttccccaagctcgaggaactcagcctggagggcaaccccttcctgacggtcaatgacaacctgaaagtctcctttctcctgcccacgctccgtaaggtcaatggcaaggatgcgtcctcaacttactctcaggtggagaacctgaatcgggagctgaccagcagggtcacagctcactgggagaagtt

SEQ ID NO: 84715 - DNA, 399 bp, Homo sapiens
tcttcaggagactaagctaaagatctgcatgaaccaactctaaaagtagcctttcacttgagtacacagttaatgtacttttaccagaaaacttttagacaggtccttcataattagaatacgcatacaaattaagacattttcagttactgggggctgtttttcttaagacttagaaaagggagaattaagaaatctccacatgcaaggattatttttgtatattaaggaattttcatgatagattttctgaagctaagcagactgaggtctgagcagccccaacctacattcaacatgtacatgttcagagaagagatcctttctgatattgatttatctgtttttgtactgaaatggataaatctcatgctgctctgtgtgaatcattgatattaa

SEQ ID NO: 84716 - DNA, 405 bp, Homo sapiens
cggacgcgtggggtcagccttctgccttctgtcttctgccctctaaggtttgggatgagaaatctgataatcgtagtgagtatcccttgaatgtaatgagtcacttcttttttgctgctttcagtattctctttatgtctctgtcttttgacagtttgattataatgtgcctcagcgtgagtctctttgaattcatccttcttggagctcattgagcttcttgggtgtttatatttatgtctttttacatctgtatagtgtgttaaaataaaaaaaaagtctttcatcaaatttgggtagttttggccatttcttaaaaatagtccctcttcctccttgtttctctctttcctctggaactcccaccttttcttctattagctgcatgttggtttttgtctggta

SEQ ID NO: 84717 - DNA, 1141 bp, Homo sapiens
atagaaaacctgatgacccttagaccgtgcggtggaattcgcggtcgggtccgggcgcccgcgcagaatcagctgtctgagctgcccaggcggcgggggagcagcgagcgggcttcagcgagccgcaggaggcacaggcctgtcctgggtccccgcaggtctgcgcgtctgttgttcccagcgctctgagaggcctgaaaaggaagagcaacctgtccagaatccccgcaggaaaggaaaaggaggggaaatctcgacatggaaaaactcttcaatgaaaatgaaggaatgccttcgaatcaaggaaagatagacaatgaagaacagccaccgcacgagggaaagccagaagtagcttgtattctggaagacaagaagttagaaaacgagggaaacacagaaaacacgggcaagagagttgaggaaccgttaaaggataaagaaaagccagagagtgcgggaaaggcaaaaggagaaggaaagtcagagaggaagggaaagtcagagatgcagggaggatcaaagacagagggaaagccagagagagggggaagggcagagggtgaaggagagccagacatgggtaagagagccagagagtgagggagagccagaaagtgaaacaagggctgcaggaaagcgcccagctgaggatgatatacccaggaaagccaaaagaaaaaccaacaaggggctggctcagtacctcaagcaatataaggaagccatacatgatatgaatttcagcaatgaggacatgataagagaatttgacaacatggctagggtggaggataaaaggagaaaaagcaaacagaaattgggggcgtttttgtggatgcaaagaaatttacaggaccccttctatcctaggggtccaagggaattcaggggtggctgcagggccccacgaagggacactgaagacattccttatgtgtagtgtccctggcaggcatttgtcaggccatatgttttaaccttatggtaatactttgctttagtcgttcctcctgctaccagtagcgttttgacccacctgccagtgtttgcttgctctatgtttcagtagcagattttcacacatgtgcattgcagagacgtcatgattcgtggaaaaataaagcagcttataatatca

SEQ ID NO: 84718 - DNA, 698 bp, Homo sapiens
gcaggaattccaaggctgacaagtcctgcttggaaaataatttaactgtagagacattgccatgtgccatgtgcaggtggagttgccaaaaccagatgaattttgtgaaaacaagtctggccttctcctcccgctccctgattaccttctttgtctatttacccatcatttagttcccttgtgctgcaaagctttttgtgtttttttatggactcaatgcttaactatatgagcttttcattacccattctaaaatcgtgactggttgtaatgtaaattgtataacacatctttctgcagcttcagattctgcaacttaaacctcctaggctgcttatctgtctcccaccacctacctgcgttttatgcactgcacttggcattcttgatttttcctttcatattaatttcaatggtgcccagagggtacctctcaccatataataggttgctttgtgaacaattccagcaagagaaccattctgcccaaacagtgagatactctggaatgtaaaaaacatatcctcagcgtatcattcccatttctagcacacgagtgtattctgcaattgtactgacatgtaaatgaagatgaattatttgcttctccttttcctttaaaaaggccccccactattgccgaaaatactctcagccacacaaaatggctagaaccgggaaaagttaccccctgggac

SEQ ID NO: 84719 - DNA, 432 bp, Homo sapiens
gcgtggaattcctttgttttattttcatgtggttattagttggatctagcaaaagaaaagagggacaaaaataactagtggcaaagcactttcttggcctgtgtgacattaggtttgtagtcacagccagtatttcagatgcttgctgctgctagcattgtatttgacacagatctgaaggccacataaaatgctctttatttttacctggtacaattatcttctaaccacatttctgcgtatcatagatataatctcttccatgtagtaatagggcatttttcagcgctctgatgtttctgtgtctttcttgtaataaagtgtatctgtcattagtaattattatctattcttccagtaggatgcagttgggaggttattttctctcattcggttatcgtgcacttttactttaaatccagtttctcttga

SEQ ID NO: 84720 - DNA, 692 bp, Homo sapiens
  misc_feature (1)...(692): n = a,t,c or g
tcaaataattatataagccatttaaattgtataaacccactaaaccatacctcaaatgctgaatattcaaaaaatatattttatgacaagtttgttgagaatttatttgcataaaaatgccagtatttttctgctgtgtctctagagatataccaccccccagctaagagtgggtggtaggcaaatgtgctacgggctcctgggaaatggatcatgaagaatgtggtgtgctcagtggccagaggggcagtggggcctgagtctgtgtctctgagtttgtgtgtttcgagaacaagagcagagggcattcagatgtagaattcctccatgtcgttatccccggggccagccgaccctgggggtggtggcatgtctccatcagtctgcttgactttgggggtatcgcatgggagctgtggggaggagtctgtgagggtggaggtgctgggagctgggggagcagcacgagctgtcgctgaggagctggaagaccttttggtgaagaaagggagggaagcccaggaggcctctgtggtcaccctgctgacagtgggcagtggtccctccctggaatccttgtaagctgcccagtggctgatgcatctttcggaggggaggggtgtctcctctgtgctgcagagcctntgggtgcgagattccnggctntacggagtacctggatanaacccgct

SEQ ID NO: 84721 - DNA, 801 bp, Homo sapiens
  misc_feature (1)...(801): n = a,t,c or g
tttttatttatttattttatttttattttttgtatttttagtagagacagggtttcaccatgttggccaggctggttttgaactcctgacctcaagtgatccatccgccttggcctcccaaagtgctaggattacaggcatgagccaccatgcctggcctaatttttgtcttcttagtagagaccaggtttcgccatgttggccaggctggtcttgaactcctgacctcaggtgatccactttcctcggcctcccaaagtgctgactacaagcgtgagccaccgtgccttctgcaggagagcctcagtgtgggcagtgagcaccaggtgggagcccagacccgcgtagtgataggccagctcctcaccaacaccagcgttggcccctgtcagcagcactcgcgctccctggaggctggctggccatagccggggtggtcactctgggcggaggacaggacagctggcccggtttctccctccctcaaccccaggtgctcacctgggtcgaagttgtcatcccaataataggcgaagaacagggcccccagccctgtgaggagaagcaccttcatggtcctgtgtgggcctgcagagggacaggggacagaggtggccggcacaggcctggcccacagccacccgtgtttggtgggtgtttggtgatgccaccgccttggatccacgccttcctatccacctccacagccaccacctgtccaggccaccacggtggctccatgaaccaccgcggctccatanccganttgcnccncgctggataggngatcgatggtcgaag

SEQ ID NO: 84722 - DNA, 399 bp, Homo sapiens
atagagaaagctcgcctggaactgaatgaaaaccccgattttttacatcaggatatttagcaagtcagggacatgatcatcaccaggcctgacattggatttttacgtacagatgatgccttcatcctgagatttctccgagccaggaagtttcaccaagcggatgcctttagactcctggctcagtatttccagtaccgccagctaaacctggacatgttcaaaaacttcaaggcagatgatcccggcattaagagggctctgatcgatgggttccccggggtgctggaaaaccgagaccattacggcaggaagattcttttgctgtttgcagccaattgggatcagagtaggaactccttcacagacatccttcgtgccatcctgctgtcattgaag

SEQ ID NO: 84723 - DNA, 546 bp, Homo sapiens
aggaggcttgacactactccatgtggaggaattcccagacacctcccagcttgaggacacctcccagctcgaggacacctcccagcgcgaggacacctcccagctcacggacacctcccagcttgaggacacctcccagcttgaggacacctcccagctcacggacacctcccagcttgaggacacctcccagctcactccgctctgccccctcctgctctgctacctcctagtcccatcgtctggaggtagctacagtcggaatatggtgtgtatccttctaaaacatctcatgtgtacctttaaacataaatttataatgttaataatggaaaaatagagtgcttgcgtatatttatgtttgttttctgcttatgaaaaatttcaaaaacatacacgaaggtagaggataccttaaaactctcacatacccgtcgcccgacatcaacaacccacaaacatgttacctcccccagagtcacagtcccacaggtaacaagtgactctaaatgggacaggggagaggtggatgcatggatggctccc

SEQ ID NO: 84724 - DNA, 403 bp, Homo sapiens
tgcccaggtgagtcaatttcccggcttggacacgcccctcttccctggtctcacacaggaaggtgcccaggtgagtccagttcccggctcggacacgcccctcttccctggtctctctcgggaaggtgcccaggtgagtccagttcccggctcggacacgcccctcttccctggtctcgcacgggaagtcgcccaggtgagtccagttcccggctcggacacgcccctcttccctggtctcgcacgggaagtcgcccaggtgagtccagttcccggctcggacacgcccctcttccctggtctcgtgcgggaagttgcccaggtgagtccagttcctggctcggacacgcccctcttccctggtctctcacagatcctcccactggttgaacccacgcgtccg

SEQ ID NO: 84725 - DNA, 397 bp, Homo sapiens
ccagaggctacaaaagaaatcaaattattggaataaaaatttcagtcactgcaaataaatagaatagatctcttacacccactccaacttttgatttttgctactgcacattctccaacaggcatcattgttcaaaatactgatcttgtggagtggtcattccttcctcacagtacagccaagacgattaaactgtattaggatcatatagctacattaattggtcacacccgattacaaataataaaattatgtggaaatgacccacacaaaatagctgtccctttaaccaagaaacaaactagacaaacctttatcaattctggcgcatggcaaattgatcttgctaattttgtggaaattgtgtattatcattacccgaaaacaaaaatcttcg

SEQ ID NO: 84726 - DNA, 408 bp, Homo sapiens
agctgctgcgggagctccaggtctagtctttactgctctgtgtattctgctcctagaggcccagcctctgtgactccgttatctgcaggtattgggagatgcacagctaagatgccaggaccacctggaagcctagaaatggcagcagcgggatttggcctggggatggagcaaagtgaccccctgctgtagagcaagctgagaggggccatgttgaaatgatagaaaaacttaccttcctaaacctgcatacttcagaaaaggacaaggggggaaacactgccttgcacctcgctgcgaagcatggtcacagtcctgcagtgcaggtgctgctagcccagtggcaagacataaatgagatgaatgagaagcagcaaacccctctgcatgtagctgctgatcgaggaa

SEQ ID NO: 84727 - DNA, 397 bp, Homo sapiens
caaccaacaaacattatcaaagtccttaaaacgcaccaaccctcagcggaaactccaaccaacaaacattatcaaagtccttaaaacgcaccaaccctcagtggacactccaaccaacaaacattaccaaagtccttaaaacgcaccaaccctcagtggaaactccaaccaacaaacattatcaaagtccttaaaacgcaccaaccctcagtggacactccaaccaacaaacattatcaaagtccttaaaacgcaccaaccctcagtggaaactccaaccaacaaacattatcaaagtccttaaaacgcaccaaccctcagtggacactccaaccaacaaacattatcaaagtccttaaaacgcaccaaccctcagtggaaactccaaccaacaaag

SEQ ID NO: 84728 - DNA, 462 bp, Homo sapiens
  misc_feature (1)...(462): n = a,t,c or g
tgaaattaatgtaagaataatccctatcattcaaaacaactgcagtttgtatccctggtcatggtaaaaatcttttgggttggcgaaagggttttttggaaataactgattaactgtatttctttgtcccaggttatggactttgtgactgatctagaattcacagttcctgatcttgttcaaggaaaagagtacttatttaaagtttgtgctcgtaacaaatgtggccctggagaacctgcatatgttgatgaacctgtaaatatgtcaactcctgcaagtgagtacattcttgatgatttcttacctaatcttgttgcctgtttttgcttttagacctanagttgaagttatggggcaaggcaggggttggcaatgtgaagagaactgcataggtggcctgtgtaagactgactctctcttccaaatgttgtagcggtacctgacccaccagagaaatgg

SEQ ID NO: 84729 - DNA, 408 bp, Homo sapiens
gctctgcacccatccaagtgtgctggtatagagatggagtacttttaagagacgatgaaaatctacagactttatttgtatataatgtggcaactttaaaaattttgcaaactgacttgagtcactctggccagtactcttgctcagcttccaacccacttggaacagcatcttctagtgctagactcacagcaagaggtttgttcacacgtcactctttttctttgcaaactgaggcttcatatttcattgacaagtagaaacgaccaatggcaaaaaaacaaacaaaaaatacacattgcctttcttctcatcctccagaacccaagaaatctcccttctttgacatcaagcctgtatctatagatgttattgctggagaaagtgctgattttgagtgtcatgtta

SEQ ID NO: 84730 - DNA, 476 bp, Homo sapiens
  misc_feature (1)...(476): n = a,t,c or g
ctaatgcccgccctacggatcgctctgcggaaccgcgnccggaaccccgggtcgacccacgcgtccggtaactttatatataccatcttatgttatagttttttgggaatcctatcttttgtgacttaaatagctaaatttcatgacatagtagagaaccattagtaaatatgaagattttatttctgtggggacttttgccagcatgtaaaaataactatttattttaatgaatataaaaattggtttttttctactcttcatgaaaacctcatgtgcaaaaatagcgaattttacctccgttcttctcttctgaagcagtgaaataattttatttttaaaatactggaaaagccttctaaaatgttaaaacacagatatttttatcctaccaaactcttctttgccaaatatgacattatagttcatgattttcctatatttgccagattaaatatttaaaatccaagctgttn

SEQ ID NO: 84731 - DNA, 419 bp, Homo sapiens
tgagataaagaaaattctgaaaaacaatacaaaaaaaattaagaaaaacaattaagtatatgaatgggagattttccaaggaagtagatatcataaagaagaaccaaccagaaactctggacttacagacttcattgaatgaaaagaaaatatatttgaaagcttcaacacaggctagatcaagaagaagaatgaatctcaaaacttgaagacagttcttttgcaacaacccgataagaaaaaaataaagataaaaggataaaaaagaataagcaaagccttcatggcacatgggacaccataaagcaaccaaatgtttgaattgtcagggtcctggaaggcaaagagagaatgaaaaggttagaaaacctatttaatgaaataatttagcaagatatttagacatccagatataggag

SEQ ID NO: 84732 - DNA, 415 bp, Homo sapiens
  misc_feature (1)...(415): n = a,t,c or g
ttttggagataaagtactaggttgcagttggccttggatagcctgtacttggaaccaggatcgtgataggatttgggacaataacttccagaccatctgcaacctggtgttttggagataaagtactagaaacaggggaccgggtgaaaatgaagaccttgtctgcctatgccgaacttgtcatttctccaagtgaacgttcagacaagggcatttatacactgaaattagaaaaccgtgtgaaaacaatttctggggaaattgatgtcaatgtaattggtaaggaacaaaacatttatcatctaaggtgatttggcagtattaacaaatattagttcagactattaacagtgactcgtgagtgcattttttttcagctcgcccaagtgcacccaaagaattgaaatttggtgan

SEQ ID NO: 84733 - DNA, 412 bp, Homo sapiens
tttgtgagcactcggaaagcgacgagaaattacataaactatatgtcctggcactccatcgcggctgaggacattgtctactccaacgatgttataccactgatagctcttctacactgctggtatgagcatatcatacacctgtataacttctttgaaaaacagtttagtattatttagtaaagctactcatgcatatactctcatttctctctcgggcatatgccctatagaaactctgctacatgtgcaccaggagacacattcatagatgttcatactctgtatgatccaaagcttttaaaattgattcagacttgttttatggcccaacatatggtctatgttggtaaatattcgatatgcacttgaaaaaaatgtgtattgtgtagttgttggatgttgtgttaca

SEQ ID NO: 84734 - DNA, 901 bp, Homo sapiens
atgacttttgatgatgatgataaaaatacctatggcgttgctctggtatggaaaaagtttcagacccaaagtttacgcctatcagacctacacagaaaatcgcatctttggagaggaatagtcagcatcaccttgattgaagggagagacctcaaggccatggattccaacgggttgagcgatccctacgtgaagttccggcttgggcatcagaagtacaagagcaagattatgccaaaaacgttgaatcctcagtggagggaacaatttgattttcacctttatgaagaaagaggaggagtcattgatatcactgcatgggacaaagatgctgggaaaagggatgatttcattggcaggtgccaggtcgacctgtcagccctcagtagggaacagacgcacaagctggagttgcagctggaagagggtgagggacacctggtgctgctggtcactctgacagcatcagccacagtcagcatctctgacctgtctgtcaactccctggaggaccagaaggaacgagaggagatattaaagagatatagcccattgaggatatttcacaacctgaaagatgtgggatttctccaggtgaaagtcatcagagcggaagggttaatggctgccgacgtcactggaaaaagtgacccattttgtgtggtagaactgaacaacgatagactgctaacacatactgtctacaaaaatctcaatcctgagtggaataaagtcttcacgttgtaagtaggcatttctttgggctctgaatccaaaattgtgttaaatttgattatttttgagggttttaaaaaaaatgtggtgtttattcttaactgattcacaactcaatgcatctggcctgcctttgctaacaacaatgaattttcctcctaccttc

SEQ ID NO: 84735 - DNA, 509 bp, Homo sapiens
acttgaaacgcctgctggaattcgccatgagcctcatatggaccagtaaccattagggggggcccgcacccaattcacgctatgctgagccttagaagaactcactggcgatgacctgagctcatgctgactgtgaaaactatgttgcctgtggaggcttggacaacatctgctctatatataacttaaagaccagagagggaaatgtgagagtaagccgagagttgccaggtcacacagggtacttgtcctgctgtcgttttttagatgacagccaaattgttacaagttcaggagatacaacttgtgctttatgggacatcgaaactgcccagcagaccaccacattcactgggcattctggagatgtgatgagtctttctttgagtcctgacatgaggacttttgtttctggtgcttgtgatgcctcttccaaattatgggatattcgagatggaatgtgtagacagtctttcacgggacatgtctcagatatcaatgctgtcagt

SEQ ID NO: 84736 - DNA, 1310 bp, Homo sapiens
catccaacctgaactgcctatcatgaactgggtgctttatgacccatctagccataaagtgggtcatgctcagcagcattccataatcagatggaagtggtatctacctgatcgggctcgagcaggccctgaaggcacaagtaagttacatgaggaagtggctcaaatgcccatggtctccactcctgccaccctgccttctctttcccagcctgcactgatggcctcagggggagttccctattatcaattgacagaggaagagaaaactagggcctggttcacagatggttctgcacgatatgcaggcaccacccaaaagtggacagctgcagcactacagcccctttctaggacatccctgaaggacagtggcaaagggaaatcttcccagtgggcagaacttcaagcaatgcacctggttgtgcactttgcatggaaggagaaatgaccagatgtgcgattatatactgattcatgggctgtggccaatggtttggctggatggtcagggacttggaagaagcatgattggaaaattgatgacaatgaaatttggggaagaggtatgtggatagacctctctgagtggtcaaaaactgtgaagatatttgtatcacatgagagtgctcaccatatcacataaaagagctcagcagaggaggattttaataatcaagtggataggatgattcattctgtggacaccactcggcctctttccccagccacccctgtcattgcccaatggacccatgaacaaagtggccatggtggcagggatggaggttacacatgggctcagcaacatggacttccactcaccaaggctgacatggctatggccacagctgagtgcctagtttgccagcagcagagaccaacactgagacctcaatatggccactgctggggcaaagttctccagaaggccatgtatgctctgaatcagcatccgatatatggtactgtttttcccatacccaggattgatgggtccaggaatcaaggggtggaagtgaaagtggcaccactcaccatcacccttagtgatccactagcaaaatttttgcttcctgttctctcagcattacattctgctggcctagaggtcttagttccagagggaggaatgttgccatcaggagacacagcaatgattccattaaactggaagttaagcttgccacctggatactttgggctcctcctacctttaagtcaacagactaagaagggagttacagatttgggtggggtgattgacctggactatcaagatgaaatcagtctactattccatatcagag

SEQ ID NO: 84737 - DNA, 704 bp, Homo sapiens
tccaggaggcgaagcgggtgcacccacaacctataagaagggctggcggcgagctctgatcactcgggcgtcggagggaacgataccagttgcattgcaggacctgactgtgaacttcacccaacaggaatggcagccactggaccctgctcagaagctcctgttcagggatgtgatgctggataactaccacaactagggctctgcggacattgatgatgccttatagaagaacaaggaaatccaagataagcatttgacacaaactgtattcttcagcaacaaaacactgattacagaaagagagaatgtatttgggaaaacacttaatctgggcatgaatagtgttccctcaagaaaaatgccctataaatgtaatccaggaggaaacagtttgaaaactaattcagaagtaattgttgcaaagaaaagcaaagaaaacagaaagattcctgatggatacagtggatttgggaagcatgagaaaagtcttttgggaatgaaaaaatacagatacaatccaatgaggaaagccagcaatcaaaacgaaaatcttattctgcaccagaacattcagattttgaaacaactcgttgactataataaatgcgggaaaaccttcttcaagagggcaagtcttattacacaaaaggggagacagactgaaaggaaaccaaatgaatgtaatgaatgtaggaaaacct

SEQ ID NO: 84738 - DNA, 450 bp, Homo sapiens
ggaattcatgtctatacatgtatgaaatggatgggagacaaaggaagcaacactcatgagccaggaccataaaagccacagaaatataataaatgaatgggactactctctgatcattgaaaaagagagacagaacattcgatggaggcagaaagagcaaggagtcaggtaaaggggtactacataagtatgtatttttcagcctgtgaaatacctttcagaggtgtaagctccactttttctggaacctgaggtttttcaggaactttcttctttggaatagctttaaagaatatgattttacttttgttatttgtatatttaatctgaagcaagtgattaactttctactccaagaatcaaaaccaagctttgcttataaccagaaagcattaataacagccaagaacagccttcaaagaacatacaagcagcattcgaaccatgaaa

SEQ ID NO: 84739 - DNA, 1554 bp, Homo sapiens
acggacttcccgggtcgacgggaggcaggagagggactacacggacagaaacatccgaaactgaaatcacaacaacagaaataattaagaggagagatgttggtccttatggcattcgatctgaatattgtatcaggaaaatcatttgtcccattggagttccagaaacaccaaaagaaacgcctacacctcagaggaaaggccttcgatcaagtgcactgcggccaaagagaccagaaacgcccaagcaaactggccctgttattattgaaacctgggtagcagaagaagaactggaattgtgggagatcagggcatttgctgagagagtggagaaagaaaaggcacaagcagttgagcaacaggctaagaaacgactggagcagcagaagccgacagtgattgcaacttccactacttccccaacaagcagtacaaccagcaccatctctccagcacagaaggttatggtggcccccataagtggctcagttacaactggaaccaaaatggtactaactactaaagttggatctccagctacagtaacattccaacaaaacaagaactttcatcaaacctttgctacatgggttaagcaaggccagtcaaattcaggcgttgttcaagtacagcagaaagtcctgggtatcattccatcaagtacaggtaccagtcagcaaacctttatttcattccagcccaggacagcaacagtcacaattaggcccaatacctcaggctctggaggaaccacaagcaattcacaagtaatcacagggcctcagattcgccctggtatgaccgtgattagaacaccactccaacagtcaacactaggaaaggcaattattcgaacacctgtgatggtacagccaggtgctcctcagcaagtgatgactcaaatcatcagggggcagcctgtctccactgcagtctccgcccctaacacggtttcctcaacacctgggcagaaaagcttaacttcagcaacgtccacttcaaatatacagtcttcagcctcacaaccccctcgcccccaacaaggacaagtgaagctcaccatggctcaacttactcagttaacacagggccacggtggcaatcaaggtttgacagtagtaattcaaggacaaggtcaaactactggacagttgcagttgatacctcaaggggtgactgtactcccaggcccaggccagcagctaatgcaagctgcaatgccaaatggtactgttcagcgattcctctttaccccattggcaacaacagccaccacagccagcaccaccaccaccactgtttccacgacagcagcaggtagagctgtgggtttatcggaaatgtcggatgttactactacacgtggctgggctaacacaggccaacaggagaaccagtatttacctttggaaggatatgcctcaagccagtgagctcaacagttgacatagtcagcctcacaacgtctcgaagcttttgtaccctattcttacagactccctgttaccaccaccctctccctcctattaaaaaagagagagagagaaaggg

SEQ ID NO: 84740 - DNA, 707 bp, Homo sapiens
ggggccgcctcagtttccctggccgtaaaacgcgggcgatgggcgctcgatgccccgggagacgccgtgtaccgcgggcccttccggacaccgggtcctccttcaggtctcgggcacccggctgcctccacgcggggcgagcgcggcgactgggatcggtccgtgctgcgctcagccccgcttgtcgctatccctctgctccaggggcagcaaaatcagcagatgagcccccagcgcgcctgcggcccagcacactgcggccgtaacagttagacagacggggaacattcatgtgcgtagagctcttcacggggcgatacagaaatgtgtcgttctaaagcgttaacgacctgcaatttgcatatcctccaacacatggattttactgattcaattatggatgtgtgcaaagaatctgctgctcgcaccctgtgaggagggttacctctgtggagccggtgaaggcgatcttgttgatctgagggtgagaagaaattgctgctcccactgtgggcccgaatcctggcacaatgttcaccactcctggagggaacccggcctgggaagaaatcaagatagcacttgaagaagaacggacttcatccaccacggatccacatttgggccgagagagccgtggctgcctcacatccccacagggaacccgggccgggctggatttacccaggacccagaagcagttgacc

SEQ ID NO: 84741 - DNA, 644 bp, Homo sapiens
ggaattcgagagagcaaactctagctgaaagcatgcgtgtgtcacagaccgaaaaccagattgagcaaactctagctgaaagcgtgcgtgtgtcacagaccattcagaagggctatagagagcaaactctagctaaaagcatgcgtgtgtcacagaccgaaaaccagacagagcaaactccagctgaaagcatgcgtgtgtcacagaccattcagaaaggctatagagagaatactctagctgaaagcatgcatgtgtcacagactgaaaaccagagagagcaaactctagctgaaagcatgcgtgtgtcacagaccgttcagaggggctatagagaggatactctagctgaaagcgtgcgtgtgtcacagaccgaaaaccagagagagcaaactctagctgaaagcatgcgtgtgtcacagaccgttcagaggggctatagagaggatactccagctgaaagtgtgcgtgtgtcacagaccgaaaaccagagagagcaaactctagctgaaagcgtgcgtgtgtcacagaccattcagaaaggctagtccatttttcctctggggttttctctcccccattatattgtttgggagcagtttgtttacatttgaaatgacctgaattcaacaagtataggagaa

SEQ ID NO: 84742 - DNA, 324 bp, Homo sapiens
gtttgcctgttgggttgtctctgtagactttggggatcggtccctatgtggcatctatccaccggtgcctcctcagaacctaagtccctctgtcctggctggagtcgctttcatggcttagctcactccactcaactgagctcgggacgagacgatcctcgcctttcatgtaaagcaaattaaattgaaggactctcgcaccaagctgatgagtgagatcctgaacggcgtcaatgtgctgaaactgcacgcctgggagcccaacttcctgaaacagggggagggcatcacgcagggtgagctttcatttgtgcgcacggcggt

SEQ ID NO: 84743 - DNA, 363 bp, Homo sapiens
gattttggtatgtcatgtttccattattaataaatttttcaatttcttaatttcttcattgactcactggtcattcaggaacatattatggaatttccatgtgtttgtatggtttccagaattcctaatattgatttctggttttattccattgtggtcagagaagatgcttgatattatttgaattttcttctttatttccaacctgtttctttggctctaatatttgctttatatatgagtgctccaatagtgaggcgcatatatatttacaattgttatatcctatgctgaattgacaagtataaacatatatacaccacataatagagccccaaactatatctagcagaaactaacaga

SEQ ID NO: 84744 - DNA, 236 bp, Homo sapiens
ttttttttttttaaaagaggactgcatattaaaattcattctgtgcatagcatgcctaggcatgaacactgattcaggatttcagtcacatcaagtttttgtgcacaggaaaggtttgacctttgggccctctactgaagattttgaggaaatcagggtgttggacactgtaaaagtttcctaacataatcttgtactttttgtatgttttttatatacatgtatatttaatgagc

SEQ ID NO: 84745 - DNA, 565 bp, Homo sapiens
ttttttttttttccagtttgtccaagaacctttattggaaaaatgtccaacaagtgatatcactagcagctgaaggggcatgccaggtgagagggggagcacctgaggctccatggaagacattggaggtacgtgcaagtgcagcatcatgccgtctagggtcagacaattccttttatttgcatggggtaagaggagtacccacagaaacacccctctctgagggccagaggcaagataccagggcagctggggatgctcagagtcctgatacaggtgaaatggggcccccatttgggacctaatgggagtaggggtacaactaggtgactctcccctggaccgggggaatgggaaggagatatcccattctgatatccacttccccagggttccagggggcattagacttttgaacagacctacctttctgggctctggttcacagtgggaaagaggatgggtaccaggcctgagattgtggccgctctccatccagaccttccactgtgatgtcacctgggcttgaactgtttgaaggtagccggtcagaacccttgagagt

SEQ ID NO: 84746 - DNA, 476 bp, Homo sapiens
  misc_feature (1)...(476): n = a,t,c or g
cgtgccannggggnnncctgtagacactgttcgtgcggcgtaattcgngcagggctgccacgtgccagcattccctccttgtattttgcccacagatagtggatttggggcccggttgctggagttgagtaaccaaggcctgtttgaatgcctggccctaaacctgcactgcttggggggacagcagatggagcttgctgctgttatcaatggccgaattgtaagcaccacctagccccagatccttagccttttgtttcctgaggtttccattctctgcagntttcatttttcttttctaaactgacattctgtaacctggatctaatctatttctaaaggtggttgagggttttgtgttctaaatctgctttctgtccctcagcgtcgtatgtctcgtggggtgaatccctccttggtgagctggctgaccactatgatgggactgaggcttcaggtggtactggagcacatgn

SEQ ID NO: 84747 - DNA, 421 bp, Homo sapiens
aagattttcagccaacacacggaatctgtattttttcttattagtgagacctttcactctgaattaggaacaaagtgcatgtgtatcatcatgctgattgagaaacttaccaaactgatatttggctgttattggagaggcctgaactggttcaccaacaccatacatgttttctgcagcaactctgaagatgtactctttattggggattaatttggtggccttgaagtttgtatccttgacggtggatgagagcttgtgccacacttcactatcagttgctcgtctctccacaacatagtttgtgatcttagatccaccatcatcgcgtggtgggttccatgttagaagacatgactcattggttacatctgtgatgtcaaaagcagctggtggtccgggtttatctgtgtatggcatt

SEQ ID NO: 84748 - DNA, 401 bp, Homo sapiens
  misc_feature (1)...(401): n = a,t,c or g
agccaggatttgatatgtgactggtgaggggctagccatgatttgatatgtgactggtgaggggcgagccaggatttgatatgtgactggtgaggggcgagccaggatttgatatgtgactggtgaggggcgagccaggatttgatatgtgactggtgaggggcgagccaggatttgatatgtgactggtgaggggcgagccaggatttgatatgtgactggtgaggggcgagccaggatttgatatgtgactggtgaggggcgagccaggatttgatatgtgactggtgaggggcgagccaggatttgatatgtgactggtgaggggcgagccaggatttgatatgtgactggtgaggggcgagccaggatttgatatgtgactggtgaggggtggagcn

SEQ ID NO: 84749 - DNA, 395 bp, Homo sapiens
cggcggttgggtgcccgcggtcacttttgccttcccgggtaagtgcggcggtggcggttggcgccgccggctgacgggcggcttcctgggagacggggagagcacccggcaggcccgcctgagacgtttgaggctcgcgggcgtcactcctcaggggcgtctggtccgagccgggaggcgttccgctaagttcggtgcccgcgggcaccagccggggggggcttcgtccgctttgccgggtaggagggcggaatgtggggttggtacgggcggggagagccggacggggccaacctggaccacgtcagccagtcccgggtgactggctcgaagtagcctcggagttgagaggggtcgaccggggcagcccgcggcgcagccccggcagcgcgcat

SEQ ID NO: 84750 - DNA, 383 bp, Homo sapiens
tatgtgtctaaaaagatgtgttattgtttttttacagtccttcattacagtttgaagctgcttgggcattaactaacatagcatcaggaacttctgcacagactcaagctgttgtgcagtctagtaagtaaattccttactgtctgaactttttgtgttttaatgatggcaaggaagtagagttttgtaataaagaaattttatcttgtaacattttttaaatgatgacttttataagttacttttgatgaccgatatctttttcatagccgtcattaatttatcatgaaaaatttttaattgtggttattaaaagaagagtagagttttatcttttggagtagacatcatgctgtgataacaggattttaaattccgtttct

SEQ ID NO: 84751 - DNA, 386 bp, Homo sapiens
accagaccgccctgttcttccgcgtggctgagtgggattccaccgagaagatcggggacctcttcgtggcctcgttttccaagaccatggcgctagaggtgtacagagactacgtgaacaacttcaccagtgccatgtccatcataaagaagggctgcctaaccaagcctgccttccttgagtacctcaagcgacggtaggtgtgcagcccataccgtgtcaccctctacgggctgatggtcaagcccatccagaggttcccacagttcatactcctgcttcaggacatgctgaagaacacccccaggggccatccggacaggctgtcgctgcagctggccctcacagagctggagacgctggctgagaagctgaacgagcaaaaa

SEQ ID NO: 84752 - DNA, 402 bp, Homo sapiens
ataggctggtcttcaaagcaattcaagatgtgctaaaagaaaaactacataaaagaggtgttcgtattttgactggattgggaaaatattttcaacagttggacaaggaaggaaatggacttttagataaggcagattttaagcaagctctaaaagtgtttcacttataagtgtctgaaaaggattttgagtctgcatggctaattctgaatgacaatggcaatggcaaggttgattatggagaattcaaacgtggtattattggtgaaatgaatgaatacaggaaatcatatgttcgaaaggcctttatgaaactggatttcaacaaaagtggcagtgtgcctattataaacataagaaaatgttactgtgcaaagaagcattctcaagtaatttcaggta

SEQ ID NO: 84753 - DNA, 403 bp, Homo sapiens
ctcagccctgttctggacgttctgacatataaaattgactcttagttctctatatgaaacagagactagacaataggtatctaatattactaaattattttttgtaaatttacaaagaaagcagacaagtttacaaagcttgtattttactgatttactttcagacccattgttgactataaacactaattttttatgtgtttgtgcttttcctccttcaagtgcttttaagatcagccatccacagatcaagaccttttattttgcagctgagaatgtgcaggaaatgaacgtgtaagtagaggaaactggtaaaccccatccttaatgggaatatacttaactttagcctggtactggaattctaatcatatgtccatatcaattattattttatttctgg

SEQ ID NO: 84754 - DNA, 394 bp, Homo sapiens
  misc_feature (1)...(394): n = a,t,c or g
tcgagctcccaaaaccgttctggtgttgggctgcaggtggcggctcattctcggaatccggagatgatgagtatcaaggggaccagtcagacacagaggacgaagcggactctgactttgacattgatgaaggggatgaaccatccagtgatggagaagcagaacagccaagaaggaagcgccgagtagtcaccaaggcctataaggtacagggggagtcctagntgtcttggatttcctcaattcctattctctctttcatgagggcccagtactccctatgccacttgcatttctggcaatgctagntttctctcattgagatcctcatatttctcctgacttcttctggtccccagcatctgattccaatctgtcctcaggaacctctcag

SEQ ID NO: 84755 - DNA, 490 bp, Homo sapiens
gttctggcgtgaaaggggggtgccgggccctctcagggaccagtgttgcttctccagtggttgcaggtgctgtcaccttgttagtgaggtgagtgctgccccctagagaccagtagctcccacgtcaggacaggagcactcggtgccagcagagcaggagtcgtgtcttgcttctgccctgtcttgggtttgagagcttaggcccttcacagccttgctctgtctctccttcttcatctctgcaaagaggtaggagtcacttcttttatagttagatgaagtgaatgtgaacacactttataagcctaagtaaacaaagtgctgataggcaaaataacctgtttctttatgtttgtgttctgttttctaatatcccatttatgtgctagaactgtgatttttatatccaagcaagcataaaaatcaggcagggaacaaatagtaagatatttccctgccatatatcctccatttccttggggattcactt

SEQ ID NO: 84756 - DNA, 625 bp, Homo sapiens
  misc_feature (1)...(625): n = a,t,c or g
tttcgtgtggtgaatcagctggtggctgggggtcagttcagggtggtcaaggagcccctcggctttgtgaaggtgctgcaatgggtgagtgtggtccgggctgttggggcatagtgcagggagagagggaggtcatggggtccagaagagcaggggtggagtatgggcgagtatccagggatgagtgcgggggttgtaggggatgggggaattgggctccagggtgaggtttcaggggtctgaagccagaaaacagatgagctgtgacgtcacatagggctgagggtacccccgttgtgaagtgggagactgtgacgtcctacctcctctcttgaagtgagggaggggtgggggaggtggagcctgtagcagatgctgggtgagagatgcaaagtcagagaaacccagagacagtgaaggtgacagagagaatgagggacagggaatgataaagacagagatggaaatactgagnnnnnnnnnngaaatatggagatgagaagagatacggacttatgagagaagagacaaccggaacctaggaaaagggagacccagaaaccagatgctaagagaaacagacgcagggagagaggcaggaaaacagggtgagggagagagagac

SEQ ID NO: 84757 - DNA, 515 bp, Homo sapiens
tgccccccaaagatgttcgctgcgaagatcatcgcaagaggcaccgcgccggaatggccgggtcgacgatgtcctacccactggggtggagaagggggctagcgggctgcgggaattcagcctccggcgggggctgccaccgagaggaatttcccctctttgaaaaggctggggacccctccaccccaccctttcactgggcttcttaaagagatcacaccgttttcccttggacttcttggaaggcagacttgggacgctttgtggggactttgaacctttccttcctgctttctttccagcaggcagccttgctctggctggtggagtcggggctcccgggcatggcactgactagccgacccggtgctgacttggcgccggggctctttcagcctctgctggcatcctgcttcccccctcctggggtgcagtggtgagtctgggggcctgcccccgagggcactggaggagtgttgcaggcatcacccacgccctctgcacccacgctggag

SEQ ID NO: 84758 - DNA, 417 bp, Homo sapiens
tttcgtatcagccgctggcgtggtgagtcgaaggcaaatcacaagtattgacagtggagggtgattctcaccatatcagggaggcagacaacatcgggagacctccagcaagtaacagggccctgggcctgggcctttggacggaggtggggaaagagcaaggcagggtgctttctctgccctggggcccaagaacccaacaggacaaggctggaggcgatggtgcataaacaggtaccagaaccgactccagggcagagcaggcagggccagacctccagggtgatgtgggcacaggaaccctggaagggactgggggcactggaatgtccagtggggagggacttgggcacagggagcaaattggaggtgagaaagctgcagccatgagcagaccaagacgctgatgttgagagt

SEQ ID NO: 84759 - DNA, 502 bp, Homo sapiens
tttcgttgcagatctgaagagcacagtcaagaccacagacacccgtggaggctcccccaagacatctgcttctctgggactggggacctcgctcaggaccgtggggagttggctgaaggacttggggagcccagaagctgccaccgaaccaagaaccacctctgtgcagaaaagcaaccaccttgttctctattctgctgcccgagacaaccacatcctcctcctcctacacccaaaggctcccatggagagctcagatgtggagctggacctccagaggagcgtgcaggctgtgctccgggagctcagcacccaggcccctgccctgcagagcaaccaaggcatgtggaggtggtccctgcacaagaaggtcgagcgagatcccggtaagagcccagtgctggtccgcattcttctcagagaactggagaaggcggaaagccaggacctccggcatgtcatcattcccttgctgcacactgtaatgtacgtgctcaccaag

SEQ ID NO: 84760 - DNA, 481 bp, Homo sapiens
  misc_feature (1)...(481): n = a,t,c or g
nattgaaagcctgtcgcangcagccaccggnctggaattcccgggccgacgatttcgtggcagccgtcctgcnncnnnccagcgggacgtgttccggggtacccgcttctctgagctcctggctccccaggatgggggagtcttctatggttccactgctccatctcgcctgcccacctggggcacaggggcctcagcaggtgaggtgcccaagcgctgtggggaggcatgagcagtcccaggaaattcctgctgtgaggggccggggaacccagacttttccttagtggattcttcgcagcctagggaaggggcaggaagctgngctcactcctctcctgtctgtcccaggttcaggcctcagggactttacccaggagaagtccgtcttttgccgtatcagggaggtgaggggaactggagaaaacctctgcctcctttttttttggtttggttttggtttgcttttgaagggagtcta

SEQ ID NO: 84761 - DNA, 439 bp, Homo sapiens
  misc_feature (1)...(439): n = a,t,c or g
tttcgtcgtagacactttgtctcgtgggaaatggtgagcgcgtatacactttgtctcatatggaaaacagtgagcgcgtagacactttgtctcatgtgggaaatggtgaacccacatacactttgtctcatatgggaaacggtgagcgcgtatacactttgtctcatgtgggaaatggtgagcgcatagatactttgtctcatgtgggaaatggcgaacccacatacactttgtctcatatggaaaacggngagcgcgtatacactttgtctcatgtaggaaatggtgagcgcatagacactttgtctcatatgggaaatggctggcctgtaaccttgtctccacgatctccttccagttcaggagccggtagcactgctgaaaaggctgtttatgtcacctaacttttcatgcctgcgacaccccactgtctgcaaan

SEQ ID NO: 84762 - DNA, 427 bp, Homo sapiens
  misc_feature (1)...(427): n = a,t,c or g
tttcgtggagaagcagctgtccccgggctgcctgggagtcactggggagtcctagcccgcccttgggcctagggctccctgatgcggcctccactcttcgcagggccagggggcgaggaaggaggagggagggaagagggaagttggggagtgggagagcgtcctccacgaccgcttgggtcctccgcggggcagcctcggggagggtggctgcagggcccggagtcgcctggatcgcagcgccatctcgtggctgctggcaggtctgccttgggccctcttggcgcaaggcaaggaaacaggagctcttcccatcagtgacaggtgcccgccggcccgcagtgagtcccagggggctttctcctgcgtcagggagccaggaggggaagggggcatgggtgctgngaccagatttccctgactctgg

SEQ ID NO: 84763 - DNA, 413 bp, Homo sapiens
tttcgtgatgctagggaaggtcatgggtttcaactcttctcccaaacctctagagaaggcacttttctcactttcgcctgggtctcctgtgcccctgagatccaccatgcatctcccagcctctgagaccccacactcctcaaaattcccattctccagctctctgctgtcatccatgggccctgaaggccaatgacacctgcagaactcccgggagaagggtgtttttacaaagacaagggcagagaggagaaggaggaggaggagagagaagaaagaagaggaacaggaagaggaggaagaagaacaagaggagaaaggaaagtagaggagaaagtatagaaggactaaagggaagaagaaaaagagaaagcaggagggaagaatgagaaaggggaggaggaggaagaaaa

SEQ ID NO: 84764 - DNA, 433 bp, Homo sapiens
tttcgtgtcgtcgcggggcttgggtgccatctccagagggtgagaggttggcaatctgatgccctccctcacacctttcttatagaagagctccaggggatggtgtcagccaggcctctgagagtggcttcccagggtctggtgtctttttttcgataattccagggcctgctttgggtgggggtcttgcgttgggtgcccctcagagcacctgggctggcaccgggaatctgtggattagcctgtatgggtatgagcacaagcatgggagtgcatgaatatggaagcatgtgtgcaagcatgaatatatgaatgtgtgtgcatgagcatgtgagtgtgtgcatgcgtgtgcatgtatgcatgtgtttatgtgtgcctgagcatgtgtgaatgtgtgtgcatgcatgaattgtttacgtgtgtatgagtgtgg

SEQ ID NO: 84765 - DNA, 429 bp, Homo sapiens
  misc_feature (1)...(429): n = a,t,c or g
tttcgtgccgagcctgcgctgggagcgcgggggcctcgaagtcccagggccaaggggagggcgtgggggttccccagaagtttcggacccgggactgggagcggcgcgaggggtccccaagttccagggctggagggagcgcgggggtcccgaagttctggattcagggtctgagaggggactgcgtgggaggttcccaaagttctggacccggcgttggaggaggctgcgaagaggtccccaaagctgcggacctggggtggggtactggggtgggaggggccngacntnccggacccactgactggaggggtggcagggggtcctcgaaatttaggagtctaggacaacgcggaggaccggggtcccggacccagttagaggacgactcaccaaagcagtccccggagttaccgacctgggggtggg

SEQ ID NO: 84766 - DNA, 421 bp, Homo sapiens
  misc_feature (1)...(421): n = a,t,c or g
tttcgtctgctgccatggtggctggcggccgggtaagggtctgagtggatctcctgccaggccagagcgccttcgggggccgcggcggaaggccnnntttgcagccagggcgccgggtttgtggtctgcagtgtcgtgaggctgaggtgggggttgaaggcccagaagccggactctgtgacccgggtcggggggtgtactggaggggcggctacgtccaggctgggtgagaagagaggcagtggggcccaggaggctggaggaagccttatggttcagactggggtgcacgtagtcgagagctcagggtttgggcaaggggatacctgccggggttcagccttgagggtgggtttaccgggttcacgaatctctctcttccttacccccgcccgcccgcctgcctgcctgcttccggtga

SEQ ID NO: 84767 - DNA, 1528 bp, Homo sapiens
ggcacgagcaccctcgttaaccctaacagaaaaaactcatacccccattatgtaaaatccattgtcgcatccacctttattatcaggctcttccccacaacaatattcatgtgcctagaccaagaagttattatctcgaactgacactgagccacaacccaaacaacccagctctccctaagcttcaaactagactacttctccataatattcatccctgtagcattgttcgttacatggtccatcatagaattctcactgtgatatataaactcagacccaaacattaatcagttcttcaaatatctactcattttcctaattaccatactaatcttagttaccgctaacaacctattccaactgttcatcggctgagagggcgtaggaattatatccttcttgctcatcagttgatgatacgcccgagcagatgccaacacagcagccattcaagcaatcctatacaaccgtatcggcgatatcggtttcatcctcgccttagcatgatttatcctacactccaactcatgagacccacaacaaatagcccttctaaacgctaatccaagcctcaccccactactaggcctcctcctagcagcagcaggcaaatcagcccaattaggtctccacccctgactcccctcagccatagaaggccccaccccagtctcagccctactccactcaagcactatagttgtagcaggaatcttcttactcatccgcttccaccccctagcagaaaatagcccactaatccaaactctaacactatgcttaggcgctatcaccactctgttcgcagcagtctgcgcccttacacaaaatgacatcaaaaaaatcgtagccttctccacttcaagtcaactaggactcataatagttacaatcggcatcaaccaaccacacctagcattcctgcacatctgtacccacgccttcttcaaagccatactatttatgtgctccgggtccatcatccacaaccttaacaatgaacaagatattcgaaaaataggaggactactcaaaaccatacctctcacttcaacctccctcaccattggcagcctagcattagcaggaatacctttcctcacaggtttctactccaaagaccacatcatcgaaaccgcaaacatatcatacacaaacgcctgagccctatctattactctcatcgctacctccctgacaagcgcctatagcactcgaataattcttctcaccctaacaggtcaacctcgcttccccacccttactaacattaacgaaaataaccccaccctactaaaccccattaaacgcctggcagccggaagcctattcgcaggatttctcattactaacaacatttcccccgcatcccccttccaaacaacaatccccctctacctaaaactcacagccctcgctgtcactttcctaggacttctaacagccctagacctcaactacctaaccaacaaacttaaaataaaatccccactatgcacattttatttctccaacaaaaaaaaaa

SEQ ID NO: 84768 - DNA, 401 bp, Homo sapiens
tttcgtgctgtttgtgcagtggagacactgtggcctgtagaaggcccattcggtgactggcgagccgcccacccacccaggccctgcacaccctcagtgcaggtggaagcgagagctgggcttcctggcgtggggcctccgcccttcctgtcctcccttgcctgggctgcgcttgccgactctcctcccagagacccctcctcccagtgagccggggcatttcctgtttgctgcatccccctaccccccctacagagtcaccctcctccctgtggcttccacagggctctgttcctaacccaggaagatgtaccttccccaggcccattgtctgccccagatcctggggacacagagagcccagctgtagcctggctcccgggccagtggtgtcccctggg

SEQ ID NO: 84769 - DNA, 401 bp, Homo sapiens
  misc_feature (1)...(401): n = a,t,c or g
aaaaaaacccccaaaaaacacagaaagtactcctataaacccttcttaataattgttagaataaacagaccgaaaatcagtaaagagagagaagacttgaacaacactattaaccaatttgacctaactggtataagacgctagccaacaaaagcagaatataccttattttcttgaggtatagagatctataggtatctataggtatctattcaccaagatagagtttactgtgggtctcatacaaatctcaataaatttagaagcattcaaatcatacaaactatgttctttgactacattgaaattaaattagaaatcaataacagaaaggtatctagaaaatcctcaaatatctgcacactaaatgccatgcttcaaaataatccatgggtgaaacn

SEQ ID NO: 84770 - DNA, 403 bp, Homo sapiens
  misc_feature (1)...(403): n = a,t,c or g
cctggcttgatatttgactaggggactttttggagatccatttaaatgtatcttagaatgggcagctgaaacactccataaacccaaagccttagaccggaacaactgctgtgtatgttctctttcacagagcaccagcctccctacatcattgcagtgttgcctcgatatgttgagatccgaacatttgaaccgaggcttctggtccaaagcattgaattgcaaaggccccgtttccttaccctcctgaggtaatgaatttctttttttgctatggctgtatattatcccaaagttgtaaagtcacctgtgtcatcacaaagcctgtgatcttttgctaatattcttactcttgcttccagatcaaacattatctatgtggccagcaatcattttgtttggn

SEQ ID NO: 84771 - DNA, 380 bp, Homo sapiens
aaaaatcagagaagagctgtgtttcctctcttgctcactttgggacctcttgccaacgggactatgatgcgatggtgaagctggtggaaacactggagatgctgcctacgtgtgatttggccgatcagcataacattaaattccactatgcgtttgcactgaataggtaagaacgataatgtacgtacaggttttgaaacatgccacccattgaattgtgcttccttctttcattcaacatcgggtatgagccaggtcacgtgctaaatgccaaggttatgaagatggacaaggtccagtctttgtcctcagggactttgtatttggcatacacattctagctgtgagattgaacacatcaatccatcctaatagcttag

SEQ ID NO: 84772 - DNA, 401 bp, Homo sapiens
tgaatgaagttacatagggacttgtttttattttttatagaaaaaaattccatactctacatgtgtatatatactttgaacaagcataaagaaacgtggagcgggggatgtagtggttaacagcacaacgatgtatttggtgtagaggaaggagtacctcttcatgaagaagctggtgaacaaccaaaaacatttgtccactgcagaagtcttttaaattaacaaggcgaaggagctggagtcattttgaagcaaccatgaatgcatatgtcttatgtctacaatttcagctacctctgacttttgaggatgctgctatttatttctccgagcaagaatggcaggatctataggcatggcagaaggaactttacaagcatgtgatgagaagcaattatgat

SEQ ID NO: 84773 - DNA, 405 bp, Homo sapiens
agaaaccaaaagcaagcatgagtagctacactagtatcagataaaatagactttaagccaaaaagcggcaaagaaggtaattctataatgggagagggaccatttcagctagaagattaaacaattctaaatatttgtgcgcccaacactggagcatgcagatatagaaagcaaacattattgaatctaaagggagagactgagtccaataaaatcagattaggtgtcttcaacaactgactctcagccttggactgatcatctagccaagtcatcaacaaagaggtattggatttaaacttcgttttagatcaaatgcgcttgatagacatttacagaacatattgtccaacagctacagaacaagtattcttatcacatgggacattcttgaggctagactat

SEQ ID NO: 84774 - DNA, 393 bp, Homo sapiens
aacaaattatgttcatagatgtcctgacactaaatacccttacattcttggagtaaaatctactattcatggaatttgatcattagtgggttctatgtactatttctttagactattcttagtagattttcactactcaacctactaataataataaacaaagttttgttggctttatcaaatgaattgatgagtactccatctttttctattgcttagaatagcttaagtaacatttgaattatccattgtctaaaagttaggtgagactcacttatgaatccatttggtcctagtggcatttgcaatatctttaatcacccctccaggctcttctatgataatcagtcaattcaagtttcaacttccaataattatatacctttctaggaa

SEQ ID NO: 84775 - DNA, 391 bp, Homo sapiens
taaaaaattcatttcctgctatcattgttaatacttttgttttcctcgtacgaaaagttacagtgtatagcttttgactttctacttgataatttttaaatgaatgattttttacatgttaccagtaagcagttttcagtgaatatacatttctctttaggttggtcctacagctacacaagctatgcaagaatttcttactcgattacaagtgcatctttcttcaacatgtcctcagatattcagtgaatttttgctcaagctaattcatatactttcaactgaaaggtaaatttttgtgtactaatttgttcctgatatagaagtaacatgtaattctccaaatatacttttctttaacatttggtgggaatttatctgtgaacaaata

SEQ ID NO: 84776 - DNA, 517 bp, Homo sapiens
attttgctttaataatggttaaaaagcgtttagcattctttggaaggaggtcatcagataggagacattttctaggatttatttctacctgcatatgtggaaatgtgtactactttagatttatttaatggcagctaactcagaggcatcaaaatgtgctaatggtgtaatatggcctttgtcttgctgttctgttttgtaggccttcaatcaagcaggggcagggccgtacagtgaacttgtcctttgccagacgccagcgtctgcccctgaccccgtctccactctctgtgtcctggaggaggagccccttgatgcctaccctgattcaccttctgcgtgccttgtactgaactgggaagagccgtgcaataacggatctgaaatccttgcttacaccattgatctaggagacactagcattaccgtgggcaacaccaccatgcatgttatgaaagatctccttccagaaaccacctaccggtgagtgcaagggagtagaaatctgcatcagcac

SEQ ID NO: 84777 - DNA, 482 bp, Homo sapiens
  misc_feature (1)...(482): n = a,t,c or g
ggacatnagggnaannnnnnattgatgtcgtggacagcatcaccggnccgcaattcccgggcggaaatgtcaaacgtggagggctgtgcctggctgctcctgagaaaactggaagatggtgtgccatgtcagatcacgaggccacgaagtgcaccagtttccgagacaatatgaaaaaagtgtttccagcagatggtccccttgtcccctgcgtggagagagcgtcttcccttgagtacattaaagccatcacagaacattttggaaaagacaagtcgtcagaatttcagctctttggctctcctcatgagacagatctgctgtttactgatgctgcccatgggtttttaatggtcccacctaagatagatgccaagctgtacctgggatatgagtatttttccgcgactcaggatccaaaaagagtcactccaggaggggttccactgccaccatttaactgaagaaaaatttaggctccn

SEQ ID NO: 84778 - DNA, 413 bp, Homo sapiens
gggtccccatgaccatccacaggttcagtgactcactaggaggactcacaggactcaccacatagtcacactcacagtgagtcactcttattaggtaatggtgggaatcctccccaaacccatgttcccagatgccacccaagggccaagattgtaagcaggcctttcgacggatagtagttcaaacctgctatgtttacttttttctgtatactgacaaattagacaccttagatgaaatgaacaaattcctaaaaatatacagattgtcagaattgactcaagaaaaaatagcatatctgagtagctataataagtaagaaattgaattggggattaaatatcttcccatgaaattcgctggtgcagtctatcaaatatttaaagaaaaaataatactaatccttcacaaa

SEQ ID NO: 84779 - DNA, 838 bp, Homo sapiens
ttttttttgtgaaatgagtcctttattttctctacttttggaagtttttcccaggggtgggggaagaatggtgttggggatcgcggttgagagatgcccagcaacttctctagaggtgcgggtgaggcgtgtgcacttccttctcctggctggggcctggtgctatgttttgaagaagctcctgtggctgacattcatctagtctaggatgtcgccacattccaggttgtccagttcgctctgcatgtggtcgatgtactgattgatctccttcacgcgcttgcggttcctcatgatctcatccttgtgaatcctgtctattaaacgtgtacaccaagagttgattctggtcaccagctcatcttctcgattgtcaatcttcaggaggtggatgtcgtgcgatgccccgacagcattaacaatcgtatctttatcgacaaaaagcgcgcgcaggtcgttaggcaggtcctcgtccaggtcgccctcgacaatcttctccagggtgctgatagagatctccaggagcttctcgtggtggtgattctccaggtcccggcactgagccatcgtgcagccccgagttaagcaaaggcccgggaggagcaggcccggcgcgtccctgatgctctcagacggcgggagacagactttaagggcccaaggcgagctcggaaattctggctggcagcaccgtccactcacaagctccgaaccctgggccttcctcgactccctgcccctgccccacacctcggacggaccctcggcccctgccatcacactcttctctcccgaattccaccgcacggcctaatgacatcgatctcgaggggggcgt

SEQ ID NO: 84780 - DNA, 463 bp, Homo sapiens
  misc_feature (1)...(463): n = a,t,c or g
aagtataaaaaaattccgtgacgaggccagaaggtgagaagaatcagaccgctccaggcacctccctccccctcatcggatccggcccaggctccaggatcctgtggaagcagctcccagcccaggcacgccccctgcagcccacccctccctctcgctgcccccagcagttaggaggcagccggtcccatggtgggccttgcagtccgaaatgtggtcccctggggggacagaggacatgggctcactgcgggagccggagttgggtcctcatctccctggcttggattcctgaccaggctgaaagctgggtccccagccacctttctctttcctccaccaggttccaggggggtccccctgtggggtgcctcctggggtggtcgccccgnaggccgccctccgcctgtgcctaggccagagccaggcactgacaccagcagggacgggcctgggggggaca

SEQ ID NO: 84781 - DNA, 495 bp, Homo sapiens
  misc_feature (1)...(495): n = a,t,c or g
agttannagnnggnncccggttcgtagaccncccagggtgcttcggatacacgaagaggggctntaagggaggccacagacctagngtaggctctttctaggacttccactcgccttctggggaggctcactgctgcccccgccctcagctccatggccttctagagtgtggcctttgtgcctccctggacgtcacagttgctgagatggtggcatccagcccgctgtgggacctgggggactaccactgccctctttgccctctgtccctctgtccccttggcttggtgcacgctgtctcacttgggtctctgtaggacacggtcctgggcacctgtgccccggaggtgcctgctgcagcctcacagcccaccttcctgccctgggtccccgagcgcgggggtggcgagttggacctggtagtgcgggagctgcaggcactggaggaggagctgcgggaggctgcggagcgcangcgggcggcctgggaggcca

SEQ ID NO: 84782 - DNA, 710 bp, Homo sapiens
gccaaagtcaggattgcagagcagacggagaaggacattgacctgacgcgcatggagtacatacccgtggccatccgcacccagatcctcttcttctgtgtgtccgacctggccaacgtggaccccatgtaccagtactcccttgagtggtttctcaacatcttcctctcgggcatcgccaactcagagagagcagacaacctgaagaagcgcatctccaacatcaaccgctacctgacctacagcctctacagcaacgtctgccgcagcctctttgagaagcacaagctgatgtttgcctttttgctgtgtgttcgcatcatgatgaacgagggcaaaatcaaccagagtgagtggcgatacctcctgtctgggggctccatctcgatcatgactgagaatccggcaccggactggctgtcagaccgggcttggcgagacatcctagcactctcgaacctgccaaccttttcctccttctcttccgacttcgtgaagcacctctcagaattccgggtcatcttcgacagccttgagccccaccggttagctgggccccagaatatggcaggatgagcccatcgaggggatgagtccctaggaaaggcttgtctgggcgccttctctaaggggccacccaaggttgccctgtggctgtggccacatctcctctgtgcctccagtgccatacccctgggatagcccactct

SEQ ID NO: 84783 - DNA, 452 bp, Homo sapiens
  misc_feature (1)...(452): n = a,t,c or g
atgacttcttagaccatagaccgngcggnggaattcggtgaattgctgcgggagagagtgcagcggatggaggcacaggagggaggctttgcacagtcgcttgttgctctgcagttccagaaggcgtcccgggtgaccgagactctgtcggcctacaccgccctcctcagcatccaggacttgctcctggaagagctgagtgcatctgagatgctgaccaagtcggcctgcacacagatcctggagtcgcacagccgggagctccaggagttggagaggaagctggaggaccagctggtgcagcaggaggcagcccagcagcagcaggccctggcgagctggcagcagtgggtggccgatgggcccgggattctgaacgaacctggggaggtggattctgaaaggcaggtctctactgtcctgcaccaagccctgagcaagagccagacatt

SEQ ID NO: 84784 - DNA, 482 bp, Homo sapiens
  misc_feature (1)...(482): n = a,t,c or g
ggcgtttgagtcatagccgtgnggnggaattccccggtcagccggaagacannnnnccttcctcaaggataacccctacccaccccacctcaggaagagacgcagagtcagtctcccctgtggggactgggagtcagtcaggtactgtcagggtggaaatgagaagctgggcccccttgcccagcctggtctccagcaaggcctagctagtggctccctgacctcacttcccacaccacctcctcccatgacagcctgcccagggagagaagacacagccacagggacaaggggcttccagcccagctgagaacacggctctttgcccctgacctccagcctcttcttccccttgttcctttcccttagaggacagctttatggactccccggctgagctgttgtgaccggcacccccaaagcagcccctcaggaagctctcaccctctgtgcccaatccctggggcaactcccctgtaccc

SEQ ID NO: 84785 - DNA, 481 bp, Homo sapiens
  misc_feature (1)...(481): n = a,t,c or g
nggcgttgagttcatggccatgtcgnggaattcctttactttgtcatctgcattnnnnnggggggtctaattatttctgaaattcctgtattacaaaattttcatgaatattgattggccttgtccacattgaatttgaattagtgtaaaaccgagcggtgccattgtttttaaagacttagtcatcaataatgttttaactgttccatggatttatttctgtttactataggatgaagtgcatgaaagggatcgatttagtgattttttacttacaaagttaagagatttgatgcaaaagcacccaactttgaaactaattctttctagtgctgccttggatgtaaatctctttataagatattttggaagttgtccagtgatatatagtaagttaaattgtcagatttcttctataattcttatgaaagaacactcttggacattatntatcctaacagaaactggggaatgttctgat

SEQ ID NO: 84786 - DNA, 397 bp, Homo sapiens
cccacgcgtccggtacattttaagcgggagcctacatatgtataaaatatggcatgccggcgtgtgttggccaaccaatacatacctgatatcagccctacagagcgcacacatgaaggcattgctaccaccaacaaaatggggagcatgagggagggcgtcattcaagtacgctccagccggccagccatgctcctccagtgattgtggttgtaattgctaagccagtgaattcagcttctttaaggcttctcatttggttacaagatttttttctaaaataaaagttatgtaaatattgtaggaaaatgtataactttaaagagttgaaaggaaatgcaagcttttttctattttgttttccctgtaaaacttcagcataagtgaagttaacttg

SEQ ID NO: 84787 - DNA, 379 bp, Homo sapiens
aaaaaaagaacaaatgaacagtataagaacattagttggtaagtaagaattgatttaagtcccctaaatgttagaaattcagaatgagattaactttttcttttgctagacaatgcgtacaggtgtgatccaaggataaaatagttcaaggaagaagaaaaagccaagaaagaagcataaaagaaagcaaaagcagaagctaaacggaaggagcacgaagcttatgaaaaagtatgacaacatttaatgaaggtggactttaaacgtttatgaaatctttaatcttcactttaatcttcacatctttttttaaaaaaaactataattcgaaagcagagaattgggtgctactgtgaatgaatcatgaccagctgggata

SEQ ID NO: 84788 - DNA, 381 bp, Homo sapiens
ctctttctgtggtggaagcaattgaaaagagaataatcagtgagacagttggactgaaaatcttagaagctcacctggcaactggaggtttcagtctttcccctagtgagaactgtattaacctggaagaggcttttcattaaggcctcatttctgcatggcttcattcagtattagagtcttatcttagaacatccaagaatttgatagaccctaacacagctgagaaaattggtttgctggatctgatgcagcgatgtattgtccaccaggaatcaggattcaaattactgcctgtcaaacaattggcaggggggatggtgagcttgaaatcaggccggaagggttacatttttccgtgcagttcaggaagggctaata

SEQ ID NO: 84789 - DNA, 398 bp, Homo sapiens
accttgagcattaggccagttctcctcttctctctaatccatccgtcacctctcctgtcatccgtttccatgccgtgaggtccattcacagaacacatccatggctctcatgctcagtttggttctgagtctcctcaagctgggatcagcactgggctcagttcctctcatttccatcacgggatatgttgatagagacatccagctactctgtcagtactcgggctgattcccccggcccacagcgaagtggaaaggtccacaaggacaggatttggccacagactgcaggacaaacagagacatgcatggactgtttgatgtggagatctgtctgaccgtccaagagaacgccgggagcatatcctgttccatgcggcatgctcatgtgagccgaa

SEQ ID NO: 84790 - DNA, 498 bp, Homo sapiens
agtacaaggaagtggtgacacagcatttcctatgagtgacctatgagacccaccccatatattatctgaagatcagccaaccatctggtaatcccaagaaaatcatttggatggactgtggaattcacgccagagaatggattgctcctgctttttgccaatggttcgtcaaagaaattctacaaaaccataaagacaactcaaggatacgcaagctccttatgaacctggacttctatgtccttccagttcttaacatagatggttatatctacacttggacaactgatcgtctttggaggaaatcccgttcaccccataataatggcacatgttttgggacggatctcaatcgaaatttcaatgcttcttggtgtagtattggtgcctctagaaactgccaagatcaaacattctgtgggacagggccagtgtctgaaccagagactaaagctgttgccagcttcatagagagcaagaatgatgatttttgtgctt

SEQ ID NO: 84791 - DNA, 497 bp, Homo sapiens
acggagtctccactgctggtccgaccatatttaccttacatcaccaagtctgaactccacgccatcatgaccgccgggttctctaccattgctggaagcgtgctaggtgcatacatttcttttggggttccatcctcccacttgttaacagcgtcagttatgtcagcacctgcgtcattggctgctgctaaactcttttggcctgagacagaaaaacctaaaataaccctcaagaatgccatgaaaatggaaagtggtgattcagggaatcttctataagctgcaacacagggagcatcctcctccatctccctggtggccaacatcgctgtgaatctgattgccttcctggccctgctgtcttttatgaattcagcccttgcctgggttggaaacatgtttgactacccacagctgagttttgagctaatctgctcctacatcttcatgcccttttccttcatgatgggagtggaatggcccgacagctttatggg

SEQ ID NO: 84792 - DNA, 394 bp, Homo sapiens
ttcttgccagaggcttttcagcaggaatcttagctgtcactgctttggggactattgtgatccttctctctagagctctttcaacgtcctgtgctgactgccagctccttccagcccatcgaagggggtccagtgagcctgaaatgtgagacccggctctctccacagaggttggatgttcaactccagttctgcttcttcagagaaaaccaggtcctggggtcaggctggagcagctctccggagctccagatttctgccgtgtggagtgaagacacagggtcttactggtgcaaggcagaaacggtgactcacaggatcagaaaacagagcctccaatcccagattcacgtgcagagcaagtatcagtgaggctgagcctggagaaaaaaag

SEQ ID NO: 84793 - DNA, 383 bp, Homo sapiens
gggagagggcggcgggcgacggatccactctgtgcctgtggtcctggtgctggaggctggggtgagaaggcgcaagcttcttgtctccaccgaggcctcagtggggctgtttagctgtcgagtgcagcacttcctgtgcctcgaaagacagccccgtgtagtcagcatggcgcccacatagccagaagggcacgcagcccagggcagagtggccacagggggctgggctcaccccggctgccctgggtggcccccaacccttccttgacccgatgctcaaacagtgctacaaggaggacggcagctccaagagccctgactgccctgtgtgcagccgctccctgaacaactggcgcagcccctgcccatggcccactgtgccc

SEQ ID NO: 84794 - DNA, 400 bp, Homo sapiens
gtttatacagcatgccactttgaaggggttaagtggttttaataagttgaatatgttttttgttttcaactaaagattaagaatatatttctttatagcaatgcaagaaaaaaattaaaattaaaaaaagaatgaagtagaaaaattactattaaaagtacatggatatgcaccaaacaacagagctttaaaatatgatgcaaatattgagagagctgaagggagaaatagttttgcaataatagttggagacttcaataccctacttacaataatggatgaaacatccaagtagaagatcaataaggatatagaggacttgaacaatactgtaaactgactagacctgacagacatgtataaaacactccactcaacaacagcagaatacgtatccttc

SEQ ID NO: 84795 - DNA, 395 bp, Homo sapiens
  misc_feature (1)...(395): n = a,t,c or g
gataatttgtgtttttgatttctctgcaaatgcaggttttgttagctattggtcgcgactcctgtacaaggaaaataggcttggagaagattggtgtcaaaattaatgagaagagtggaaaaatacctgtaaatgatgtggaacagaccaatgtgccatatgtctatgctgttggtgatattttggaggataagccagagctcactcctgtcgccatacagtcaggcatgctgctagctcagagactttttggggcctctttagaaaaggttacttttcttgtagaatgtcccactttctgaatttctccagttgtttttgcatgagtgtgttcagatgaagaggtttgggcacggattctccatgaggaatgccatgttctgctttgcttcatn

SEQ ID NO: 84796 - DNA, 403 bp, Homo sapiens
tcccggcgcacgatcctgatcgagaggttgcattttctcatcaacttcctcaacaagcagctggagcggatggtctccgagctggggggggaagaagtggggcccctggagcttgaaatcaaaaggctgagcaagctgatcgacgagcacgatggcaaggcggtccaggcccaggtgacctggctgcgcctgcagcaggagatggtcaaggtgacacaggagcaggaggagcagctggcctccctggacgcatccaagaaggagctccacatcatggagcagaagaaactacgagtagaaagcaagattgagcaggagaagaaggagcagaaggagatcgagcaccacatgaaggacctggacaacgacctgaagaagctcaacatgttgatgaataaaaacc

SEQ ID NO: 84797 - DNA, 414 bp, Homo sapiens
  misc_feature (1)...(414): n = a,t,c or g
ttaactgatgggattcatatatctttaacaaccaccgatatcgagaggcaattcagaggtgagaggaaacactactgataactcctaatgatgctaccctatacgagatgaacacacaggtaatatttatgagaaaatacactttccttataaaattgngctatgtttgttcggtgagtgagcaatgatgaagcaaaatagcattttctcccattttcttttacaaatacggtttctttgggaaaaaatatttcaccattatttatggctctgtcttatgcataaaactggaaattcatttgcctttacaatgaagttaactgttattttagcctaactattgcaagataggaatcggtggctatcttttatagtcactggtgggcaggtgccatggctcacgtctgtaatcct

SEQ ID NO: 84798 - DNA, 488 bp, Homo sapiens
  misc_feature (1)...(488): n = a,t,c or g
nggaannnggggaggcccgagtccnnnaattganancctgcntgtttttgcagaactacnggnnnggaannnnngggncgacccacgcgtncgnggatgnncaaaagacattgaattggatccttgcttagttccaagcgcctacaaaggctagggaaggaccagtaaccatgcgataaaggaatagctcagcatagggtcagaaatgacactagccgctgacaacaaaagaatacttttccattttaacgcaaaagcaaaacaaaacacatgaaacctggagcatgttgtatgaatagtaaggcacaggaatcagtttttaaaaatgtactctgtaacccccctgcactttcagaaatgccagacgtgaaagctgaagatgaagtggattttagagcaagttcaatttctgaagaagtggctgtagggagcatagctgctacactgaagatgaagcaaggcccaatgacccaggcgataaaccgagt

SEQ ID NO: 84799 - DNA, 847 bp, Homo sapiens
caagaaaagtggaagtgtagtctggaagtagccaggttttaagttaaccaggttacactcttggtggttcctggcgtcctatcaagagaaggaattatggccccagagctgtgcctgggacccgcatgtctgtcacagatctctgctgggaagccaggctgtggcccttccaaggtgaatggtggtttccatccagggttcaggtttcttagcagctagtggtgacggtcagggtgtgagtgtggggacgtggctggcgtggtgacgggtgtgtgggggcatcattgggagtgatggcgatggcttgtcttctcaccggccggtttggagtccagaaccacatgaatgacctcagggtgggtcagaacaaggagctgtcagtctgagacctctcagtgtgctctttcttggctagcaagttactttaccttggtagtcattagcttcttctttgactaaatgaaaaggattgtatctacatgctgctgtgcatcatgaaacatgttacaagaaggttaaggatatccaggtagcggacgctgactgagcacgcgggtcactggccgtattcaggtctccacccggagggacctggtgtgggtacccgtaaactgggcagaggggaaccactttaacaaaatgaagctttccccataaatctgggagccttcgactgttgacagggatacattcccctgcttttagattcgggaggacgaccccactggggacatgcgtgcatgctgcccccccctccgaaagggacgacagagtttaggacacctgcggacagaaaggtttggtgctttgccaggcccagctcccaccttttttattgaacgaaggc

SEQ ID NO: 84800 - DNA, 654 bp, Homo sapiens
ttttacaaatccagagttttttattggattcccacaaacataaattactccgtcaaattgccatgaaagtttgagtgtatacttgcaattttggaacttaactcctggcagaccagtaacagagcttggacagcaaggccacagaccacagcattcatgaggaaatgtattttgacctcaatgtgataaaatgctttatgagggggttgtcctgcagtaactatagggaaagcctggctttgaaaattaatgtttacaaatatgaacttccaaatgtgaaccctcactgaataaagcacaatttgtaggggaaaaaaatatcaggctgtttaaatctcttatggactagttggctttgcttttggcctattgttcaaatggggctatttattccaaaatgcttgttctgcagacagcagatccatcaattttttaatgaagaacatagcctacaattacactgtaactggcatccgaagtggtggggtctgttaagaacatgaggcgctatagtttgtactaacatcctatgggggttcattttacaggtatcattccttggaatgctttccccggaaaaatatgtggctctgccctggagaacatctgcaacacaaacgaggtaaactccccacgcgtccgcccacgcgtccg

SEQ ID NO: 84801 - DNA, 402 bp, Homo sapiens
  misc_feature (1)...(402): n = a,t,c or g
tactcgtaaatagagaacttatatgggtgccttgtgaacaagtacgcatttttaatttaaatgtgtcactaaacattcccgacggactttttgggattttgactggaacagctaacgacactctctgcgaatgtgtaacagaactcatcacaacagaaaacgttatctccatttctttaataaacctgtcaagtgaatcagtaatgttgttacctggtgatatagaattagtgattaacatccttccatgctatataccggaaccctgngaaacttataattntccttctccaaattttatcaagttgtcactaattaccaataaagatttctatgtagaatccaataattacacantgcannatttttgatacatgtttgaatgtcctgatgaattgaagc

SEQ ID NO: 84802 - DNA, 404 bp, Homo sapiens
aacacggatgcctgtgcttactgaggacctagaagtcgcgttttagaggacccgcatcctggcccccagcccggagttgctgatccacacacctttgattatcatggagctctcctaggggtacgaacagggggtgcccttcctggacgcggacaggttatccctggcggtacaaaaaggggagtgcttcggcctgctcggcttcaatggagcccgcaacaccacgactttcaaaatgctgaccggggaagagagcctcacttttggggatgcctttgacggggggcacacaatcggctctgatgtcagaaagctgctgcatctgtggcttgaaaagggcccagcacatgcctctggacagcgagacaaggtgcggcagcggatcggctactgcccgcagtttg

SEQ ID NO: 84803 - DNA, 388 bp, Homo sapiens
  misc_feature (1)...(388): n = a,t,c or g
taatttcattagtctacatggcgaggaatagaggaggttcagagaagaatatacatgtattttgtatacctcagaattttagaaaagagaatcctgaatatttttttggaggagttgaggaagaagtaactgaggtttaaattttatctttgcagtgatgcctgttctgaccgtcttatttaaaacttaacaatacctgaccccaccccctgccacatacttctcttttccccatagcacccatcactttctagcatgttacttattatttattgtgtatatagttttttgcctatgtctgcctgtatagnagaagcctattatcactatccctcaaattanccagtgtgtgtggacaaagggcaaaccaatgttgatattaacaaan

SEQ ID NO: 84804 - DNA, 384 bp, Homo sapiens
agcagatttgagcaggcagaagaaagaatcaccaaatttgaagatagatcaactgagattattcagtctaaggagcagaaaaagaaaagagtgaagaaaactgaacagagcctaggagacctgtgggataccctcaagcataccaacatacacagaatgggagtccccgaaagagaagagagaaagaaaggagcagaaagaatatttgaagaaatattgtcttataaggtctgggctataaagaaaaaaatacttgaagaaataatggttgaaaactcctcaaaagtgataaagacatgaatgcacatctaagaagctcgacaaactccacataaaataaacctaaagagatccacactcaaacagattataaccaaattgttg

SEQ ID NO: 84805 - DNA, 381 bp, Homo sapiens
gaacgctggccgtccacccaggaatggatcgtaatctcctatattttcaccctgggaatagaaaagatgagagagattctgatgtcagagccagggaagttgctacagaaagtgaaggtatggctgcaggagtactggaatgtcacggacctcatcgccatccttctgttttctgtcggaatgatccttcgtctccaagaccagcccttcaggagtgacgggagggtcatctactgcgtgaacatcatttactggtatatccgtctcctagacatcttcggcgtgaacaagtatttgggcccgtatgtaatgatgattggaaaaatggtaagcagggtcttctgattccatgttataagttttcagaggaggaatggtgat

SEQ ID NO: 84806 - DNA, 395 bp, Homo sapiens
ccgacgcgtggggccctacgctactggatcttcggcaggttcttatgcaacatctgggcggcagtggatgtgcggtgctgcaccgcgaccatcatgggcctctgcatcatctccatcgaccgctacgttggcgtgagctacccgctgcgctacccaaccattgttacccaaaggaggggtctcatggctctgctctgcgtatgggcactctccctggtcatatacattggacccctgttaggctggaggcatccggcccccgaggacgaaaccatctgccagatcaacgaggagccgggctacgtgctcttctcaacgccgggctccttctacctgcctctggccatcatgctggtcatgaactgacgcgtctacagggtggccaagacggagaa

SEQ ID NO: 84807 - DNA, 413 bp, Homo sapiens
atcgagttggaggaattctttatgtattctaggtacagattctttgacaaacacatgtttgatgaatattttctcccagcttgtggcttgcttattctattaacatcacttgtgattagaatttttttcttttatgtttattgctttccgtatcctgagtaagaaatctttgcctaccccaagatcacaaaaatattactttatattttcttctggaagctttatagtttcagctgtcaagcttaggtctatgagggaggaattgaagttaattttttttcatatggctatccagtttttccagcagtattattattattccaattaactaattaattttaattgagaaaattgtatctacttactaggtacatgttgttttaaaatacgtatatattgtggaatggctaaat

SEQ ID NO: 84808 - DNA, 408 bp, Homo sapiens
catgcactgaaaacccctctgttggtggatgtacgagctgtttcctcctttgggctgctatggagaatgccgctgtaagcgttcacgtgagcatctgtttgaggccctgctctcaagtctttggggtacacagtggtcctcttattatcaagggaaatgctctaagacctctagatcataaagctttacccccatgttttcttaggagttctgaggttttggcttcctctttaggttgagagcccattctgagttaatgtttgtgtgcggagtgaggtgaggacccagatttattcttctgtgtgtccagatcgagttttcccaacaccatctggtaaaccagctgttctttccccattgaatggtcttgacacccttgttgaaaatccgttagccatagataatatg

SEQ ID NO: 84809 - DNA, 395 bp, Homo sapiens
caaggagtctgtaaggcatctccttcctcctcaaacctaaaggatgggaagccatccagggaaggactggcagatatacttcacccacgtgccaaagaagaaggacatccaatacatcctggtatgggtagatactttcactaactggatagaagcatttccatgctgtacagaaaaggcctccaagcgataaaagtcacaggaatggactcctggatgcatcactcaagtcaaagcctggaaacctgagagagagagcaaccccagacagcccagaggaatgtcctggatatccatgtgaagaaataggagatcttaagctgaaaatcataaaagataagtaaatgagtaagggctattcatcctactcagtcccactcctaccttatcagata

SEQ ID NO: 84810 - DNA, 395 bp, Homo sapiens
aatttatcatttaaatttaagaaatcaagggtaaataaggcttgtgctagtggtgttggagggtgcttactcatagacctgctttgttgttttttgagcatatttttaagggtggcgtgggtacgttctactatggcctgtccttgggggttatacaggatgcttgtggaatgttggatgttccatgtgtgacaaaattgttgaaattgtgagctggcataagccataccattgtcagttttaatttttgtgggccgccccataaaggcaaaagttaaaagaagatgtttaatgacgtgtcaggtggactctccaggaaaggcatgagtgctaattaagtgagaatcattatcaacagatacatgaacatatcttagttttcaaattcagggatg

SEQ ID NO: 84811 - DNA, 250 bp, Homo sapiens
gcagcacaaagacattagcaggctgctggtttcatggacctgtaccacaatgacacagagaacaccagagcatcaggactgaatgaaattggagtttttaaagctgcactaagaagtaaatgttaaggcagtggttaaaaacaacagtctataaaggggcacttgcaaattgtgctgtcttaaaccgaagaaaaggtattagggaatattttataaaaaataaacttgcaataaattatgaaaaaaaaaa

SEQ ID NO: 84812 - DNA, 383 bp, Homo sapiens
attcagttttcccccatcgaatgctcttggcaaccttgtcaaaaatcaattggccatttataggagggtttattcctaggctttccattctgccccactggcatatgtgcctgtctttatgccagtcctacgctgttttgaatactgtagctttgtagtaagttttgaaatcaggaagtgtgagtcctacaaccttgttctttttaaagatcattttggctatttgggaaaaacattaattttaaaaaattactacttgtaagatctgtgtgaaatttctaccttctgaaaatatgaattcttctcggtaaaattttctgggactctatttcctgctgttcactaaagagagtatttatgctcttaattatagaaagagtatt

SEQ ID NO: 84813 - DNA, 429 bp, Homo sapiens
ctgggatctctagaatgtgatggcacccagaaattacaggggtgaggatgaatgttgttgtctttctttttgttttctatggtgaaactcccaactttaagaatgccctgttggttatctcttattcagggctggtaaatgataactggaggtgcaggaagaatgagaggagctggcgttacatcaagcactgtataggaggcctgccagcagcctgtatgctgggtccagatggggctccggtatcatgattaaccttggactcttcttgtgatgtaggaatagcctacagcatggaaaaataccaaagggcagacgacatggcacgggtgatcatgggattcatgaaatatctgcatcagaataatagtccattttacttctcttttctagaagtaaatgatgactcccacagatttgtggggcagt

SEQ ID NO: 84814 - DNA, 421 bp, Homo sapiens
  misc_feature (1)...(421): n = a,t,c or g
tactttccctgggttagtcaataccggttttgtcagctcatgatagaaaatcttcccaaactccgtgaggatattaaagaaatctccatgtctgatctcaaagactttttggaaagtattcgaaaacattctgacaaaataggtgaaacagcaatgaaacaggcacagcatcagaaaaccttcagtgtttctctgcagaaacaaaataaaatgaaatttgggaaaaatatgtatataaatcgtgatagaattccagaggaaaggaatgaaactgtattgaaacattcacttgaagaagaggatgagaatgaagaagagatcttaactgttcaggatcttgttgatttttcccctgtttatcgatgtttgcacatttattctgttttgggtgacgaggaaacantttgaaactattatcgaa

SEQ ID NO: 84815 - DNA, 414 bp, Homo sapiens
agattgacttggtattctgcaatcttgttaaactcacttattagttcttataacgtttttgaatatttcttacaacttcctatgtagataattatgtggtgtgcgaataaaaacaattttacttcttcctttccaggctgtatgcctcttatttctttttggtgcctccctgaactggctagagcatccagtacactattgagtagaagtagtgaaatcaagcattcttgccttttcccaaatcttagggggaaagcattcggggatgcaccatttaaatatggcatttgctgtggattttgaaatacatactatttaacagaaagtacccttccagagggtttttaaatcatacatggatattgaatttcatcacatgctttatctgcttttattgaaattatcatatggatt

SEQ ID NO: 84816 - DNA, 430 bp, Homo sapiens
  misc_feature (1)...(430): n = a,t,c or g
taatacaccaagacacatcataatcaaattgctcagaaccagtgataaagtcttaaaggcagctagaaaaagacacattacagacagataacaaagctaaggatttcagcaggcatttttcagaaataacacaccttaaaagaatggagcaacatctgtaatgtattttaaaaagtaaacctataattctacatccagcaaaaatatctttcaaacacaaggcaaaataggcaaatcaatcttggaaaagatgaacaaagttaggagactcacacttcctaatttctaaacttattatgaagctgcagtaatcaaggcaaagtagtgctggcataaggatagacatatagatgaatggaatacaattgagagttcagacataccttcttacatttatagtaaatgcattttttaaagggtgccagacaan

SEQ ID NO: 84817 - DNA, 714 bp, Homo sapiens
cgacccacgcgtccgtacgaaaattgtaaataggaagacgacaatctatgaaattcaggataaaacaggaagtatggctgtagtaggaaaaggagaatgccacaatatcccctgtgaaaaaggagataagcttcgactcttctgctttcgactgagaaagagggaaaatatgtcaaaactgatgtcagaaatgcatagtttcatccagatacagaaaaatacaaaccagagaagccatgactccaggagcatggcactaccccaggaacagagtcagcatccaaaaccttcagaggccagcacaaccctacctgaaagccatctcaagactcctcagatgccaccaacaaccccatccagcagttccttcaccaaggtcaccaaggacaaggatatcaaataactactgttcaatctttactcaagtgtggaaattttgcctgaagtcctccacctaaaaacctgatgccattggtaatgatgtttatgaagataagatcaaagcacagaaaataatatatgtatatatatgtatatatatctggttgaaatactatatatatatatatatatataccagctattaattctaggaaatggagtattaagggtgcattttatttcattagttttacttttatgcattttcttcatatcatattttgcattcagaattttcataatttgaaaaaaaataaactttttttttcttaa

SEQ ID NO: 84818 - DNA, 463 bp, Homo sapiens
aacgtggatgtttggttttatttttccagcgtgtgagctaatgaactagctgaggagtgagcctgcctctccccgtgaagacgccatgcagcgcaggctgatttacagactcgtacccgggcgctggggaggggatagggaagctggccgcaggcctgtctccgctcctgtcctcacacacacagtcctcacccacagcctccctgggccctgaggacggagcgggttacacaggctccctggaatgttggctgcccccaggagtagccgcctgttcttgggaattctgtgctgaccgtggcagccccgcaggggcccggggttgcgggtggatggggtgggctgggcactgaccgaggagctttgcctgcgacccaggtggaggtggcctttgagcagtgaggccccagggtcctgcagggtggggtctagggcagccaggggtccctggcggacgcgtggg

SEQ ID NO: 84819 - DNA, 418 bp, Homo sapiens
aaacgtgagattttatagtgcattaaatattgtacattatttgtgaaccaactggaatggctgcaaagcagctgttagaatatgttgagtcagtaacacaacatgtctgcataccctaaacatatatttgtcttaccttttaaaatgtttagaaccctctatcagtgtaactattggtttgtcttgaatcatcctaaatgaggaagtgtattaccattttttccctacaggacataaagtggaaagaagaaattagcataaagaaactaattaataattatgttttaagttttttggcattacggacattgtttacatcatcattaacatcataacatcatatcgtctgttatcaagaaaagattaaaatttaaagccaacattgaagatgttctttccagctttcccaataatgcaa

SEQ ID NO: 84820 - DNA, 519 bp, Homo sapiens
ggggggagagccctctgtccacccctgccctgccctggcgctggtccgccactgcccgctgctctcgcgctggtccgcagctcagccgagcagctcccttcatctggcctaccagaccctcactcagccgcgagaggaggagctccggcgacctcgggccttcccttagggtctgcgcggcccttaccccaaacccgcccaaggtagaggcgtgaaggggccggcggcgatgcagaggcgggaagcgcattggggaggcgaggctggagaaggggacgcagggaggcggggggtggacccccagcatactccaggagccggcaggagccaaaccccagccctccacacaggtattcctgcggaccacgaggtgccacccgtccctggtcgcagaaaagacgaagggaaggcccagcttccctacctctacctcccatgccgggcgcccagcctgctcaactgaaccccaagccgcaggttaaccctgctccagcttctccccttggctatgggcaaact

SEQ ID NO: 84821 - DNA, 475 bp, Homo sapiens
  misc_feature (1)...(475): n = a,t,c or g
nattgagagcatagaaagcgccnggaannccacgaaatcagctgagagcccttcctgacgatctggggcagctgactgccctccatgtcttaaacgtggaaaggaatcaactgatgcagcgcccacgttccattgggaacctgacccagctccagactctcaatgttaaagacaacaagctgaaggagcttccagacaccgtgggggagcttcgaagcctgcgtaccctcaacatcagtggaaacgagatccagagattgccgcagatgctggctcacgttcgaaccctggagatgctgagccttgacgcctcggccatggtctacccgccgcgggaggtgtgtggtgccggcactgcggccatcttgcagttcctctgcaaagggaaagccaggccgctgcctcctcccctcattgaggaactatgacccccatggccaccctgtgccagcccaggctggggaacagcagagac

SEQ ID NO: 84822 - DNA, 477 bp, Homo sapiens
  misc_feature (1)...(477): n = a,t,c or g
nattgagntcattgatgacctcggcagngcggggaantcgctgagcctcgggctggccacgctgctgggcctgggtgcccggcgcctttaccgccacttctgccgcctctacgagctgcacagcagccagcgctactgtggggtgtgcctgggcctgctggcccatgcacatggcctcccccagctgctgggccgtgccctggccatagcctttgccgtgggtgacctggcagctgtggccctcatcaaccaggacttcctgaccacctcggaagccatgcggttctggacaccgctcaccatctgctacacgctgctggtcatctacatgcaggaggagcagcggcagcaccccggcctgcagagccaggtgcagacggtgctggtgcgcatgggcggcctcttcttgctgctgctgactgtgggtcgctggctggacctgctgggcatccttgtcttcctactgggcgagctctg

SEQ ID NO: 84823 - DNA, 404 bp, Homo sapiens
acgcactcacatctactgccaggttagctgtagtcttcgcctcttcctctgaggtggccaactgaggattgacttcatcaagatccagtgctgatagcaaccctggaagaacaaagggtgacaaaacctcaggctcccttgctgcttgagaggtttgttgacatctttgcccccacactacctttgaccctgtgttgacctcagaggccaaatttttgggctcaagaactggctttggtcctattggtgttggagctgcgggttctagcaaggaatttcaggcagcgcttggtggcaatgttccccgagagcagttcacggtggcgatgttgacttatgagcgctaggaagtgcttatgaactctttagagagggctgatgaacttccttaccttaacatggcg

SEQ ID NO: 84824 - DNA, 455 bp, Homo sapiens
  misc_feature (1)...(455): n = a,t,c or g
nagagggtcagntacctagannntctgcnnntgccggacgagcctgcttcggttcttcctccctctgcttatcatcatctactgctacatcttcatcttcagggccatgcgggagacaggacgggctcttcagaccttcggggcctgcaagggcaatggcgagtccctgtggcagcggcagcggctgcagagcgagtgcaagatggccaagatcatgctgctggtcatcctcctcttcgtgctctcctgggctccctattccgctgtggccctggtggcctttgctgggtacgcacacgtcctgacaccctacatgagctcggtgccagccgtcatcgccaaggcctctgcaatccacaaccccatcatttacgccatcacccaccccaagtacagggtggccattgcccagcacctgccctgcctgggggtgctgctgagtgtatcacgccggc

SEQ ID NO: 84825 - DNA, 560 bp, Homo sapiens
  misc_feature (1)...(560): n = a,t,c or g
ctctgtgtcctcggcctgcacatcagatcntttggatttggtaccgttcaccctcccagagtacctccntcttgttcttttctccccggggcgggggttggagcctttgagnaccctcgnccaangcgnnggaatcccttgcctttcccatggaaaacacaacataggctctgggccgggctgtcttctggcttactctgcctcttgacctactttggagcttccccatgtggccctctattgcatacccccttctcctgggaaacacaaataataagttcttctttcaaagacagttgtctgtgtgtctgtcaccttaccacacctaattaagacaaatcccaggtgcacattttagagcaacttcctgactcattgaatggggccagctttaccctaataccaaagccagagaaaggcattataagaaaggaaaactacagatcaatatctctcatgaacatagatgtgaaaatcctcaacaaaacattagaaaatcaaatccaacaatgtataaaaagaattatacaccatgactaagtgggatttactccaggtan

SEQ ID NO: 84826 - DNA, 487 bp, Homo sapiens
  misc_feature (1)...(487): n = a,t,c or g
agatgtgcnncaggcgtgccgccactaagtactccgtcgatcgtctgcannnncgcggaantantgagatgatgttctgtgcggggagccagnncaacgncaagggcttgtataagcgatttgctttccctgcctggctttgagggcctcacaggaggatataacaaggttctcaggcccaattttggtggtaggtcatcctctgtgtccaggacatcattcaaagggacgaaaacagagacaataagcagtggagggtttcgggaggttttagttgactccattttctgatctgcagcctgttaaggattggcaatgatggatgaggatggctaccaatgatttttcacactgcctggaaaaaggcacccagcctctccacctgcaagataaaggaatgctccttctcactgtggaggctgcaagagcctcctaacactcacacactgtcgttctcctgcccccactttcagggtcattattcaag

SEQ ID NO: 84827 - DNA, 460 bp, Homo sapiens
  misc_feature (1)...(460): n = a,t,c or g
acgggccnaattgaaactcgataccactagaccagngcggnggaattcgcgggcggcaggggcggatcgggcttcttggcttgggaagaggaagaggactaagatgacgacgaggaggacgaagaggaggaggaggaggacgaggacgaggacgaggagggcacctccgccttgggcttgaagttccatgggctcgaagcgctggtggttgaggaattccaggaagtcgaaggggtagctctggaagtgcaccccgtcctcgcccccgatgccgctgctcccgccacccccggcgccgctgcccgctgggttcgcctccatctccggcgggtgggagacgggagaccctgtgaagaggaggacggggctgaggacacggccgcggcgctgggtctccccgcagatggcaggtatccatgtgtgtaccccacaccacaccagaccctcagcacccgtaact

SEQ ID NO: 84828 - DNA, 596 bp, Homo sapiens
  misc_feature (1)...(596): n = a,t,c or g
ctctccatcggccgtccggtgctgagtgatcgcttgccacaactgtgtgtgtactgatttgcagacgctcacttccccccgcccccagaggggcgccncncttttgattgcagtactctangncgnggaannctgntggccacgtaagccaggcggngccggaggggtgaggtgggggtagtcatattgacctcatctgaccccttgggaggtgcctgtgcctgatgcccatacttgcccctgcccactcaccaggatcagtgagcaggagctgcatccagtctctgcacgagcccgtgtcttcattgagctgccactgtccattgcagggtgagcctggcccaagggggcacctccattggagggagggggcattgacatttccaaaccttggccagggccctgccttcattgagccaggccccagaccttctcacccctgttctgacctctccacgccagaatggccattccccagcaactcttcttctctggtgtggggaggggcgagagagccatgcagtctgagcgggatgtgggcagcaaggtcaagtatgaggtcacggcaagtgtcagggatgaggcccctccatggn

SEQ ID NO: 84829 - DNA, 404 bp, Homo sapiens
  misc_feature (1)...(404): n = a,t,c or g
tttcgttcctggaccatccgaacctagcctgtcccggcccgcagcctctatggaggctcctgccgggccgtagagcccttcgccccctggggacccacccgtctataagggctcagccctcggcttccagagcctgtcagcagtggccgtacccttcgccgggactgccgggtctccgggacctcttcgatctacaaggtcatgttatgcctatagagggcgcatttgcagggcctcaccccgggtagagggtcctctccaggtttttacggcctgtccccgctctaagggtcagtgcaggaggcggcgatggccctgggcaaggttctggccatggcactggttttggccttggccgtgctggggtcgctgtcccctggggcccgggcggnggactgtaaggg

SEQ ID NO: 84830 - DNA, 605 bp, Homo sapiens
ttttttttttttgggtttgctttctccccctactttattggagagcacttgccattgcttttatcaagtgcttgctagccatggatgccaactaacttcttcaattgaaggccggaggatcatatcgggttccaggagcctcttgagcaggtcctggcaatcggccgagatgctcagatgagtggggaaggacacccccttctgctgctgccacagcatcttggggatgtctgtgtcgtcaaaaggtaggctggcacagagcatgacatacaggaccacacccatgctccagacatcaccttttttgctatcgtggggaatgccctgcagcacctcgggggcagcataggctgtactgccgcagaaggtctggctcagctcccggtgtgacttgggcaacaccttggcaaagccaaagtcagtcagcttcaggttgaagccctgcaacaaggcgttctcacatttgaggtcccggtgggccacaccacagccatggcagtagcggatggcctcaaccatctgacggaagagggccttggcccggctttcaggcagtggccccccattcagcacgcagtcaaagacatcccctccctcagcgagct

SEQ ID NO: 84831 - DNA, 417 bp, Homo sapiens
tttcgtcctgccgcgtgggcgaggactctgtggacttcttgcttcgcgtctctgagcccaaggcggtgtttgccaaggagcagccggcgtgcagggaggtgcaggctgaggtgggggccagcgccacgctgagctgtgaggtggcccacgaccagatggaggtgacgtggtacaaggacgggaagaagttgagctccagctcgaaagtgcacgtggaggctgtgggctgtatgcggaggctggtggtgcaacaggtgggccaggcagactccggagagtacagctgtgaggccaggggacagagggtctccttccgcctggacgttgcagagcccaaggtggtgtttgctaaggagcatctggcacgcatgaagctgaggcagaggcaggagccagtgccacactgagctgctaggg

SEQ ID NO: 84832 - DNA, 444 bp, Homo sapiens
ggatttcgtgctgcccttccgcagcgattttatcccgggtgagtatcggccccggccgagcccccaaggcgggcgggcagcgcggcagggccgggacttgagcggaggaccgagtaggcgcaggtgtccgggcccaacaggaccaggaaggtgtcggggttggaatgagtgggtacccgggccggggacggtgcgagagggtgccttgcttgggagcggaacgagaaggtacttgggtcagggaggtgatgcccgggcctggaacgtggcggggattggagcaggcgcgcaggtacccgatccgaggcggggagagcacccgggatggaaggagcatgcgtgcgggccgtgagcggcgccagagggtacctgggtgagtttcaatgatatttcggggtgggggcacgaagaagaggggcttgccaagatgcttggggtgagtgg

SEQ ID NO: 84833 - DNA, 758 bp, Homo sapiens
  misc_feature (1)...(758): n = a,t,c or g
ggcagggaggtgacagatgtgtcccaggtacagagaacagagtgaacaggagagaggagggggccagggcattccaggtggggaaaggcagcaggtggcccggtggtaccacctcttttggcgagggctttggaccttacccggtgtgatgggaagtcctggaagtgtgttaagcaggggagtctttttgatcagattttctagaaaacgacagtgggctgctgtggacctcagagaggcatgtgtgatagtgtgtttcgggctcttcccacgaaactcggctctgcacagtgagacctcatttcctggttctgtttgatgagtgagcgaatgcacatggcaggcggtcatgtcccttgggcctgtgaggtgaggaagggtccctgagccctgtggggatagagactcttccaccattctgacatgatccgagttagcaggcagcactgtccagatggaaatggggatgggagacagaccatctctctcagcgggtccagccatgagccagcagactgtttcccattggcccccatctttcagagtgggatgatctttctaacaaagaaacccacacaggaatttggtgggtgggtgcatgtgtgcattacctttcaggatggaacccggtggtgcgtggagcgaagccctggcatgcttactctcgccaactcctgcccctgtgcgtactaaagctggccccctctctctccccaccgaaatccaaaaacccgnnnggggggggcgtgggggggggc

SEQ ID NO: 84834 - DNA, 354 bp, Homo sapiens
  misc_feature (1)...(354): n = a,t,c or g
ctcaggggacagaacgggaaagcccccaaatgacctccacattctgcacctgtcagcccaggtgccacttgccaagtgatccaatggacccaccttttgcctgcctcattcctcccggacgctcaacccaccacccctggtccctaccgtgtcagccactctcaccttctccttctctgccaggaaggcctcagtcaggtctcggggtggctaggctgggtcccagatcattctgtgctcggtcagcagctcatccagctgggtcaggaaagccttttgggagcgtaagaccttgccagccagccctgggatgcgcaggaggagggggacaacattcagcatctacagctgacn

SEQ ID NO: 84835 - DNA, 348 bp, Homo sapiens
tgtatttccagcacttactttggtgcttggcacgtagtagatgctcagtaaatatttgtagaccagatggacggtggtttgtattctaagtcaaatgagggaaaatacatattcataaatctcaaaaacaaataataggagacttttaactagtagcaaagagtttgctatattgcggttgtttgttttttctgttacagctggccaagaatgtaggaaacaatagttttaatgatattatggaagcaaatttaaccagcccctcaccaaaacccaccccttcaagtgatatgtaagtatttctgatatattgaacttttttaaaccattctataattgtttttctaa

SEQ ID NO: 84836 - DNA, 386 bp, Homo sapiens
  misc_feature (1)...(386): n = a,t,c or g
cggccgcgtcgactaggcccatttagtcaagagnncacttcaagacctgaatgtttttgttagttgtatggctcaatgatctgcctaatactggcagggtcatgttgtaacatcccactattattgggggggtatctacatctttttggagggggttcaaaacttgctttatgcatctgggtactcctacattgggggggtatatatttacaatagttaggtcttctcattgaattgaattctttattattatgccatgcccttctgtgtctgttttgatgaacactcggttaaaggcttgttttgttggaaataaaaataggaggccctgctttttctgttttggggttgcttgggagatttttcttcatccctttactttgagg

SEQ ID NO: 84837 - DNA, 503 bp, Homo sapiens
  misc_feature (1)...(503): n = a,t,c or g
ttactaatctaggcacagccggattggttactggactaggcacagccggattagttactaatctaggcacagccggattggttactaatctaggcacagccggattagttactggtctaggtacagccggattagttactaatctaggtacagccgggttggttactaatctaggtacagccgggttagttactaatctaggtacagctggattagtaactaatgtaggtacagctggattagtaactggttgattgaccacactattaggtacaaacaaatggctcaatatcataatataggggattcctgtggcatattgcaaggatattttcggccttatcttgggtcacaagtttttttcaataactggaatgaaaacatattcattagatttgcagatgacatgaggtccngattacctaggaanaagttgtttggaatggaagttattcgnaatttccnaaggacctttgaaagncttggatttntgggggtacatc

SEQ ID NO: 84838 - DNA, 433 bp, Homo sapiens
ggagaaggttactgacagaacaagaaacacacagagagtctacttcagaacaaggacagcacaaagggtcaatagaaggacaaggaccacgcagagtgtcagtttcagaacaaggatcaagcagagagtcagttgcagaacaagggtcacgcagagagtctattgcagaacaagatcgacacaaagggtcagtagcagaacaaggatcacgcagaatgtcagctgcagaacagggatcactcagagagtcagtaatagaagaaccataccaaaaatcagaacaaggaccttatggagagataatttcagaagagcaagaagacataggctcaacttcacaatcaagaaaagatagtatcttaaaaagtacaaaatatggggaacctataacctctgagtacattgaagtccctctacaggaaaagaggtcttg

SEQ ID NO: 84839 - DNA, 406 bp, Homo sapiens
  misc_feature (1)...(406): n = a,t,c or g
agcgaaaacatattaaactgcttattcaaaagttgtctgatgtcccttaagagtgtcagaacaatcagctatagaagctcacagaaatctgtgagaaagaaaagaaagaattcaagaagaaaatggatgaccagaggccggagaagattaccgaagcttaatccaaagacaaaagtccgatggaagaggagaagacagagatgatccggtcatatattcaggaagtggggcggtatatcaagaggcttgaagaagcgcaaagtaaacggctagaaaaactccgagagaaacacaaggaaatacgtcagccgatcctggatgaaaagcccaagggggaagggtcctcctcattcttgtcggaaacttgccatgaagatacctcttggttccccaactttactccccn

SEQ ID NO: 84840 - DNA, 472 bp, Homo sapiens
  misc_feature (1)...(472): n = a,t,c or g
actgaagcattgaaangactgattacccttggnnnnatgtggtcggggatcggggatcgggggtccggttgggtcgggttgggctccatgtctggttgggtcgggtccaggtcgggtaggagtccggtcggggtccgggtacaggtcggggtccgggcctggatcgggggcgggtccgcgtgcggctcctctagccccgaacccgtgttccccgtaagctgttggtttctaaggggcggaggaatggcgactggagccacctctcaccgctcagggagccgggagggccggcagctcccgcgggccgagtttcccgccttgggtgcgaggacgcgtggggccgcgctgtgcccggggaacactcaccagcatctctagcctccacctccctctcgcgccagtggcactcccggttgagacaactgagaatgttccctgggcacagtggcccgggttgagaagccctgcaggc

SEQ ID NO: 84841 - DNA, 456 bp, Homo sapiens
  misc_feature (1)...(456): n = a,t,c or g
atcgtccctntnnnnattgatanccatgcggaaccgcgccgnnnatccgggtcgacccacgcgtccgtcaaacctggttgagggaacctacacttttcacctgtaagtgaccgatgcacagggtgagagtgacacagaccggaccactgtggaggtgaaacctggtgagttcatttattgatgaggctgagtagaattgctgaattatccaatcaaggcctctatcctgagatccccttccccgagcatggacagagccagatggcatgttcagctttaaaaataatcgagagaccccaggctgaaaaatccatagagaccgtctgttccaataatacctcctacccatgcagaaatacagacctccccctattcatctcagagggagaaacaaactcagagagggcaggacttgctcagtgtcacacaggagctgtgtctgagccaggcctttgc

SEQ ID NO: 84842 - DNA, 465 bp, Homo sapiens
agagtgcccttagaaaactaatgacgtcctcggaaccgccccgaattcccggggcgacccactagtccgggcagtgtgggggaccttcctccccattaccctgacttacctcgggcacacgcctgagcctgccctgaacgcaggacccaagggtcagcctggggccctcacccctgaggtgcccctgagctctaagctgctgtccatgccagcttgggacagccccgccaacagccacagagcccctgagacccagccactgcctcccagcctggctgaagcggggccccccacggaccccttgattgtcaggaactccggctgacaagtgggaaactggagcgagtgctccaccacctgtggcctgggtgccctctggaggccggtgtgctgtatctccagccgggatgaggactgcgaccccgctggcccggcccagcctgcccgccgctgccacctgtggcc

SEQ ID NO: 84843 - DNA, 410 bp, Homo sapiens
ctagagaatagccttgaacaagtaaatctaagagttattgaccttattgaggagatagagaaaaagataagggtagaaagggtattcaaaaggacactaacagagagctttccaaacctagagaaagataccaatattgaagaaggctgtaaaacaccaaacagatttaacctaaataagactacctcaatacactaaataatcaaactcccaaagattgaagaaaaaaaattcctaaaagcaacaagagaaaagaagcaaataacatgcaatggagttccaatatgtctggcagcaaagttttcagtggaaattttacaggccaggagatagtggcatgttaaatttaaagtgctgaaggaaataaacttttaccctataattgtatatccagcaaaattatcattcag

SEQ ID NO: 84844 - DNA, 504 bp, Homo sapiens
gcggccgcccccgcgctcctgcagctccagctccagcaggaagcgactccctcgcgccgagtcccggccgttctccacgttcacgatgcgcagaagcgcgaagcgcccgccgtggcgcgcgttcagccgctccatgtactgagcggtcacgtccacggcctccgcctccggcagctgcaggttccccgaaacgttgcatcgcaggtcgttccagtccgagcgcagcagctcgaagtccacggcgcccacgctgaacgtgcgctgccagtcgatggcgtcctcacgccagcgtccgagcgccgggcccgcggcctcctcgctgtcctccgacgcggcctcgtcgcccggggccccatcgtcctccccttcctcctcctcttcgccctccccgggcagctgcggcccggacacctgggacaagctcaggaaggaggtcacgggccgcgcttcggaggacaagtttgagtccactgtgggcgccgcaggtcccagcgtgcgcgcctg

SEQ ID NO: 84845 - DNA, 1276 bp, Homo sapiens
  misc_feature (1)...(1276): n = a,t,c or g
caagaagtgtccacagcagtaatggataaagactagttttaaatcctcaaagccctaagaggggccccttggttgccctttgtgaatgccagcccccttaagagagtggtgtttgattaacaaaaaaactgtggccccaagtggaacccttgaccttttcctcagataatctgtgtatgtacacagctaacacagctctttagattccctgttaagtgactcattcacattcctttcttggatataaagtcattgctgtctttttatttttgaaatagtacaagacaaagatttttaacttaacatgaaaaattcactcttttattttggaaaaaaagttaacttttcatactaacaaacagaacaagatttaaggtaaatttcttaaacattatccagaaaaataacaagatttatagtatctacttctggtactaatatacacaaaaggccaaaaccatgcctattctgcaggtgtagcttcggtgctctcctgttcaggggcaggctcactgcccgcttcttttccttctttgcttcttttagattttttgtgtttgtgtctcctgtgactatctccttcttcactttcatggcgacgtctactattacttcgagaagacttatgtctggtttcctctttctccctgtgtcgtctttctctatgtcgttcttctttttctcgacttgctctgtgacgctcataacctctttctgcatattccctgtatctgtatcgttcttcatcgctgttgaaaacacttggtgtaggactgtgatcacgctccctctctctctctctggtgcgttatctttctctgtcccgatcacggnnnnnnnnnnnnnnnnnnnnnnnnnnnnnnnnnnnnnnnnnnnnnnntctggcataatagtcccactgcttgctggtgtccacaagactaggccacgaaggagcagaaccaggaagatggggaaaggcaacattgccatatggaaatgcacgtgcagaacgactatcataaccagaggaatgtccactttctattgttggtataagagatggaggtggagcgcctggtggaggaggaaaacccggtggtggaatcagaggtggagcagtgctgacagtcggagnnnnnnnnnnnnnnnnnnnnnnnnnnnnnnnnntgggaggagctcctgcagggaaaaacggaggtggtttgctaaaattgttgtctacttcagtagcattagacaaaattatttaaagtcaataaattgttattcgagcggacgcgtgggtcgacccggg

SEQ ID NO: 84846 - DNA, 820 bp, Homo sapiens
aggagaaggcctgattttgaagggcaggtcccagggtcagccagtgaagggcagagcctctgattgctgcttctctgcaggcccagtggcgacttctggggtgcatgcacgaggggtcttcctgctgtagggcaggccagatggggctcaggctgtcggggcgctcacacctggcgctttggctgtcgtaggtgcggctgactgcacagaagtcactggggcctttgacttctacacactccctgtggggctccgcactgtgcccgtcaccgagagccagtgggtgagagccagtttcatttgcggtagaggcagcagaggttgtagaaatgctccttgaggcagatgccacaccccaatttcatggagtgatttgggctgagccgagtctgcagcaggcagaaggctctgagatgttgtcctagcctgggcaaaggacagttcagagctcgggggaataggggtgtgctcagcacgactgggtggacaggccgtttgttgtgaatcgtacaggcttccaggagcgggtgcctgaggcttccagacaggctttgggaggtggccagaggagatgcctgtttccgcggcaggaaatggagggagggcccaggctggagaggttcagccaggctgtcacaaggctttgaagcttcccatctgagagcctggctattggagagtgtgggtttggaacttgaggctaggaggttctattctgtcctgtgccagccacagccttcggatgggcagagcaatgatggggggaagatgtaaaagaaaagaactgaggaaagaagaagaaaaccagcttcaacaacgg

SEQ ID NO: 84847 - DNA, 404 bp, Homo sapiens
cgggggctctccccgtgcgtgtttattctcccgcctccccggtgcatgttcggccctcccagtgcttgttccctgcccctaaccgtgcatgttcggccccccgcccccatgcatatttgcctggtttcttctaggggctcaactgcagcttcgtcctggaaatggtgaataacttcagagctctgcgcagtgagacggagctgctgctgtctgggaagatggccctggtaagctggtgccccagggacagcagggctcgggctgtgtgtgaaacgactgctgtcgccaggttgctgggcacacagggcagcacactttagtccagagttcccggtcttaaggaatgggccgcagaggtcatttggtttgttgtgcggctggtgcccacccctgctgtgcacccc

SEQ ID NO: 84848 - DNA, 628 bp, Homo sapiens
ggaggcaggagaggcaacttacagcggcctacgaggccctgctgcaggaccacgagcacctgggcacgctgcacgagcggcaatcggccgagtacgaggccctcatccgccagcacagctgcctaaagacactgcatcggaatctggagctggagcacaaggagctcggggagaggcacggtgacatgctgaagcgcaaggcggagctggaggagcgggagaaggtcttgaccactgagcgagaggcgctgcagcaggagcagaggacaaacgccctcgccatgggcgagaaccagaggctgcggggcgagctggacagggtcaatttcctgcaccaccatctgaagggggagtacgaggagctgcacgcccacaccaaggagctgaaaacctcactgaacaacgcgcagctggagctcaaccgctggcaggcccgcttcgacgagctgaaggagcagcaccagaccatggacatctcgctgaccaagctggacaaccactgtgagctgctctcccgtctcaaggggaacttggaggaagaaaatcatcacctcctgagccagatccagctgttgagccagcagaaccagatgcttatggagcagaacatggagaacaaggatgtatt

SEQ ID NO: 84849 - DNA, 467 bp, Homo sapiens
ccgaattgcaaggtcgacccacgcgcccgcggacgcgtggggagacagctcccaagcctttggttgaagccccacagagatggagcagaaggaagggaagctctctgaggatgggaccaccgtctccccagctgcggacaaccctgagatggcaggaggtggagcccctgcagaggagaccagaggcacagctggaaaggccatcaatgaggggcctcccactgagtcaggaaagcaggaaaaggcaccagccgaggacggcatgtcagcataactccagggggaagcaaatggattatatgaggtcaaagcggaatctcaaagggaggctggtgggaaagaggatgctgacgctgatcttataaaggaggatggtgagaaggaagagaccactgtgggttctcaggagatgactggcaggaaagaagagaccaaatctgaacccaaagaggctgaggaaaaagaag

SEQ ID NO: 84850 - DNA, 403 bp, Homo sapiens
cccacgcgtccgcaaacaacccagctcttgccataattatgccaaggggtacaattgggctttcttggtaggcagatctcaacaacctggcttggttttagatcccagggacctgcctgctcccagaggtgacagaggaagatcacggaaggatctgtgtggtcattgacctcgatgaaacccttgtgcatagctcctttaaggtaactcaatgtctggaacccttcctacctttatcttgggccttcttgggaatctggcaacagatgtgtaaggcagcctataggtgaggaaagaagagtgattagaagggaaaaggcctggcctctggcattttggccaccctgtgtcacaggtatctacacgccccactgaagaatgttgagtaggaaccctgtgtgtc

SEQ ID NO: 84851 - DNA, 492 bp, Homo sapiens
gatggaaaaaaatttgaagccgtctggatagagctccggaccggcaaacccgggccgacccacgcgtccgaaacaactatataaatataaattatatatttttatatatataattataaaatgattatatattataaaatataggtatatatttatataatatagaaatatatgaatatatggataatatgtaatatgtattaaatatgattaatatatgtaactgcctattaatacatattacataataatataaagcgtgattatatgtaaactatatattaattaaatatatgtaatacatattagttatatataatatataatggattatgtgttatataaatatataattatataaaatatatttttatattataaaagtatataaatatataaatatatgtatataaatacatttgtgtaaaatcttcggcgggcccccggttaaaaactcatgaaagcctccccttttaaaaaaaggggggggga

SEQ ID NO: 84852 - DNA, 417 bp, Homo sapiens
cccacgcgtccggttaattcaagtcaggcatttgctcttgtatattatacattgggagctcttgggggcaatctaatagcccacatgggtttgggttacagatactgggctggcatcggcgtcctccagagttgtgaatctgccctgactcactatcgtcttgttgccaatcatgttgctagtgatatctcgctaacaggaggctcagtagtacagagaatacggctgcctgatgaagtggaaaatccaggaatgaacagtggaatgctacaagaagatttgattcaatattaccagttcctagctgaaaaaggtgatgtacaagcacaggttggtcttggacaactgcacctgcacggagggcgtggagtataacagaatcatcagagagcatttgactacttcaatttagcagcc

SEQ ID NO: 84853 - DNA, 414 bp, Homo sapiens
  misc_feature (1)...(414): n = a,t,c or g
aaaaaggaagcgggttctgttctggttcttgcgactatagtcacctcccgaggcaaatgaccactgtcctgagaggacgtgggtgaggggcaggtgagtaaagggatggcagcatctgtggactgagcaagaagaatctctgatgtctgtcctgagccttccggtcagtgatggggtcggtcagtggatggaatagtggaagtcggagcgatctctgatggtggatctgagggaggagtgagggggcactgaggggtctctggtggtggatctgcangcggagtgaggacggactgggggtctctgtctggtggtggatctgagggcggagtgagggcggactgtggggttgtgggggaggatgactatgggaactaaggagggatctgaggagtgtgaatgatgcacatctta

SEQ ID NO: 84854 - DNA, 412 bp, Homo sapiens
  misc_feature (1)...(412): n = a,t,c or g
gcgtttcagttttattccatcgtggtctgagatagtgctttatataatttcaattttcttaaatttattgatgctcgttttgtgggctgctttggagaaagttccatgggctgttgaatagaatgtgtattctgtggttattggatgagatgttctgtgtatatctgttaagtccatttgttccagggtatagtttaaatccgttgttcctttgttgactttctgtcttgatgacctgtctagtgctgtcagtggagtattgaagtcccccactattattgcgttgctgtctgtctcatttcttaggcctattaggaattgttttataaatttgggcactccagtgttagatgcatatatgtttaggattgtggtattttccttgtggacacagccttttactattatatan

SEQ ID NO: 84855 - DNA, 410 bp, Homo sapiens
ttttacatatcagatggggtagaatgaaaagcttggcatctcttacctaactggtaatcagaatgctcaagtaaagcaatacctagtgtaacaagcttgggtttcttttgcagtaagttgctctgctagccgggatgctccctttccttttctctagggggcagataatttttaggccatctgctgaaacttggtaggctttttgagggtttaaagggaatgtatttttagtttccatttatgcctttatcattaaactcgaagacatgtttatgcttcatgttctttaaccatgtagaggaagcaagggaagagttgagagaacaggtttatgacgccatgggagaaaaagaagaagccaaaaaaacagaagacaagtctttggcaaagcctgaaactgataaagaaca

SEQ ID NO: 84856 - DNA, 420 bp, Homo sapiens
ttctttcgggcagccatatagatgggatgtaacctggtgtggagggatgtgggaggagccacaggaaagaaggaagcgggaggctggggtcctgggctgttgggtggccctgtgagagcccgtgtctgggcagtgagggggtagggcacaagccagggaatgggacaaggggcaggagaggaggacctgggcctcagtgggatgagagaatcgcagctgggaagcaaaggggagagaagccagcaggggacgactgccattgagatgtgaatatatctcgtctcacttgcgcacatgggaaggagctgggaccgagaaagatgtggtggacctcaggagggctatggaggctgtgtctgagggagagcggggggaacgagtgcacgatctccaggcacaggctctcgggtgagtgttcac

SEQ ID NO: 84857 - DNA, 523 bp, Homo sapiens
tttcgtcacaaagacagagaagagctgtccagcagggagaatagggccctgaaggaagggcaccgccaagatggagagggggccttagcagctcctgaagctgagccagcaggaaaggtgcaggcccctgaggggctgatcccagccacaggccaggcagaggagctagcagccaaagatcacgactcctgcgcaggactggaggggagagctgaagggcaaggaggagtggatgccgtgctaaggacccaggaagctgttgctgaggaagatcccataatggcagaaaagttcagggaggaagcggtggatgaggacccagaggaggaagaggacaaagagtgcactctggagacagaagcgatgcaggacaggaactcggaaggggacggggacatggaaggagaaggaaacacacaaaagaatgagggcatgggaggaggaagggttgtggctgtggaagttctacacggaggtggtgaaacggcagaaacagccgcagaggagagggaggtgttggcag

SEQ ID NO: 84858 - DNA, 412 bp, Homo sapiens
ccttcgtcaggctcggcacaagagctaggacaggaggagccgcagagctcgtaattgctgcggggaggacaggccagctctggaagaaaacaggtggacctgggtcccattaacctggacagacacctccaagatgagcatgagggggctgctggatctgttctcctttcacagctgtatcctgaagaatggcagtgagccggaagagccacaggattcggcaaagacggacacacaggtacctgagaactcaacagttttcccatcaaaggtgatgatgtgtgagtgcccggctgcttggcaggtgccaggggagaatgggtggcacccaaagatgccccttatggtcccacatctctgccctggcccacaggaggagggggagcagcacacagcatgggtggaagcctcg

SEQ ID NO: 84859 - DNA, 3131 bp, Homo sapiens
gcacatagagatgaaatccagcgcaaatttgatgctcttcgtaacagctgtactgtaatcacagacctggaggagcagctaaaccagctgaccgaggacaacgctgaactcaacaaccaaaacttctacttgtccaaacaactcgatgaggcttctggcgccaacgacgagattgtacaactgcgaagtgaagtggaccatctccgccgggagatcacggaacgagagatgcagcttaccagccagaagcaaacgatggaggctctgaagaccacgtgcaccatgctggaggaacaggtcatggatttggaggccctaaacgatgagctgctagaaaaagagcggcagtgggaggcctggaggagcgtcctgggtgatgagaaatcccagtttgagtgtcgggttcgagagctgcagagaatgctggacaccgagaaacagagcagggcgagagccgatcagcggatcaccgagtctcgccaggtggtggagctggcagtgaaggagcacaaggctgagattctcgctctgcagcaggctctcaaagagcagaagctgaaggccgagagcctctctgacaagctcaatgacctggagaagaagcatgctatgcttgaaatgaatgcccgaagcttacagcagaagctggagactgaacgagagctcaaacagaggcttctggaagagcaagccaaattacagcagcagatggacctgcagaaaaatcacattttccgtctgactcaaggactgcaagaagctctagatcgggctgatctactgaagacagaaagaagtgacttggagtatcagctggaaaacattcaggttctctattctcatgaaaaggtgaaaatggaaggcactatttctcaacaaaccaaactcattgattttctgcaagccaaaatggaccaacctgctaaaaagaaaaaggttcctctgcagtacaatgagctgaagctggccctggagaaggagaaagctcgctgtgcagagctagaggaagcccttcagaagacccgcatcgagctccggtccgcccgggaggaagctgcccaccgcaaagcaacggaccacccacacccatccacgccagccaccgcgaggcagcagatcgccatgtctgccatcgtgcggtcgccagagcaccagcccagtgccatgagcctgctggccccgccatccagccgcagaaaggagtcttcaactccagaggaatttagtcggcgtcttaaggaacgcatgcaccacaatattcctcaccgattcaacgtaggactgaacatgcgagccacaaagtgtgctgtgtgtctggataccgtgcactttggacgccaggcatccaaatgtctcgaatgtcaggtgatgtgtcaccccaagtgctccacgtgcttgccagccacctgcggcttgcctgctgaatatgtcacacacttcaccgaggccttctgccgtgacaaaatgaactccccaggtctccagaccaaggagcccagcagcagcttgcacctggaagggtggatgaaggtgcccaggaataacaaacgaggacagcaaggctgggacaggaagtacattgtcctggagggatcaaaagtcctcatttatgacaatgaagccagagaagctggacagaggccggtggaagaatttgagctgtgccttcccgacggggatgtatctattcatggtgccgttggtgcttccgaactcgcaaatacagccaaagcagatgtcccatacatactgaagatggaatctcacccgcacaccacctgctggcccgggagaaccctctacttgctagctcccagcttccctgacaaacagcgctgggtcaccgccttagaatcagttgtcgcaggtgggagagtttctagggaaaaagcagaagctgatgctaaactgcttggaaactccctgctgaaactggaaggtgatgaccgtctagacatgaactgcacgctgcccttcagtgaccaggtggtgttggtgggcaccgaggaagggctctacgccctgaatgtcttgaaaaactccctaacccatgtcccaggaattggagcagtcttccaaatttatattatcaaggacctggagaagctactcatgatagcaggagaagagcgggcactgtgtcttgtggacgtgaagaaagtgaaacagtccctggcccagtcccacctgcctgcccagcccgacatctcacccaacatttttgaagctgtcaagggctgccacttgtttggggcaggcaagattgagaacgggctctgcatctgtgcagccatgcccagcaaagtcgtcattctccgctacaacgaaaacctcagcaaatactgcatccggaaagagatagagacctcagagccctgcagctgtatccacttcaccaattacagtatcctcattggaaccaataaattctacgaaatcgacatgaagcagtacacgctcgaggaattcctggataagaatgaccattccttggcacctgctgtgtttgccgcctcttccaacagcttccctgtctcaatcgtgcaggtgaacagcgcagggcagcgagaggagtacttgctgtgtttccacgaatttggagtgttcgtggattcttacggaagacgtagccgcacagacgatctcaagtggagtcgcttacctttggcctttgcctacagagaaccctatctgtttgtgacccacttcaactcactcgaagtaattgagatccaggcacgctcctcagcagggacccctgcccgagcgtacctggacatcccgaacccgcgctacctgggccctgccatttcctcaggagcgatttacttggcgtcctcataccaggataaattaagggtcatttgctgcaagggaaacctcgtgaaggagtccggcactgaacaccaccggggcccgtccacctcccgcaggtaaccagcttctcctcttcctcagtaccaggggcaacgtgcttttctgcaaggcagaaggaagtgatactaaaccagtagaatgtttcccaatcttcactttgttcttaagctcaaaccattcatttgtttgcgatctgcggcactgaaataacacagaccattatgagcatcaggagaattagaaaataccacctt

SEQ ID NO: 84860 - DNA, 416 bp, Homo sapiens
  misc_feature (1)...(416): n = a,t,c or g
tttcgtccgctggctctgccgggctctcgaggcccgaggcgttcccctctggagccgaggcgcggagggtcgctcctgcagggtgctgggataggacactcggggaagggtgaaagccacatggggcctgtctcgagcagctgtggggatgggagacctgccctggggctagagggaggatggggcctgcctggcctgggctatggcagagctgggagggtcttgggctgggctgggctgggctggggggctggtcccgggttggaggagggcgtgttggggagcctgcccgggttcctgggagaatctaggcgtctcaccttgccccagcgtgggggatgggtagatgcctcccagctgttagaagagggagacgtgtctgggactgctggggaaataggaaacttgtctctgan

SEQ ID NO: 84861 - DNA, 405 bp, Homo sapiens
  misc_feature (1)...(405): n = a,t,c or g
gggggccccaccaggtactgaaagacccgcaggttgagcgggtagaacagccgggcagggcagatagctgtctatgttggttcttgtttgggatttattttcaacaagttacttttaggatccttttggggctggagactgagtcttgaaccacagaagggaataaattatacaccactgtcattctctctctccctctgtctcttccttttaccctctcttggcttgccttttccccctttcctcttcctttcccttccttctcttttcttttttctgctttctgactttctccctctccttgtattgctttccttctagatttctagcttgccaccgntcattctctccttctggctctccctttctctctccttctctgatgctcctctcttctctcctgcg

SEQ ID NO: 84862 - DNA, 404 bp, Homo sapiens
  misc_feature (1)...(404): n = a,t,c or g
ccaaaagacccgtacattattgttgcgtaaaagagctcttattatgatcaacggacactgaaggtacaagaactgccccaaactattcccacgagtgaaatgcctcgaaacattctcatttcttgtgataaatctcttgtcgagaaagtcactcctggctcaagggttttcattactggaatcttttccgttttgccttcaaataattcaaaaaaaaatgctggagcttttgggggaattaaagcctcatatatcaaagcattaggaatagaactcgaaagcagcagcaatggtggccgaagtgagcgcacttttacaccacaggaggaactcatgttcacaaagctatcacaaacacctaatctttatcttctaattgcaaaaagcattgctcctgcaattan

SEQ ID NO: 84863 - DNA, 407 bp, Homo sapiens
ctttcacctggctgttgttttccttactcaagaggccctgcacctggagaagttttcaagggccaacagagccaaaatccttaacaaggacggagatatgaggagacacattgtctttgaaatcaaagacatgtggtacaaccttggtcaacacaagataaagttcattccacaaaaggtgcgccccctattagaaatgacattaatttccaagacggagctgcgcaaagccaccatccccatcttctttgatatgaggcacagtgaattccattcgacccgaagcttccaaatgtgtgaaaatgagaacatcacctagctggatcatgacttccaacgaggcagaggagacgaacagctcaaagggctatttgatagaatacttctggaacactggacgaagcacc

SEQ ID NO: 84864 - DNA, 430 bp, Homo sapiens
  misc_feature (1)...(430): n = a,t,c or g
ctcgcggtttctctcgactctgtcgtctctatctgtgtctggctctgtctctctctctgtctgtctcgggctgcctgtctctctttatctgtgtctctttctgtctgtctgtctctgtctgtctgcctttctctctccctctctttctctctgtgactctttctgtctgtctggctctagctgtctgcctttctctctccctctctttctctctgngnctctttctgactggctgtctctggctgtctgcctttctctctccctctctttctctctgtggctctctttctctgtgnacgnctctgactttttctctctctctgactctggccccctctttctctctctgtctctccccccactctctcgatctccctctcactttctctcgctttcccatgggcaggcatctccccctgtccgtgccagg

SEQ ID NO: 84865 - DNA, 526 bp, Homo sapiens
aggtcgtcctcagggcccagcacccggagctgggtccccacccgaatccggccctggcctatgggctgctctgggctgctctttggtttgggtgcctctgtgctgtctcggcggggcggcagggaggctgtgagcaaggagtggaaagtctggcctccggaggcgccgcgctcatgctggacctccaccaggtgggccatgtaattcttgtccatgatgttctgctccagagtctgggggtcgtgggccactgcctggtccaggaactggaggagtttgctcatgctggacacggggatgccaaacgactgcacgaacagcagcagctgctgcggctccaggtcctgcagggcggcgtccaccaggcggagcacctcagaacggatcatgcgcagcttcagccagtcaggaagcagcagcgcctcctccgatgtgtccaccaggaaggcggtgggcagtggcttctcctccggaaaccagatgtccagcagcgcctggaactcgctgtcgtcggctcgaggcggct

SEQ ID NO: 84866 - DNA, 439 bp, Homo sapiens
cgggaattccacaaacacacgcacagtcacgccactggcactaacgagttcatgcacaccagcagctccacctcaccaccggtgcaaatgtgcacacagatgccagcagctatgcccccacacctgtgccaacactaccaccagcatgaatgtgtgcatggacaccagaaattcctcccaacctccatgccaccactgcagtcatgtgcgtggataccagtggccctgctcccccagcactgccaccactaatggtgcaaacacatgaatgctggcaactccaccacccccctcccccagcagtgtgaatgcacacacagagctggcagatgtggggcagcaccccaccactgccagggcaactgcaagcatggacactgacaaccatgcccccacctgtgctccactgacagcatccacacatgcaggatagctgcat

SEQ ID NO: 84867 - DNA, 479 bp, Homo sapiens
  misc_feature (1)...(479): n = a,t,c or g
gggaaggcagggccggnnnnnaattgtaactganaggcgatgcaangcnnnnnaatnannggncgacccacgcgtccggttgaatttcactgccaccatctgattctggccttgcccatgtcagggtaatgctgttgcctgttatgttgctaggttctggaatgccaggggcatcaggaacagctgtaaaacaaaaacaaaaccccaaatcaattagatgcatttgcttggaaggttaaacttttgacatagtaccgcttagtaaaaacgcaaacttactatattgtatttgagcaaccactggatcagaatcaagtggcctgccaacaccaaacttgttaactgcagaaacacggaattggtattcattgccgtttattagtttaatggcagtgtaactttgcgcttcacatttatcctcaattagtgcccaggcaagtctgctgcgttcccgtttttcaatgatgcagcgggctatg

SEQ ID NO: 84868 - DNA, 359 bp, Homo sapiens
tagcaccggcgctgaagtaagggcggggcatgggccaaagatggcgcccgagcgagtaagggcaggagagaaggaagaagctggaagtggtttctgctgagggtttgaagggggaagggtggttgagttgataagcagtggaggataggggcgtaaggtggtgggatgggtttacaagcctcaggagagggcggtgggggaggagaatgggtacaggcaatactagaattgtcctgagtaggggacggtgtaggaaaagaagtggatactgcttactgagaagatggcgactgggaagatggcagctgagaagacaacgaggaggcttgcaggggttaaagaagatggttgagaggaag

SEQ ID NO: 84869 - DNA, 348 bp, Homo sapiens
gccagatgtgccccacttcttatcggggaaaccggagtaatgatcaaggcatgtgctttaaacaccaagaagccctgaaactcttctgtgaggtggacaaagaggccatctgtgtggtgtgccgagaatccaggagccacaaacagcacagcgtgctgcctttggaggaggtggtgcaggagtaccaggtgagagaaatgagggaatgtggggggatgaagggagtggaaaggtaactaggagagctgaggaatgagtagcattcctttcccacctcctcaggtacttagttgctaaacttctctttatttgatgagggagacacggtggagagagatggtcatatgg

SEQ ID NO: 84870 - DNA, 204 bp, Homo sapiens
ttaatacagttaaagcacttaaaacatagcccagcaaatgataagtactacaaagatgtatgtaggtatgttaggtggataaataggtagtagacagaccatacacatatatatgtatgagttagctagtttaataaatccacattattgtgcccatctctctctggacttactctcaagtatcgtaaaatatatgacctcctg

SEQ ID NO: 84871 - DNA, 412 bp, Homo sapiens
cgtccgaaacttggacttttttaagatttatacttgagtatttcatttatttgggtgctaatataaatgatattgtgcttttaatttcaaattccacttgttcactgttggcaaataggaaagcaattgacttttgtatattaaccttgtatcctgccaccttgctgtaattgcttattagccaccacctgcttttgtaaataaaattgcactggagtatggccattctcatttgtttacatgtcgtctgtggcagttttcatgcagaagagttgagtagttgcaacagagaccatatggcccagaaagcctaaaatatttactatctggcccttgacagaaaaagttttctgatccctgctcaagaacattcagaaggcatttatcagatggtaggaacctggcagagtat

SEQ ID NO: 84872 - DNA, 376 bp, Homo sapiens
ttcttccctcaatgtcaaattgtacatcatgtttcagattacagagtagaactgaaagttgaattaggcaggcagggcacttgctaggtagaaatgagtttatagagaccaaagccttggggtgtgcttggttttcgctttgttattatttagtgctatattttgagtcttctcacaaagtggattttgtttttattgtctgatgtttctctactcctccaggtgcccagatgactatcatgagccaagcttgtgcagaaaggtgtaacataatgagactggtggaccgtcggtgggcagggattgccaaaggagtgggcacccagaagattattggaagggtacatctaggtgagcaaaaggcactggggcttgg

SEQ ID NO: 84873 - DNA, 400 bp, Homo sapiens
  misc_feature (1)...(400): n = a,t,c or g
cgccgccaccgccgccgccgggggagctcgcccgcatcccagaggcggtggggccggagctggaggctgaggagaaactgtccgttcgggtggcggagtcggcggcagccgcgcctcagggagggccggaacttccaccttctcctgcatcgccgccggagcagcccccggctcccgaggagcgcgaggagccgccgctgcctcagcccgtagccccggcgctcgtgccgccggcgggcggggactccacggtgtcgcaactgatcccgggctcggaggtgcgggtcacgctggaccacatcattgaggacgcgcttgtcgtgtcgttccgcttcggggagaagctcttctccggggtcctcatggatctgtccaaaaggtttgggccccatggtatccn

SEQ ID NO: 84874 - DNA, 229 bp, Homo sapiens
aaaacacatttcatgttaatgcatcagatgacttagtattgctaagaatataggactccttgaatcgatctacagattcaacacatccctataaaaatctcagctagctttttttgcagaatttgacaagctgttcctaaaactcatatggaaagtaaagaagttcagaatagcaaagaaaaaaatattgaaaaagaagagcaaaactggagaactcccacttcatgat

SEQ ID NO: 84875 - DNA, 682 bp, Homo sapiens
  misc_feature (1)...(682): n = a,t,c or g
gctgttttgattccgcaccatgcctgcaagatccacccaagaggctgcgtgtgctggctgcttgttacttatcgttgctgagcagtgttctgcaatgtgggtgtatcacagtttggtcattcaccggttgcacatatacttcttaagaaggtctgcacatagctgtgagcagagattccgggagcagggttgagaggttctttgtgaacactcacagggccccacttcgcgtggtactttctctacaaggcctttcctatccatggtcttgtttttagtcccccgctctcccgagccacatgcatgtatttatcttccatttcctctgtggaggcaaggagctgggaagttctgagccaaggtcccacgccacatggccgggcacagcagtgccaagatgttccctccggctcctcggtgttctgaccccacaacgacatgctacttccctaccctgctgggaaggcttttatgcgcaaatccgcttggaccttctttttcccaccgcctcctgtantggaggtccgtgggaccccgccactaccatgctgcattctcttgaccactcgcctcgttcttgctccggctcggctggcgcggacccgagacgacccccgggggcccctcatggcacgggcagaaaatcgccttgccttgccgtccgccaggccagggccccccc

SEQ ID NO: 84876 - DNA, 231 bp, Homo sapiens
gcgctgcttctcataagaagagattactttagaagaccctgcagatgttcctgtctatgtacagcttattcctctggctttatattccaacccttcagtgttcgtagataagttagtatcatggtttaacttgaggaaggtggcaaagatagattcgctaacactagaaattcacgtcttaagaaacagtgctcatccactgcatagttctgcctgatttatggagggcct

SEQ ID NO: 84877 - DNA, 228 bp, Homo sapiens
gcattttaattaggaggggtggtaggcctcctgccccttcaccccacgccttctgtgagaagtgctctcttgcaaacagtaactttttgctgggcaacacccagggggcggagctcttccccgtggtctactgctctgatggcttctgtgacctcaccgccttctcccggactgaggacatgcagcggtgctgagcctgctcctttctttatgggccatacaccagtg

SEQ ID NO: 84878 - DNA, 214 bp, Homo sapiens
  misc_feature (1)...(214): n = a,t,c or g
agattacaggctatttgtcttcaacaaaccaatctaaaatcacttatttcctactcctccgtaagccacatagcacttgttattatggctatcctcattcagaacccttaaaccttataattgctcatggaattataattgctcaccaccgtgcccagcctcgtggattttttaagtcgcagtgaatccttctcagatctaatggaagtccttn

SEQ ID NO: 84879 - DNA, 827 bp, Homo sapiens
atgtgtaacttgtcggatcaacagcgtatcggattttccatggaagatgcagtggttagtagcttttccatagtccagatgcaggtgcctgcagcggaagccgtgtgcagtacatccggttcagcaggagccttgcacgcagccggcacgtgtgcaggcacctggagctgccctccccactgtgctagccggtgtgcgtggctgtgcacggtggccggagcccgtgattgttctcccacacaccccgcgccgctcctcgaggggctcatcctcagcagatgccaccccaaacaaccctatttgcttctagacctatacctaaagtctcagtgtgctcctagaggtgagattgagagtgtgatccatgaggtgctgtgcaacagtagaaacgaactgcttgagttatccaattcatataaacaaaaatctagagaaccagtatgggaatggatattaagggtatgggataatagttgaaggaacaagaagttggatcaggctgaatttattgacttgggcctactaagtagggacttggcgtttaatgttgcagctcaggaagctttctactctggtctcatttctgccctctccattgcacaaaattgctctcattaaagtcacaaatgacctttgtcatacatccattgggtatttttcaggtatcattttatctgacacaccagtagcatctgacagtgtagaacagtccttgttcttgaaacaccctctgccttcaggtcttttacatcatcagattccagggacttatcctgactctctgaccacccctttctcatggtcctctgtcagttgctcctgttcta

SEQ ID NO: 84880 - DNA, 409 bp, Homo sapiens
gtactgactcggaagtttcgggtcgacccacgcgtccgaagagaagatgctgcacatacaactctcataaacagttgatagacttctggctatgctaatatgaagaaattgattaatcttctaaaaaaatactaaaaagcaaatgcgattgtcaaaaacaatcatttcagaagtcttggagttaaccagaggaagatgacagctacagaatactgctaagataaattaaggactatctgaacaaatggagagataaactatgttaatggattggaagactcaatattgttgggatagcaattctccccaaattgatctataggttttgggacatccctatcaaaattctggtaggctttttgttggaattcacaagcttacccttatacttatagaggaatagaaaaga

SEQ ID NO: 84881 - DNA, 391 bp, Homo sapiens
ccgacacgagtgtacacagtcctggttgaactgaattcaggaaccatcgtggccaatatcacagcggaggatcctgatgatgaaagttttcccaaccacctcctctacagcattaccactgttaacacatatttcatgataaatcagctgactggtacaatccacgtggcccacaggatagaccgagatgcaggtgaattgagacaaaatcccaccatctccctgtaagttctagtgaaggacagaccatatgggggtcaggagaatcgcattcagataacctttattgcggaagacgtctacgaccatcctaccacatgccaaaagttcaccttcaacattatggtgccggaaagaacagccaaggggacgttgcttcttgacctaaaca

SEQ ID NO: 84882 - DNA, 1062 bp, Homo sapiens
ccaaacttaacctgtttatgtggtggcgagatttgactactatgtgctttctcgctcatttcgtatttgtttttaactacgcagattaattcgcgcaagttttttctaatcctgtagagaaccggctgcgtgtgtgtgtgtgtgtgtgtgtgtgtgtgtgtcttccaatcgcattcttcagacggtgacattctttgaagaaaaaagtgcaaaacttgctcttggactcacattcatactctcctcttccccagcccacttgctcttcaggacgaagctgagatctcgctctgttgcgcacactgaagcgcaggggtgtgatttcagctaactgcagcctcatgcctgggctcaagtgatcctcccacctgagcctcccacctgagcctcccaagtatccgggaccacagaaatttgatgtcttctttccatcctgggaatggacataatgatagtcggaggtctgtgttttatgccaatgaaaagtgggaatttttagacccaacccctaaggacctagaggagtccatagtacaggaagaaaagaaggagccaacccctgaaggaaacaaagtttcacaaaggctgaaaaatttgcctcatacttccctcaaagccaaacagttgcttcaaacttcatctacaaatagaggatttgtacctcaattgatggaatattggtaattcttctactccatttgaagatgaaaaataaaggccaaaatcataggcctggcacagaagctggataatgaagacagctccggaggaacacatagatacacacacatatagacacacacatatataaagtacacagacatattatttttaaagtttattttttaaagttttaaagtttctaaaatgaaagctggccctgcctctctcccagagtgagcggagacagcggttgcatgagcagctttccttgtgaggccacaggtccctctggacacgctgctgcctgaccatgcctcctttccctttcagctttctcatagaccaatgggcttggagcattaaggccatacccctattatgcattctagtgcgaccttg

SEQ ID NO: 84883 - DNA, 404 bp, Homo sapiens
  misc_feature (1)...(404): n = a,t,c or g
tcgagaggaccaacaagttcatcaaagagctcattatggacgggaagaacctcatcgctgcgacgaaaagtctgtcagtggcccagcggaagtttgctcattcactcagagactttaagtttgagtttatcggtgatgctgtgacagatgatgaacgatgcatagatgcttccttacgtgaattttcaaattttttgaagaatctggaggaacagagagaaattatggtgagttgagaggggtgtaaattaataagtcagctttcaagggggaaaaaaatctggatttggaagcttgttctggtagaagttgtgaagcatttatccctgggtacagtagtgcattgtaatggaaagatgaggtttccggagccctgatttctagttccttgagggtgctgaccn

SEQ ID NO: 84884 - DNA, 382 bp, Homo sapiens
atgcaaacgcggtttgacaagatgtttgacaagacccaggacccacctgaggaggcagtgttggccgcagtgtcccctgccaccaaggttgtgaccaaggccttatccaccgactgatgcagcgatagctgctgggacagctactgggacagtgacaactctaatgatgaccctgccgaggagctggctcagctgctggatcagctcaaagaccagctcaaacacgttcgcgacctgtttgaacccctgtataaccccccgcagaacaaggcgaaagacaaggaggaagacaagaaggaaaagcacaaaaaaaagcacaaggggggccctttgggggggcccttttttaattccccgtttttggcacggttattttttttta

SEQ ID NO: 84885 - DNA, 397 bp, Homo sapiens
cagagcttttgctaaagaaagtaacttattagagtgacaaacacactgttcaagacccattaatggaactgaaattgatatgggatagcctggaggagagaatcatcaacagacagcataaactggagggtgctctattagccttgggtcagttccaacatgccctggatgagctcctggcatggctgacacacaccgagggcttgctaagtgagcagaaacctgttggaggagaccctaaagccattgaaattgaacttgccaagcatcatgtgctccaaaatgatgtattagcccatcagtccacagtggaagccgttaataaagcaggaaatgatctaattgaatcaagtgcaggagaagaagcaagcaaccttcagaacaagctagaggtttt

SEQ ID NO: 84886 - DNA, 375 bp, Homo sapiens
tttcgtggcgcttattcaggtactgatcccgggacccctgccgggctccagcagccctaacccaagctctgctggtctgtgagcttggcagtgtcactcccgaactttccccacttggtttcccagaccacaggctccgccccatggtcggctacccccccggtccccatttggttgtgtcccggtgactgctggccttgatcctttttccgggtgccgccggatctcccatccccagagcaccccactgttctccgcccctgactcagctactgcttcggggctcggctttgccccttccacctgcagccctggtcgtcgccccgcccctgactacctcacaacctacctgtcaccctgcttggccccgccctc

SEQ ID NO: 84887 - DNA, 379 bp, Homo sapiens
cttcgtgtgggcccctccgggaggtcgggctgttattctcccatccctcccgaccgcgctttgggcagaatcctaggccataaacccctggaccaccactttctgacccaagggggtctccgaaatgagggatagggaggcttattggtctggaacgcggaggagagcctgggggagtggtcagtgctgtgaccattctgctcggctgtggtcgtgaaggaaaccggtactggccgggagctcagtgaagggatgtatggtggggaaggagaaatagaggtctgaggagggtcttgtgaatgttgggatgtggaactgtcggatttgggagttgatatgaaaacaagcttgatcgtgggagtgcaatcgtcaggtgctg

SEQ ID NO: 84888 - DNA, 448 bp, Homo sapiens
  misc_feature (1)...(448): n = a,t,c or g
gcgatcgannnncatttcccgggtcgacgatttcgtggaggatggagcagtgagcgggtctgggcggctgctggcagcgccatggagactgtacagctgaggaacccgccgcgccggtgaggggccactggctaagaggacgggcatggggtcaggggaagaaaaggcgggaactggttgaggggatacacctgtgtgggagtccccggagctaagcgacccagccgatggggcacctgctgagtgaggggggggacgtctggtgggtgagggtccggctgaggggagcatctgctaaggaggttagacttgggaccggttagagggagcactcgctgtggagagactgtgctgaggaacgtggggacaagttagggagagtacctgctgaggccgcgccactcgggggatcgctatccaagcagggactcacggaggtgggggcgan

SEQ ID NO: 84889 - DNA, 428 bp, Homo sapiens
cgatttcgtccgctacttccctgcggcggggtaaccttcttttacctaccgggctcggttccctggctccggccgcgggggagcatggagtttgcggagctgattaagaccccgcgggtggacaatgtggtgctgcaccggcctttctacccggctgtcgagggcaccctgtgcctgacgggccaccacttgatcctgtcctcccggcaggacaatacggaggagctgtggctcctccattcaaacatcgacgccatcgacaagcgatttgtaggatcactgggtaccatcatcataaaatgtaaagattttcgaattattcagttggatattcctggaatggaggaatgcttgaatatagccagttccattgaggcattgtctactctggactccatcactctgatgtaccctttcttttaccgtcc

SEQ ID NO: 84890 - DNA, 472 bp, Homo sapiens
ttttttttttttgcgtttggggtttcttaaggttttttttttttaatcggatcaatataaatctctttaggaaaaaaagcaatgttgctggtttgttctcactggggagggggcagggctgaggagcagctgcagtgcagtgtcagaaaggagacaggggaatggagggggtgtgagagacggagggtgaaagaagaagaagaaaggagacagggggagagagtggagaagggagaggggcgagtgaatgagcgggaggaggggaccggggaggacaggcagagggagtgggagagcgcgagggctggcggggcgcggggagaagccgaggaggaggggagagtgagggaaagagtgaatgagcaggaggaggggaaggaggtggatgccgagagaggagcgagcggcagaggagggcaggagccgggaaggagagcggcggtccccgcgccgcgctagcgttgcgacgaaa

SEQ ID NO: 84891 - DNA, 425 bp, Homo sapiens
ccggacttcccgggtcgacgatttcgtcaaaagtattttatagttaagtccgtttttgcttagccatcatactgagtacttctctgcagagcatgcatatccagggcaggacttccacagaccaaaatttcaacctcttctggacgaagcagcattagggcatttgaagcacacacactatgaaatccataataaaatgcagcaaactgcttatagatggatttgttcagaaggaagtcagtataaagctgtacatattcttttctattttgattggtaactgaaattttatcaccaccgggctttaaattataggacttgattattccaaattcttcttgaaaaacctgaaatgttgaatagaaatcttcttcaacattgccttcatgtgataagagatcacttaatccatgggccaactcagg

SEQ ID NO: 84892 - DNA, 410 bp, Homo sapiens
atgagttggaagttgaccctgagctgttggtatggtgacttgagaggtttgagagcagcatttggatagggtcttgtgggtggtcttgaccaatgaggtctcagcaactgagggtgggctctcgggagtggggagtggggggtgtctgcaaagtttgagagatcataagcaaggcctccatggttaccatctaagagtgtgcactttggggagtgaccctgggagtgtgagtgggaaatctgtggtggggccgggaccaagtcccttccagcatcccacatctactttctactcacttgagcgtcgaccaccctctccccacagaccccggtgctgctgacacccagctcgctgcctactagcattcacttctggagcaccctgagtcccattgcgccccgtagcccgcg

SEQ ID NO: 84893 - DNA, 378 bp, Homo sapiens
ttcctttccataacttaggctttccttgctcatccctaggagctgaggataactataccttggccagccacctcattgctacaggtaagtaccctggaagactactgagggggtgatcatacgaaacgacaatgtgcctttccatagcttatactttccttgctcagccctaagagctgaggataactataccttggtcacccacctcattgctacaggtaaataccctggaagactactgatggggtgttcataggaaatgaagggagaagcactacttggaaaaagatactggagagcagctatcttgagttaggaattgagctggcataggaaataattaaaacgacaactccacctagagaaacgaacaagaag

SEQ ID NO: 84894 - DNA, 436 bp, Homo sapiens
caaaagttcagcccaacacggaggatcttcgggcaggagatggggaagaaggagaagcaggaaggaaagagctcagtgtgggggcgcgcatggcatcccggtgggacatctgaggcccacacccacctgctgtccctccctcccacggtggccaccgagggtgaaggcctggggggaggcagacgcctggccctttactctccctccctgtccccatggccgctgggtgggggccgtctctgggatgatccccgagggcaggatccgggagtccctgcagaggcatcagcctgtctgtcttgatggaggagaggcggctccagctgggcgggaccaccaggggaggggcttgtgctctgctggctcaacctggtgtggacccacctcccgggcgctggctgcaatgactttctctttccctttgcaattgccttgg

SEQ ID NO: 84895 - DNA, 400 bp, Homo sapiens
ggatcatggagggctaaataagatgggtggagctgagattacagctgacggaatggggattagacccaagtaccagataaatctagaaactagagaagtgaatgaaggaagttacagtacagaaaacagttccacgtgatcttcacacataaaggtggaagaagaaataggatgatctcatgttgtttttcaggctacggaaaaacctgcgagccctggtggttgtccatgctacatggtatgtgaaagcatttctggcactgcttcggcccttcatcaggtactagttctaggaacaaggactcctttctccttccccccattttcaaaatcaagattaagatctttctccaccttgattctttctagccttaaccactctacttctacatttttcttt

SEQ ID NO: 84896 - DNA, 419 bp, Homo sapiens
cgaggctgctgaaaccgaaaccgctgtgctgttggcgcagcgccgagattgattcaccttcacctgtgctgcactccagctgacccaagtaggaagccagacgagctgtaaaacatgaacggaagagtggattatttggtcactgaggaagagatcaatcttaccagagggccctcaggtatgtgcggaaagggtcatatctgacagtaggggattagagggtgtaattgcagacacctctgctgctgagccggattcacctggcctcggggcgggcaggccacaacctagaggtttcgtgcaacgcttcggggtgcttagagaaaatatattgaaaatccatcattaagccagatacgggtctgaggaatccacctcaaaatcccagtttgatgaacacaatatatatagtcagaagg

SEQ ID NO: 84897 - DNA, 396 bp, Homo sapiens
tttcgtggaatgccccacctattggagggggtcccaggatatcttccgtgtcctgagtgagggctgcagaggggcctccagctagctctggggacccttccgtgagaggtgcattttggggccatgggggttacagactagggctccccaccaaagagaggtcctggggatttgggggctccctgagtattgggctgcagccccccatatgcctcgtccctcagaggattccaaggagacttggcggaccccccccaactgagggggtgtgagtgggagtctctggggatgaagctgggtattggggtatctggggtggaatgggggtggtctctgggctccaaggagactggggggcccaggccctctgaggaggcccaagatggggtgtgtggg

SEQ ID NO: 84898 - DNA, 426 bp, Homo sapiens
cagaaacctgtctcctcccttccattccccaggcccagcgcccggtgaggcctcatcactgagcccggccacctccccttgccatttcctctgcctttggacgactcccctccctgtccttcttcctttctccctaggcctctctctcagggctctttttctccagattttttcccccaattttgggcactgccggggggggagaaaccctcagatctcatcctagattcccttttaaaccacagacaaggtcttgtattctttcttaatttttaaaaaagagttcttaccctcatctctttccctatctaaaaaacacggcctggaacaaaaaacggatggggagcggtgctgggcggccggcttgcctctggaccgggggcggagcatcccctgagggctggaacagggaggggtcaatgcccc

SEQ ID NO: 84899 - DNA, 632 bp, Homo sapiens
cccacgcgtccggcctgcaatggacccggcttgtctgtgctgtgcttcatgcgtcacgacatcctggagtatttcagtgtctacgggacagccctgagcatgtgggtctcgctgatggcactggccgacttcgacgaacccaagaggtcaacatttgtgatgttcggcgtcctgaccattgctgtgcggatctaccatgaccgatggggctacggggtgtactcgggccccatcggcacagccatcctcatcatcgcggcaaagtggctacagaagatgaaggagaagaagggcctgtacccagacaagagcgtctacacccagcagataggccccggcctctgcttcggggcgctggccctgatgctacgcttcttctttgaggactgggactacacttacgtccacagcttctaccactgtgccctggctatgtcctttgttctgctgctgcccaagcaagcagccagcacccccctttcccgcttcgcagcagcagcacatggaaagttggaggcggcaggccactccgagcagggcggcgacgagggccctgccaagcgcgaagggccacactggcaggctcctcactgcagcgatttacgaaggccgcccaaagcctggccaagtct

SEQ ID NO: 84900 - DNA, 388 bp, Homo sapiens
actaggcagcacgttgccgtgttcgtcgtaaacaaagaagtagccatcctcgccgaactgcatgcgcgacagcatctccagcgcctggcgccgctgcacggattgctcctcgccgctggacttgatgcgcgtcagcgccgtggtcgccagctggacgtagtggcgcagctccgtctccttgctgtgcaggtaggcggtctcgaccagttcccgttcctggtgggccagctccagggtctggtgctgcacggtcgccgcgaccaggcccagggcgagcgcgatggcggcaatcgacagaagtgcaagtttcagcggaagttgcatggaagcctgtgtggggtgcaccgacgatcttttccgcccagtggccgggccttgtcaacagggc

SEQ ID NO: 84901 - DNA, 425 bp, Homo sapiens
ggtgcagctggcctttgccgccgttaacgtgtggcggaagaacctgcaggtagggcaggccaccctccgaggcctggtgcccagggcccggcctggccacggacctcctccatccccgaaggccgtggcactggctctggctctggtgggcaggactggagctaggagccatggccaggggcagtggtgagtgctcccagggcacgggggcagcaccggaggggggctgcctgcaggtggctgcccactgcaaagccggggccgagggaggccacgcaccctgctccaagcctccgcctggcccctctgtctccagagtcgcccgccggtacccattccataggaaggcaatcaggcagggtaagacaggggcccgcctgtgtatggcacgtgagtccaagatgcattttgccctccgccgaccc

SEQ ID NO: 84902 - DNA, 588 bp, Homo sapiens
atgagccgctatgagcaggtgctacatcacatccgctaccgcaactggcgtccggcttcccttgaggcccggcgtttccggattaagtgctcagaactcaatgggcgctacactagcaatgagttcaacttggaggtcagcatccttcatgaagaccaagtctcagataaggagcatgtcaatcatctgattgtgcagcctcccttcctccagtctgtccatcatcctgagtcccggagtagcatccagcacagttcagtggtcccaagcattgccacagtggtcatcatcatctccgtgtgcatgcttgtgtttgtcgtggccatgggtgtgtaccgggtccggatcgcccaccagcacttcatccaggagactgaggctgccaaggaatctgagatggactgggacgattctgcgctgactatcacagtcaaccccatggagaaacatgaatgaccagggcatggggaagatgagactgagggagaagaggaggaagaatccgaggaagaaatgagctccagcagtggctctgacgacagctattaggaggaggaggaggaagggatgggcataatggagccaggc

SEQ ID NO: 84903 - DNA, 1055 bp, Homo sapiens
ccttgattacctattaaatccatccacagtattttcctgtgaaaatcagaaataaaaaaccactttatacatttatttcagtcaaatgatttctcaccagtgtaaattttcggttggcaagtaagatgcccaacaacactaaaggaattcccacactccttacattcatagggtttatcatcagtatgaatgcgctgatgtttggtaaaggatgaactatgtctaaaggccttcccacatgccttgcattcatagggtttttctccagtatgaattctctgatgttctgtaagggctgaactatgtctaaaggccttcccacataccttacattcataaggtttttgaccactgtgaattctttcatgtcgagtaagttcactacctactccaaatgctttctcacattctttacatttatagggtttttcaccagtatgaatcctctgatgtctagtcagggatgaactatttctaaagacctttccacatgctttgcattcatagggtttcttaccagtatgaattctctgatgacgagcaagttctctacatactccaaaagccttcccacattccttacatgcataaggtttctcaccagtgtgaattctctgatgttcaatgagctgtgaactaattctaaaaaccttctcacagtgcatacatttgtagggtttctcaccagtatgaattctctgatgttcggtaagctgtgaatgaaatctgaagtccttgccacattccatacatttgtaagttttctcatcagtatggattttctgatgtcgagtaagttgtgcatgcactctaaaggatttcccacagaatgagcattcaaagtgtttctcaccatcatgaactctttgaagtggagtaacttttccaactctttcaaaggtccttctgtattccttacatttatagaacttctcattatgaattttctggtatacattaaagtctttataaaaactacatgtattcccatattccatatatttacaaggtttcacaccagtatgaatattcagttgtaacatactggagttatg

SEQ ID NO: 84904 - DNA, 437 bp, Homo sapiens
ctggtggaattcggctttgattgtcctagctcactgcagaggcatgaaagaactcacactggagagattccctatgaatgcaagcagtgtgggaaagcgcgatctcatcactcaagcttttgaagacatatgataatgcacactggagatggacctcacaaatgcaaggtatgtgagaaagccttcatttattccattgtatttcaaggacatgaaaggactcatactggtgagaaaccctatgaatgtaaagaatgtgcgaaagccttccgcatttctagatcccttcgaagacatgaaacaactcacactggagagaaaccctataaatgtaaatgcgggaaagcctttattgatttctattcctttcaaaatcatgaaacaactcacactggagagaagccatatgagtgtaaggaatgtgggaaagcattcac

SEQ ID NO: 84905 - DNA, 448 bp, Homo sapiens
  misc_feature (1)...(448): n = a,t,c or g
ggttttcaaccagcctgtaagtgagctgtcagtttctgaaaacaaccgacgtgggttatacttaacaactattaatgcgccagatgaagaccgtgagaaaaatgcagacattggttatcagcttggaccgaatgcctccttttttgatctggaacgaaaaacaggagttttgacagcctcctgagtatttgacagagaagaacaagatcgattcatttttacagtaactgccagggataatgggacccctcccctccaaagccaaacggctgtgattgttactgctctggatgagaatgaccgttgccccccgcttactcataatcattttcaattttttgcggctgagaatctgccaaagcatactactgtggcggtgatcacagtgacagatgcacatgctagagagaatatagctgtgactctntgcattctacatgacagtgan

SEQ ID NO: 84906 - DNA, 456 bp, Homo sapiens
ccgtgcggtgtttgacacgaacgttgctgtcgcacaccccagcgctgtgtcccaacgcggccattcagcagcgcctggcggccctgcggcacctgtgccacaagcggtttgtggaggttcgtgagcaggagggggtcctgggggcagccagccgcggcctgagccacagagtttggcctgggatactcactgcgcactgcagggcgcacagacatatcaagtatgagctgcttcttgccccagagctggaagagcctgtcacaggagaactggaccgaccatgtgcagacggcagcgtccgtgccacccgaaccaacccagcggagctgcctgtggggccgggtgggggctgagagtcaccagagaggtgcaaggctgcctgtgcgaggccggaaggaggaaggccaggccccccccgcccggtgccagcgcatagccggccggaagggcagcgta

SEQ ID NO: 84907 - DNA, 483 bp, Homo sapiens
  misc_feature (1)...(483): n = a,t,c or g
gccatattcgcagccattccagggtccagagttggtgggagcaaggcccgagttcaggcccgccaggtctcccctgccacagtctcaaagaggcggctggcccaggcccagcaaaagatccgggagctggctatcaacatccgcatgaaggaggagcttattggcgagctggtccgcacaggaaaggcagctcaggccctgaaccgccagcacagccagcgtatccgggagctggagcaggaggcatagcacgtgcgggccgagctgagtgaaggccaaaggcagctgcgggagctcgagggcaaggagctccaggatgctggcgagcggtctcggctccaggagttccgcaggagggtcgctgcggcccaaagccaggtgcaggtgctgaaagagaanaagcatgctacggagcggctggtgtcactgtcggcccagagtgagaagcgactgcaggagctcgagcggaacgtgcagctcatg

SEQ ID NO: 84908 - DNA, 404 bp, Homo sapiens
catcgttcgacccacgcgtccgatcttgacttctccatcaagctggatttggtctgtgtgtccatgtactggagagtcagtgggcgctcatttctcagagttatgatgtccttggcctggcctgcttttactctgcttgcttagatctgctgctctatggaaaaggattgctgtgtcggccctttagtgagtgtctgcgtttcgttcaagtctacgagcacagccgtgttctaacctctcagagcaatgtcatgctgggggtccactcctccctggccatgtggtttgcccaggaatcacagtgggacctgtttaagcactatttctccaacgcttgcagttggtgaaaagaaccaatgcctcgctatttgggtgcacatggctttgtccgattcctagaatgc

SEQ ID NO: 84909 - DNA, 417 bp, Homo sapiens
tttcgtgcaaccatggcgggaggaatgaaagtggcggtcttgttggcagttggtcccgggtcctggggctcgggagtcgggggcggtgggacagtgcggttactcttgatcctctccggctgcttggtctacggcacaggtaccgcccgggcagcagctgtcacgggggcaggtgccgagggggttatttttggaaaagggattgtcctgagggcgcgggccggtactttgcagaagggcggtggctctaccgagggccgccggcgtagagtggtggaagaaacttggcaggctagtgggcgtcgggactgaggggctgggccctgaagcgggctggggcagcttccagagtggggaggagccttaagtcttttggcggagacaggaagggaggcctatactggatgaaaagcagcc

SEQ ID NO: 84910 - DNA, 201 bp, Homo sapiens
actagttatagatcgcgagcggccatccttttttattgcttacttgatggattctgccagaaaacgggagctgtttttttcattcgcgaccagcgagccaatacacaaaaacacatggaaggagtatgcattataggctttgctcagcggctcgataattggcttttataactcaagcaccagcaggcggacgataaaaaa

SEQ ID NO: 84911 - DNA, 402 bp, Homo sapiens
  misc_feature (1)...(402): n = a,t,c or g
ccgagctccatccagccccttgtgcccctaggtttacaccagtaaccggccccttcgaattggctactatgaatcagatggttacatccagccatcccctagcatggccagggctgtgcagctcacctcctggctgctccaggatgcttgacaccaggtagtctcacctggtcctgggtgagagagagtctgggccagtgcgaggatgctgggcggggccatccttggagacaaaggtggctacatctgcgtttgaggtgctgagataactgtgttccccctatgcttcctggagaagactgatgggatggaggtggggatagggtgagccctaccctagaaggaaggcattaagcttttgtgcttcctccttcggnggtggagattcagggactcactcct

SEQ ID NO: 84912 - DNA, 681 bp, Homo sapiens
  misc_feature (1)...(681): n = a,t,c or g
cgaggtggagcaaatgatccgagacctggaagccagcatcgcccgctacaaggaggaatacgccgtcctgatctcagaggcccaggccatcaaggcagacctggcagctgttgaggcaaaagtaagattatcatcattgatcctcagcctttcctgctgtggaagcagagattaacacacttcaacatgcgctgcatgcaccatgctggcctcggtgaattcgctctttaacatctgtaaggccccggaggacttttttcctggaaaataatacacactgagtagttcacttaagtgttgttaaattaggatagattgatacaaactgggacactttttcagccgttggaatccccccacccagcagctcccagacctgttttgctctgcctgcctgagggcctcgctccgtaccccagcttctgccccgctgagattctgagtcgtgtgtggtcattagttatgtatgatctgggtctcatctcctctgggactgtgaacaacttgggcacgtttctaacccacccaaaaccctgcacataatgtggatgaaccgatttgcaggattcggtataaatcctgaaaggcctcatccctgagcatcttgttcggttttccttttaggtaaaccngagcactgctcttctgaagagcttgtctgctgaacgtgaacgatgggaa

SEQ ID NO: 84913 - DNA, 450 bp, Homo sapiens
gcaagccagtcacggttacgaggaggcgccctaccttttactgctaatggaatgaagctagacctgtgtttccaatcattagctggcttactgagctgtctttcatcatagattccaaattctgttggattctttcaactattgttaaccaataaattgtatgttgtggatagtcgatgaacttgaaataaaagatttctttttccttccagtttgttgtagcagtgttctggatcatttatgcctatgacagagagatgatatacccgaagctgctggataattttatcccagggtggctgaatcacggaatgcatttcaaagcttaaagttttcttggcacgcttttcaaacgcccatctgactttgaagcaggctgcctctccacagaaagcttgctccagcaaagactaaaggattgacctggtgccatgcatgctgctctgcaca

SEQ ID NO: 84914 - DNA, 404 bp, Homo sapiens
actacatggacgtggcaacaggcggctcccgggggtctcgggggatggcgggctctgggccaatggcctcagtgaggactgccagggtctgaaggttgggcacagagttcccggacgccaaacactaggtcagagaaatggcctttctgtgacccctgaccccacattctgatttaagggtggccaaagtaggcctggccctggctggcctggggattgagctgagagcccagaagaaggctgaggcctgaggcctgggggactctgggctcctccaggccgcggctggacatccccctgaggcctggcccaggctggcgagggccggaggctgtgtccggctcctcggcaggcctggtggccggagcgtttctctgggccgctgtgcggtgcctgtggtaatg

SEQ ID NO: 84915 - DNA, 407 bp, Homo sapiens
aatacattgtgctgaggagagttatcagaatgtttagctctgcagggcaggaggggttgagcactgatggctgcccacgatgccctcaatacccatctcttgcacccaggggtcagggccaatccacatgagcaatgactgcccacatttttgttctggagatatgaatgcagcaaagtctctagaatgtgtcctctgacctgacctgcagcagaaactgctgagtactcacacgaaaatgtcatcccgaggcatgatgtggtttaaaccttcatccatttggaaaattttgtggaatcggtgattatacacatctgcgaccaccatctaagaatgaacagtaacagaaagaccacagaatggctaagagtgcccctactaactgcttaaaacccagaaacaaatgg

SEQ ID NO: 84916 - DNA, 413 bp, Homo sapiens
aatacacgcccacagtccagtccacacggaatcccacagtccacacgtaagcccacagtccacacggaagcccacagtccagtccacacggaagcccacagtccacacggaagcccacagtccacacggaagcccagagtccacacggaagcccacagtccagtccacatggaagcccagagtccacacggaagcccacagtccacacggaagcccacagttcacatggaagcccacagtccagtccacacggaagcccagagtccacacggaagcccacagtccacacggaagtccacagtcaagatcaaccttccaagaacgtgtataggacacttacttctcttggaggagctcgatccaaaatacgggggcagaggcacagctctgactgacagctcccttggtgtggg

SEQ ID NO: 84917 - DNA, 1671 bp, Homo sapiens
ccccgcccccggcttttccacgcctcagccctgttaggggacaccatggtggttcttggggggcgctcggaccctgacgagttcagcagcgacgttctgctctaccaggtcaactgcaatgcctggcttctgcccgacctcacccgctcggcctctgtggggcccccaatggaggagtctgtggcccatgctgtggcagcagtcgggagccgcctgtatatctctgggggtttcgggggagtggccctgggccgcctgctggcactgaccctgccccctgacccctgccgcctgctgtcctcacctgaagcttgtaaccagtctggggcctgcacctggtgccatggggcctgcttgtccggggatcaggcccacaggctgggctgcgggggctccccctgctccccaatgcctcgctccccggaggaatgtcgacgtctccggacctgcagtgagtgcctggcccgccatcctcggaccctgcaacctggagatggagaggcgtccaccccccgctgtaagtggtgtaccaactgccccgaaggtgcttgcattggacgcaatgggtcctgcacctctgagaatgactgtcggatcaaccagcgagaggtcttctgggcagggaactgctccgaggctgcgtgcggggctgctgactgcgagcagtgcacgcgggagggcaagtgcatgtggacgcggcagttcaagaggacaggggagacccgccgcatcctctccgtgcagcccacctatgactggacgtgcttcagccactctctgctgaatgtgtcccccatgccggtggaatcatcacccccactgccctgccccaccccttgtcacctcctacccaactgtacctcctgcctggactctaagggagcagatgggggctggcagcactgtgtttggagcagcagcctgcagcagtgtctgagcccttcctacctgcccctgcgatgtatggccggaggctgtgggcggctgctccggggacctgagagctgctccctgggctgtgctcaggcaactcagtgcgccttgtgcctgcggcgcccccattgcggctggtgtgcctgggggggccaggatgggggtggccgctgcatggagggtggactcagcggcccccgtgatggtgagagggctttgggcactgggggagaggggctggcccttggttggggtctgatacagtgaacatagggatactgggccagacccagaggtggggctcagaggaggcaggagggagggcctaggcaactggggcaggtggtacagaggtccaggtaaaatgctatatccccggtgctagggctgacatgtgggcgtccgggggcctcctgggccttcctgtcctgcccccctgaggacgagtgtgcaaacgggcaccacgactgcaacgagacgcagaattgccacgaccagccccacggctatgagtgcagctgcaagaccggctataccatggacaacatgacagggctgtgccgccctgtgtgcgcccagggctgcgtgaacggctcatgtgtggagcccgaccactgccgctgccactttggctttgtgggccgcaactgctccacggaatgccgctgcaaccgccacagtgaatgcgctggtgttggggcgcgtgaccactgcttgctctgccgcaaccacaccaag

SEQ ID NO: 84918 - DNA, 425 bp, Homo sapiens
aagacagtggctgggatagagataacatgaaaggaatattgataaagagcagaaggaagaagcaggactaggtttgtttgggtttttaagattagagatagtctggggcctgttaaaatagaaaatagaagaaaaaagattagagataaagacagaaaggaaaagaaaagaaaaatagggagagaaacagaaagcaaatgaaaggagagagctagagagtaaaagaaaaaggaagggaaagaaagggaggtaaaagtgagaaaaaataaatggaagggagacagaaagataggtagaaaaggaggaaagacagggacaagggaaagaagcaaggacaggggaaggaatggaagaaaaagagaaagtgaaggtagggcagaaatgaagcaaaagaaggaaggaaaaatgagaaatgaagatacagg

SEQ ID NO: 84919 - DNA, 402 bp, Homo sapiens
ttcgccattcctccgcttgggcctgggcctgcagacgccttcgctcctcctccgcctccaggcgctcgcgctcctcacgctccctccgctccgcgtcctcccaacgtggcgcttccaggctccgctgctgctcttcccgcggcgccctttccgcctctagaggcggctcctgcccctcgccctcctcctccaagagctcctgccttctgttctcttcccaaagcctcctctccagcgcctgcagcctctgctcctctaggcgtctcttctcggctgcttccgccttttgccgcttgcacttggcctccagttctcgccagtagtcttcttggcgtcttctctcttcctcggaatccagcggattgggttcctcttcgtgccacgttggcttgtcctcgcctg

SEQ ID NO: 84920 - DNA, 387 bp, Homo sapiens
aatacatctgctgaaaccatctccagatattacttcatctactatttttaaatagaaattcggtgtcaaggtttattacctttggcaattcccactctgaccgagatccgtctgcactgtagtaatattgtctaccttgatcatcaacatgcttgagccactcttgatcccctggattttggaaatctcctttgctgatgcttgcatcccgagtccaacgaggaggtttccaagttctttcctgtgtccctctgttatagtaatagcaacgccctgagctgtctttatgagtttcccattctccattaatctgaattgccgggctcccaggaagtgggggaagagcagactgggatattttcagttcttgaaggttagcatagacag

SEQ ID NO: 84921 - DNA, 380 bp, Homo sapiens
ttgtcccaggtaaaaacatttgcagatttatattttataaaaatattttattctatcatcaattttgaaaaataaaaacaattccaaatgcaatattaaaccttttcatttgtatttattctttggatatgataatctctgttttctcagataaccagaatgacaactacatcatcttcaaaacgttgccacatacccaccacaatctgctgagttttaagagtactcttttcctatactgctcagttgcatttgtatcttttttgacattttcaagccacatgtttttcaagtagtttgttacgatcatagttactaattattattgcatctatattttagtaatagagaatgctatttgtgatgaccggacgcgtggg

SEQ ID NO: 84922 - DNA, 362 bp, Homo sapiens
ctcatcaccaacaaagtttttgtggcccgagagctgtcatgcctggatgtgcatctggacagcacagggagcaccgctgtggttgcagatcaagacaagctggagctggagctggtgctgaaggggtcctatgaggacacacagacatccttcctgggcacagcctctgccttccgcttccactacatggcagccctatagacagagctgagcgggcgcctgaggagctccaaaagcaatggctggaatggggacaactcaactgggtacctcactgtgcccctgaggcccttgaccattgtgaaggaggtgactatggatgttcctgctccaaatgtaaggggcctcaactggatgggaaa

SEQ ID NO: 84923 - DNA, 378 bp, Homo sapiens
aatttaaatttgttttcatttaaaatttaaaatatatacaattagcctcagacttttatttttcattattatcttttattatttttgataatatttctgtggatcagcatatcacaatgtacattcttggaaacaatactgcaaaacatgccacaaaaatgtgttatcaaacaattttgttaaaagctgtgtactataaggaactattcataattttattaggtatgattacagtattgtaactttgttaaaaaattgttgattttttttcaagatgcatgctaaagtatttgtgaatgaaatgataaaattttcaggatttgcttccacatattatgaaagtatggaaaaaggataggggtgaggacagggctgggt

SEQ ID NO: 84924 - DNA, 437 bp, Homo sapiens
aggtaatgaccaaatttttctccttttttcttgtgcctttcctatctgagtcctatcacagtcattcaattgctcagaaacagtcagaagttccccatttgggcctgacccagctcccctactgaacagttctatgaccttggagaagtcacttaacgtccttgagccttacatagcttatcgtaaaatgggaataaaaatacacttctgagttgttctgaggctcagctgtagaagtgctttggaaacgaagggccatccaaatagtcacaactgatgaactgaattggatgctttttgccttgtatcccaaatcatggctcacaaattagatcaatgccatgatttctgtaaaaccttaggcaacaattataatctggaaaagttaatttggcagtgtatcttctcaacctcattaattaaaaaaaaaaaaaagg

SEQ ID NO: 84925 - DNA, 420 bp, Homo sapiens
atgctttgagaatcaaggcttcctgtttaattttcaaaggaaaggacaccggatattgaacagcagctgtgctccttgatcttggcaacacacatcaacaggcagaatgaatttttgaccaaattgaaagctcacctccaccataaagacttaagactggaggatgcacaggacaggcactttatgcttcacatcgccttgaagtgtgctgacatttgcaatccttgtagaatctgggagatgagcaaccagtggagtgaaagggtctgtgaagaattctacaggcaaggcgaacttgaacagaaatttgaactggaaatcagtcctctttgtaatcaacagaaagattccattcctagtatacaaattggttttatgagctacatcgcggagccgctcttccaggaatgggcccatttc

SEQ ID NO: 84926 - DNA, 457 bp, Homo sapiens
tccgggccgacccacggtccgaccacgcgtgcggtttactatggaaaaatttccttagtttataatacttcctccaagagagaaataaagctcagcccacattttttgctgccttgggagcatataacttctgttgcagagatatcattcccttggttttggagttcttaaggcctgatagacaaggtgttacacagcaacaattcaagggatagggtttttttcctattttactgtaaacattttcaaacatactgaaaagctgaaaaaattctacggtaaacatccatatcttcttcaccactgagattctgtatttaagattttgctggatttgctttatcgcatatctgttcttttttttaatgtatttcaaagcaaactgaagatatcagcacgattcacctttaaacaggtatgatctttgtttcatactaatatgaggagactcattatt

SEQ ID NO: 84927 - DNA, 403 bp, Homo sapiens
acgcgagagcgttgagttccagttcctggttacgcttaagccttccaacaaggcttttgagaagaagtttcgctttgattataccaatgagagggccctgcggcgcactctgtaggaggacctggtgaaggacttgctgaacaacccacacatccaaaacgagttggagcgggaatttgagcggatgcgggaggatcgggaggtgctcacggtcatcttcccaactggagacagcaaggccgtcctcccctgtaacctgctgcggatgatctggaatgctcagaaaatcatccacatgaacccacgccttgcctccgacctgcaccccatcaaagtggtggggggagtcaaggaattgagcaagaagctggtgattgtgaatggtgatgacccactaagacgg

SEQ ID NO: 84928 - DNA, 397 bp, Homo sapiens
  misc_feature (1)...(397): n = a,t,c or g
tacgggttctgtgacagagatttcgacccgagctgctttatgaatagaaccacccactggagctggactatgtacctctaggcggcctgggaccatgataacagagcataccagtgggggaaccattacggactactctgatggggcgataagcatgaatttcctggacttgtacttatgtgacaaagcaaatgcctgtgcggaggaacactatggccacgaaaccaaagactggctgttgatctatgataatgaaggcgctgatgccactggttctcctgtgggctccgagggttgttgcagttttattgctgatgacctggatgacagcttcttggactcacttggacccaaatttaaaaaacttgcagagataagccttgggggtgatggagan

SEQ ID NO: 84929 - DNA, 412 bp, Homo sapiens
cctagggatataatacttttcacactcctcctgaaagccacaatcttccaggaaggtagaaaggactaatcaagctattaaaaggacctcgagcaaatgatgccaggaagcctctttaccatggctaaaacttctacccatggcacttcttcagatcagaacagcccttaaattacgtctatggcttagtttctttgaagtcctatactggagaccctttctacatgcaaacctaatattatacccagaggttacgaaattaacccagtacataaaatccctgacttaatttcaagaggtcgtccaggagtttggacagaattctgagtctaacccccctaacaacccatataaccaggcaggaaaacaagtcatcattaaagtctggagagatggatctctcagatctcaa

SEQ ID NO: 84930 - DNA, 405 bp, Homo sapiens
cccacgcgtccggattacaggcgggagtttccgtgcccggcctcgttctcttaacaaaatgtgttgcaaagcaaaagttttttaggtacacattcttttcaagcggacataaactattctccacgatggaccatctactagaccatagaacaatcctagattagtttttaaaaactgatatgatacaaagaatgttgtccggccacagtagaatagaaatagaagattaatagcacgagcaaatatggaaattttccaaatatatataaaacacaacacacagcccatggttctaagaagaaatctcaaagaaaaatactaactacttcgagatgaatgaaaatagaatataatgtattaagaacttatggaagggaggaaaagcagttctcagaggaaaattcg

SEQ ID NO: 84931 - DNA, 401 bp, Homo sapiens
ttctacgtccgtctcggggccgaatgttgtggctctttttccctactctgggcctctcctccctctgtgtgtgcctgaggttccccttgaagggagctctgggcctgtctggaggttaaacaacgccatctgcgtcagtaggtgggcctacgtcctcaaccccctacgcggctctgctggctggcatggcatcgtctgccattttctctttgttcttgcttttgacagctggtaacggatacctattattttaaaatttaaatcattaaataactttcagttttttattttcagctctatgatcgacagttatacatggggctgggaggacagctcatgagacaagcagtgtgtgatttaatacaaaagttgtcactttccaaaacgccctttagaggtgg

SEQ ID NO: 84932 - DNA, 424 bp, Homo sapiens
  misc_feature (1)...(424): n = a,t,c or g
tctccttctgaaattngggggannnnnnnccgagcgtccgagggtgagggtgagggtgttgatggagtttgtgagggtgcgggtgagggtgctggtggagcgggtgagggtgagggtgttaatgaagcggctgcgggtgagggtgctgatggagcgggtgcgggtgagggggccgcatactcatccccttgcctggtcccccaggctcctactttggtgtgtgctcattcaggagcagcagagtggccgtgcttgggacggccagccaagcgatccccactggtactggcatctgtaggtgcccctgcttggagcgggtgctggcaactgccctttgctggaaggggcagcaatgtccagcagtggtggaagctctcgaaagaacacagggctggggagtaaactcactcagatcccagctctg

SEQ ID NO: 84933 - DNA, 387 bp, Homo sapiens
taaaaaaataggcaaaccacatttacattttgccagtatcaggcggcggcttcaaagccaaagtgatgtttggatgtaaagtgaaatattagttggcggatgaaacacatagtgaggaaagttgagccaattatgactgatgcccacggatgaagagcggcaaaatattgaggaagcccagctggccaaccctgacttacccttgggcccagccgagaactttctgatgactcttgcctccattggcggcctctctgttcgtttacaaatctgggccttcaagctggactatgacagcatggagcggcaaattgctgatccactgtttgacctgaaagtgggtatggaacagctgttactgaatgctcccttccgctgcatcctggt

SEQ ID NO: 84934 - DNA, 414 bp, Homo sapiens
cgggtcgacccacgcgttcgcagaacgccattgtagccaagatggaattttccttgttttcagggcaccggattccctggaaaatgtcattagcaacgctgtgcctgggcgtcggcagaacaccattgtggtgaaggtgccgggccaagaagacagccaccacgaggacggggagagcggtttggaggccagcgactctgtgtccagctgtgggcaggcgggcagtcagagcatttggagcaacgtcacgcttatcaccctgaactcggaagaggactaccccaatggcacctggctgggcgacgagaacaacccctgagatgcggtacgctgcgccattatcctctccgacatgctggccaataacaccaactgtcggacgggcgagaagatggcgctaacgctgcttgacta

SEQ ID NO: 84935 - DNA, 477 bp, Homo sapiens
  misc_feature (1)...(477): n = a,t,c or g
ggaattcccgggtcgacgatttcgtgcggacaggaggggagcggacaggaggggagcgttcaggaggggagcgtacaggaggggagcggacaggaggggagcggacaggaggggagcggtcaggaggggagcggacaggaggggagctgggctgggagtgggtggtcagaaaggtgcactttcttctcagtacttcctgttctgctacctttgtangaaccagctcttctgatggccagagttcaagcccccctgaatgaaaatgatatctgtcactcagaaggctcctcccgtggggccgtgactggctgtggactggcccggctgcctgcatgccagggcaggtgttcacatggagttgttgggttgcactctcttgcccttgagaaggatgaggcgttaataagggcattccttctgccatttcactcgtangtaaccatggttcgtgtagtaagaaacgcggtgctaaagtgt

SEQ ID NO: 84936 - DNA, 355 bp, Homo sapiens
tttcgtgcagaatcatcacgaagcgtttattttcatggatgactatcaacgcagctactgccatccaatcgagaccctggagcacatcttccaagaataccctgatgatatcgagcacatcctcaagccatcctgtgtgccccagatgcgaagagggggctgctgtaatgacgagggcctggagtgtgtgcccactgaggagtccaacatcaccatgcagattatgcggatcaaacctaaccaaggccagcacatatgagagatgagcttcctacagcacaacacatgtgaatgccggtgaggatgtacccacagattcattatcatcaagcggctgcagggtgcctgatctgcg

SEQ ID NO: 84937 - DNA, 416 bp, Homo sapiens
tttcatcagaggctggggcggctgtggagcctgaggtgggagctgcattgtggggcagggaaaaggtgagccaagccgacggaggggacgcgctgcggggcgcccccagtctatggagcggggtaagatggcggaggcggaaagcctgctcttcaaacaacacagaatttcactccatggtctagtgctcgaaaacaaagtcttgcctcagaatcacagccacttctcagaaacgagtccctggaaatcctatgcctggatggaagtttccccaacccgcgcccctctcctgggagccgctgctcctttatccctgcctccctgttacgaggacgacccttgcccacggtgcaggctcctcataggtggggaaaactgaccctgctgccgccccccagttatcatttttttttgcg

SEQ ID NO: 84938 - DNA, 424 bp, Homo sapiens
tttcgtccttggttgagtaagggtgactgaaaccgaaaggcgagaccttgggtaaggggcactcctgtgctgtgtttcagtgaaacagacagcacttgatctcacatcttttaaactaaaacagactaattatactcccttaaaattttaggttcttcacgtacgggaattttccattagaacagcatctgaaacaaattcacgaggaagcactgagcaaattccagaaaattgaaccaagcaccgtggtgccagctcagacaccctgggacaagcctgtgagtgccccaccgtgtttgtgtccttcctggtaaatatgttgacatgaggacttggactgggtattgatgatgggatttcagatgctgtcatgtttggtacagagtatgggagagcttttctagctgaaagaatggtaatttgg

SEQ ID NO: 84939 - DNA, 442 bp, Homo sapiens
  misc_feature (1)...(442): n = a,t,c or g
tttcgtctcaggtgttgaccctccgaggccaggctgcccaggggcagcacaggaggtgagggcctgtgggatgagggacccccgacagcacaaggaggcaagcccctcgccgctgcaatgctccggtcctggggctcaggtggaagttgctcctgatccccccacacccccagcaccatcctgagtgacttcccttgaccgtcctgggtgaccatcctgagcaagactccctggccaccaactgtcctgtcggctctgcttggggcaaccacagtgccaagtgagcctggcaggtgctgggtcacaggacagccatggacagggcctggggaggaggagaagctggggccctgtagagcctgttccttggggagcaggtgagggaccctgctgcctcccctattcctgtctgcaacaggcccagcccatacctncagctagt

SEQ ID NO: 84940 - DNA, 421 bp, Homo sapiens
  misc_feature (1)...(421): n = a,t,c or g
tttcgtgagtcctaggaagtgaccgctttgggagcaggtttgtctgagtcctaggaagtgaccgcagtgggagcaggaccgtctgagtcctaagaagtgacctcagtgggagcaggaccgtctgagtcctaggaagtgacagcactgggagcaggaccgtctgagtcctacgaagtgaccgcagtgggagcaggactgtctgagtcctangaagcgaccgcagtgggagcatgactgtctgagtcctaggaagtgaccgcagtgggagcaggactctctgagtcctaggaagtgacacggggagcatgactatctgtttcctacgaagagaccgcagtgggagcacgactgtctgagtcctatgaagtgaccccggtgggagcaggactccctgaatctaactagtgtaactgggggagca

SEQ ID NO: 84941 - DNA, 483 bp, Homo sapiens
  misc_feature (1)...(483): n = a,t,c or g
tttcgtcagagtagaagggtagagttggtagaaacttttataggtcatttagctccactttaagaagagagtgcattccgctaacactcaagacctcctaggtacaaggcactgtgccagactgaaggcggagacttaaagagagtgaggcaaccctggctctctggaagctatatgatcaataacccggggaagttagaggggaaacaaatgcaaggcaggcaggagttacctggttgatggaaatgaccgccagccggggtatgaccacttggaggatgacctgcagcagcgaggtgcccaggccggccaggatggcccaggtgagcggcagcggcagcatactgtaggtggcgaagagcgtgaagagcacgtagcctatgccgtccnccaggaacccgtaaccgaggcctgctgccaggatctgggtggtcattggcaccaggttnaccacgcccgctntacttcagactttttaaaaga

SEQ ID NO: 84942 - DNA, 412 bp, Homo sapiens
  misc_feature (1)...(412): n = a,t,c or g
tttcnnnccgccggaccctgaggcagcgagtaagtgtttttggcccatcgtggcatccctcccggctccgacctgccgccgtgcctgctgcactgcgcggcatgtctgacctgacccggactgggtagggggcgcgtcccgctgctagggtcccaagggggaggggagcggagaggaggcggatgatgtcatggatgcttcgcccggcctggggggaggtggcggccagagggggtgcggctcggattatgtcacctcttccctctgcgccccgccccccggagccacacgcgttggtggggagcctggggaggtgcgggcggtgtttcccccatcgcagggacctccacgtcctgtggcctgtggctggggtctctatcagttggctctgcgggccgtgtgctgctggaga

SEQ ID NO: 84943 - DNA, 416 bp, Homo sapiens
  misc_feature (1)...(416): n = a,t,c or g
cttctcctgggagcccccgactgaggcggagactaatgtgctgccggcgcgacgggagcggcaagatcgcatctcccgggtcatgggcgactatctgctgcgcggctaccgcatgctgggcgagacgtgtgctgactgacgaaccatcctcctccaagacaaacagcggaaaatctactgcgtggcttgtcacgaactcgactcagacgtggataaagataatcccggaaagagtaaaaaatcatccgagagaggggccggatatacttaggggggaagcgtggttaagtggtgatagacgcccaataacagtctggctgagaggtgacaagtcactctctgggtgagaaanaaaaaaaattatttctcctttaggctctaaggaggacccttaactcaataagagcaccaagccn

SEQ ID NO: 84944 - DNA, 416 bp, Homo sapiens
cacatgggcccgaagaggctctgagccggctttggtttctttgacattgatggcagaggcctgacgcgcgcaccaaggagcaaatcctggaactgctcgggctggaacattttctggccatactcccaaaagagctttaggcctgcctgcaaaaacatcatccatagaatggagaggaaactgtgactatgctggatgatgaggaaagagagcttgatggaccaaagcagatcttttttggacgaaggaaggacatgattgcagagaacctagcaccttcagaaatcactgaggaattgccaagaagccagctcatgcccgagaagaagcagctccagggagcatcatgggagcttcagtccttaagaccacatgaagaagacatctatactacaaatgtgaaatctgcttcaagg

SEQ ID NO: 84945 - DNA, 369 bp, Homo sapiens
tattttattacgcttactaaaactttgaagaagactgacacaggccattaattaatggtggtgaaaatgaagactaatatgagccgaattattcaatccaagatgatagttctgttgcccaagtcaaggcgataagcttctaccaggcatgttgccttcctggagtcataccgtactcactggcctacgcctgcttgaagttagtgaattactccttcttcttctggctccccttttatctgagtaacaacttcggctggaaggaggcggaagccgacaagctgtccatttggtacgacgttggagggatcataggtggaactttgcaaggcttcatctctgatgtactacagaagatagcgccggttc

SEQ ID NO: 84946 - DNA, 398 bp, Homo sapiens
  misc_feature (1)...(398): n = a,t,c or g
aaaactacaaagaaatgccattacgcctccatgagaacgactaaaactgaaaagatggaccatggcaagtgctggtgaggatgtgaagccagaggagtgtccctccagtgccgttgtgaatgcagaatggcacagcggccatggaaacgggcttggcaatttctgataaagttaaacacacacttagcatatgatcagaaaatccatcttctgtattcacccaaaaggaaagcttgtgtccgcggagaggctggttggcaaccgtgcttaacagctttatttgtaacagtcccaaactggaaacagcccagaagcccccagcagttgcatggaatggctgttgtgatttatccatgggatggacactgctccgtcctcaaaggaacaaaggatcgatn

SEQ ID NO: 84947 - DNA, 406 bp, Homo sapiens
ccaggggcctggggcaggtcccggggcctgggggaggaccaaacaactttttttggaaggccctttcccagggggtccaaagggaccagcctttcttggaaaaaggggtaattcttaaccgggtcgcctgtgtcctcccgggggaggacccttttgggcccaaaaccagtttttccaaaaggcctggaaccttacagccaggccaggggcaggtccttgaggggctaacccatccccccatggggggcaaacccccaaccccccttggggggcaaacccacatccccccatcgggggcgaacccccaccccccccttcgggggcgaacccccaccccccccaggggcaaacacatccccccgttgtgggaagggtctgcctgtccaacccttcttgcgggaattaa

SEQ ID NO: 84948 - DNA, 406 bp, Homo sapiens
aacaaccccagcacccttccccgtggatcctagcccatgagtcctcgaactacaatggggcggaggaggcagcgaagaagggaacacaagagctcgttgtcgctagcctccagcacggtggggccgggcgggcagattgtgcacacggagaccacggaggtcgtgctctgtggagaccccctcagcggctttggcctccagctccagggcggcatcttcgccaccgagaccctgtcctccccacccctcgtgtgcttcatcgagcctgacagcccggctgagaggtgtgggctgctgcaggtgggggaccgtgtcctgtccatcaatggcattgccaccgaggacgggactatggaggaagccaaccagctcctgcgggacgccgcgctggcccacaaggtcgtgg

SEQ ID NO: 84949 - DNA, 415 bp, Homo sapiens
gatgtaagtatttccaaacaggcaaatggacactggtggcccaactcgacccatggcccttctgggctgacatttctgcctacagaggagggcttcataggccaaggcacgacgcaggggagacaccaacttgcctggtccaccacagaggtgagggccgcgtcaatggccgcctgtcccctctttaatgccctgacgtgatggtatgacccattctgggaggccgagagcacctcaaagaactcagcaggaagcacagtttcaattcagaagttctggaaagcgaagcaagacaagccacccttccttgatggcccgatgacctgcacttctgtttcatctccccgggaggcacctggtgcaggttggagcctaacaagggtctcacaaggaaccagtaaataccaaaataaat

SEQ ID NO: 84950 - DNA, 388 bp, Homo sapiens
ctgagccacttccccgcaattatcccctgcccgctcctcaggcccggctggccgagacggaactgatgtacgtcacacaccctgggctgcaaactgtcctcgggacgacagcgaaaacacacttcagcgggcgagccgcccaagccaggcactgtccgtcccgggacctacgcagctgccatggaagctccggactcctcccagacgacggcagacacctccctcggcctcacctaccaaccaggggtcaccagcactgaggattctgccccctgcacagcctggaacgcgtgccttccagccctctccaccaggcctgcactcatcacctgcaggccatggggtccatgccccccaaccatgactccctccaccatgctgacccgcg

SEQ ID NO: 84951 - DNA, 369 bp, Homo sapiens
tttcgggaccggaagaaccgtgcaacatttggaagcttttttttaagggggttggggcaggaagttaaattcaaaaccaccgttggaagaaccaggggaaccagaaggtccagaagggccgggggaaccaacaggaccagattaaccagtgcaaccgcaagaacaagggggcccaatggggccaggaaaaccgttaagtcattttttgccagaaccaccaccaaagccaggggaacttcgggaaccaccagaaccaaaggttccaaagggactttgttaacaagaaaagccagaagggccaggggaaccttgaaggccaaaaaagccacgggaacctttattgcttttgtcgccttgttcgcctggcaa

SEQ ID NO: 84952 - DNA, 385 bp, Homo sapiens
ccttccaaaaggattgtgttttaaaaaaaaattattattaatatggttccttaaaataataaggagaagaaccaccattttgatattgatggggaataaccaggatttttaattattaaattaattttaatttttttttaagggccttcttggatttcttggaaaaaagggggaccttgtttttccaggacaaccagggtcccttggttttcttggcccccttggaatttgggaataatgccttattggtcttaaaaattattttccccagattgattattataaggtcaagtttggagtaccagaaggaggattcgaaggttttcttggaccagttggccccccaggccttcccggcccccttggaacatttggtcatcttggt

SEQ ID NO: 84953 - DNA, 410 bp, Homo sapiens
atggctcttgtgggggttccaaggggggctgtgtctcctgtgggggttccaacgggggctgtggctcctgcgggggctccaaggggggctgtggctcctgtgggggttccaaggggggctgcggctcctgtggaggctccaaaggaagctgtggctcttgcggctgctcccagagcagctgctgtaagccctgctgcttctcttcacgctgagggtcatcctgctgccagtccagctgctgtaagccctgctgctcctcctcaggatgtgggtcatactgctgacagtccagctgctgcatgccctactgctgccagtccaactgctgtaagccctgctgctcctcctcaggttgtgggtcatcctgctgccagtccagatgctgcaatccctgctgctcccagtctagt

SEQ ID NO: 84954 - DNA, 408 bp, Homo sapiens
caagatctcaaggggggaggcaaacctttttgtcaaactggaggccggggccaaagctggccggcggcaaaacaagccattcggagggatccacctcatcatctggggggactttttgcagttgccacctgggaccaagggctcccagcccccacggttttgtttccagtccaaaacctgaaaaaggggtgtgccagtgaccctggacctgaccaagggggggaggcaggcaaaccaaaccttcttttttttactgcaggccgtgaggttaggcaggtgttcaaataaggggacccgccagttccaggccacagcttcccacaaggggggggaagaagggattgtggccacaaggctctgcccccaccaggatgatgtggccctcaccaccaagaggcggcttcagga

SEQ ID NO: 84955 - DNA, 406 bp, Homo sapiens
aacttacagcctccccctactgagtttcagcattaacagcctccccttactgagttccagaactgacagcctcccattatggagttccagcactaacagcctccccttactgagttccagcactaacagcctccccttattgagttccagcactaacagcctccccttactgagttccagcactcagttccccctgttaagttccagcattcagttccccctgctcagttccagcattcagttccccctgctcagttccagcactcaagtccccccgttcagttccagcactaacagcctccatttcttcaactaaaaatcaaggaggggggggtacccttcaactctccaatttttctgccggtttctatctacacagggaatctacctctgttcgggctgccaa

SEQ ID NO: 84956 - DNA, 433 bp, Homo sapiens
ttaataaaccagggatacaaaggttttgtttggggacccaattgccacaaacagagcaaaaacctcctggttctggcctgcaggaaatttgcccggccgccctccttgaccacgggcaaggggtcactgcctgaaaccccttcgttgcccccaccgaaggagaaggggtttgagttccctggagtcactgctgaacccagggattaaaacagcgaagccttaacactggttacaggctcttctcgcaaaatttctgtgaggttacaaagggccaccaccagccaggccacccaaactgaacctgtctggtcaaaggctggttgggggaactcggggtcccacaccttccttaaaaggaagtccaggttccatgacaaagcagcaaaggacaaaggctttgccaaaggggaaaatgaaaagcccaggggcatgc

SEQ ID NO: 84957 - DNA, 481 bp, Homo sapiens
gctaccggccttgaattcccgggtcgaggagtcaagggggccgatggcttccgtggtttgaagggcacttagggttaaaagggtgaaaacggttttcttgggtttaaaggaaacttggccttcaggggtgatcggggggaaatcggcccacccggtcccagggaaaaaaatggccttgaaggcccaaagggtcggggaggtcccaatggtgaccccggtcttttggaaccccttggggaaaagggaaaattcggagtcccagggttaccagggtttccaggaaaacaaggaccaaagggttttattggattccttggatttcttggccccaatgaaaaaaagggcggcagggggacccttggaaagccaggaccgcgggggcagcaaggcccaccggttccaaggggtgaaaaaggcccccggggcttcattgggaagcctggccccaagggcaattccggaggtgacggcccacttggct

SEQ ID NO: 84958 - DNA, 427 bp, Homo sapiens
gagccccggctcgagttaccgggacgagccacgcgtccggtattgcgctggggggattatggctttgttaagatacccaattgcgaaatctgagcatcacctggttgggtcaccagagggcgagagcgcgccagccatcacattgaccgttaacatttagggcaagctggtggattttgtcttgacacactttgggaaccacgagtgggtttctttggcccacctaatattacacaaatgccaagaaatgttattaacaatgtactttgatttctatgaaagcacctttctcattttcttcttttttacctcccaaaggatttctccctgcgttgctgggtgtaaaaatcagacagaagcatttaagatgcaggccgccgttattgctggtgtagggacaggccgcgttagtctgcatttactgagg

SEQ ID NO: 84959 - DNA, 367 bp, Homo sapiens
tgctatggaaccacggttcaaagtggtggattgggacaaggacctggtggactggcgaaagcctctcctgtggcaggtgggccacttgggagagaagtacgatgagtgggttcaccagccggtgaccaggcccatccgcctcttccactcagacctcattgagggcctctctaagactgtctggtgagctcttccctgagcctgtggcaggctgtccctctcttctgacggtgccaatcagatatggaaagggagggggcaattgagtccctccccagagcccaggtctatgctgtaaagctgtcagggagggaggaacatgccatgggaataattcatccctatgcatggttttgtccactgggtg

SEQ ID NO: 84960 - DNA, 393 bp, Homo sapiens
cggacgcgtgggggcgggagcgctcttgttggaccttgtggggtgagtctggctttttggcggggactccctggccaagtgtgagcacctggaagcaaaaggatggggcaggactccagcgctcgcgggtgctctctggtggccacggagagaagaggctttgggcggcggcgggtgccaaggtcagggcagagtgggggctggacccccacggggctttggacggcacagatctgaagtggagccggcaggccttgctggggctggactttggggaggaggcctctagtggggccaggtgtggtgggggagtacggtggccgctgtctgtgttaccagtggaccttgagctccaagactgcctggcccgcctaagctggtccattgtggccg

SEQ ID NO: 84961 - DNA, 449 bp, Homo sapiens
aagtagcttgcttagtggatggtggaaaggcctcccgaaggctcagttatgatgccagattggagacaatgccctgtcaatatggatgttataatacaggatgtggtataggctttaactgaacaatacctagtgctacttctcccacagccagcatatgctggcttggaaacctaagggctgcagataggaatggcccctcttactgttatgccaagtaaccccagaaggaatttttgcttctcatcttgtaactctgaactccactgtcccaagggaggactgcttctaccaggtatgacaatggtggtattttgaactttgaactatcagttgagactgctgcctgagccaacacccagggatggagttactgcactaactggtgctattgatcccaatttttgagggaaactgggtggctcatacacaatgaaaacaggaacatt

SEQ ID NO: 84962 - DNA, 579 bp, Homo sapiens
  misc_feature (1)...(579): n = a,t,c or g
taattataaaagcaataattactgttcccattttgcagatgaagaaatggaggcccagggagctgaagttctttcccagcatttgctgccaggagtctctccaccatgaggaatgaggccaaggttaagtccatctaactctagaaactggccttctggcaccccgggctgagttttctcaccctacccttgcacctcactcaggcagtcagtccttgggagagtgaatgaacacgcaggagacctcacctaccaccagggtcctggtccagtgccctgggcacctaacagcaccagcctcctccaggcttttctggcccctgcgactcctcctagtacccgcaacatagtgaccagaccacttccctgctcaaagttcttccacacatcaccaatgctgacagatcagtgctacattcctcttctaggcagtcaggaaccatcacaacctggctcctgcctgtcatcctggccttccagattctcatttgacaggctggagagacacatactttggtcaattttgcaaaatacaataagtaaataaagagatgcacagcactggaggctgngcgcggg

SEQ ID NO: 84963 - DNA, 426 bp, Homo sapiens
cccacgcgtccgccccgatcagtttcctgcatccaaatgcagggaagaaatctaaattcaaaaccagtgttcacaggaagaccctgaaccccgagttcaatgaggtgagccagggccaggcaggtcccagccaaccctggccttgacatgctgagccactaccctaccgtggcctgcttcttaagctgtgggagagccgaggctgcctccttcccgcctctctgcccttctccctgcaggaattcttttactcaggcccacgggaggagctggcccagaagacgctgctggtgtctgtgtgggactatgacctaggcacggctgatgacttcattggtgagtgggaacatgaggagctggggtgggggcccagtaggctcctggcggttcctgacccatcccccatggcaggcggggtgcagctgg

SEQ ID NO: 84964 - DNA, 181 bp, Homo sapiens
  misc_feature (1)...(181): n = a,t,c or g
agtttgaggnnaacaaaaaaaagagagaagattcaaataagcataatcagaagtgataaagattacattataactgaagccatagaaatactaaaaatcatcagaaactactatgagcatttctacacacacaaactagaaaccctagaggatatanattagttgttggacacatacgaac

SEQ ID NO: 84965 - DNA, 440 bp, Homo sapiens
agaaaacgtgagaaacataagagaagatggcgaattataagatggtgaaatagacgatgcaggatttgaagaaatacaagaaaaagaagcaaaagagaatgaaaagcagaaaagtgagaaagcctacagaaaatcaagaaaaaaacataagaaagagagagagaagaaaaaatccaaaaggagaaaacgtgagaaacataagagaagatggcgaattagaagatggtgaaatagacgatgcaggatttgaagaaatacaagaaaaagaagcaaaagagaatgaaaagcagaaaagtgagaaagcctacagaaaatcaagaaaaaaacataagaaagagagagagaagaaaaaatccaaaaggagaaaacgtgagaaacataagagaagatggcgaattagaagatggtgaaatagacgatgcaggatttgaaaaaaaaaa

SEQ ID NO: 84966 - DNA, 457 bp, Homo sapiens
  misc_feature (1)...(457): n = a,t,c or g
tggtacgttgagcctacnannctnactgaaggccagcgtttctacggaaagcttctgacccaggtttttaacgtgcgccttcactctctgctcctggagctgctcacctacctgtgcctgagcttcctgcgctcctactacccttgctatttgaaggtctcgcaccgagacattctcggcaaccgggacgtgcaggtcaaaagtgtcgaggttttgatcaggataatgacgcagctggtctcagtggccaagtcttcggaagggaagaacgtggagttcatccacagcttgctgcttgagagtttgtncancanccccccctactcttaataccatctaaattcctccacctacactctctttctttctttccttcactacacccaacatcacctgccacaatctctcctctcttcagatactccccatcacctggtccttcaccatcacttggccg

SEQ ID NO: 84967 - DNA, 460 bp, Homo sapiens
  misc_feature (1)...(460): n = a,t,c or g
naagggggtaagaccnctnggntaannncacgtgcccagcagtccatctgctcctgtgagattctggaaccagattcnggtgattaggccgggaaggggccactggtggggtatggatagcatcatcagcgggcttggagcacccacagatcagaacctggggcagccccaggcacacattcccagcagagaagtctgagcttagctaaatttttccctgctccttaggaaggggtagtgggtactgcctgatcttctgtgtcatctgtgcatctgtgcctgcccacagtgggcagctagcgtctccccttccaggtatgcacaccacttccttgtcattgtcaccatcatcctcggcctcctcctcttcctcattggcctccttctactcttactcgggctcctcctcttcctcatcatcctcctcctcctattcctcatcctcctcctcttcctcgtc

SEQ ID NO: 84968 - DNA, 447 bp, Homo sapiens
cagatgcttaggaacgggggagaccagaacacagtccctgattaccactttgctgatagaattcgggagcttctgtgacctacagaggatcagaagaattgtataccttaggatacatacctcaggccaagtgctttaggtaacattgtagaagaagtgactcatccctgtagcccaggtccttgccctgccaatgagctctgtgaagtaaaccgaaaaggatgtacatctggagatccctgtcttccatacttttgtgtgcaaggatgcaaactgggacaagcttctgatttcattgcccgtcaagggacactaatccaggtgccatcatctgcaggggaagttgagtgctataaaatctgttcatgtggacaaagtggactcttagaaaactgcatggaaatgcactgtatggaccttcccaccgacacatccgcccttgtgaga

SEQ ID NO: 84969 - DNA, 443 bp, Homo sapiens
  misc_feature (1)...(443): n = a,t,c or g
cgcaccggnnnnccggttgacccacgcgtccgcgctccctctctctgccaccgctcaaagcctgggataacgcttttgaaagcgaatcaggaaattacttaggaatcggaagccccaaagaattatgaataatcctcgctgccaaagggaaggggattttgagcaaaagctccacatctgcgcacactagagttcaaagactccagctgttggaaggtcttgtgagcaatgtttgagaggtaagactggaccgctaggtcttgccggtgagaaaggggaccaaggaaagactgggaagaaaggacccatatgaccatagggagagaaaggagaagtaggtccaattggtcctcctggacccaagggagacagaggagaacaaggggaccccgggctgcctggggttttgccgatgtggaagcatcctggctcaaatccggctc

SEQ ID NO: 84970 - DNA, 411 bp, Homo sapiens
  misc_feature (1)...(411): n = a,t,c or g
ttattgtgagattataacaatataatgtgtaaaaacactgaaactccaaagatactagactgtcttactttcttactttacctactattcctaggtaatgtcatcaactcccataaaaagattccaaaatctgtatctccagtcatcatgtctcccaggtttcagacacaggactgtcactgcctcctggatttctcttagatgtctcagaggcattaaacttctaatgaaaaatgtcatatgtgtaggcttctataggctgaaggtcctcagagaataattcctgaataattaatttactgagtcttttcttccatgattcactaggtgtgtagtgtcctggagagcttagagcaagaataccggagagatgaggactggtgtggtggacgagataagctgnggccagcn

SEQ ID NO: 84971 - DNA, 399 bp, Homo sapiens
tgaagacaagcctgaggacgagatgttctttaagcgggccagcctgctggagcggcaggatcggcgagcataggacgcgcggcggcgcaagcactggcaggaggtggagaaggaacagcggatggaggaggccgcgaggctggcccaagaggaggccccggtcccagccccgcttgagtccgcagtcccgatggctactccagcccctgctgaccggtctccaaccgatgaggaggtgggcccctggaagggggacttcacgcggctggagtactagcgcctggcccatctgaggctgacggactaactctgtaaagtgctgcggacccgggctgcggagaccgggggtccaagtcggtgcgggcggctttctacacgactctaatacgagtgctgtga

SEQ ID NO: 84972 - DNA, 444 bp, Homo sapiens
aaaatagtttgtactagagtaaatttctaccaatgcgaagactgtggataagcctttaatggatcctcaatctttactatacataaaagaattcatattggagagaaatcgtacatatgtgaagaatgtggccaagcctgttgccagttcacaaaccttactacacataagataatttatactagagacaaactctacatacgggaagaatgtagcaaagccttttacctgtcgtgacacattacaacacatacaatattttatactggagagaatccctactaacgtgaagaatgtgacaaagcctttaatcagtcctcaacccttactacacataagataattcataccagagagaaactcaatgaatattagggatgtggcgtagcttttaaaccagcctcacaccttaccaaacataagataattcatactggagagaag

SEQ ID NO: 84973 - DNA, 407 bp, Homo sapiens
cggacgcgaggatcatagttgggcatgggatttatttgtttctatatttagaggtccagagataccctctggtggagaaatcaactcagttatcaattactccaattgacattggaactgcttgcgataaagggcaaagagagggcaagatgctggctttatggcatttcacgaaaaccccaataagagaattgcagcacaaacccctaggaatattttccatctcaaaagcagctcctgactttctactggtaaagactaaatgcttaatcacggatcatcacatagttaagtgatccaagctgcttatcgtgagctgggtgttatctgattcaaaggactgtgaaatcagtcatgcgtactacttttctatcctaatacagaagtggcatatatgacaatgggcg

SEQ ID NO: 84974 - DNA, 379 bp, Homo sapiens
gcgaccttactaaacataagataattttttctggagagaatttttacaaatgtgaacaatggggcaaaggctttaactggtcttcaacccttacaaggcgtaaaagaattcctactggagagaaaccctacaaatgtgaagaatggggcaaagcctttaatgtgtcttcacaccttactacacataagatgattcatactggagagaaaccctacaaatgtgaagaatgtggctaagcctttaaccactcctcaaaacttactatacataagataattcatactggagagaaaccttacaaatgtgaagaatgtggcaaagcttttaaccaatgctcaaaccttaccaaacataagataattcgtactggatagaaacc

SEQ ID NO: 84975 - DNA, 398 bp, Homo sapiens
ccccgaaccctactcctgctactctcggtggctttggccctgacccagacctgggcgggtgcgggggcgggagggaaaccgcctttgcggtgagaaacaaggggccctcctggcgggggcgcaggaccgttggagccgcgccgggaggagggtcgggcaggtctaagccactggtcgcccccaggctcccactccatgaggaatttcttcacattcgtgtaccggcccggccgcggggagccccgcttcattgccgtgggctacgtggacaacacgcagttcgtgcggttcgacagcgactccgcgagccagaagatggagccgagggcgccgtggatagagcaggaggggccggagtattgggaccaggaaacactgaatatgaacgcccactcacg

SEQ ID NO: 84976 - DNA, 461 bp, Homo sapiens
  misc_feature (1)...(461): n = a,t,c or g
acgactttcggtacgagacacaggcaggggatgccatttggggattttttgactgggagatgtactacaagcggatcccgatccctccagaactgcagaaagctgaccccagcgacccatttgagtctcccgtgatggccggtggactgttcgccgtggatcggaagtggttctgggaactcggcgggtatgacccaggcttggagatctggggaggggagcagtatgaaatctccttcaaggtgagccagctctccagacgccccgttcttggcacagcctcctgagtgcctgtcccagtaagcgtctcagcttctgcctgagcttggaaagactggaggcctcagggatctgtagcccttctgcccatcacgtgaataagacaggggctcatgggccactctttgttgtggtgtgtgggggtgggggaatgacattnaattattttcccaggtataaat

SEQ ID NO: 84977 - DNA, 391 bp, Homo sapiens
tcacgggaggcaggaggtgggagacgggtttacagttttgggtgtgagcaggtgcagcagccacccgggaggttgtcagcactcaccacatctaaaatacgcctcatcttcaaaatcccaaaaccccacaagaaagcaagagctgccagggccccttccagcagggaggctgaccctgcgccagcgcccacctgagcatgatgccgttcatgcggatggctctcttccagtccttcagggtggacttcccggccaggtgcacaaattcctttgggctgattacatgctcgtcgtactgtgggggacacagtcatgtgggtcaagcttggccgggacaccacatagggggcccccatctcccatccgaccctgagtcaggcgcgcaaggcag

SEQ ID NO: 84978 - DNA, 456 bp, Homo sapiens
tctcgggtcgacgggaggcaggagggaagacgtgtggccgtaggtgctcggggtcaggcctgactgatgctgggtgtgggagctgtggccacgggtgccggggtcagccgtgggtgaggctgggtgtgggacctgtggccgtgggtgctggggtcagccctggatgaagctggatgtgggaggtgtggccatgggtgctggggccagccttgggtgagtctctgtgtgggagctatggccgtgggtgctggggtcagccctgggtgaggccgggtgtgggagatgtggccgtgggtactggtgtcagccccgggtggtgctgggtgtgggaggtgtggtcgtgggtgccggggtcagccctaagtgaggctgggtgtgggacgtgtggccgtaggtgctcgtggtcaaggcctgactgaagctgggtgtgggaactgtggccacgggtgccggggg

SEQ ID NO: 84979 - DNA, 442 bp, Homo sapiens
tgaattcccggatcgacgatttcgtcataattgtattgcaggggggatgctgattattacataatcagatcttgattgttgtctagtttagaaaccttcatatgaggcttatactttcctgtgcttttctctggttatgcagaaaaggttgcagggacaactggccatcatactataccatgcagatagccagatctctctccttttcatcagagagtacccttaagaggtaaaagagacaggctgtagttctgtttttgtacctcagactgataaggctcatgatgcgtttatttcctttttttctattttattcagctaggattgtcattctttgcttgcctcccaggaaagggttaaaaccttaagtgaggcagtgagtaaatttataaagtgtctttaaccttcaaggttagtagtagctagtagctgttattttaat

SEQ ID NO: 84980 - DNA, 422 bp, Homo sapiens
tttcgtagcagggcccagaggacagtggagacactggtgaggtggcgcgcagtggggaggacatagcctccactggacacacttccctgggctccagtcctgtctctccactgtggagaagctttggacaagaggctggccctgtccaggagccttagtttctgggaaagagcaggttgtggtagggattgaatgagatggtatctgtgccgttcctagcacagtggctgggcgctcagaagcttcctggagcccgggttgctgtcacttcgttcttccatcgctgcccttctctctccgcagccaagaagactccacactctatgtcagtttcacccccaaaggccccaagatccaccaagtcaagcacatgtaccaggtatgaatcccaatgtggaaggtccttataggtcacacattcc

SEQ ID NO: 84981 - DNA, 422 bp, Homo sapiens
  misc_feature (1)...(422): n = a,t,c or g
tttcgttccgcactgggcatgatgacaagaatctcttcccagtttgaataaacgagaaaagtgagtggtcctcgctccctccagccatctcagtggggaatgcagtgtccttcggacactcctgaaggagaggcatgtggtttggttaaaaacttggcccttatgacacacatcacaactgatatggaagatggacccattgttaaattagccagtaacttgggagtagaagatgtgaatttattatgtggggaagagctctcttacccaaatgtgtttcttgtctttcttaatggtaacatcttaggtgtcattcgagaccacaaaaagctagtgaatacatttcgactcatgagaagagcaggatatatcaatgaatttgtttccatctcaacaaatcttacagatcgatgtgtctatan

SEQ ID NO: 84982 - DNA, 477 bp, Homo sapiens
  misc_feature (1)...(477): n = a,t,c or g
cgtaggaangtttcgcnaaatttggccaagancgcccagactcacgaagatattgaagcacagattccagaaatttaaggcattattgcagctcttgatgaagctcaaggagtgggcctggattctacaggttattatgaccaggaaatttatggtggaagtgacagcagatttgctggatacgtgacatcaattgctgcaactgaacttgaagatgtaagttacaaattatgtacaagaggcagttatttttttgagagagcatgaaatatgaataacttttgttgcagccatctggtttaatctggagaaacatttttgggatcttttaaaggataaaactactggaggtatcctctctaaggttcagaaacttcactggaaatgctttgttctgagaatttatggtaaagactagtttgtttatccagggaagcacctgccagccattacctttataaaggtaagagtacagtg

SEQ ID NO: 84983 - DNA, 358 bp, Homo sapiens
aaatggttcacccccatggaatttgaaatcaaaggaggctacgcatgatcaaagaactggaggctgagtgtgcgctgtggcgggtggcccctacgacggctgatggaggaaggatctctacctaatccttcaagaatatattacaggaacaaactgagaatactgaagtctcaaaacaatagctcagttgacccttgtatgagaaacttggatgagtgtgaggtgtgccgtgacggatgggagctgttctgttgcgacacttgttcaagagtcttccatgacgactgccacatcccacctgtggaaagtgagaagatgaaggagtctgcgggaagccaacagtgttgtcaggaatctc

SEQ ID NO: 84984 - DNA, 422 bp, Homo sapiens
  misc_feature (1)...(422): n = a,t,c or g
tttcgtgcggggacagcggccggggctcttagcggggcgactgcgggagggggccgggctgccgccgcctccttccccttcccctcggggccaggagtgcctccgtcgcgttcccggttcgctcccctccggctcctggccggagcggcctcctgggactggaggttgggggaagacacgcggcttctgggacccccacctcctcccttgcgggagggtgctgcggcctcccgctcccaccttccccggctcaggatccgggggacaaggatggggggcgcccgggatcccattgtccggatccaggggaaggggacggcgttcaggacctgccccttcggactgcgaacctctcctcccgtgacccgcggatcctggtggccggagcagggcttagaggggtcgctggatcctaaataccn

SEQ ID NO: 84985 - DNA, 402 bp, Homo sapiens
atggtgctggagtcggtggtcgcggacttgctgaaccgcttcctgggggactatgtggagaacctgaacaagtcccagctgaagctgggcatctggggcggaaatgtggctttagataatctacagataaaagaaaatgccctggtaagtttttttttaaactatgctaataactcacttaatttggtaagttcttagaaacctttgcctactaggcatctgataccatgtactagataaagtgatggaatcactcaagggattacttgttcaactatttgctgttggaaaatctgagattaaagatttagaaattttttcccctaataatcaaaatagtatctcttggaaacggagtgtttttcgttgatctaatttgactgtatagttttgtagttgact

SEQ ID NO: 84986 - DNA, 441 bp, Homo sapiens
tttcgtgaatacatggagagcttgcagctgaagcccggtgaagtcatctactagtgccccaagtgctgctgtattagacccgagcgcgcccaccactgcagtatttgcaaaagatgtattcggaaaatggatcatcactgcccgtgggtgaacaattgtgtaggagaaaagaatcaaagattttttgtgctcttcactatgtatatagctctgtcttcagtccatgctctgatcctttgtggatttcagttcatctcctgtgtccgagggcagtggactgaatgcagtgatttttcacctccgataactgtaatcctgttgatcttcctgtgccttgagggtcttctgtttttcactttcactgcagttatgtttggcacccaaatccactccatatgcaacgacgagacggagatcgagcgattgaaaagtgagaagcct

SEQ ID NO: 84987 - DNA, 449 bp, Homo sapiens
  misc_feature (1)...(449): n = a,t,c or g
gaattctcgggtcgacgatttcgtcatagaccaaatggacctaatagatatttacagaacatttcattcaggggctacggaatacagattcttttccttagcacatggatcattctcaaggatagatcatatattaggtcacaaaacaagtcttaaaacattcccaaaaattaaaataatatcaagcattttctctgaccacaatggaataaaactggaaatcaataacaagaggatttttggaaactgcacaaatatatggaaattaaacaatatactcctgaatgaccagtgggtcagtgaatgaattaagaataaaatcaaaaattttttggaaacaaattataacagaaacacaacataccgaaacctatgggatacagcaaaagcagtacaaaggtggaattttatagttataagtgcctcaaaaaaataagaaaaacttcaan

SEQ ID NO: 84988 - DNA, 444 bp, Homo sapiens
tttcgtctaatctcggaatgtattacagatatatttgtgacagtattgctattgaaaatacttaatagtagatgaaggacacaggattaagaatatgaagtgccgtctaatcagggagttaaaacgattcaatgctgataacaaacttcttttgactggtactcccttgcaaaacaatttatcagaactttggtcattgctaaactttttgttgccagatgtatttgatgacttgaaaagctttgagtcttggtttgacatcactagtctttctgaaactgctgaagatattattgctaaagaaagagaacagaatgtattgcatatgctgcaccagattttaacacctttcttattgagaagactgaagtctgatgttgctcttgaagttcctcctaaacgagaagtagtcgtttatgctccactttcaaagaagcaggagat

SEQ ID NO: 84989 - DNA, 444 bp, Homo sapiens
gctcgaccgtaattcccggctcgacgattgcctggacacaggtgcactacaccgcagtgcaaatacctgcttgcaaaatgatgtgttgatatcagtcagcttgcggacggtgaacaaatcttatctggtggagtgcttaataagcagaatagccatgatgatattgttactgagtttggtgattcagcttgctttactctttcattgttgggacatgtatattggtcagtaagaatgattcaaactgtcagaaaagcattgccatacacgtatgttttatagtttaaaaaacctatgttgatcagcgtttatcaaatattacttggctgagtagtacatagtctgattctatgaccttattagaatagcagagatgctaatctaagtatgaactctccacttatccttactgatgatagctacagctgccctgcctaacaattg

SEQ ID NO: 84990 - DNA, 3312 bp, Homo sapiens
ccgggtcgacgatttcgtggaggctgatccaacaagtcagtgagggagggaattctttaaaaatgaaatttgaaaaaaacaaaaacagcctgcagtgttagacgagagtcttttatccaagaaacagatactccagctgtgaaaataacaagacccaaatggatagggaacacgtttgcctgtcagagcggtagtctagcccagaaggcagataggaccacagcaccccacctgcttatcccccaaacgtgcctcctaaaactaaacctgtctcttttctgcttcctgctcttcccttccttccccctcttcctcctttgctcttctgtctacagaaaatactcaaagaacctatcgggtgaatccagatggttccctgcgtgtcacttttgccagcgggatggagatcggcctcagctcagagccccacatcctggcaggggcagtcaaccctaccctgggcaaatgcaacatctcattgcccggagagcacaatgcaaacctcatctcagtgctctaatgaggggaacaaggctgtgcttaaaatgtatttcatatctctttctcataggcccacaacagaaacctactctccatagattttgatcatataacccgcacaggaaagatctatgatgaccatcgaaaattcacccttcgaattctttatgaccagactgggcgacccattctgtggtctcctgtaagcagatataatgaagtgaacatcacatattcaccttcgggattggtgacgtttattcaaagaggaacgtggaatgaaaaaatggaatatgaccagagttttctttagtcgcctcaactttagttgtccataatatgctattctgcctttgtctcgtttcagtctgtgatgcttctcctacacagccagcggcgttacatctttgagtatgaccaaccagattgtctgctctcagtcaccatgcctagcatggtgcgtcacagcttacaaaccatgctttcagtgggctactaccggaacatctacaccccaccggacagtagcacttcttttatccaagactatagtcgagatggccgattgctacagaccctgcatctggggacagggcgcagagtcttatacaagtacaccaagcaagcaaggctttctgaggttctctatgataccactcaggtcacattaacatatgaagagtcttctggagacctttctgactcttccacattgatcgcctagcttcttactgtttttgttttggttcctgcaggacctcttattggacgccagattttcagattcagtgaagaaggccttgtgaatgcacggttcgactacagctacaacaatttccgagtcacaagcatgcaagctgtaatcaatgaaacccctttgcctatagatctttaccgatatgttgatgtctctggcagaacagagcagtttggaaaattcagtgtaattaattacgatttaaatcaggtcataactactacagtgatgaaacacaccaaaatcttcagtgccaatggacaagtcattgaagtccaatatgaaatcctaaaggcaattgcctactggatgaccattcaatatgataatgtgggccgcatggtaatatgtgacataagggtaggagtagatgccaatataacaaggtacttctatgaatacgatgctgatgggcaacttcagactgtttctgtaaatgacaaaacccagtggcgttatagttacgatctgaatggaaacatcaacctcttaagccatgggaagagtgctcgtcttactcctctccgatatgacctccgagaccgcatcaccagattaggagaaattcagtataaaatggatgaagatggctttctgaggcagaggggaaatgatatttttgaatataattctaatggcctgctgcagaaagcctacaataaggcttctggctggactgtgcagtattactatgatgggcttgggcgacgtgtcgcgagtaagtccagcctagggcagcaccttcagttcttttatgcagaccttaccaaccccataagagttactcatttgtacaaccacacaagctcggagattacatctctgtattatgatctccaaggtcaccttattgccatggagttaagcagtggtgaagaatattatgtagcctgtgataatacaggtaccccactagctgtgttcagcagccgaggtcaggtcataaaggagatactatacacaccttatggcgatatctatcatgacacttaccctgactttcaggtcattattggttttcatggaggactctatgatttccttactaaattagtgcacctggggcaaagggattatgatgttgttgctggcagatggacaacgcctaatcatcacatatggaaacagttgaacctccttcctaaaccattcaacctttcaacaaagcttataaagtatgggatttttcattttctttttttaatattgtgtctcacagacatcagaagttggttggagctatttggtttccaattacacaatgtactacctggatttcccaaacctgaattagaaaattcaccaagtatctgacagatgtctaactccatgctgcatctgctctgtgcctctctttcctagactatcctgggcattcagtgtgaactccagaaacagctcaggaatttcatttccttggaccaactacctatgactccccgatacaatgatggacggtgccttgaaggagggaagcaaccaaggtttgctgctgtcccttctgtttttgggaaaggtataaaatttgccatcaaggatggcatagtaacagctgatattataggagtagccaatgaagatagcaggcggcttgctgccattctcaataatgcccattacctggaaaacctacattttaccatagaggggagggacactcactacttcattaagcttgggtctctggaggaagacctggtgctcatcggtaacactggggggaggcggattctggagaatggtgtcaatgtcactgtgtcccagatgacttctgtgttgaatgggaggactagacggtttgcagatattcagctccagcatggagccctgtgcttcaacatccggtatgggacaactgtcgaagaggaaaagaatcacgtgttggagattgccagacagcgcgcagtggcccaggcctggactaaggaacaaagaaggctgcaagagggggaagaggggattagggcatggacagaaggggaaaagcagcagcttttgagcactgggcgggtacaaggttacgatgggtattttgttttgtctgttgagcagta

SEQ ID NO: 84991 - DNA, 386 bp, Homo sapiens
tttcgtgacatgtctaacctcggaggccgcaggaacgggcctgtcgaaatgcgcctgacaggaatcatattgacagggcatgaaaatgagaccacacgatctctggaagcgattaatgataaaatttcatggataagaaggccttgactacggaggggttgccatgtcaggacttgcttgccagcttatgacatacgcatctttgtacttaccaattgaagatattttctgcggggtaactgtctcattgacattcattttttgggtattctattccctaatgtttgaattactgacgatatcctaatagatatattcataatgagggtgggatagtactgctactggacaagtattttagaacttctcaatagattatctgggtc

SEQ ID NO: 84992 - DNA, 424 bp, Homo sapiens
aattcccgggtcgacgatttcgtttaaagattgaggagcagaagaagtggctggaccaggagatggatgaaggtgctacagcagcggcgggcgctggaggagctgggggaggagctccacaagcgggaggccatcctggccaagaaggaggccctgatgcaggagaagacggggctggagagcaagcgcctgagatccagccaggccctcaacgaggacatcgtgcgagtgtccagccggctggagcacctggagaaggagctgtccgagaagagcgggcagctgcggcagggcagcgcccagagccagcagcagatccgcggggagatcgacagcctgcgccaggagaaggactcgctgctcaagcagcgcctggagatcgacggcaagctgaggcaggggagtctgctgtcccccgaggtac

SEQ ID NO: 84993 - DNA, 404 bp, Homo sapiens
ccgggtcgacgatttcgtccgaggctgagccaagcaggcactgattctggcagttaggtgttccctgactccttcccgtcagcgccagcagagccgctgccctacttcctgcaggagccacaggacgcctacattgtgaagaacaagcctgtggagctccgctgccgcgccttccccgccacacagatctacttcaagtgcaacggcgagtgggtcagccagaacgaccacgtcacacaggaaggcctggatgaggccaccggcctgcgggtgcgcgaggtgcacatcgaggtgtcgcggcagcaggtggaggagctctttgggctggaggattactggtgccagtgcgtggcctggagctccgcgggcaccaccaagagtcgccgagcctacgtgcgcatcgc

SEQ ID NO: 84994 - DNA, 428 bp, Homo sapiens
gccgcattcccgggtcgacgatttcgtcaggagggacacgcttgtcatgttggcgcttgtcatgcccgcgaagggagctgtggcggtttagcctctgccccttgtggtccccgtgccccagcctgacctcgccctctccccgttgttctgcccgttgttctgccaacctccccccgccagctgccctgccgcgtggttgctatggcaatcgctcagctgtcaggggcccactgctcccccttcttctctgggggctgagcttctgggaggcttcttctgggaggcccccaggagctgccaggctggggagaagttccccagaggcccctcttggtcctggagagaggagggggccttgacctctgcccgggcaggataggggctcagtgcaagggaggaggagggttctgcaagggccaccgcgtctg

SEQ ID NO: 84995 - DNA, 387 bp, Homo sapiens
tttcgtgccgcttcttcaccttcttcatcataatctttctctttatcttcaatagcttctccagtagcagatagcactgatcctgggattatacgctcacgtaaaaagtgaccaatttcgaagtctgcagccaggatagattccgcatcatcatacagagctgcactctcaggaacttcaggaggggcggataagtcaaagaaagagtcattgtaaacatgcttatgcgcagaacaaactgacccacgtcccctgcgagtctgctctttcttagtagaattcagagcgacattctgtacttatttaccatctatctggcgccctgtgcaagccataatttctgctgcatccctggaatggggatcacaaccatgctggtctgacctc

SEQ ID NO: 84996 - DNA, 418 bp, Homo sapiens
gtgcgcggtctagaagtggagttgctggcggctgcggcggtgacggcggcgacggaggaggcaggcggtggggcgggggcggggactaaggattctgaggtggggagtcgggagtttctggattctttatccggaatttcaagggccgccggagggctgtcgcttctgcagtgcgtaggagcggccggggcgggaggctccgcggagccgagggcgtggagaataagaaagccttgagttttgtgaaaaaccggagaagagaaactaaaaggacagtagaaaaggcttttccagtttgcataatatttccttcatggatactttttcatagcattattatgtgatgtgagaagttttttttttttgaggtaccatgggtttaaatctcaagattcaggggatttggcttattggaaaa

SEQ ID NO: 84997 - DNA, 400 bp, Homo sapiens
ggtggcattccccggcagggcccacagtaacaccagagcgaacccctctttgccttacgagggctttactgctctgacctggacgaaaaggcagggcggcctgaacaccccaagctcatccgagaggtctgttgcatcgccggccccattgatgccggcctcccccgcatcttttgttaggggaggacggacctcttccagggtggtttttactaaaactaggaggatggggtcctggaccctgaatacccccgaaatatctttgacggcttcgatggcatcccggacaacgtggatgcagccttggccctccctgcccatagctacagtggccgggagcgggtctacttcttcaaggggaaacagtactgggagtaccagttccagcaccagcccaggc

SEQ ID NO: 84998 - DNA, 154 bp, Homo sapiens
ttttttttttttcagatgcacagggaatgcacctattattgctatatagattgttcctcctgtaatttcactaactttttattcatgcacttcaaacaaactttactactacattatatgatatataataaaaaaagttaaattctgcaaaaaa

SEQ ID NO: 84999 - DNA, 423 bp, Homo sapiens
caggtttcggtccctgtccaaagggggcatgcttcattcaggagaaggcaggttcctgtcaggaggggacagatcccagtactgagggggcaggtccctgtcaggaggggacaggtttcagtcaggtgggggcgggtttctgtcaggggggcaggtcccagtcgggatggggcagatttcagtcaggagtgtgcaggtgcctgtcatgaggggaccagttttattcaggaggggacaggtttcaggcaggaggggacaggtccctgtcaggaagtggcaggtttcagtcaggagggggcagctttctgtcaggagagggcaggtctctgtcaagagggggcaggtccccatagagggctgtgtcccagcagccaagtgaaagaagcttttttgtaagggtgtgttgggctgtgtcagcgtctg

SEQ ID NO: 85000 - DNA, 419 bp, Homo sapiens
  misc_feature (1)...(419): n = a,t,c or g
aggacacgtggagaatgtgaacagacttgatatccttctcgagccagcttaatatgattatggttactacagtattgacaccctattaatgggcagaatgtggcaaagcttgcaaccacagtgctgaccgtgccggacgtactattattagcactgaacctaaccactctgactgggacgaatgtgactcagcctttgtctggttctcatacctagctctacatatatgaatccatactggagagaaacgctacaaatgtgatgaatgtggcagagcttttaaccagtgttcaaacctcactaaacataagagaattcatactggagagaaaccctacaaatgtgaagaatgtggcaaagcttttaaccggtgctcacaccttactgaacatagaagaattcatactggagagaagccn

SEQ ID NO: 85001 - DNA, 449 bp, Homo sapiens
  misc_feature (1)...(449): n = a,t,c or g
attacatttggaccncnncacgccaagcttggcacgaggggctgggcagcctccgcattgcacagcgcagaccgctctagccttaggcctggaggggacaccaggagatgaggcttgtggctcagcctgctctctgcagccacaggcaaaggccaggaaggccggggtgcgggagctggcataggagctggctccagctcgggtactggcttaaagggagcaggagctggtgataaattcaactcaaattttcattgcctttgcaaagccagaaaacaccccagggctcctaagaaaagccccagcgcaggaccccaggacactttgcaactgggctgcaactgcgtggtctgaggctcctccctgtgtggccccaccagcaggctgggttctagctctggtgttggggctggagctggcaccacagcaggctccacctccagagatgg

SEQ ID NO: 85002 - DNA, 435 bp, Homo sapiens
catcattacgccaagcttggcacgaggctcgaccactcgacatgcggaacgaaggcgctcaccgtcaccgtgggccaccacggatgatgaatgacgaaggccgccaaggcataagcgagcaggctcagacacgcgtacttcaaaaatcgggcgtacgcgggatagggcacgaagacctgcagcacgagcgagatcaccacgatcacggccagccaagccaggaatggggcgtgcaccagcagttgcccggtggccgccatcgcgccgaggtcggcccccacattgacgacgttggcgaccatgagcagcgataccgcgacgaaaagcactttgcgcgaatagtgttcgcgcaagatcgccgccaggccgcggccggtgaccatgccgatccggccgcaaatctcctggatggccgccatgaacggatatgtccag

SEQ ID NO: 85003 - DNA, 460 bp, Homo sapiens
  misc_feature (1)...(460): n = a,t,c or g
ggcggatctgctgttggtgaccaaagcagtgaagaaggcagagaggaccagggtcatcaggccacccctgctcgtggacaagattgtgtgccgggagctacgggaccctgggtccttcctccttatctacctgaatgagtttcacagtgctgtaggggcctacacgttccaggccagtggccaggccttgtgccgtggctgggtggacaccatttacaatgcccagaaccagctgcaacagctgcgtgcacaggagcccccaggcagtcagcagcccctgcagagcctggaagaggaggaggatgagcaggaggaggaagagtgagtaggagaggttnncttnctttgccttctgcgcgtctcttcttctgcctgcttccctaccattttggggcaaaggaacgccaacaaccgctctaaacacggagcctcataagggttccacggaataacctgcccc

SEQ ID NO: 85004 - DNA, 438 bp, Homo sapiens
cgtcgttgaattctgcagaaggggcacactgcctatcagcgcaaggggctgcctcagctcttctgctcgttatcctgtctcaccactttctccaagaagccctcgggcaaaaagacctgtaccttctgcaagaagtgcgtgagggtcttgggggctatgcagagggcagggatctgggcaggagtatgagtaagacagagactgttggtaagaacctatcaggatggagctgggcgagagagtgatgtagggagagagtcagagtatttggctctgtggtcattgatcctggaggaggggcggaagctgaggaaatgagagggtggtcttgagtgaatattcaaacctgttcccacctctagggagatctggaacaccaaggactcggttgtggcgcagactgggtctggaggctccttccatgaggtcttgacatcg

SEQ ID NO: 85005 - DNA, 456 bp, Homo sapiens
tgcggtggaattcggcttccatcagtaggtttttagcaggtctctccacagaactgggggctcacacctaatatttctgaaatcctttcagtaatggaacatgactgacaaaggcaaggggctccgtggaatctgcttcttcctccctgcaggcagaggaagtctgggtctgaggggtgggctggtatttacccaaagaggcttccttgggaggagaagagacgattcaggcaggttccacatagtatctacatcctaagagagccctgtggtggcttcatgacttacattttatttttgaggctgtccactgggtcccccacgttgttacccaaccccatccttttttgtttgtttttccagactggatcgggctggagctacagctgaggtccaacgagacagggaagatatttgtcagcaccgagttctagttttacaacttgagtgcccacc

SEQ ID NO: 85006 - DNA, 450 bp, Homo sapiens
  misc_feature (1)...(450): n = a,t,c or g
gctatatgactgagcggaggaattccgngttgaagagaaacatgcagacacatggcgctctgnctgtttatctgatttcttttttcatgctgccaaagngctgtgcanagaatgaaactgtggagatgccatatctctttctgtgggagatcactttggaaaagggaatggtctaacttgggccgaaaagttccagtgtgaagggagtgaaactcaccttgcattatgccccattgttcaacatccggaagacacttgtatccacagcagagaagttggagttgtctgttcccgatatacagatgtccgacttgtgaatggcaaatcccagtgtgacgggcaagtggagatcaacgtgcttggacactggggctcactgtgtgacacccactgggacccagaagatgcccgtgttctatgcagacagctcaactgtgggactgctctctn

SEQ ID NO: 85007 - DNA, 650 bp, Homo sapiens
  misc_feature (1)...(650): n = a,t,c or g
ggaagaattaatacagatcaaaaaaatatttgaacattcaaatctttttactaccagagagacttcatttaaacagaaagagtagggaacattccatattcaggaacactttagcctctatgagcagtaaatgtaggtggccattttgataaacttctctggcactccattttccccactaacgtacagaagcttcatgaagtcatagactatgttgtcttgttcagccatagccccttccagcatctggcaggctgccaggcaacataacaggtacttggcaaatacttgaatgggtgaggcactctaggcaggccaccagcccacttacgtctcatcaaacaggggttccaaggtcttccgcttcactgaagtcttcttacgacatgcccacttcctttctggcaacaagtagacacggacgtagggatcagctccactggctggtacatggtgttaggtttctgcagccattgattagcacgctgaggcagcgcgcagacacacatagcgcactgtgagctgaatctcacccagctgccgtcgcctgaggtccccaccttcatgttgangcgatatctgccagtcaagcaagagaggccangagttgagnaagacatgctnggagccagcctctggnggccagngaa

SEQ ID NO: 85008 - DNA, 531 bp, Homo sapiens
  misc_feature (1)...(531): n = a,t,c or g
ggcacgaggaagttttaaaactggactttatttacctactagtgacatcgacctagtggtgtttgggaagtgggagaacctacccctctggactctggaagaagctcttcggaaacacaaagtcgcagatgaggattcggtgaaagttttagacaaagcaactgtacctattattaaattaacagattcttttactgaagtgaaagttgatatcagctttaatgtacagaatggcgtgagagcagctgacctcatcaaagattttaccaagaaatatcctgtattgccatacttggttttagtattgaaacaattcctattgcagagggaccttaatgaagtatttacaggtggaattggttcttatagtctctttttaatggcagtcagtttccttcagttacatcccagggaagatgcttgcatccccaatacaaactatggtgttctcttaatagaattttttgaattatatggacgacacttcaattatttaaagactgggcatccggtttaaagggntgggtggtt

SEQ ID NO: 85009 - DNA, 445 bp, Homo sapiens
gtggaattctgatcagccagcgacccggtgacaggttggtgacactggatcacttccatcacggaaggggcagcattttgtcctcactggaatagacacttactctagatcgggatttgccttccctgtacgtcacgctcctgccaaaactagcatccgtggactcacagaatgccgtacctactgtcacggtatgccacactgcactgcttctgtctgaggaactcccttcacagcaaagaaagtatggtaacgagcccatgctcatggaattccccggtacgaccatgttgcccaccatcttgaagcagctggtttgataagatggtggaatggccttttgaagactccactacagcaccagctgggtggcgatgccttgcagggctgggccagagttctgcaggaggcagtatatgctctgaatcaaaactgagtgtaaggt

SEQ ID NO: 85010 - DNA, 551 bp, Homo sapiens
tcttagccagcggggaattccgcctctcacagtcagtcctcccacccgagtgaccccgatggcggcctcccagctggcggcgctggaaggagtggactccggtcccagggtgcccggggccagccccggcttcctatattccgagggccagcggctggcactggaggctctgttgagcaagggcgcggaggcgttccagacctgcgtgcagcgcgaggagctgtggcccttcctcagtgcggatgaggttcagggcttggcagcggcagctgaagactggacagtggccaagcaggagcccagcgggatggcagagggagccaccaccgccgatgtggacgcgggcagcctgagctactggcctgggcagtcggagcagccggcgcccgtcctgcggctgggctggccagtggactctgcgtggaaaggcatcaccccgggcgcacttgttacacccaagcctcctggagagggtcagccgcccctcaaggagctggtgcggctggagattcaggctgcccacaaggtgggttgtcgcgggggccctgtgt

SEQ ID NO: 85011 - DNA, 428 bp, Homo sapiens
  misc_feature (1)...(428): n = a,t,c or g
cggaccttcgaacagngcggnggaattcgttacaataccttgcagccataaatggatacatgtatggaaatctgcctggattggacacgtgcttaggagacaacgttttgtggcacgtttttagtgtaggatcagtggaagatttacacgggatatatttttcaggaaataccttcacttctttaggagcaagaagggacacaatacctatgtttccttatacttctcagacgcttttgatgacacctgattctataggtgagcagtgggtcttctcattcagcctgaaacattaaagtatgcagaagcactatctttatacgcactgaatattctgtacaggaaaaaaaaattgaactgatacaaacaatgcttgagaaatctttgccctgctccacttcatttataagagccttagtatttcattt

SEQ ID NO: 85012 - DNA, 387 bp, Homo sapiens
gtccgtgtggtgtgaattctgccaaccagcttctccagattcactgagcatccttgggagcatgggccccctactctgggcctgttatgaatgctgaggcttgggggcttgggggtgtggccttccaacaaccccaccctgatgggagggagggagggagggaaggaggggactttccccaaacaagcagtcccctggtcgaggcagcagagggccttaggtcaggggaggtggtgggggttatcattcaagtttacggggaagggtggatagagggtcctcttctcattcctgactaggctccttggccccccgatctgattaccttcacggaaggaagcggacgctcaccacgctatgccctctggttctgtgtggcggagtcag

SEQ ID NO: 85013 - DNA, 385 bp, Homo sapiens
agtgtgctggaattcgggaagagaaggaacagaccctgctgcagttccagaagagtaagatggcctgccaactctacagggagaaggtgaatgcgctgcaggcccaggtgtgcgagctgcagaaggagcgagaccaggcgtactccgcgagggacagtgctcagagggagatttcccatagcctggtggagaaggactccctccgcaggcaggtgttcgagctgacggaccaggtctgcgagctgcgcacacagcttcgccagctgcaggcagagcctccgggtgtgctcaagcaggaagccaggaccagggagccctgtccacgggagaagcagcggctggtgcggatgcatgccatctgccccagagacgacagcgactgcag

SEQ ID NO: 85014 - DNA, 421 bp, Homo sapiens
  misc_feature (1)...(421): n = a,t,c or g
gcggtaaatcctgaggctttnccccagccaggcacgaaggctggggagagaggcgagggttggtttctagcacttccggggccccccaccggagccgcgcctacctgctgcagctcttacaggcgccgccgcaggccctcaacttgcaggcccagctggctgacccggggctgggcctcggacaccacctgcttctgctgtaggcaagcgccctgcgcctcgttccgtgcctgcgccagcagtctcagcttgtcctccaggaagggcggcccctgcaaagcgaggcctcagggctcagacgccagctccccaaggaagtccacctgcagatcagaccaggaggccgcccctccttgctggtaccagccactcagagaggctccagggccccgaggaagggaagatgggcagaccacggggn

SEQ ID NO: 85015 - DNA, 429 bp, Homo sapiens
  misc_feature (1)...(429): n = a,t,c or g
gccgagcagaaacgtcgtgagcgggagatgcagcaggagatgatgctccgggacgaggagactatggagctccggggcacctacacatccctgcagcaggaggtgatgctccggaacgagaagactatggagctctacggcacctacacatccctgcaggcggaggtgcaggtccaacccgataaacttatcaacctgtacgccgacctgcaggcggcgcaggcggagatcaccgaccaacatgatgagtatatcctcgtgcggcaggacctgtaggaggcgcagaacgagcacaccaccaaactccggctctagttcctatgcatcgagaacctcatcccgccgcaggagatgaacccgaccatgaaccggctcttcctggactgtgaggaggcgcaatgtacggtgcagtcactgaggcctaccggn

SEQ ID NO: 85016 - DNA, 444 bp, Homo sapiens
  misc_feature (1)...(444): n = a,t,c or g
acgtctactctagcgaggngcaattccgagcggcccagcgtggcctgagttggcctcctgttcccatcaaggcagcaaactctgaacgggcacagagctggccagcctcagccctgggttcttccgcagcacccacagggccagcagtgatggactctcctgggcctgagccccgggtccttccccagcacccacagggcccggcagagatggactctcctggctccctgaggcttgcaacactgagtggcagccgcgctcagaccaccccaccctcaccccaggcagtgccctccccaggccctgccaggcccccagctccacctccatcacctgctgcctgcagtccctccccgcaggaagccccctgccctccacaggaccttgagcctgggccacgctgggccctctgcacccagccataggcacctccctcaccatccg

SEQ ID NO: 85017 - DNA, 407 bp, Homo sapiens
caacttcctgcactacaacctgaatccccaaacctggcgagacatggcacgcacgcgcggctcactcacctggcagtcaacggcttcctgctcttcggggtgctgcatgcccaggccctgcaggctgcgtggcaacagctgcaagtcggcctccaggcctctgcacaaatgggcctcctgagggcactgggtgcccggagcctgctgtccagccccaggtcctatctccttctcctctacttcatgcctctggccctgctatctgcctttagccaccaggaggctcggttcctgattcccctcctggtccccctggtcctgctttgtagtccacagacgcagcctgtgccttggaagggcactgtggtcctcttcaacgccctcggtgccctcctcttcggctgcct

SEQ ID NO: 85018 - DNA, 508 bp, Homo sapiens
cgggtcgacccacgcgtccggtgggtggcaccctgccagctccatgtggccgcacgcctctctccatgtgcagtaggaaggatgtcctcgtggtgaccccttggctggctcccattgtctgggagggcacgttcaacatcgacatcctcaacgagcagttcaggctccagaacaccaccattgggttaactgtgtttgccatcaagaagtaagtcagtgaggtggccgagggtagagacccaggcagtgtcgagtgactgtggacattgaggtctctccttgtgttcaagacagagtggggtggcggccagccttgtcctcccagagggtagatgggaaaggtcattcatgcagcatcttactgagctcacgtgggctcgtgggcttgtgggctcgccaggtcggtaaaacccagctccttctccagaggctgcgtctcacccaaggatggtgcttctgctgccccctcttagtaagaagggggctggctccccatcgcttggaagag

SEQ ID NO: 85019 - DNA, 535 bp, Homo sapiens
  misc_feature (1)...(535): n = a,t,c or g
atgctgccgaattcagagttgttgctgatgccatgaaagtcattggcttcaaacctgaggagatccaaacagtgtataagattttggctgctattctgcacttgggaaatttaaaatttgtagtagatggtgacacgcctcttattgagaatggcaaagtagtatctatcatagcagaattgctctctactaagacagtccggtaaagaagggctccatcttttcccctcctcatgttgactgatactaatttgccccatcagaatgattccctgtttactcaagattttgtaggaaactgaattaaagtagaaaatggagaaaggaaattgggttaataacaaaagcattntggggttgtttcttgatggttttggtatgtacttaaacacagcaaacccaaaaacttagtagcttanaacaacagtttattactgacaatcttgagggttgactgggctcagctgaatgngtttggtttggggtttctcatgcatgtgttgtcagatggtggctggngtgagagtcttggagg

SEQ ID NO: 85020 - DNA, 392 bp, Homo sapiens
tttttttatccagtcaaacagtaaaatctttgcaagtttatcttgctttagtcacacaacttataacaataggcaggcatagatcaaaaatgcttacaggatatgatcctgataaaattattgttaccttggattcccaacaacaggctgcggcctgggagatgtccactgcatggcaaatcactttcgcagattttgtagaaataatagataaccattatccatcagacaaaattttgcagttttataaaattcacccttttattccccctgtgattgctcatcacaaacccatttcaggtggacagacctattttaccgatggctcttccaaaagccacacagccatttatggacctaaatatacttaaataataaagacccctagagtt

SEQ ID NO: 85021 - DNA, 436 bp, Homo sapiens
gggtcctgcggcctggcccgaggacaaaagggccctccttattgttgcagacccttgccaaccgcgcccgacacattttgtggccctcatggtgaccgagcctgggctacaagcaaaagtgaccaaggcccaggaatacctggtccacgtggccccacactgcgccaacttcctagtgccctctcagaacctacacctgaccctggccctgctgcgactggcaggcgctggggaggaggccgctgccattggagctctgagacgggccctcttggccccggggctaaatgcaccccctcggctgagctttagaaagctggtcctcctgggcccgcatgtgctgtgtgccccaccctctcccacactggaaagcatggcacaagtgctgagccagaggctggaagccgaggggctgagtacactacagtctccaggg

SEQ ID NO: 85022 - DNA, 445 bp, Homo sapiens
gaattcccgggtcgagcaatgaaggctcctgggccacacaaacacacagctggctgagaagtagcaccaagccttcatccagtgctgggctactgggcacagggcggccacaggcatccagcagggtgagcagagcctcacgaactggaccatgccgcaacagtggctggcgagcttcgctcactagcatttcaaatagtttcagttgctcagcccgccgttcctcgaccccatccccaagctcatcccattgcagctgccatgtcaacacacgggtcagcagatcctcgtgcagagcaaactccagcaggggcccagggcctgtgggggccgagggaactgcacggtcctctgccagcagtgtcaacatctggtaagtgtggttgcgcacagcactgagatcgtctgcacccccaggagctgcccgagggccttgccgctccag

SEQ ID NO: 85023 - DNA, 429 bp, Homo sapiens
tcccgggtcgaggtggcgcacagaagcagcgggcccggcctcagatgcctctactcagatctggggcaggaggattttctaaggactggtgcggtgcgggcacatccggggagcagaaggaagctgttgataaatccaacctcccaccccggccgatgatgccctctctgcagtttggctcaattcccaggcgtgtgcattgaaagcaaaatgagtgtggctgcctgaaatgctgcccagacacgaattccagccagccagccagctcctaatcggagaggcggtaccagggctgggtgtgccctgccaggaaggtgggaagaaatgctccaaacagcctagtcttgctcagatcaaacagcagcttatcaaaagcggagagccccaaaacacctagcaggcccttgacccccacgtttgcctcttcct

SEQ ID NO: 85024 - DNA, 449 bp, Homo sapiens
  misc_feature (1)...(449): n = a,t,c or g
ctgaagatctccgggnagtcccacgcgtccgcttcagagcatgctgaaacctggtggccaagtggactgagatgaatccctggagttttatgccaagcacacggcgcagatagaggtaaaagctgagtaaactcagggcatggggttgtgttgaggccattagtgtgcaatgccctgctctggggctggcgtgcattcattcatctgagcaatggaaatgtgagtgtgtactgtgtgctaggtcctgggctgggtgctggacatcccatggccaagacagtcattattgctgcttgtggtccggtggggaagaggacactgagcaacctctcattcctcacgaattcacgaggacaggtgggaggcatcataagaaagtccagcagagggacctgctgtagatcgtggtggtcacagaggcctagtctgaagaaatttcatctgaacct

SEQ ID NO: 85025 - DNA, 400 bp, Homo sapiens
ttttccctttagcagggaaaccggagttctccgtgctgttgggaggttcaagagccactctgtgcagaaatgcccagaaagagttaagtgagaggaggaagccttaaaaaccagcgacagtcttggttttcttaacctgtccgccatttaacatttctagaagtgcaacattgcttctaagaaatttttgaagacttgtggatagaagaagtaaccttgaaaagggcagagctgagccagacaacttttcagctgggtgctccctggaagatggatcttgccttgtggatgtttttctaccgtgacagaagatagaaaggatgaaatagaaagagtcaacagggagctgccaccaccgtgtactgtgctgctgtcccagaactggagggtctgggaggag

SEQ ID NO: 85026 - DNA, 499 bp, Homo sapiens
caccaccactggagcttccgcagttgccagggcatccttggtctctggacctctgtctcattcagccagttttagctccccaatgggcagcacagaggacctgaattcctaaggaagcctcagcatggaccagggagatgataaaagcaatgagcttgtaatgagctgtccatattttcggaatgagatacgtggagaaggggagaggaaaattgcctttctggatagaaatagagaatagcaacgtttatggatatcacaaataaagaattcaattctttacatgattgagtgagagtatgtataacctggtgggtgggttcagagtaccttttaatctagtatgcttaacttgatgttaatatttaacttaaatatttgacttacatgttgacgttgaaggctcaaagctatactaagaagctttctgaaagattgggctttaaaataaaataatattttaatattgaaccatttttacttcttgtcactgttcaat

SEQ ID NO: 85027 - DNA, 407 bp, Homo sapiens
  misc_feature (1)...(407): n = a,t,c or g
accagccgcgccagggggtcaaccaactccgacaccgctcggcgtcagctgggcgccaccaggcgcggacttcggagcgagggcaggtgcgcgggccggaagcctcgggcgctcacctggcacctacctggagctcacctggcgcctttccaatatggcggccccggctgacgtcaccggaggatgtggcagagtcggcgcgggagagctgggccgggaggcgccggaagcggcggccggggatccgctgccactgcagcctacacccttcccggccctcggtgcttgtcttttctttggcgttcctgcgccccctgacccgcggtcctgcagtcctgctcccgtgacgtgccctccctccttccgttccccgtttccccttcactacccagggctggagcctgaan

SEQ ID NO: 85028 - DNA, 394 bp, Homo sapiens
tccagggttgccttattgaaaacagactcctggataggtgggggagtttccctttgggttattaggaggctttcgtataactgacttttggacagcagaggcaagcatctggtattttaaatggagatgtttgtcctcttgaattttttgttcctcatctctgttgttaaagacatggaaggtcgcatttaggagctcccaccaagatgtctgggggccctcctctaatttttgtaattttttccgaatatctggggtggattgggaaataaattggaggtagagaaaagtttgaccttctctagattctgggtccaaattggtatattttagcatagcttcagtgaggtgggataagaaaagggcagggttttactggggctcttgggtaaat

SEQ ID NO: 85029 - DNA, 403 bp, Homo sapiens
  misc_feature (1)...(403): n = a,t,c or g
aaggatcttgctttcatgtcacctgttttgtgcttcctaagtaagctgtggtctaattaatttgtagacatccaaccctatcgatgtcgctgctcggcctgggacagtcccacacactttactccaaaaggacccgagggtacgtgcaaagtcaggcttggtctcaggtaacaccagggtgtgtgtgtttgcacgggacggccagcccagtgctcgcatcttccttagctcctttgagcgagctgctgtttcagctgttcttctagtttgtggaagaaaatgccaattactcttagaaaacacagtctctcctgctcactgcgagcataggacacaaagagaccgacttgccgatgggagaaaagaggaatgagttacggtctgagcccagaaattggacagn

SEQ ID NO: 85030 - DNA, 1064 bp, Homo sapiens
acctgcaggacatgtccccaatgctgctgagctgcaatggccccgacaagctcttcgacagccacaagcttgtcttgaacgtgcccttttctgattccaaaagagtgagggtcttctgtgccaggggtcctgaggatgtgtgtgaggcctataggcatgtgctgggccaaaataaggtgtcctatgaggtaccccgcttgcatggggatgaggagcgcttcttcgtggaaggcctgtccttccctgatgccggcttcacaggactcatctccttccatgtcactctgctggacgactccaacgaggatttctcggcatcccctatcttcactgacactgtggtgttccgagtggcaccctggatcatgacgcccagcactctgccacccctagaggtgtatgtgtgccgtgtgaggaacaacacgtgttttgtggatgcggtggcagagctggccaggaaggccggctgcaagctgaccatctgcccacaggccgagaaccgcaacgaccgctggatccaggatgagatggagctgggctacgttcaggcgccgcacaagaccctcccggtggtctttgactccccaaggaatggggaactgcaggatttcccttacaaaagaatcctgggtccagattttggttacgtgactcgggaaccacgcgacaggtctgtgagtggcctggactcctttgggaacctggaggtcagccctccagtggtggccattgggaaagagtaccccctggggaggatcctcattgggggcaacctgcctgggtgagagagagacagggaatggagttcctggggtggaggctgagggttgggggtggtgatgatggtggagcaggggccattgcactccttgaagagagccagaagcaaggaatgatgaaattatactcccggatgtggtggggttggtgggtgttcaccagacacagtccacacttacctcggggactctgaaaccagagagagcagagacctaagagatcattcagtccaacactttcattttacaagtgggcccagagagggtaagtgagtcacatagaac

SEQ ID NO: 85031 - DNA, 414 bp, Homo sapiens
ttccttcttgctgaagtatgagtgaaacggttctatttattatctactctagtaatccagtagtttgtttgactgtggtgacttggtgttaacattttttttcttctaaattttagaacaagcactggttaattaggcaagccaagactccaatgactaattcttcaatacagtttttagataatgcatttaggaaaaggtaagagctgctgctacataacaatctgagtggttttaaagaccctgcaaatcagctcatgaagaggagaccacaccacattgttgtctctgaaacaaaaacagagggaagcaagtcagtgggagagaggcttcgatggggcaccagaagcagagagattcctttacactcaaatgaatgaggtggcatttggaccccagtactaattagactgg

SEQ ID NO: 85032 - DNA, 451 bp, Homo sapiens
aggtaatgggtggaagggaccggacacctgggtcccagatggcattatgtgaggtggagtctgtggaaccgaatgcttgggtcctgtgcgggtagctgtttgaaaggccagtacagtacagtacagatagtagtcttgggacctgggaggaagggtgtcctgaggtgggagctttgacctgtctggcctagcagaagatgtaaaaggggaccgggagcttcgaccagggcctcgagatgagccacggtccaatgggcgatgagtggaaaagacagagaagccccggttcatgttcaatatcgccgatggtggcttcacaggttgtggagactctcgctgctttctgctcctcaaggggatctgctcatcctcatggggatcttcgtttgcctgaggcttgctgctacctttatttcaagtaactttcaatgaagtatgttgcatgctgacg

SEQ ID NO: 85033 - DNA, 392 bp, Homo sapiens
ctttattcggggtggtctgccaccccgggaggtcagaggcatgccaccaccactccgcggaggtccaggaggcccacgaggtgctgggggacccatggggcacatggcaggccgtgaaggaaataaaagaggcttccctccaagaggaccccggggttcccgagggaacccctctggaggaggaaacgtccagcaccgtcctgaagactgaccgaggcccaacccgcatgcacttgccttgacaaatagaaaccctactagtgaaaccacccttacctcacgccatacccactctatagtggattgcgctcgctacaggaacagaatgatgaccctgatggatggctaaggacactattcaaccattcactggacgcttcatagccttctaa

SEQ ID NO: 85034 - DNA, 372 bp, Homo sapiens
gaacgtctggtcctaaccagtgagcactgtttagtactgaccctcttctggccatcatggacctaccacacactgctgctttcccgtcagcatgtgcggcggctacctaagctgacccatgctgagcatgatcatctagcctccatcatgaataagctcttgaccaactatgacaacctttttgagacgtccgttacctactccatgggctagcatggggctcccacaggatcagaggctggggccaactggaaccattgatagctgcacgctcattactaccctccgctcctgcgctctgacactgtccggaaattcatggttggatcacaaatgcttgctcaggctcagagggacctcacccctgagcag

SEQ ID NO: 85035 - DNA, 400 bp, Homo sapiens
catttttgggatccagtagccatccttatatagtggaatagacattagtttaaattatgaaatatctcctttaaaaaaacatgcaaatggtgctttctttaggatttgcaaagcaatagaagagctgctcaagctaaaaactatccacatagcaaaagcaaacgaacaaacaaaaagccgccaatgttacgtctgcagaacccctcataaaatggctgctcaagggaacagaacatgaaatcccgcgccagactagccatattagggactgcagaaaccgcctatgaacctttaaagatgataaatcagaaaggtcagcagggcctttcactaaagtaacgcaagtaatatctcaaaagcaaaattcaaagatccctgccaaaagctattaataattctc

SEQ ID NO: 85036 - DNA, 356 bp, Homo sapiens
atccaaacctgctggggtaacattccccaactggctgagagtacataagtggttcttcagctctgagatgatcctatcattggctgctttaaaatttgtgattagtctgctttttgggcatgtgaaatataattggtggtgcagataaatttttattcaccagagagagcttattacagagctgcttgtcatgacacgtggaaattcaggaaacttctgtggagtctctgtgtggcgattctggccagaatggtcgtatggtttcaagatgctaactctagtttccccaaagctggcttttgcctgctggctttggtcctattccacgtgactgtggagtgcctcaaactcaagac

SEQ ID NO: 85037 - DNA, 366 bp, Homo sapiens
agccggagtgcatggttcccgtggtcctcggggccaagcagctgatccttgtatgcgaccactgccagctgggcccagtggtgatgtgcaagaaagcgggcaaggccgggctgtcacagtcgctctttgatcgcctggcggtgctgggcatccggcccatccatctgcatgtccagtaccggatgcacgctgcactcagtgacttcctatccatcatattttacgaaggatggctccataatgatggcactgcatggaatcgagcgaagaaggaatttgacttacattgagcgcaacccgatcgaccgatgttcttctacttgacccacggccaagaggagattgactgctcggtcagctactacc

SEQ ID NO: 85038 - DNA, 513 bp, Homo sapiens
gacgggagggggtcccttctccccctcttggcgacagtgaccatggcattgggctcagcagaccccctcccacatacaccaggccccgcaaatccctgtgaccagtttcactgccaccatcttggtgagcgtgtggtgtctgacctccagaaatgcacatcgacccccagccagcccggtgactttgtcacctgtgttcaagtgatggctccccttcccttcacacccacacccacctgacctggggacacctggggccagtgtgactctaggcctgctcccgccgcgccccagcatacatccacctgctttctgatcagtcccaccacctcggtacctacctccctgacaccttgtcatcctagatcagtacctctcgcttcacacacacctggcctgggaacactgaccatatctagtctcccggctttttccccaagatcctggtctctaaatcctctgggctggaggaaattagattttcaaaccctgtgaacaccacgccgagcccta

SEQ ID NO: 85039 - DNA, 452 bp, Homo sapiens
tttcgtttttaatcaacaatcacacctttcacgccatcaaagacttcatactggagtgaaaccttacaaatgtaagatttgtgagaaggcttttgcgagtcattcctatctggcaaaccatactagaattcatagtggagagaaaacatacaagtgtaatgagtgtggtaaggcttttaatcatcaatcaagccttgcacgtcatcatatacttcatactggagagaaaccttacaaatgtgaagaatgtgacaaagatttcagtcagaaatcaacccttgagagacataagagaattcatactggagagaaaccatactaatgtaaggcttgtgatacagctttcacgtgtaagtcacagctggcacgacatacaagaattcacactggagagaaaacttacaagtgtaatgagtgtcgcaagaccttcagccgcaggtcatcccttctat

SEQ ID NO: 85040 - DNA, 697 bp, Homo sapiens
aaaattttatgaattttaaagaattttgtaactttaaatcttaggaggaagtattctgcttcatcaggtggtctatgcgaagaagcgacagctgctaaagtggcatcctgggattttgttgaagccacacaaagaacaaattgcagttgtttgaggtagattatttcccgatcgattgatgcctatgtgtgatagtttgttacgccactgaatgcttatgcccactttatttgaaacagcttacatgaacatatgtcaggattttttttcaaaagaaaattcaggaaaaatatttcaggaatttgaagctgattatagaagtacatgtaaatataagctttcagttcattcactgttacccagagggcagactctgaaagttttgtttcctagtagctaaataaaagacaattttatatggagcctatggtatatatagtatctataagctatacagccatataaatctcttgaggaaaggcattccttcctcaatggcactacctgaggaattttatccccagagttctttctttttttaaaaaatgaagagacagggtcttgctttgttacccaggctggagtgatcatggctcactgcaacctcaaacttctggcctcagtcgatcctcctgccccagcctcccaagtagctagggttataggcatgtgccaccacacctggctaattaaaaga

SEQ ID NO: 85041 - DNA, 853 bp, Homo sapiens
ctttcgagatcgttagtccatagcggaggacttcgcaatggcggatacgctggagtcctcgctggaggacccactgcagagctttgtgcgagttttggagaagcgggatggtacagtgctacgactacagcagtatagctccggtggcgtgggttgcgttgtgtgggacgctgccattgtcctttctaaatacctggaaacgcccgagttttctggcgacggggcccacgcgctgagccggcggtcggtgctggagctgggttcgggcaccggggccgtggggctcatggctgctaccctcgggtaagagctggcgggcgggcgggatgtgggggcgccttcttgctggggaaatccggattacaggctttcccccctgtgcctacacctcagtcgacgttattttatagggctgatgttgtagtcaccgatcttgaggaattgcaagacttgctgaagatgaatattaatatgaacaagcatcttgtcactggttctgttcaagccaaggtactgaaatggtttgtatggcctttcagcttgttttaagatattgatttgtagtttgttttgaattgcgtttcattaaaaggatggaaggggactttccggttctttataaaacaagagtattttgaattattaaaacaattgaaatatttgtttggcatttttaaggggggaagaaatagaaggctttccttctccacccgacttcatactgatggccgactgcatatactatgaagaggtaagtatccagtgagcgaagtctcttcacttataagatgaaccttattccatgaattctaaagcacacgtttcttcacattttaacatctttgaatccggg

SEQ ID NO: 85042 - DNA, 205 bp, Homo sapiens
tttttttttttttttttaagacttaacgtcattgtatttattaggttctgaaacaatacacattcacatccttttgaatacagtacatttggcacaataagcgcttgctttacaatgaaataacactaatgaatggcaagagattaaaattacatccagaaaggaaaaaaatgtacaaataaagcatcacaatacaaaaaaaaaa

SEQ ID NO: 85043 - DNA, 196 bp, Homo sapiens; identical to SEQ ID NO: 67800

SEQ ID NO: 85044 - DNA, 476 bp, Homo sapiens
agatgctcggaggcttcttttatacagccagaaagacaccagcatgaaggacatgcgcaaagttctgagaacattacagcagatcaagaaatccagctcaagtaagtaaaaaccttctctgcatccgtttataattggaaattgacctgcaccagggaaagagagtagcccaggtgtctggggcttgttcccattagatcttccccaaggggtttttctccttggtggctggcctgtggggcccctctccaggaggcattggtgaagaaactaggggagctggttgccacagacagtgatgtactaatcttctctgggaagacagaagaaaagtccccagggaagaatactacagacttggccttagggacagctaggggtgcagattgctgccaactgcattttttctgaagttggccatatggttgcagtgaatggatttatagacagagtatttctgtgcatataagagcaat

SEQ ID NO: 85045 - DNA, 535 bp, Homo sapiens
ctccagttccttcactcccccaagtcacaaggttagccagaatgacctccagtcattctgattctgtgactcatgatcagagtcacaggaatatttttattgagttgacaaaacgagaggatgaagggctgcaaggttctgtatgcacatgtgggtgcgtgtgcaccagcgtcctcttctgcctgtcctctccttgttgagctgtatctccccttcagtatgggatggttgcctttacttttctctagtgggtggcctctcctgtgcttgacatatctgtcactatattgttttctcttctgtctctgaccttataggttggcatttcaagtctactccttcctcttgaattctacctccaggtaccaggctctggatgggattattgcaaagactgcctacgattccctccttacttacgggcccatgctgctctcatctgtccatgtttcacatagggtttgcttaaagactctctggactatgtgctgcccctactttagacattgttttggcatcttacaactggttgtgg

SEQ ID NO: 85046 - DNA, 373 bp, Homo sapiens
cctatattgaagttatttgtaccaaccttttattttaattagattattttctgtctagtaccatacagttttaataattatgttataccatttgtttaatgattctagtattctttttgtatagaatttcccttcacttttttcatatatttaattcccagatagaaattagaatcactataagtttcagaaaaaaatcatattggaattttaatggtaatgtgctgaatttatagattaatttgtgaaaagttaacaacttgaactgatttaatattcccatccagaaacaggtctgttcatttatcaaaagtggaaaaaaatttctttactttcaagtcttgtgtatgttttaatacactcctagatactt

SEQ ID NO: 85047 - DNA, 311 bp, Homo sapiens
ttttttttttggggcggggggggggcccaaagggggggcaaaccgggtcaaaaacctcggggttaaagccagccccccccctttattttcaaagggccaaaaataaggggaaggccccccccccccggccaaattaaatttgttcaggggtaaaaacaaggacccgggaaaaattaaatgggtttttaaaaaaggaattccttattttggggggaccccaaaaggaaactgaataatccttttttgaaaaggagaaaaacacccttccttggaaacccggggggaatgtgcccaagaacccaatttaaaaa

SEQ ID NO: 85048 - DNA, 674 bp, Homo sapiens
gatatcaccttaaaaccttaaaggttggcttaacacttcttgccctttttttttctttcttttagtctctgcgatatgataccagctgttttgtggagtattttgccttggatctcctgatggagaatggggagtgccgtggggtcttcgcactgtgcgtacaggacgggtccatccatcgcataagagcaaagaatactattgttgccacagggtaggaatctaatttctactttatttcctttgtaaaaatgaataaattccatttagagtctctttattttaaggaaaatagaggcattgtagaatagcagttcagacacaggccttgatataaccgtgtgagggtgatggcctttcccagccatggttcctcacctgtaaagggtgaggacagcagcacctgcctcagggggtgagaaagcatggccctcagtagtcggtagtggctgccgtcaggttcacagcttacctctcccaattttagatgaggaaactgtggcccaaagagtcacatggggttttctggcaaaatctctcttgttttagtgggttctatgtttatactgattcctgggatagataagtctgtcttctccacataatgaaaataaataactttaattttatacagtggcagttactttagccactttaaaagttaagaagtgtca

SEQ ID NO: 85049 - DNA, 448 bp, Homo sapiens
cactctaccagattcactcgactcctataagcacgtcgtgcctggaagaaccctgttccgacccaggttattcttcttagaagctcagatattattgatatgtataacaagctaatttttgttttaacatatacttctctgatttttagtacaacgggatgatcttatttttattaataatctatttccttctttgtgaatcagttcatgttttactaaatcttaatttcttattatttaatttctttacctatttaggccttcatatttctctggcatattggttgtaattatttttcaattttctatcactatgacgatcatacgtttttaaactaaacatttgaagttccgtttagtcaaatctatacaatcgttttctttatgtttcttacaagtaagagcacttctgagtaaaagaatatttctaaataatttgacatttgaa

SEQ ID NO: 85050 - DNA, 671 bp, Homo sapiens
aacttcctcccccgacggctcctgctgacagggcccccacaggtgggaaagacgggctcctatttacagttcctcaggatcctcttccgcatgctcatcaggctcctggaggtggacgtgtatgatgaggaggagatcaacaccgatcacaatgaaagcagtgaagtgagccagtcagagggagagccctggcctgacatcgagagcttcagtaaaatgccttttgatgtcagtgtgcatgaccccaagtacagtttgatgagcctggtgtatactgagaagctggcaggggtcaaacaagaagtgataaaggaatccaaagttgaagagcccaggaaacgggaaactgtatccataatgctgaccaaatatgcagcctataacacctttcaccactgtgaacagtgccgccagtacatggacttcacctctgcctcccagatgtctgactccacccttcatgccttcacattctcttcttctatgctgggagaagaggttcagctctatttcatcattcccaaatccaaagagagtcattttgtcttcagcaagcagggcaagcacctggagagcatgcggctgcccctggtttcagacaagaatttgaatgcagtcaagagccctattttcactccttccagtggttgacatgagcacggacatgtatt

SEQ ID NO: 85051 - DNA, 493 bp, Homo sapiens
gtcgcatctacaaccagagccagcgcttccccggcgccaccccttttcttggaatcccgctgcttaactacctgcgggtggcattggccccgccccatttccccacgctttgaagggggcgagtctccacagacctcctagggggatagacagcagctggtgtgaccccacacacccagtgaggtctctggagccgcggtgcgggaagcggggacccgggtttgaatcctgcccctctggtgtggtgcggcctcttcccacagacttttggcctcagtgttccccgcctgggaagtggggactggccctggtacctggctccagagctgcacccagaggcgatcagcccggtgcgggaacggggcggggtggccgcaactacgggccacggatcctgacccgccctgcccacgatgactatccacatcctcatcctgctgttgctcctcgccttctccgcccaaggggacctggacactgcagccaggcgagg

SEQ ID NO: 85052 - DNA, 422 bp, Homo sapiens
cagctttgaagtaagctttgaaatcacaaaggataatcctccaaatttcttattttttaacaatttctttttgtgatcttgtcacttggcattcccagatatattttaggagtggttttccaatttctgtgaaaaaagtcttctgggatttggtagggactgcactgaatatatataagttgactgttcacctataaagactctccttgcgctgaatttcagttcagctggtcatcgttgcttgtacaactctgtgatgaattgaaaatataattttggccttttgtttcttttatcctagttgttggagacggatgtcatgcctttcttaaccttgtgtgttctgctcaaaaatggaggttctcagccaggtgtggttgttcatgcctgtatccaagcactttgggaggccaagatgaggg

SEQ ID NO: 85053 - DNA, 369 bp, Homo sapiens
cttttctatacccagaaggaagtgatggctttagaaaaagtgagggtagttcccaagatagcctgcagcaggtggttccctttctgcgggagaaaagcaccatgcgtgggtgtctgcagcctggagggcatcgctcctctgagatgctggtcaccctccattggcagcaacagtggcatccctgctgtcactcggcagagtagcccctctcgctgagggtggtttttcctgcccgctctgtgctgcgcttgtggataagcagagaacgactcctatgagcagactgaggtcaggtggcccttcccagcgttagctcctggggacattcactactggacgcacttgaaaaagttgttgcaaagccccttg

SEQ ID NO: 85054 - DNA, 319 bp, Homo sapiens
  misc_feature (1)...(319): n = a,t,c or g
cgcgccatagaaaggtctaaaactgtcttccggttatttcagccaccccctttgaaggacctcttagagccaatgctcacatcgttgggtggaagagacgccagcggacaatgggcacgtctccatgtccaggagcagttcagtgggagaaagagatgcaaggccacccagcataaaccatggtgctctgcccccagcgggtggtcacatgggcctccagagtcccacacacacagggaatgcggtgtcatcctttgcaatgggtagatacgggaatgctccactcggaaggatgatgaggtcagactcnctgcncnct

SEQ ID NO: 85055 - DNA, 320 bp, Homo sapiens
  misc_feature (1)...(320): n = a,t,c or g
anggnngntgcctttgttactatacttgatgatacttcagatgcaggtagtctttgcttttatctacatagtcgataccaattatgcttaccatgttcataaataccctggaatcatgtcttcgacataaagtgcctgcaaaattataaatgggtatgctactcctcaggtatatagtaaatatttttagatacctatatctgaaatctttttattggaaatatgtaggttctttcagttttgacatatatatgtattatatctggtatatacactaaaagaacaagctgcataatttgtgggacgtatcatagaaggaa

SEQ ID NO: 85056 - DNA, 328 bp, Homo sapiens
cgaaccctgtggaatgtcagtccccagaaaatctgagcactgtggaatctcagtccccagaaacccccaaacactgtggaatcccagtccccagaaaccctgaacactgtggaatcccagtccccagaaacccccgaacactggaatcccagcccccagagacccccgaacactgttgaataccagtccccagaaaccctgaacactctggaataccagtccccagaaaccctgaacactgtggaatctcagtccccagacacccctgaacactgtggaatcccagtccccggagactcctgaacactgtggaatccatagcctgctt

SEQ ID NO: 85057 - DNA, 710 bp, Homo sapiens
ttcccgggtcgacgatttcgtagtatcgtggtctggcgaagctgaaatcgacctacaccgacaagctgccgctgatggtcaacccgaaaaccgggcgtgtgcatacctcttatcaccaggcagtaactgcaacgggacgtttatcgtcaaccgatcctaacctgcaaaacattccggtgcgtaacgaagaaggtcgtcgtatccgccaggcgtttattgcgccagaggattatgtgattgtctcagcgaactactcgcagattgaactgcgcattatggcgcatctttcgcgtgacaaaggcttgctgaccgcattcgcggaaggaaaagatatccaccgggcaacggcggcagaagtgtttggtttgccactggaaaccgtcaccagcgagcaacgccgtagcgcgaaagcgatcaactttggtctgatttatggcatgagtgctttcggtctggcgcggcaattgaacattccacgtaaagaagcgcagaagtacatggacctttacttcgaacgctaccctggcgtgctggagtatatggagcgcacccgtgctcaggcgaaagagcagggctacgttgaaacgctggacggacgccgtctgtatctgccggatatcaaatccagcaatggtgctcgtcgtgcagcggctgaacgtgcagccattaacgcgccaatgcaggccagctgcgagcaatctctagacggc

SEQ ID NO: 85058 - DNA, 568 bp, Homo sapiens
ctgattacgaattccatgtccgtacctgtacatcgtggagactcgaaataccctgccgttacaccgcttacgccacttgcgtgccacccgcgacaatcaacggtacggcaaaagagattccgctcaacagtgcctgtttcagctccgttttgacacttttcaccggttgcgtatcttgctgtacggtacgcgtctcatcgctacgcttgagggtaagcgcttgttgcatcaacgcttctgcatggcgaatcggctcggcaacaggcactgaaagcgcgggaatgccattaaaacgctcactctccttgatggcgacttcagccgcaaaaatacaggcggttgcactattgagttgatccgccgttaaacgcccttcaatgccgttagcgccttgtttttcaacgtaaacatttacgccgagtttgcgtccggctttttccagatattccgcagccatataggtgtgagcaatacccgccggacaggccgttacgcagacgatagttggcgcgttggaaaaagaggcagaaggttgcgtgcctcccttgtcatccagcgccgagagcaa

SEQ ID NO: 85059 - DNA, 609 bp, Homo sapiens
cgctacaaagaatgcatggctaatcaactggccaaatttccatggtaatgcgttcatccatcccctgtgccatcatgatttcctgtaacgcctgcacggtgacggaagcaccacgcacttctttccagctgtgatatcgtaattcatcggcaaccggacgtaacacttcgcgtgccgctttttgtgcagcatcaaaattttcctgccccagattacgatcggcaaaatagcgttccagccaggtgacgcagcccatcgacaggctgaacagctaggtggtttgtgcacccgtgccggttaccagttcagtactggctccgcctatatccaccaccaggcgctgatcggcaccaccagtggtgtgagcaacgccctgataaatcagacgtgcttcctcttcaccgctgatcacctgtaccggacaaccgagaatttcctgcgctttggcaataaaatcacccgcattgacggcaaggcgtaacgtcgccgtagcgacaacgcgaatttgcgagggaggaatatcttgcagacgttcagcaaacaggcgcaaacattgccaaccgcgctccattgcttcattggagagggcattttcgctattcaggccag

SEQ ID NO: 85060 - DNA, 493 bp, Homo sapiens
cgttcgaaccatgaaaaccaaaaatctacccgcgtggaatgcggaaattaacgtgatcaacggcaacgaaggaaccaaaacgcatggtcagatctctctctcctggcctcctcgtataagggaggagaaccatttgctccaccagtcattggaaagatgggccgcctggcctaggaagccaacgttggctgctgtcatacaactacagctctctctgcgctctgagacgttctgaaatcacgtgaccgtaagcttcctccacctagcctctttacttcccatggtccaaactgaatacctcccagggagaggctggacgctatcccatcccatgtgtgaggctgatcggtgctgtgaaactgacagcgccgacctctgacctcacatttccatcgccaaaacaaaacgtgcctttgactgagaagtcttgggaatcatccattcacgcgtgggaatgcacatctgtcttcactggagaaacagtctttcaccg

SEQ ID NO: 85061 - DNA, 217 bp, Homo sapiens
gaccatgattacggattccatgtccgtacctggagatccggacgatcggggcttacccgcgatttcctggctttagagcgttcgtcgtgctgaacggatgcacattcctgcttttctggttcataccgcgctaaaaatcaaatcgccaaacggcaaaagttatagcgaacggttagattcggtgcgtacagaaaagcaattgagcgcgatttttgac

SEQ ID NO: 85062 - DNA, 424 bp, Homo sapiens
gtgctggctcactgcaacctccggccacggcaacagagtgagacttaagggaaccctttccccacccccattcacctgactcctcaactgcaccctacactgtcacatcccacctctccgtgtctcctcgatctaacctctaatagctgggcaccccacctctccttttaataacccctccaccgcccataacaaaaacagaaagaccaagacttccagactggactccaggccaacaggctgttagccggcggttggcacttagttgccctatacccattttgagcttcagatattcaaggcatggctctgcacagccaacagatttgcctcccctcagtgctcaacatcaccaccctctacatgtgcaaagcacacacagaaatcatcctggcctccttcctttccctactcccctacaccc

SEQ ID NO: 85063 - DNA, 482 bp, Homo sapiens
gtttctattccgccttccttgtagcagataagggtattgtcacttcaaaacacaacaacgatacccagcacatctgggagtctgactccaatgaattttctgtaattgctgacccaagaggaaacactctaggacggggaacgacaattacgtgagtatgaccaattccttataagaattaatagtcatggtgaggatcttgactctccagttctattctctgagcaaatgacttattctgggccttaattttcctgccttataaaatgaggaaacagaactgttgtcacttgaagaaatgtttgaggacctgcaaagggccaggcacaaaggtttgtgattgctgttgtacatggagggtataaagtaggaaatagcagcagcttccccaagggagaaggcttcttgggtacccacagaggaggcactgctttgtcagtttcccaggttagaagagtaatttgtctgtggagcatcctgat

SEQ ID NO: 85064 - DNA, 1073 bp, Homo sapiens; identical to SEQ ID NO: 70412

SEQ ID NO: 85065 - DNA, 438 bp, Homo sapiens
caaaaatttctcccctcaacacaaaaggcccgcgctacaaataaagaattagaagagacccctgtggggtggggtccattcctgttgaatagccacatgtcaatcacccagcatgaatatccacactggctttcatcagtctttacaaaggaatgaggggcatttcgtccagatgcatggcacagccccaccacctgcccaacaccaggaccccaggcctcgtcatcctgaccccagccctgctcctgacctctgacctcaaggaaaagacagaccccaccaagggcctgtcgcactgggccttcatgccagggcaccagggcccgcgggaggacaactgaggtgtccctgagtgtcgctcagcccccccacaaccccgcccccaggaggccagcggacgcgtgggtcgacccggacatccgacgggtactcacgctc

SEQ ID NO: 85066 - DNA, 37 bp, Homo sapiens
cccccccgggttttaattgccccccccaaaaaaaaaa

SEQ ID NO: 85067 - DNA, 226 bp, Homo sapiens
cggccgcgtcgacattttattgaaatacaaataaatacatttgtgaaatgttctaatgagttttctactaaaacaacacgcagaaatgactcaagaaaagttgagtgccaatattattgtgattaacatgtgcctcagaaatggatgctctgctaagaattaaaaaaaagggggggggcggtgtcatgtttaaattcctaccttggaaaagagatgtcgaaagcac

SEQ ID NO: 85068 - DNA, 347 bp, Homo sapiens
cccaccaacaacatagcccaagccacccaggggtgtgggggaaaggccatgctgcacccccaaaccccactccagcaaacacacttttgggggctactttctggggcacccagagctgtcatgagattataatccaggcaatgaaatcagactacagagcagaagtggaggggggtcctcttatatcaaggcaagtgaatcagaaggagagccgtagaagaaacatgagagtcataagggaagaaccacagcatgcttcagattatccaggagtaaatccggcttctcccaggaccatgaccaaataccaaaaccaggaaaaatcaatgcaggcttataggttcact

SEQ ID NO: 85069 - DNA, 318 bp, Homo sapiens
gcccacacacgagtccacggatgcatcccggctcaagaacctagctaaacgcggatatcaatcacatcaaagatgatgccaggcatataagctttgatgataggcagcttaggctagatggtaagtatttgtgaaaaatggcttgaacatttaacgaaccgagcatgttattttatttttaggtgaaaaccatgaaattcagctctgtcaagaaatataccatttacttttctatctcaaattttacatgaaaggccttaatatctaagtagactaaaatgtgtgtttgtgtttcataaatggagcctgaacttaaaa

SEQ ID NO: 85070 - DNA, 354 bp, Homo sapiens
ccgtttaaagtttggaaagaaaaaggccccaagaaaaaaaataattcatatagatagctaaacagacagataatatatggcccacccccggaagcttcttattaattctgtaatatgctaaatacataaagtataaaactttgcttttccacttttactttcagaactcattttcggaaataatcctcagtgttttctcacacagaagttgatcttttcctatcaaccaaaatgatgaagtattataactatgccttcaaatcaaagtctgtaacacaaataagactccaaatctacttctgctagcgtttctgaatctttccacttttaacctagactacaaataatttaaag

SEQ ID NO: 85071 - DNA, 344 bp, Homo sapiens
aacttgaattctcatggcctccaacttaagcatgaaataagcaggctaaatttaaaataattataagcaatcttctattttggaagcagaacaaatattttttagaatatattaatttagatattacacgtatctctagaaagcattggaacatgtgtttcctcataactatgattaaacttggcctcttctctaagttgtgaatgcaaaactagcatgttaaaatagaatttgatttagtttacaaaaagcaatattgtgaattttacagacaatccatattttccctagggaaatgattgattcattttttacagagaagtttattccttatatgtttttaa

SEQ ID NO: 85072 - DNA, 379 bp, Homo sapiens
aaaagcaccaagtattctctactgctaagagacgtttaacatcaactaatagtgacttggttattggggctaatgttgaacggaacaagatgctgaaaacaccattcagcatatgggtgcccagtggcttgctggaagacaaattagaactaactgctcaacccgaaagcctcccattccacagagtccatatgagtgtaaggggattggagaagaaaaggaaatgtgaaatataggagactagtacgctatattttaaacggtaaacctgtgcccgaagacttattgcttaatactgtgagaatcgtgtccatactactattcataagtgtacttagtttgcattattgtggtataaataatatgattgctaatgtcg

SEQ ID NO: 85073 - DNA, 750 bp, Homo sapiens
cggccgcgtcgacttcttccatactgactatcgaccacttattagagattctaataattatgtcttagatgagcaaactcagcaggctcctcatcttatgcctccaccattcttggtagatgtagatggaaatcctcatccaaccaagtatcagagattagtaccaggccgagaaaattctgcagatgaacatttgattccacagctgggctatgtggcaacaagtgatggagaggtgattgaacaaattataagcctgcaaaccaatgataatgatgaacgcagcccagaatcgagtattcttgatggaatgataagacagttgcagcagcagcaagatcagagaatgggagcagatcaggatactattccaagaggactttcaaatggtgaagaaacaccccggagaggttttagaaggctgagcttagacattcagtcccctccaaatattggtctgcgtcgtagtggacaagttgaaggtgttcgtcagatgcatcaaaacgctccacgcagtcagattgctacagaacgtgacctgcaggcttggaaacgaagagtggttgtaccagaggtaccactaggcatatttaggaagctggaagacttccgattagagaaaggtgaagaggaaagaaatctttatataataggaagaaaaagaaagactcttcagctctcacataagtcggattcagtgggtttggtatcacagtctagaccaaggacatgtaggcgtaaatatccgaa

SEQ ID NO: 85074 - DNA, 119 bp, Homo sapiens
gcccccaaaaaagggggttttttccacacccaaaattttgttgtacccccggtttttttcccccccccttttttaaaaaaccccccccggatttttttttttgggccccaaaaaaaaaa

SEQ ID NO: 85075 - DNA, 383 bp, Homo sapiens
atgaaacattcatgagtaatactgcatttgatcctcaacaactctaacaacagtatgtcatcattctcactgaggaggcaaggaggttggaaagcttcagaaggaaagtacacattttgctttaaaaaagtcattgtagtgatggcattacggatgatactcattttcttctttatacttttctatattttaaacattggtaagaacgtcaaaaagacatatttgaactcagccaatcttataaatacaaatcagtacactatctcaagtttgttaatttcaagagcagtaggagaaaacaacagataacatatgttatatatctcatcctatccctcaattcaagattccagaggaattcctgcattttgctattgtattgg

SEQ ID NO: 85076 - DNA, 318 bp, Homo sapiens
ggcacgagcagcgaatgggcgagctctttgaatgtgtgctgttcaggggtagcctcgccaagtacgcagacccagtagctgacctgctggacaaatggggggccttacgggcccggatgttttcatggacgattgcgtcccctccggtggctgccccactctgctatagtactactgctcgctgggcgcatcggcaacgccaagctgcgcagcatcacggtgcgaaagctagacaagatgtatctcagcgacaagaacgcgtgatgaccctctatccttagtggtcacttgatgtcggatatggttgcacaagctgcg

SEQ ID NO: 85077 - DNA, 346 bp, Homo sapiens
ggcacgagactggaagggagacagggagatggggaagggacatagggtgtgtgtatgtgtgaggtagccctgaccacggtctctactatccccccacttctgtgcagtctaactacctctcgaacttgtcctttgcatccaacttacgacttggacaactgttattgcagataccgcacctgccttcaccctgaatattcctctccacctcacaacctcatacctttccttcgaacacttccctgtccccccttcaccaacattcaacgtatggcccaatcccacctttctgccacacctctttaccactttgacctttttccctccctgtctccacacacccccg

SEQ ID NO: 85078 - DNA, 344 bp, Homo sapiens; identical to SEQ ID NO: 66370
  misc_feature (1)...(344): n = a,t,c or g

SEQ ID NO: 85079 - DNA, 810 bp, Homo sapiens
ggaacttttagagacgaaaaacataacaggtgaaaaaatatgctgcatggtattcacaggtgattttaaaagatcagcaaacttaaagatacagcaatagaaactttccaaaatggagtacagaaggaaaaaaagactagggaaaaacaatacaaatacaaaccacaatgcaaaataaatacaaaacagtacaaaaacaatacaaaacaataccaaaaaacaaaaaggccatggaaatgcaaattaaaaaacagtttcaggacacttgcaaagtacagaccaaacagtataaagcactcaagaatcaccagttggaagttactccaaagaatgagcacaaaacaatcttaaagacactgaaagatgagcagacaagaaaacttgccattttggcagagcagtatgaacagagtataaatgaaatgatggcctctcaagcgttacggctagatgaggctcaagaagcagaatgccaggccttgaggctacagctccagcaggaaatggagctgctcaacgcctaccagagcaaaatcaagatgcaaacagaggcacaacatgaacgtgagctccagaagctagagcagagagtgtctctgcgcagagcacaccttgagcagaagattgaagaggagctggctgcccttcagaaggaacgcagcgagagaataaagaacctattggaaaggcaagagcgagagattgaaacttttgacatggagagcctcagaatgggatttgggaatttggttacattagattttcctaaggaggactacagatgagattaaattttttgccatttacaaa

SEQ ID NO: 85080 - DNA, 398 bp, Homo sapiens
caaataagaaaattatgctcttaaaattttttgtttatttgtttagtgcctagtctgtgcagggtactgaagcaggcatggctggagataaaaaggatataatcagttatggacaaagcgctcaagacctaatggtgtttttgaggagcaagatactggtatgaggtagaaaatggtacaggcctacatgccataagggaggtatgggagtgggtataagaagtgtggggagtggggagtcagggattcctttgtggaggaaagggctgggggatggtgaggattttagactggacattttaggtagagttaacagcatgagcaaaaaagttcagaggccaagagagcacagggtgtgtgggaattgagtttggcttgagcgtaggtcgacgcggccg

SEQ ID NO: 85081 - DNA, 322 bp, Homo sapiens
cacacacaaagtgcggccccgttattgttcctgaggaacatctccagcaatgccgggtctaccgtgggggtaagtggcctcatggagcagtgggtgtgccagaccaagaaggcatctcagatgcagactttgttctttacgttggtgctctggccaccgagagatgcagccatgaaaacatcatctcttatgcagcctattgtcagcaggaagcaaacatggacaggccaatagcaggatatgctaacctgtgtccaaatatgatctctacccagcctcaggagtttgttgggatgctgtccacagtgaaacatgaggttat

SEQ ID NO: 85082 - DNA, 312 bp, Homo sapiens
gttatgtgtattgtttatttctctactactccctttctcccatgaaacgcaagtatagcctgctacaggagcatgcaagaatggaagcaggagagattcaaagaaggttttctagaggagagaatgcctacacgaaagatgagtatgagtaactaggcaaagaaagagacctctgtaaaatgtaatgttttattacagatttacagagtaaatttgtggccaaagaaaatgaagtacagagtctgcatagtaagcttacagataccttggtatcaaaacaacagttggagcaaagactaatgcagttaatgt

SEQ ID NO: 85083 - DNA, 381 bp, Homo sapiens
gccaaatgaactggggtgaactgcctttctgctcatgcctgtagggggcagcatatggggctggctcagagcaggagcacggtaagtgggaaccatggttatcccgggcctccacttccccacccaacctggcctctcttgcccaggtccctcccacccccacactgaccggtcccggctgtgcacagcggcgtgccgaatgacgttcttccggtagacactggtgtagctgcactcgtcacacttgtagggcttgctgcccacgtggttgaacatgtgctccttgagcgaggaccagcggcgggaacgatagctgcactgcaggcacttgaagagctggggatcgccagcctcatgggagttgacgtggaagcgcaggtt

SEQ ID NO: 85084 - DNA, 374 bp, Homo sapiens
  misc_feature (1)...(374): n = a,t,c or g
ggcacgaggctcgtagacaatttgaattttatctggaagaaatgatcctccctctcatggtagctagtgcccagagtggggaacgggaatgtcatatagtggtgcttacagatgatgatgtggntgattgggaagaanattatttttntgatttaagatattgttggttttaatttattgataatggatattatagatatattatttagtagggttagttttttattttttaatagatatggggattaagggatggaaatagattggtttgttatgtttgtattttagtttatttgggtttatttttagaaatgttgttgttaatattatgtagtgtatgggggatagtgatttatttaattttttgtgggtgg

SEQ ID NO: 85085 - DNA, 339 bp, Homo sapiens
ggcacgagattggcttggcatatataaatcacctggtggagagaggagactatgacatagcagggcgcaaatgccagaaaattcttgggaaaaatgcagcactctgggaatatgaagcttataaatttaacgatattggacagcttaaggctattagtccttatttgccaagatgtgatccagcttatggtctattcctttattatatgattttacttgaacttttgccgggttttatcatgcttatactccattctttctgtgacatattctgataacgtctaccatcgcattcttgtccttcctgttaggttccgtttatatttgcaatactagccc

SEQ ID NO: 85086 - DNA, 354 bp, Homo sapiens
ggcacgagggaagggcataggttacagctcagggcttcccaggcatcagtgtttccacataggagagaaatgctataggaatggtgacagtggtgagggcttcagtcagggctcacatctgcaacctcatcagagagtcagcacaggagagaacctctacagatgtcaggtatatgcccggagctccaaccagaactcctgtcttccctctcatgagcttactcacccaggagagaagttgtgtacatgtggcaggtgtgggaagggcttccatcatagcttagattttgacattcactgtgtagacagtgctggagagagagcctgtaaatgtgatgtatatgataaaggctg

SEQ ID NO: 85087 - DNA, 367 bp, Homo sapiens
ggcacgagcattggccttagcggctgtatcatgtctcatgacagacgcgcactggcaataatcaagggtgggcgatgatatcatgacgatcctgtactgcatcgatacagccactgatggaatgcttcctttcttatgactgcccttacttcatttctgaagttctcagaaggaagcttgaactctacgggctaattgtactgacagccgtgacatgcccatattgcgacttttatttcatgattaatggctcataccttcagcggcatatttgggctcatgaaggtgtgaagcccttcaagtgttctttgtgtgagtatgcaactcgtagcaagagtaacctcaaggctcatatgaatcgtcacac

SEQ ID NO: 85088 - DNA, 361 bp, Homo sapiens
ggcacgagctacaggcacatcttaaagttcacacagcactggacaaaaggagttattcttgtcctgtttgtgaaaagtctttttcagaggatcgattgataaagtcacatatcaagaccaaccatcctgaggtctccatgagcaccatttctgaggttctcgggaggagggttcagctgaaagggctaattggaaagagagccatgaaatgcccatattgtgacttttatttcatgaagaatggctcagaccttcagcgtcatatttgggctcatgaaggtgtgaagcccttcaagtgttctttgtgtgagtatgcaactcgtagcaagagtaacctcaaggctcatatgaatcgtcacag

SEQ ID NO: 85089 - DNA, 367 bp, Homo sapiens
  misc_feature (1)...(367): n = a,t,c or g
ggcacgagaattgaactgtttagatttgcattaaagcttcacttttttttcttcttcatctaggggctcttggccagctgggagtggggcttgctaatcttttgaggaaacgatttggaaaggacagtgtgattttgtctgacataaggaaaccccccgatcatgtctttcacagtggtccattcatttattctgatatcttggattacaagaatcttcgggagatcgtggtaaacaaccgcatcacctggctgtttcattacagcgctttgctcagcgcctttggagaagcaaatgtttccctggcgagagcagtgaatataactggcctgcataacatcctggatgtcgctgcggaacacaatcn

SEQ ID NO: 85090 - DNA, 418 bp, Homo sapiens
tgcagtgaatgtgggaaatccttctgtaaaaagtcaaaatttattatacatcagaggactcacacaggagagaaaccttacgaatgtaatcagtgtgggaaatccttctgccagaagggaacccttactgtgcatcagagaacacacacaggggagaagccctatgaatgtaatgaatgtgggaagaacttttaccagaagttacacctcattcagcatcagagaactcactcaggagagaagccctatgaatgtagttattgtggaaaatccttttgccagaagacacacctcacacaacatcagagaacacattcaggagagagaccttatgtttgtcatgactgtgggaaaaccttctcgcagaagtcagcacttaatgaccatcagaaaattcacacaggtgtgaaactctaca

SEQ ID NO: 85091 - DNA, 378 bp, Homo sapiens
cccacgcgtccgagaatatcatcatctgcctccctacagggagtggaaaaaccagagtggctgtttacattgccaaggatcacttagacaagaagaaaaaagcatctgagcctggaaaagttatagttcttgtcaataaggtactgctagttgaacagctcttccgcaaggagttccaaccatttttgaagaaatggtatcgtgttattggattaagtggtgatacccaactgaaaatatcatttccagaagttgtcaagtcctgtgatattattatcaggacagctcaaatccttgaaaactccctcttaaacttggaaaatggagaagatgctggtgttcaattgtcagacttttccctcattatcattgatgaat

SEQ ID NO: 85092 - DNA, 341 bp, Homo sapiens
ctgttccaaaggtttactggttcaaagatgggaagcagatttctaagagaaatgagcactgcaaaatgaggcgagaaggagatgggacatgctctctgcacattgaatccactaccagtgatgacgatggcaactacaccatcatggcagccaacccccaggggagaatcagctgttctggccacttgatggtacaaagtttgcccattcgcagtcggctaacctctgctggtcagtctcacaggggaagatcccgagtgcaagaaagagacaaagagcccctacaggaacgctttttccgaccacatttcctgcaggctcctggggatatggcagctcag

SEQ ID NO: 85093 - DNA, 96 bp, Homo sapiens
ttttttttttggaaatttttttaaaaaaaaattttcccaaaaaaaaaaaaaaaaaaaaaaaaagccccccaacattttttggggaggggtttttaa

SEQ ID NO: 85094 - DNA, 377 bp, Homo sapiens
ccttgtaagactcttggacacacagagggatgggcttcagaactatgaggctctcctaggcctcaccaacctgtctgggcggagtgacaaactccggcagaagatctttaaggagagggccttgccagacatcgagaactacatgtttgagaatcatgatcagctgcggcaggcggccaccgagtgcatgtgcaacatggtgctccacaaggaggtacaggaaaggttcttggctgacgggaatgaccggctgaagctggtggtgctgctctgcggggaggatgatgataaggtgcagaatgcggctgcaggggctctggccatgctgacagcagcacacaagaaactgtgcctcaagatgactcaagtgacaaccc

SEQ ID NO: 85095 - DNA, 310 bp, Homo sapiens
ccccagctgtctgacctgcgttggccactgcagcattggcggatcctgtaccatgatcggcataatgatgcctgagtgccactgctcactccacatgacagggccccggtgcgaggagcacgtcttcatcctacagcagccaggacatatagcctccatcctaatccctctgctggtgctgctgctgctggctctggtggccggagtggtattctggcataagcggcgagtccaaggggctaagggcttccagcaccaacggatgaccaacggggccatgaacgtggagattggaaaccccacctacaag

SEQ ID NO: 85096 - DNA, 328 bp, Homo sapiens
gcaaaccaaagcctaaggtttcctggttcaaagatgaagctgatgtgctggaagatgatggcactcatataaagactacaccagcaacacttgctttagagaagatcaaggccaaacgttcagattccggcaaatactgtgtggttgtggagaacagtacaggctctacgaaaggtttttgtcatgcaaatgactgcttcgtactcctttaagtctagcgtaacctgtctgtacagagtatgccgctctagtccctctctcttctcttctatttttctctatctactaactgtcgcgctcttttattctcctcatgcgctctccaccg

SEQ ID NO: 85097 - DNA, 329 bp, Homo sapiens
ataaatttgaaaatcagtccttagattctataagttctagttcagaggaagttttgaaaaagatcaaaaccttaaaaactgaagatattcagaaaggcaatgttttaaattgtaggtggctttttgaaaaccaaccaattgataagataaaagaaagccaagaaggtgatgaatgtgttaagacggtgacagacatacaaggtggggatgtaataaaggggtgctttaattctgtgtcttattctttaactgtctgtagtcctcttatctctcatttactaaactctctatctagttagttaagttacttaactattgattaacatagt

SEQ ID NO: 85098 - DNA, 402 bp, Homo sapiens
gtgccttatcgcttgcatgcagttcttgttcatgaaggacaagcaaatgctggacactattgggcctatatctataatcaaccccgacagagctggctcaagtacaatgacatctctgttactgaatcttcctgggaagaagttgaaagagattcctatggaggcctgagaaatgttagtgcttactgtctgatgtacattaatgacaaactaccctacttcaatgcagaggcagccccaactgaatcagatcaaatgtcagaagtggaagccctatctgtggaactcaagcattacattcaggaggataactggcggtttgagcaggaagtagaggagtgggaagaagagcagtcttgcaaaatccctcaaatggagtcctccaccaactcctcatcacag

SEQ ID NO: 85099 - DNA, 307 bp, Homo sapiens
ctgaactaaggagtcggttgaacagaatacattcagagtctattatttgtgatcaggttgtgggtgtaaatattattcctagccctgatgaggctggtgagcaaatccatgtcagtctccccttatcacagcaagtagccaatgagagccgcctctccatgtcagagtctgtttctgagttctttgatgcccaagaggtgctcctctctgcaagttcgtcagagaatgaggcttcagatgatgagtcttacatcagtgatgtgagtgataatatatctgaagacaacaccagtgttgcagacaatag

SEQ ID NO: 85100 - DNA, 324 bp, Homo sapiens
gcgtaccagagcttgcggctggagtacctgcagatcccaccggtcagccgcgcctacacgactgcctgcgtcctcaccagcgccgccgtgcagttggaattgatcacaccttttcagttgtacttcattcctgaattaatctttaaacactttcaaatatggagattaatcaccaacttcttattttttgtgccatttggatttaatttcttactatacatgatttttctatatacttaatttctatagcctattcatctgtttatcttatcttttgttctatatctatatatattttctgcttgtttttttactattctcatc

SEQ ID NO: 85101 - DNA, 612 bp, Homo sapiens
cccacgcgtccgagcaaagttacgtcagatatttgctgaagccactctacgacacccatcaattatttttattgatgagctggatgcactttgtccgaaaagagagggggcccagaatgaagtggaaaaaagagttgtggcttcactcttaacactgatggatggcattggttcagaagtaagtgaaggacaagtgttggttcttggggccacaaatcgccctcatgccttggatgctgctcttcgaagacctgggcgatttgataaagagattgagattggagttcccaatgctcaggaccggctagatattctccagaaactgcttcgaagggtaccccatttgctcactgaggctgagctgctgcagctggcaaatagtgctcatggatacgttggagcagacttgaaagtcttgtgtaatgaagcaggtgagtgtggtttgctatggtgagtctctattgatgcacttatctccagtttacttacatacaaataatttatattttacagatttcttaatggaagtagctttgtttctaattataaaatgtgtaatttttatttgaaaaaatttttattggaaaaacctagatgattcagaagactata

SEQ ID NO: 85102 - DNA, 377 bp, Homo sapiens
ttctgcttatatggaaatattgagaagcgtgtctaaacaacattcagttgttccaagtcaaatatttgagctggaggatgggaccagcagctacaaagattttgggatgagcacaaataatcgctttacaagtgctggccaagcatctaagaatataatccagccaccctcctgtgaattgcagtattataatgttccattgtatgacacagaagacaccttctcaaagtcgagtaatgaccatgtagctttgagtagattctaccatactacgtatcggtaactcatttagctacactaattctatgatataatatctgctacttctatacgattcgactattcttatcactctaggctactcctactatcttatg

SEQ ID NO: 85103 - DNA, 377 bp, Homo sapiens
  misc_feature (1)...(377): n = a,t,c or g
cggacgcgtgggggcttcttaacggttctcattcaaggatcaactcatgctgggggattccacaatgtattagagcgatcaacaaatggatctcgactacatatatttgactttgatgtagatcctctcaggcgacacactttttggactatcacagtgggaggaacttttacttggctcggaatctatggggtcaatcaatcaactattcagcgatgcatctcttgcaaaacagaaaagcatgctaagcttgccttgtattttaacttgctgggtctctggatcattctggtgtgtgctgtcttctctggcttaatcatgtactctcactttaaagactgtgacccttggacttctggcatcatctcagcaccaan

SEQ ID NO: 85104 - DNA, 410 bp, Homo sapiens
tcgaacaggagactgactcatgtgtatcaatggaagcactatctgcatattaggtaggatagttctgtttgggactgcagcgggggtcacttttggggccactaggcactacaggccagcaggaataccatgtggcatgtactaagaataggccttgattgccaaacacacccatgaatgatgcccctactcaaggtcccatccctttccattgaccagctatattctatgaactaccagtgatgggattcaaatgccatttactgagtcactgtcctttttaccccaagcgtatgctatgatgctgtcactgtctgacaaggagtccctacattctacatcccacagctcttacaacgtgtggcacattatggacagggctgcagcggaatccagtgctatccaatccg

SEQ ID NO: 85105 - DNA, 368 bp, Homo sapiens
  misc_feature (1)...(368): n = a,t,c or g
ctgtgctaattattattattttttaatccaatcagagaccttgttatatgtgggaataaggcactaaccagtgggtcgggggctctccaaaaacccttcccttgctgtttacctgaggcaagctagctaactcctctcacttcttgttccaacacctttttattcttctcaaattctttacatttctgttgtatcgttttcatagataataattcctgttgaagaacttgattgttttcagccagatacagacattttgaagatgcaccttccagttctgctataagattatcagtcttatgttttatctttttaatctgaatatccatttcaagttgactggtttttaaatatccgtggaatctaan

SEQ ID NO: 85106 - DNA, 389 bp, Homo sapiens
cggacgcgtgggctgccgcaggactttcctggtccgtctcgcggagagcgtagcgcggccttggtggcggaatggcgttgagtgactgcccggtcccggcatctggttaatgggactcgttcaacacggaattgtcccggtgctgaattggaatgtaaccaatttacctacaagtttgccgaagaaatccgaaggcactctttcggggcattaacgcccggatatgacttcatggtccgactaatacgtgctatggagtcaattcttcctcccagcgctcacgagctggacctaaaacgactgtacgtattcatcaccaacgccgaaaccagagaacatcacttagtctacactttttcctccagggaggacctcattacaggccatct

SEQ ID NO: 85107 - DNA, 354 bp, Homo sapiens
cgagatggtggaggggggtgaagggaagatgtgcatcaatacagagtggggaggatttggagacaatggctgcatagatgacatccggacccgatacgacacggaggtggatgaggggtccttgaatcctggcaagcagagatacgagaaaatgaccagtgggatgtacttgggggagattgtgcggcagatcctgatcgacctgaccaagcagggtctcctcttccgagggcagatttcagagcgtctccggaccaggggcatcttcgaaaccaagttcctgtcccagatcgaaagcgatcggctggcccttctccaggtcaggaggattctgcagcagctgggcctggacag

SEQ ID NO: 85108 - DNA, 413 bp, Homo sapiens
taccgagatagcaaaaattaaaatggaagcaaaaaaaaagtatgaaaaggagttaaccatgttccagaatgattttgaaaaagcttgtcaagcaaaatctgaagctctcgttcttcgggaaaagagtacccttgaaagaattcacaagcaccaagagattgaaacaaaagaaatttatgctcaaaggcaacttttactaaaagatatggatttgctaagaggaagagaagcagagctgaagcaaagagttgaagcttttgaatcgtatcaacttgaactgaaggatgactacatcattagaacctatcgactgattgaagacgataggatcaatatacaaatatctggtcattggcaagagagcccatagctattactcaaataaggaggacctctatcattctggacatcgg

SEQ ID NO: 85109 - DNA, 83 bp, Homo sapiens
ttttttttttgggccccaaaaattaatttccggggcccgtttttaacacccccgggggggggaaaccccggggccccccccct

SEQ ID NO: 85110 - DNA, 342 bp, Homo sapiens
atcaccctggggagcatgaagtcggtgagcccgagttccactacatcgcgggggcccacggcaatgaggtgctgggccgggagctgctgctgctgctggtgcagttcgtgtgtcaggagtacttggcccggaatgcgcgcatcgtccacctggtggaggagacgcggattcacgtcctcccctccctcaaccccgatggctacgagaaggcctacgaagggggctcggagctgggaggctggtccctgggacgctggacccacgatggaattgacatcaacaacaactttcctgatttaaacacgctgctctgggaggcagaggatcgactgaatgtcccct

SEQ ID NO: 85111 - DNA, 1822 bp, Homo sapiens
gatgaacctgtgtggcctcatgcccatcttccccgctcccctcgaccaggtggctgacatggaggagctgaccatctgggaacagcacacggccacactgtccaaggacccccgccggggctttggcattgcgatctctggaggccgagaccggcccggtggatccatggttgtatctgacgtggtacctggagggccggcggagggcaggctacagacaggcgaccacatcgtcatggtgaacggggtttccatggagaatgccacctccgcgtttgccattcagatactcaagacctgcaccaagatggccaacatcacagtgaaacgtccccggaggatccacctgcccgccaccaaagccagcccctccagcccagggcgccaggactcggatgaagacgatgggccccagcgggtggaggaggtggaccagggccggggctatgacggcgactcatccagtggctccggccgctcctgggacgagcgctcccgccggccgaggcctggtcgccggggccgggccggcagccatgggcgtaggagcccaggtggtggctctgaggccaacgggctggccctggtgtccggctttaagcggctgccacggcaggacgtgcagatgaagcctgtgaagtcagtgctggtgaagaggagagacagcgaagagtttggcgtcaagctgggcagtcagatcttcatcaagcacattacagattcgggcctggctgcccggcaccgtgggctgcaggaaggagatctcattctacagatcaacggggtgtctagccagaacctgtcactgaacgacacccggcgactgattgagaagtcagaagggaagctaagcctgctggtgctgagagatcgtgggcagttcctggtgaacattccgcctgctgtcagtgacagcgacagctcgccattggaggaaggcgtgaccatggctgatgagatgtcctctccccctgcagacatctcggacctcgcctcggagctatcgcaggcaccaccatcccacatcccaccaccaccccggcatgctcagcggagccccgaggccagccagaccgactctcccgtattatgaaagcttgggagaccgcatttcccagacacctccacggggcctacacttccacggggcctacaactcccaaacacccttgggccactgacgtcttccggaaacgtgcacttgcaagctgcccgcaatacgtcatggcgaccaaacgccttttcggggctacccggacgtgggccggctggggggcctgggagctcctaaaccccgccacttccggaagactcctggcccgggattatgccaagaaaccagttatgaagggggccaaatcgggaaaaggtgcagtgaccagcgaggccctcaaggaccccgacgtatgcacagatcctgtccagctcaccacatatgccatgggcgtcaacatctacaaggaagggcaggatgtacccctgaaaccggatgctgagtaccctgaatggctgttcgagatgaacttgggtcccccaaagaccctggaggagctggaccccgagagccgggagtactggcggcggctgcggaaacagaacatctggcgccacaaccggctgagcaagaacaagaggttgtagcatggagggcccggcatcgctgacccccacgccgagggcttgccgttttcccggaggacgtggacttttgtgagacaagaggcggctccccagcctgggtttccatgtgaccccacagtggggctggaccagggccctggaggccaataaagagctttctgggtagaccctaaaaaaaaaa

SEQ ID NO: 85112 - DNA, 374 bp, Homo sapiens
agaaaacctacaaatgcgagcagtgtcggatggcgtttaatgggttcgcaagcttcactagacatgtgagaactcacacaaaagacaggccatataaatgtcaggaatgtgggagagccttcatttatccctcgacatttcaaagacacatgacaacacacactggagagaagccctataaatgtcagcactgtgggaaagccttcacttacccccaggcttttcaaagacatgagaagacgcacacgggagagaagccctatgaatgcaagcagtgtgggaaaacattcagttggtctgaaaccttgcgagtccacatgaggatccacactggggacaaactctataaatgtgaacactgtgggaaggctttt

SEQ ID NO: 85113 - DNA, 338 bp, Homo sapiens
tgacaaatgtgagaaggtatttccttctatatccaaactaaaaagacactatttaattcatactggacagaggccctttggctgtaatatttgtgggaaatcttttagacagtcagctcacttaaaaagacatgaacagactcataatgaaaagagtccttatgcatctctttgccaagtagaatttggaaacttcaacaatctttctaatcattcaggtaataatgttaactataatgcttcccaacaatgtcaggctcctggtgttcaaaaatacgaggtctcagagtcagatcaaatgtcaggagttaaggcagagtcacaggattttattcctg

SEQ ID NO: 85114 - DNA, 411 bp, Homo sapiens
gtcacgaggaagcttcctattttcatagtagatgcattcacagcaagagcatttcgtgggagtcctgctgctgattgcctcctagaaaatgaattggatgaagacatgcatcagaaaattgcaagggagatgaacctctctgaaactgcttttatccgaaaactgcacccgacagacaactttgcacaaagatcctgctttggactgatatggtttacaccaacgaccgatttacaaatcttgacatcatccatactaccttcaatactctaaccttatttactacatatccctaatacatcattctacctttctacataaccaactccttactctttatctctattaatattccacatacctcatcataaatcttccttctatactccttatacactcctacacattcct

SEQ ID NO: 85115 - DNA, 652 bp, Homo sapiens
  misc_feature (1)...(652): n = a,t,c or g
ttttttttttttgtggggggacttcaggaataatttattcaatgctaaataaggggaggagtggcaagtctaaaatacataccctctatgtacattctaatcttgttcattctctacaggtacaacaatatacacattcactcacccaactcaccatttcctggcagctaaaatgacaggatcttctctacaacttatccccacccccatcagtcatacccaccttctggaagtcagatccttcaggtgattgcctactggccacaagggcacccatcatttccgtggcctctgtggtttctatccctgcctttctgggggcagaaatgtctgctgcagttcctccttttggaaatctgaagacttttggaattgcccctgtgtgtgcttcttattgtgcatatgagtgaagaaatcaaacatggtcccacagatggtgttgcagtctttgcaccagtgattgccagcatcataatactcataagcagcagtgggctgatccaactgcttagtggctgactgggggctttcggcaggcttggggctcttagtacgaaacttctcattgtttacttttgattcctagaggggnaaaatctgtacttacaaggaattcaaggcaatctagacttgtcttctgttagaaatagta

SEQ ID NO: 85116 - DNA, 493 bp, Homo sapiens
  misc_feature (1)...(493): n = a,t,c or g
agatgccnttattgactgtggcctgagcaccggcccgtaanncttggggcgacccacgcgtccgctaggtgatagactattaccaattcatggactcttaccattaaacctgggcgagccagtgcactttgtgagggaggagagggactaggaagggagaaggtgaggtggaaacaatgtggattgctggctcctgcctcagcttttgccaccccaccaaaaaaaccaggatttctatgacacagatttcctctactcaatgatttcttatccctcttcaggagaccactgggatactacagacccagctccaggaggctcaacgggagctgaaggatgcagcccggcagcacagagatgaccttgctgccctccaagaagagagcagctctctgctgcaggataagatggacctgcagaagcaggtcccctcctcctccccaccaagacccatggtccttccacaacacaggcaggctttaccactttctct

SEQ ID NO: 85117 - DNA, 466 bp, Homo sapiens
  misc_feature (1)...(466): n = a,t,c or g
aaagaactcatactggggagaaaccctatgaatgtaataaatgtggtaaaaccttcagttcttccagtaatgttcgaacacatgaaaggactcacactggagagaagccctatgaatgtaaggaatgcgggaaagccttcatttctctcccaagtgtccgaagacacatgataaagcacactggagatggaccttataaatgtcaggtatgtggtagagcctttgactgtcccagttcatttcaaatacacgaaagaactcacactggagagaaaccctatgaatgtcaggtatgtgggaaagccttcatttctcttaaaaggattagaaaacatatgatactgcacactggagatggaccttataaatgtcaggtatgtggtaaagcctttgactgtcctaggtctgtccgaacacatganagaactcatactggagaanaaccctatgaatgtaaagaatgtgg

SEQ ID NO: 85118 - DNA, 423 bp, Homo sapiens
actacgcataggctgaacgtgactgcggaaccgccatgcacttccatgcctatttactggatgcctgatgtgccgcacaggtgcacgactgctaatacatgcccagtggacctgactgactactgtgctcagaacggcttctactgcctggtgtacggattcctgccctacggctccctggaggaccgtctccactgccagacccaggcctgcccacctctctcctggcctcagcgactggacattcttctgggtacagcccgggcaattcagtttctacatcaggacagccccagcctcatccatggagacatcaagagttccaacgtgcttctggatgagaggctgacacccaagctgggagactttggcctggcccggttcagccgctttgccgggtccagccccatccagagcagcatg

SEQ ID NO: 85119 - DNA, 539 bp, Homo sapiens
gggtcgacgatttcgtgccgagcaggagaggttgagttgcggtgaaggcggctgcgtcgcggagctgcagcgcctgggcgagcggctccaggagctggagctacagctgcgggagagccgggtaccggccgtggaagcggccaccgactactgtcagcagctgtgccagacactcctagaatatgcagagaaatggaaaacttcagaagatcctttacctttattggaggtatacacagtggctatccaaagttatgttaaagcccgaccttatcttacctctgaatgtgaaaatgtagccttggttctggaacgcttggcattaagctgtgttgaacttttactgtgtctgcctgttgagttatcagataaacagtgggaacaatttcagacactggtgcaggtagctcatgaaaagctgatggagaatggcagctgtgaattgcattttttagctactctagctcaagagactggggtgtggaaaaacccggtactgtgcactattctttcccaggaaccattggataaggataaag

SEQ ID NO: 85120 - DNA, 673 bp, Homo sapiens
ggcatatatattcagcattgatgaaaaagaactaaatatcttacatgaaatgaaaggtaaaaagcttggatcgtactttggagcttctgtctgtgctgtggacctcaatgcagatggcttctcagatctgctcgtgggagcacccatgcagagcaccatcatagaggaaggaagagtgtttgtgtacatcaactctggctcgggagcagtaatgaatgcaatggaaacaaacctcgttggaagtgacaaatatgctgcaagatttggggaatctatagttaatcttggcgacattgacaatgatggctttgaaggtaattaaaattatcaaattggtgcttgatttctgcttttaaaatggtttatggaagaaaatatgattaaagttttgtattgttttccttcctatagaagatggagccagaatggcatgctaagttttttcttttctttagtgttatatatgacttctcctcaattgtcacccattgatctttaccactgttaataatggatgatattcaaaataccttatttcagtgattctaaggcaccattgattagaaactgcattattatttatgtgtccctaaaagctacctattaagctgttacacccaccatttttctgttaaggaagatcctgatttcagaaataataaaatatgggcag

SEQ ID NO: 85121 - DNA, 119 bp, Homo sapiens; identical to SEQ ID NO: 85074

SEQ ID NO: 85122 - DNA, 390 bp, Homo sapiens
tggaagtggtggcatttcattccttcagtgtctcctgagagccacttgtggcctaagcactggactaggccctggagctagaaaactgatgaagacgtgggctgggcaccgagtgtacggtctactgggggcatcaggagatgaatgaggaggtttccaaggggggcgggcaggggaacggccaggggaatggccaggcgttgctggtgtgctgggcggaggcgctgggtccacaggcctaggtttgagtccagctctcccacttgccagctggtgccctcaggtgagtcacttctcccagacctccagctccttgtttacttagggggatcttgaacatacaatcagaagcggtggctctgaagtgcttacctgtttgctggccgagtt

SEQ ID NO: 85123 - DNA, 379 bp, Homo sapiens
gttccttcaatggtgccttagctgctgttcctgtccaggacctgggctccactgtcatcagagaagtcttgaaaagggccactgtggctccggaaaatgtgtctgaggccatctttggccatgtcttggcaccaggctgtggccaaaatcctgttaaacaacccatggtggttccaggaattccttattctgttccaccttggacctgccaaagaatcgtggggccaggcttaaaacctgtgcgccttgcagccacaccaatagggatgggacactccaccattgtggttgcgagaggcgtggaaaatatgcccggggctcctcactgggctcacttgaaaacgggtgtagatataggagatacccctctctctgacag

SEQ ID NO: 85124 - DNA, 409 bp, Homo sapiens; identical to SEQ ID NO: 53189

SEQ ID NO: 85125 - DNA, 134 bp, Homo sapiens
ttttttttttacacaattttttgtaaactaggaaaaaaatgcttgggtttttcggaagggggaggcttttttttgactgccaaactcttttatggaaaatatctttatattaatgctgaaaaaaaaaaaaaaaa

SEQ ID NO: 85126 - DNA, 786 bp, Homo sapiens
acgttctcacagaacatcaactatgagtatgaccctgacatctctcctccacgaaaaaagcaagcaaaggcccatttgggagacaagaagcagcttgattccaaaggtgactgccacaaagcaactgattcagacctttcttctccacggcataaacaaagtccagggcaccaggattctgattcagatctgtcacctccacggaatagacctagacaccggagctctgattctgacctctctccaccaaggaggagacagaggaccaaatcttctgattctgacctgtccccgcctcgaaggagtcagcctcctggaaagaaggtcaggattttcaggagccatgtccttcttttcgtgtgactcttctctctcagctttatgtatgtcccagagaatcaagccaagaagaaggatgtagctctgagaagtgtagtaaatcttagttaaaaggacctttggaggtctttccttctgaaggcaaactggctataacccatcccagatggacttacagataccagatttcccaagtagcttctgcgtttatagcctcttaattctacaatctcattttaacaggtctagaaaaacttcctattttcttaggaataaaccgaggactgtaatttgcagagtgaagtttggagcacaagcattgtgtcaaacggatcacatacagaaattctccttctgccacttactgtctgtgagatttgggcaagatgcttaatatctctaaacctcagtttctttatctgtaaattgtggataatagtagtacct

SEQ ID NO: 85127 - DNA, 1069 bp, Homo sapiens
aaactggccacggccgggagcggaggggacagcggggatcgtgagctccggcccgggcgagcgggtgcgtctgccgcagagtcggcacctgaaggacatggaggaaagaccggcagagaccaatgccaatgtggacaactcggcgtccccctcggtggcccagctggccgggcggtttagggagcaggcggctgcagccaaggagacaccagccagtaaaccaacccgaaggaaaccgccctgttccctccccctgttcccccccaaggtagacctgggccagaatggtgaggagaaatcaccacccaatgcgagccaccctcctaaattcaaggtcaagagctcgcctctgattgagaagcttcaggccaatttaacctttgacccagctgctctactgcctggggcctcacccaagagtcctggactcaaggctatggtgtcgccatttcacagcccaccttctacccccagcagccctggtgtgcgatctaggcccagcgaggcagaggaggtgcctgtcagcttcgaccagccccctgaaggcagtcatctgccctgttacaacaaggtgcggacgaggggctcaataaaaaggcgccctccctccaggcgattccgaaggtcacagtcagactgtggagaacttggagatttcagggcggtggagtcatctcagcagaacggtgctaaggaagaggatggggatgaagtgttgccatccaagagcaaggccccaggatcccctttgtccagtgagggagcagcgggagagggagtgagaaccctgggacctgctgaaaagcctcctctgaggaggtcacccagcaggacagagaagcaggaggaggacagggccacagaggaagccaagaacggtgaaaaggccaggcggagttcagaggaggtggacggccagcacccggcccaagaggaggtcccggaatcgccccagacctctggcccagaggcagaaaataggtgtgggagccccagggaggaaaagccagctggagaggaagcagagatggaaaaggctacagaggtgaagggggagagggtgcaaaat

SEQ ID NO: 85128 - DNA, 436 bp, Homo sapiens
aaggccctaggcagaactgaggttcttccctcctctccaggacggcggcactgggtgtgtccttcgggctggtggcctgtgtactggggctggtgctgggcctgtgctttgccaccaagttctcggtaagtggggagctctggccccgcgggccctccctccctgcctcaggacacctgcctaggagccctccctggtgagcttggctgggctgagcccctgctctggtcaaggttgggtgcccatctctcctgcctcggggacaatttcctgagtgccctggaggcttctcccgaggatacccctacccaggctgccagcgaccagccctccttgcccaggctgttggctctgggtgacttgaccctgttaccccacagaggtgctgcccagctcggcggacgctctgcactatctctgagagggtggagacaca

SEQ ID NO: 85129 - DNA, 408 bp, Homo sapiens
cacacgcgcgcgcgcgcgcacgcgcatacatacgatagacgtggtggtgggccctaagccaggtgaccggccgtcagtcaatacttacaggatccacaccaagctcttatgcagctctgggtccacagattccagatctgagagctggatgggcttccccagcagctgcttgtagaagggcactgtgaagcccccgttgatgtagtgtccatggaacacagccagccccatgatccgccccacaaagtggaaataagacaagtggtcctgtagggggcaccagagaacacgaatttgtcagcatggtgccggccaatgtgggaatctcgtgctgtccccaagcttcttgggaaaagtgtcccagaggcaaccagacctactgactcaaggactcacaggccccgctct

SEQ ID NO: 85130 - DNA, 404 bp, Homo sapiens
acgccacctctcaacatgtgatggtcaaaatcctcctaaaaagcaagccggttccaaattccatgcgagagctcgttttgagcctgtacatggtgtagctagtagttcaaaagatgaaagacaggaagatccttatggccctcaaacaaaagaggtaaatgaacaaacacattttgccagcatgccaagagacatctaccaagattatactcaagactctttcagtatacaagatgggaattctcagtattgtgattcatcaggattcattctcacattagaccaacctggatcagccaacatgtattatgacagtgtgaaacctgtcccatgtattatataaagcaggctgattttatgttactattgtgtctttaccatcacatgacttttgttagaactag

SEQ ID NO: 85131 - DNA, 434 bp, Homo sapiens
ggaccttcttggaacagcatttctcttgggctatgctctggcccagatactccactgctctctgacatacctttagctatacaggttacccttacctgcacaggtgggtttctcaagtccctgggaaagagtggtccaccacttggccctgaggtccttggctacatggcagggtgatctcagtctacatggttctggatcactcagcccagataccccaagtctgggcagcctccaccttccccagcctgtgtgtggctggcattcccggtcctgccttagctcattacctcttccctgaatcaagttggtgcttccaccaggtcctcacaagcttgaagaatgcgaagaggccatgggccgagtgatgaatgtgactcccaacgatgggctgaccgtctccctaccctttgggaagataagaacagtcatcg

SEQ ID NO: 85132 - DNA, 441 bp, Homo sapiens
gcgctcacagaagtggaaagaaaaaaagcacaaaaatccacattggctattgatcctgcgacttccaaagaaatacctgttccctctcctgcatttgattttgtcatattattagatgtttcagatacttcctcaatgagtcgcatgaatgatattatagctgaagaattgtcctataaaactgctcacgaagatatcagtcaacgtgtagctgctgaaaaccaagataaggatggagaccaaaatttaagagaccagatacaacatagaattataggcttcttggacaactggcctttattggagcaatggttttcagagccagaaaatattttgataaaaatcaatgctgaaatagataaggaatctttatgtgaaaaagtaaaagaaattcttacgactgaaatagcaaaaaaaaagaataaaggtgagaagaaataa

SEQ ID NO: 85133 - DNA, 214 bp, Homo sapiens
aaaaaagtaaaacatgtaacttttgtacattaaccttgtatcctgcaaccttgccataactgctagtctgacaattccaacatccctgttgtatctgaatttagttgtaatgcttgctctgtctcttcacttttttttgtctgttagtgtgcattgtaatattttattaaaagccagacatgatatactaggaaaagaaactccaaaaaaaaaa

SEQ ID NO: 85134 - DNA, 447 bp, Homo sapiens
atggaatcttctgcgatacaacaattcgtatctacagaaggtaactatgtttccacaatgcaaattttcccgcgagtttctacatcctcgctactggctcacatggtttgggcttggtgtactctggctttgggtacagcttccttatcctgttctctgctttctcggcacgcgtattggcgcaatggcgcgaccattcctgaaacgtcgtgaatctatcgcccgtaaaaacctggaactttgtttcccgcagcattctgcggaagaacgcgagaagatgattgccgaaaactttcgttcactcggcatggcgctggtagaaaccggcatggcatggttctggcccgacagtcgcgtacgtaaatggtttgatgttgaagggttggataaccttaaacgcgcacaaatgcaaaatcgcggcgtaatggttgtcggcgtccattttat

SEQ ID NO: 85135 - DNA, 419 bp, Homo sapiens
aaggacctgactaagcgtataaggactaggatgatggcctcagctcaaatgaaggagcacgataaggaccccgagatgctggtggatctccagtacagcctggcaaactcctacgcaagcactcctgaactacgcaggacctggctggaaagtatggccacgattcatgccagaaacggagatttatctgaggctgccatgtgttacatccatattgctgctctcattgcagagtatctgaaaagaaagggttactggaaagcggaaaagatttgcacagcatccctgctctcggaggatacccacccctgtgatagcaactcattactaacaactcccagtggaggaagcatgttctctatgggatggccagctcttttgagcattacaccaaacattatggaagaaggagcgacgaa

SEQ ID NO: 85136 - DNA, 653 bp, Homo sapiens
  misc_feature (1)...(653): n = a,t,c or g
atggcgcccagggagctgtgaggagaaaaccctgtcggtcttggagcggggacggcagaaccagggtccctggcggtgcggcggggccggcgggtgcagcggaggcggcggcggcggcggcagtgacgtcgccgggaaccctaaggactctgcaatatgaataattccctagagaacaccatctcctttgaagagtacatccgagtaaaggcacggtctgtcccgcaacacaggatgaaggaatttctggactcactggcctctaaggggccagaagcccttcaggagttccagcagacagccaccactaccatggtgtaccaacagggtgggaactgcatatacacagacagcactgaagtggctgggtctttgcttgaacttgcctgtccagtcaccaccagtgttcagccacaaacccagcaagaacagcagatccaggttcagcagccgcagcaggttcaggtccaggtgcaggtacagcagtctccgcaacaggtctcggctcagctctccccacaactcaccgttcaccagcctactgagcaacccatccaggtccaggtgcagatccaaggccaggcaccacagtcagcagccccctccattcagaccccgtttcttgcagagtcccagtcctcgcagctgcnaga

SEQ ID NO: 85137 - DNA, 351 bp, Homo sapiens
atggaaagagacccacaattaattagagtagtgaaaaatattttatttaagcagcggctgggtcatctattttctatcctatctattattgagttatcattttatatgattttatgagacaacagaagcattatactgcttttttgatgcataaagcacaaattgtaaattttcagtatgtgaatgacttcacttattgttatttagttttgaaacacagagaacaccacgaaaaagtaaccttgatgaagaggtgaatgtaattcctccacacactccagttaggtatgaattttcctacttttaattatattataattttgttattcatggctttatagtgtttcagat

SEQ ID NO: 85138 - DNA, 836 bp, Homo sapiens
tgaggcagggtcttgctctgctgcccaggctagagtgctgtggcataatcacaacttactgtagccttgaacttctatgctccagtgatcctcctgccccagcttccagagtacctaggactacaggcgcacaccaccacacctggctaattatttttatttttgtagatacggggtctcactatgttgtccacgctggtcctgaactcccggcctcatgtgatcctcccaccttggctcccagtgttatgattacaggcgtaagctgccacgcctggcccacacctacttctaatatgtacccttttcaagtataacttgttgaatactaaaatcaatggcagtgcaaatatttaactctcttctaaatcacatctgccaagttatcaaaaccatagttctccacctccaggcacactcacctgaaagatggaggaacaagctcaggaggtaaagtcagtggtaatggctgtccagctttggccatgtcagtaaggtgcattgcaagaataaactcttctgcttttagctgtccatcaccatcaacgtcagccagagtccaaatagtagccagctgagtttgagaaagatttgactgaagaagggcatttctagcttgaaaacctgagagatatccactcatacttttgtcaagagtattaaatttttgccgatattttaatcttgtaggctgaggaactgcccactctgaggtcccagtcttgggtgagttccctgagagtgaagcagtcgaggaagttgagctactagatcctaaatcaatcagagactgcgctttctgtatactagcacctccaaatcctcccatcatcaga

SEQ ID NO: 85139 - DNA, 352 bp, Homo sapiens
  misc_feature (1)...(352): n = a,t,c or g
gcaaatgactctcaggggccgatagatagcctgctggaatctatcataacagctatgaagactccctattcactgccggaggattgcctgactttgccactgtcaacctagcccatcacgtggccacaaaggacgactttgtatctgtacgttaaccagttctgcgacgaattgacgatcatcactcatctctcaatcgatcccaaatacagcatactaaccatccaccattgctcctatcatctatgaccctgagacttcggtagaagcccgcattatcttattaggaaataattctatgttcctactaagtcaactgcatttttactactttaacaaaattcactgacan

SEQ ID NO: 85140 - DNA, 914 bp, Homo sapiens
gttaccaatctgagtttgaactgaagagtctggccagcacacgcagtcacgggggaaagcctaatgcttggagcagatttaggtagtttgggtaatgtcttctgtttttctactaggaacgggccatctaccacagcattttcagatctgaagatggggagcacagataccattttagtttctaaatccatcactttaatttgatgattattggtgtctgctacatataataattctccattctctccaatacacaagcctcctggttcattaaaagttgactctgtaaaactggaactggtaacattatttgtgtctccagttcctgctaatgttgtacagttttttgtttttggatccacaactttaatcttgtgattgtaggagtctgcaacataaagtaaattcctttttttgtcccatgttactccaagggggtgttgaagctttgcattgattcctactccatcaacatcaccaaaagcaaataaattcatggggtctctttctcctcctacgaggtgcttcactgctccatctttcagtgaaacgggttctcactgtactgctctcactatctgctaacaaacaagcagctccagggatcttcagaggccaaggaaaggcctgaaggttgggcaaaacctgccttgtgaggataggcattgtttcgattctcttcatttccacttccagcaaacctaaggcaggttccttttgttaactcatttttctttggcagtttgcagcagtccagcaggagtgcccatatctgatgagtccctgccatggctatccataaaatgtcacctctttggacctctgaacctgatgttccaaaaactacatcccaaggggaactaatgggttgttgttctccttttgctccaccttctttatctgtaccttgaatt

SEQ ID NO: 85141 - DNA, 394 bp, Homo sapiens
gtgaaagtaagaaaacatttagctggttctgtctgtcaggcttcaaatacatacatttacagaatgacttctgactaaattgtcttagatatgaatgttattatctacagatgtgaaccttttctatcatttgattgttctaggatgttgaagtcaaatggattgaataccagaatatggtgaactacctcatccaatggattagacaccatgtgaccacaatgtctgagagaacatttcctaataatcctgtagaactgaaggttagtgtcactgtagaaattacataggattgattcgattgtaaacccttaagtaatgctataataattctgtaattttagaagttcaacaaaagttgcccttggaaagccattaataagtaggcaaaatt

SEQ ID NO: 85142 - DNA, 401 bp, Homo sapiens
gcgaagaaacagaaagtataactgaacaaactagagatattgttaaaggggatggggaaacctgtatatggctttgggagacccagccaatggagtgggtttatgaaaaagtttcgttaatgaccagcagtgaagaaattcataagggagatgtcataacttgtacttggctctttgaaactcatccacttgataccatattagatgactctgaaacagcagtctaattgcataactgtataacaggaggagatccaaggtgtgtatgttcttacatgcatgttttcttttttagacagattatttggacttgcatactaggagaaaaattgaatggtttctagcctgttgaaatggatatactagctgtagatggttcctgcattgggtataattgtttg

SEQ ID NO: 85143 - DNA, 583 bp, Homo sapiens
agctcgagcgtttgatggcattgagcaatgatataaagaaccccacaattcctctgaaatcggaattagcttatgagatttttgataaggggcgggttcgcttctggctccaggctgagcacttatcaccagatgccagctaccgatttattattaacgacagagaagtctctgacagcgagatacacagaattaaatgtgacaaagctactggcattattgagatggtgatggatcgatttagtattgaaaatgaggggacctacactgtgcagattcatgatgggaaagccaaaagtcagtcttctctagttcttattggagatgcattcaagactgtgctggaagaggctgagtttcaaaggaaagaatttctcaggaaacaaggccctcattttgctgagtacttgcactgggatgtcacggaagaatgtgaagttcgacttgtttgcaaggttgcaaacaccaagaaagaaaccgttttcaaatggctcaaggatgatgctctgtatgaaacggagacactgcctaacctggagaggggaatctgtgagctcctcatcccaaagttgtcaaagaaggg

SEQ ID NO: 85144 - DNA, 403 bp, Homo sapiens
cccacgcgtccgcccacgcgtccgcccacgcgtccgatcacgcatacaaaaacatatgcgccaatttttgggcgaattgctgacaacattcttgaccccattcctaacatgccttgtatcatggcatggatcgtggcacgtaaagatggcaatgccgatggaaccaccctggtagacgctctgcactgcgttctaccatcaattctaccaactgacctgccctttcacctgcctttgcacgttgcttacaaagatggtgacattgttactggtactgttactcgagttgatactggagttctcactcccgttatggttcccacctttgctccaacctacgttacaaccgacgttacatctgacgaaacgcaccatgaagctctcaatgaagctcttagtgaag

SEQ ID NO: 85145 - DNA, 421 bp, Homo sapiens
cccacgcgtccgtgactctttaattagttttatccctatgttagcttgtctccttctttatgtttccttatagctaatttgtcatccatattgcaaatattgataaatatcatgtctaataaaaagatcccttacacttttatcgaaaagaaatctagacatttctacaaacatattttataatcttttcaagtgacagagaggcaggagaagaaaattgtactgaaaccaaaaattcctgctaaaatagaggagcctccaccggctaaaggtatgatttctttcaaagaaatgcaacactatttattttaatgtatataataataccttcacatttgcataactgtcttatgcataacaatttgcataactgtctacgttttgtcagaacacatgtatgaacgtatttactgagtatagt

SEQ ID NO: 85146 - DNA, 410 bp, Homo sapiens
actaactgccataagaattcttggaaaatcgatcagctccaagaaggttgcagttattactttagagtcacagctgagaatgagtatggtattggccttcctgcccagactgctgatccaattaaggttgcagaagtgccacaacctcctggaaaaataactgtggatgatgtcaccagaaacagtgtctctctgagttggacaaaacctgaacatgatggtggcagtaaaatcattcagtatattgtggaaatgcaagctaaacacagtgagaaatggtcagagtgtgctcgagtaaagtctcttcaggcagtaattaccaacctaactcaaggggaagaatatctttttagagttgttgctgtaaatgaaaaggggagaagtgatcctcggtcccttgcagttccaat

SEQ ID NO: 85147 - DNA, 495 bp, Homo sapiens
  misc_feature (1)...(495): n = a,t,c or g
ggtggcccnnagagnccnccctgaagccgactgacggcntggaaccccgncaccacgcgtccgatctcataaaggttgttggcaagcctggcatccccactggaccaatcatatttgatgaagtcacagcagaagccatgaccttaaagtgggctcctccaaaggatgatggaggttctgaaatcaccaactatatcctagagaagagggattctgtgaacaacaagtgggtgacgtgcgcctcagctgtccagaaaaccacctttagagtaaccagacttcatgagggcatggaatataccttcagggtcagtgccgaaaataaatatggtgtaggggaaggcctgaaatcggagccaattgttgcgagacatccatttgatatgcctgatgctcccccacctcccaatattgtggatgtcagacacgattcagtatctctaacttggactgaccccaagaaaactggtggttctccaattacagggtatcatn

SEQ ID NO: 85148 - DNA, 445 bp, Homo sapiens
  misc_feature (1)...(445): n = a,t,c or g
tgaaaaggaggaggtcgaggctgtaaacatcacccaagagcccagacacatcatgtgcatgtaccttgttacttcggcaaagtctgtaacagaagaagtaaccatcattattgaagatgttgatcctcaaatggctaacctgaaaatggaacttagggatgctttgtgtgctattatatatgaggaaatagacatcctaacagctgagggtcctagaattcagcaaggagccaaaacaagtttgcaagaagaaatggattctttttcaggttcacagaaggttgaacccattactgaaccagaagttgaatctaaatatctgatctcaactgaagaggtcagttattttaacgtgcaaagtagggttaaatatttggatgccacacctgtcactaaaggggttgcttcagctgttgtctctgacgaanaacaagatgagagtctg

SEQ ID NO: 85149 - DNA, 409 bp, Homo sapiens
tgatgcagccagcagccttagccttgcttctgatgaagaccaggtcctggggggctcccgcggacctgatcccagggaatcctcctatggaccaggtcccggaggctcctcctatggactagattccagggaatccttctacagtctaggcttcaggggctcatcctatgaactagatcccggggaatcttcctatggaccgggtcccggggaatcctcatacagaccagatcccggggaatcctcctatggaccaggtcctgggggctcctcatacagaccagataccaggaatcctcctatggaccaggtcccaggggctcctactatacacatcaggtctgggagttggggctcctccagtggaccgggtccggggtgggggttctcatatggaccgggtcccagg

SEQ ID NO: 85150 - DNA, 419 bp, Homo sapiens
cccacgcgtccgcggacgcgtgggttcaagacagagaattataagaagagctttcttgttggcaaatctggcaacaaattgcaaatgacttaaccaggtgtcaagactccatgatcaataattctcagtgtcacaaacaaggtgatttcccttaccaggtagggacagaactgtctattcaaatttctgaagatgagaactatatagtaaataaagcagatggtcccaataatactgggaatccagagtttcctatcttgagaacccaggattcttggaggaaaacattcctgactgagtcacagagattgaacagagatcagcaaatttccataaaaaataaattatgtcaatgtaagaagggtgttgatcccatcggttggatttcacatcatgatggtcatagagtacacaaaagg

SEQ ID NO: 85151 - DNA, 779 bp, Homo sapiens
aaatttcagttttcagaaagctgctgagattagaatgcaccttacaaggctggatgatgccacagaggaacgaggagagagaaagcatcgtttggggccgagaagggactgagccccagtcacagcagaagcagacgatgttgggatttgcttgcttcccacaacccagagtcccccacctgcccacactctggcttctcctcaggctgaggtagatttgacacccggcaccccacagctctctactacatgggagtcccgggctccccgcactgtgccagttacgcagaggaggtggactctgcccagaggactccctgtccagctgggcagatgcacttttaaaagacaaatacaggtttccatgacagccttctaaagacgagctctggagctgtgtgcccaaggccaggagcctggactgaggcctttcctaaggggagctgcccaactgctgtagagtcagtaatgcgaagccctgggaaacttaccgaagccatctcgaagccaagaggaggtctggtgctcctcttgtttggggatcagcttttatgctgaaggagagaaattgacttttcctttacttttgacactgcttccacctgacttaaatactaaagcactgcttagaagagacaactgtttacaaaggagctctttctctagaaggggggcctttccccttgttataccaacttttggattatggcggggggggggcccctttgtggctggggcgcctgtcgcgcccccctatttctccctcgtgtagaaaaaac

SEQ ID NO: 85152 - DNA, 1090 bp, Homo sapiens
atgtcattcattaattctgtggcattgcttacgatcaatgaagctagtgctgaagacagcggggactacatttgtgaggctcataatggtgttggtgacgccagctgcagcacagcgttgacagtgaaagcacctcctgttttcacccagaagccttctccagtaggagctcttaaaggttctgatgtgattctccaatgtgaaatttcgggaactcccccatttgaagtagtatgggttaaagatcgaaagcaggttagaaacagcaagaaatttaaaatcacttcaaaacattttgatacaagtcttcatatccttaatcttgaagcctccgatgtcggggaatatcactgcaaagctactaatgaggtgggaagtgacacgtgttcttgctctgtcaagttcaaaggtttgtatacatggacacaaaaatatatgccccttcctcctatctgttcttgcctaactaataacttgtgtggccatgattctcacattttttcctctaaccacaaatttctttcatcagaacctccacgattcgtgaaaaagctaagtgacacctcaacccttattggggatgctgttgagttacgggccatagtggagggcttccagccaatttctgttgtctggctgaaagatagaggtgaagtcatcagagagagtgaaaataccaggatttcattcattgataacattgcaaccctccagctggggagtccagaagcatctaattctggaaaatatatatgccaaatcaaaaacgatgctggaatgagagaatgctctgcagtcttgactgtactagaaccagcaagaatcatagagaagcccgaacccatgactgtcactactggaaatccttttgcattagagtgtgtagtgactggaacaccagaactctcagccaagtggttcaaagatggaagagaattgtctgcagacagcaaacatcacattacattcatcaataaagtggcttcccttaaaatcccctgtgccgaaatgagtgacaaaggattatatagctttgaagtgaaaaacagtgttggcaaaagtaactgcactgtatccgtccatgtttctg

SEQ ID NO: 85153 - DNA, 420 bp, Homo sapiens
ggcacacgagcactgccaggctgctcctgcatcggggcgctggcaaggaggccgtgacctcagacggctacaccgctctgcacctggctgcccgcaacggacacctggccactgtcaagctgcttgtcgaggagaaggccgatgtgctggcccggggacccctgaaccagacggcgctgcacctggctgccgcccacgggcactcggaggtggtggaggagttggtcagcgccgatgtcattgacctgttcgacgagcaggggctcagcgcgctgcacctggccgcccagggccggcacgcacagacggtggagactctgctcaggcatggtgcccacatcaacctgcagagcctcaagttccagggcggccatggccccgccgccacgctcctgcggtgaagcaagacctagctggctg

SEQ ID NO: 85154 - DNA, 478 bp, Homo sapiens
tttgacgctgtggaccggcttgattccgtgcgaccccgcgtactaaaagccaatggctctagtcagagtcccacagccctgttctgtagcccacctgaggtggacacctgtataaatgaggatgttgagagcttgaggaagacggtgcaggacttgctggccaaacttcaggaggccaagcggcaacaccagtcatactgtgtggcttttgaggtcacactcagccggtaccagagggaagcagaacaaagtaatgtggcccttcacagagaggaggacagagtggagcataaagaggcagaagtcggagagctgcagaggcgcttgctagggatggagacggagcatcaggccttactggcgaaagtgagggaaggggaggtggccctagaggaacttcggagcaacaatgctgactgccaagcagaacgagaaaaggctgctaccctggaaaaggaagtggccgggttgcgggaga

SEQ ID NO: 85155 - DNA, 436 bp, Homo sapiens
acacctccttcgggaagccacataattaaattacaataatttatatttttagtaaacatatggagtgataaatacacagttaaataatgtgtatttatatttgttataacttacttggtcaagatatcataagaaatgctcatggatatataacaggcagtgaagaaaaacacaacaggttggggctgtgaggataactcacctttgatgacgattgaagacgtgcacagagcagagcctgcatcattggacactttgcatgtgtacaaaccagcgtcgttcatgcctgctttcctgacttgcagcactaacgtgttgttcttgaatgttatttcacagttagaagttggttggatctctatattatttttgtaccaggcaacagttataggttgggaaccagccacacgtccctcaagtttgaaagaattccctt

SEQ ID NO: 85156 - DNA, 426 bp, Homo sapiens
tggagacctctcgccacgaagggctggatgtcattgagaatgcagtggacaacctggattcccgaagtgacaagcacacagtcatggacatgtgcaatcaagtcttctgccctccactcaagttcgagttccagccccacatgggggatgaggtctgccaggtcagcgctcagcagcccgtccagacagaactgctcatgcgttatcaccagctgcagtccagactggccaccctcaagatagagaatgaggaggttaggaaaaccctggatgccaccatgcagacattacaggacatgctgactgtggaggactttgatgtctccgatgccttccaacacagtcgatcgacagagtccgtcaagtcggctgcctctgagacctacatgagcaagatcaacattgccaagaggagagccaaccagc

SEQ ID NO: 85157 - DNA, 339 bp, Homo sapiens
ctttgttccacgctcctgctactgactgtcccgtcctgggtcttttcccaggtcaccttgaaagagtctggtcctgcgctggtgaaacccacacagaccctcacactgacctgcaccctctctgggttctcactcaacaattatgagatgcgcgtgacctgggtccgtcagcccccagggagggccctggagtggcttgcacgcattgattgggaaggtgataaattctacagcacatctctgaagaccaggctcaccatctccacggacacttccaaaacccaggtggtccttacagtgaccgacgtggaccctctggacacagccacgtattactgg

SEQ ID NO: 85158 - DNA, 336 bp, Homo sapiens
tcatcaatgggaaaacaatcttttgctgttaacttcttgaatgatctctaaacaatgtaatacattatattcaagttataaaattaatgtacaaaattcacaacacaattattttcaagttatgtctacatataattgtttctaattaaaaggattttatttatcttctgttacttacgatattcttccaaatggtgcaaaagcagcttttatatcttcagttgtaatttctgggctgagatcaccaacaaagacatggaaatgatcttataaggggaaggaaggggaagtgaaaagaaaaatagaactttagaatttaaaaagtactaaaatcta

SEQ ID NO: 85159 - DNA, 401 bp, Homo sapiens
gggaaagaaagggtgcccgaggcaaacaaggccaatccctcgcagaaaggaaagcccggtaaagactctgctctcctgccacaggccttgtcccgctgaagaaagtccaccaaaaaatggcccccctgcctgggccacagcccaccccgagcgccccgccctggcccagagcctcaggttccgctgcctctgatgcactccacccctaggaacttcgtggaggaaaagatgggcagcaagttcgtggaaggccggagtgttgagttttctaagtcctacgaggagagcagcccctccacgtcaatcttcttcatcctctccccgggggttgaccccttgaaagacgtggaagccctgggtaagtgtagcaggcaagtgatgttctcaaagacggagtattg

SEQ ID NO: 85160 - DNA, 393 bp, Homo sapiens
accagctccacctgggggatcttaagctgcacagcggtggactcaacctttgacccccggctggcacgatcaccttgaacttctgcttccttccctcgagccagcccaaaggaaggcatcttcagcttgggcatcttcaccctcccatcccagccccagcccttgccctccaactcagccacccctggcactagttctgctgcctcagtgtcccggcctctgaccccaaacttggggagagcaaacctgggccccttgaacttgaggtcggcccctgccacctctaccttgcctgagggcaggtgggcatccaggctgagctgtgggatggacagatcgagggcaggcagcaggcctgcctccccagcccctttggcctcagcctcagccccc

SEQ ID NO: 85161 - DNA, 417 bp, Homo sapiens
aaagtttctgaaagaccttgagaaacagtacaacaaagaggaacctcacttaagtgaaataggatcttgctttcttcaaaatcaagagggctttgccatctattccgagtactgcaacaaccacccgggcgcctgcctggagctcgccaacctcatgaagcagggcaagtacagacatttctttgaagcctgccgcctgctgcagcagatgattgacatcgccatcgacgggttcctgctcacaccagtgcagaagatctgcaaatacccgctgcagctggccgagctgctcaagtataccacacaggaacacggtgattacagcaacataaaggcagcatatgaggccatgaagaatgtggcctgtctgatcaacgagcgcaagcgcaagctggagagcatcgacaagatagctcg

SEQ ID NO: 85162 - DNA, 131 bp, Homo sapiens
ttccacgaccaaggacatcgcgctggcatacggcaacatacagctcaagaagctgcccaccatccacttcggcaccatgcgctccgtgcgaaccgcccaactggagattgtttcaggcatgtctgaagcat

SEQ ID NO: 85163 - DNA, 770 bp, Homo sapiens
tgaagggagaccggctcggtctctctctctcccagtggactagaaggagcagagagttatgctgtttctcccattctttacagctcaccggatgtaaaagaactctggctagagaccctccaaggacagaggcacagccacacgggagtgaaatccacccctggacagtcagccgcaatactgatgaagctgagaagcagccacaatgcttcaaaaacactaaacgccaataatatggagacactaatcgaatgtcaatcagagggtgatatcaaggaacatcccctgttggcatcatgtgagagtgaagacagtatttgccagctcattgaagttaagaagagaaagaaggtgctgtcctggccctttctcatgagaaggctctcccctgcatcagatttttctggggctttggagacagacttgaaagcatcgctatttgatcagcccttgtcaattatctgcggtgacagtgacacactccccagacccatccaggacattctcactattctatgccttaaaggcccttcaacggaagggatattcaggagagcagccaacgagaaagcccgtaaggagctgaaggaggagctcaactctggggatgcggtggatctggagaggctccccgtgcacctcctcgctgtggtctttaaggacttcctcagaagtatcccccggaagctactttcaagcgacctctttgaggagtggatgggtgctctggagatgcaggacgaggaggacagaatcgaggccctgaaaca

SEQ ID NO: 85164 - DNA, 643 bp, Homo sapiens
  misc_feature (1)...(643): n = a,t,c or g
aaaaggtctcaaaaaaatgttatactaatctgatgttaggctctttggtaggggtggtggttgaatatggccatatgaaaatatgtgaaaaatttaataattaattaccttgacattttggttactttttgttctataattaatcaaactaatcatattttaaattggggagaaagaatgaaaggacatgtctgtttcctgatttgtctgattgttcagacaggcctgatattgaaagcttttgatactgagatcctattaatctcagatgatgatgaagttactgtattcttaaagaaacaaagaatttaaatagaaattaaatgttatttgtaattacaaaaaaaaaaaaaagggggggccgtttaaggggtcccttggggggcccaaagtttacgggggcttgcaaggtaaaagctttttccttatgggggggggaataaaaaccaacctgggaatttttggaaagaaccctttttttgggggggggacaaattgggccaacctccctacggggtttaaacgctctagggaaaaataaaaattttttaaaggggaaaagggggaaaaaataaggccccataacccttggtggtttagaaaattttgggggnnnccgcgggggggcccctttcccccctcc

SEQ ID NO: 85165 - DNA, 1165 bp, Homo sapiens
ttttttttctagtataaataaagttttaatgagaaaccaatattgatttttaacaagtgattcgattctgtgaacttgaaaaatgatttgggaaggagtgggttaatgaggctaatgaggaggcttttgtggattagatgataactggagtggtttggtcataaaacttcatagtgcaaaatttcctagtaaagcccttccttctttcctttttcccctctttttcttttcggtctctccctttctttatgggcttttcctaaacactttcttcttttcttatgacctggatctcagtttcactatgcacttccctaacctatttctcctaatttcagttaaggtaaaaagtccacaggtatcagaactggaacctgaagttaggttaaaatgcggtgacaaaagaagcagacttcattatgttcttaagagttcaggctcttaagatttattacccctttcttttgtcctctcctggagaatagaatgagccaagatcagtccttacttgagcaaatcactccagcatcctcagcatgatcacagttatgctttccccatccttgatgtttgcagttccagagagctgactcatttccgttgcatataagatcatcaaaccagattggtccagagccttctccaaaattagatgaaccagagaaactgacagcacttccacattcaagttgtctacaaatgacagatgcatgatctatgttgaagttatcatcacacactgttccccaccgtccttggaatttgatctctattcttccagaacacatattccctccacgcgtcagcctcatttccaaattggatccatctggagcagagaaaagaccagagttcagaagttacattcatttagaagtgattttagaaaagaagtttcctctggacacttgggattttatgttgtccttaaaatggtgcctgattttggacattgcccagctccacacagtagagaattttaatatgttaaaatctaggaagcaattaggatttttatctatatctacttacaaaggaaaatgtttacaggttaaagtttttaaactttctgttttgtttccacctattactaggacagatgtaaatactcttttttgtacagaaatagataaattcgactcaagttatttaaatttgactcagg

SEQ ID NO: 85166 - DNA, 436 bp, Homo sapiens
gaatggtacctttgtggtgaagatcctgcatttggatttccaaaacttgagcaagcaaacaaaccttctcatctttgtggtcgtgtttttaaagtaggagagcctacatattcttgcagagactgtgcagttgatccaacttgtgttttgtgcatggagtgctttttgggaagtattcacagagatcatcgatataggatgacaacatcaggaggtggaggtttctgtgactgtggtgatactgaagcctggaaagagggtccttactgtcaaaaacatgaacttaacacctctgaaattgaggaagaagaggatcctcttgttcatttatcagaagatgtgatagcaagaacttataacatttttgctattacgtttcggtatgcagtagaaatattaacctgggaaaaagaaagtgaattgccagcagatttaa

SEQ ID NO: 85167 - DNA, 555 bp, Homo sapiens
  misc_feature (1)...(555): n = a,t,c or g
cacagattatgggttggattgatgaatataataactgttttatttcagcacaataaggaaaacctagtcattataaactctcaaaatcatgtttaccttttacttaaatggagcttgtttgtattaatgattgtaatttatattgcagcataactctgctaatagagacatgataatttacaaaaagattaacaacgttttaggccgtactgaaaatattttcttttcttgataatggtctcttctggtgtctagaggagagctgagcaattccttttaatgaatagcagtggaaattaaaataattatgcttttctgtttttcccttcagaaaacctaactgaaaataaagacataacttgctatttttaaggtttcattaatccagcaaaataaattttcttttactgctttggggtaattctatttcacttgatcacatttaggctgcagatcaaattacgaagctgtataatctcttcctgaaaattgatgctactcaggnggnagtgaatccctttggtgaaactccagaaggaccaggtaaaaaaaaaa

SEQ ID NO: 85168 - DNA, 430 bp, Homo sapiens
cccacgcgtccggcgagcggcggtgacttgccagtaagggtttggagtcatcaccaggtttaattttggaggaactttacaggtttggctccagcagctgctgttgccaccaccactagttcaagcaccatgcggtttacctcaatatcaaattctttgacctccactgctgctattgggctctcatttacaacttcaacgactaccaccgccactttcaccaccaacactactaccacaatcaccagtggctttactgtgaaccaaaaccaactgttatcaagagggtttgaaaaccttgtaccttatacttcaactgttagtgtagtaacaactcctgtgatgacatatggtcatctggagggtcttataaatgaggggaaccttgagctggaaatcaagagaagactttcttctcaggccactcagg

SEQ ID NO: 85169 - DNA, 497 bp, Homo sapiens
  misc_feature (1)...(497): n = a,t,c or g
agtgccagggcnnccttctgaaaccccaataganagtcctcgagangccccggattcggggtcgacccacgcgtccggggtttctcttcatctttagataacctatcttatcccagacttagacattcactcacactcaaaattaaatattggtattggttagcatatgagtgagtgtctgcattttctagtggtttaatatgccaattcaagacacagttctatgagcatcctttttaaaattctgtgtgtgtgcatgtgtgtatgcatatgtataatgagagaaagataataggtcatcccaatgaccctgagagctggcaaagatgggaataaatgttgatagtttgttctttattttagatgctagttctcaagactgctatgatattccacgagcatttccaagtgatagatctagttcacttgaaggcttccataaccactttgtaagtataattgaccttggcattatcaagtgaattcaattgtctaaa

SEQ ID NO: 85170 - DNA, 2147 bp, Homo sapiens; identical to SEQ ID NO: 66838

SEQ ID NO: 85171 - DNA, 402 bp, Homo sapiens
cccacgcgtccgcccacgcgtccgctagaagcaagaggctgattcagcgaatgtcttaaaacactagtcatcagataacaaggctacagcctcgtgaactggaaaataagcaatctgccagatattttgatggaaagaaggaaaatttatgtgagattttagatattagagacaactaagatgaaaaaacagaagttgattttattttggaagactaagctcagtgtggtggtgctatgtcagacttcagtggtgtgatcctcagtcctgggtttcctggaaactatcccagcagtttagattgcacatggacaataaatctacccataggttttggtgtacatctccagtttgtaaatttttctacagaaaccatacatgattatttggaagtacgaagtg

SEQ ID NO: 85172 - DNA, 375 bp, Homo sapiens
  misc_feature (1)...(375): n = a,t,c or g
cagggcggcaccatacacctggcagggggcaaaagggtagtcaggcaggccctgcatatcctggaccccttgccacactacacacacccaccttatcaccagctgcacccgcgagcacaaaggtggagaagacgggcacggggtacttggtctgggcaggccagcactctatagtggcccccatgggcaggcaaaagacgggcactgactcgggcagcgggaacgcctcattgtcctcctccgggtagcggcccagcaactctgcacccccagcatagttgggggtacccaaaaggagcagggtccatcacactacaagggaaatgaaccaagggatcccagaagagggcccgagtagcanagagaaagtaaact

SEQ ID NO: 85173 - DNA, 419 bp, Homo sapiens
  misc_feature (1)...(419): n = a,t,c or g
ccaacatatttgaaaaagacaccattgtgtcttttttttcaaatgtgcttctactgtttccaggagtgcatttattttactgcagtatttgacaggacagcaggtatcctgttccttgaatttgggctcactagtattgcatactacctaattagtataactagctcttagacaaatgtttaacaagctgaatatgaattattattgattaagtatcttctactctccacatctacacattacaaaatttccttggtacttaaaatttacatatttccagggatgacccaagatttcctacgggtcgtggtgttctgagaagagggatgaccgttgaaggactgaaacagcttattgcttgtcangagcgttaccagttccttttccagctggcctgtatgacatttcaggtacttcta

SEQ ID NO: 85174 - DNA, 319 bp, Homo sapiens
ggttatagagcttaggattccaaaagacgatgaagcaaggaaagggaataaagaagagagccaagaaaaagggggtaaaggagcttttaaggatccccagtttccatggggctctcaaggaatgagaagtcaagatcacatccaagttagcaagcagcacattaataatcagcaacagccacctcaactacgttggagaagcaattctctcaataatggccagccgaaaagtacgcgctgccaggcatctgcctccgcggagtcattaaactcccacagtggtcaccccactgctgatgtacagactttccctcgtgcc

SEQ ID NO: 85175 - DNA, 396 bp, Homo sapiens
ggcacgagatgtcaagctccatttgggagtctctttctaaaaatctcaaagagcacgacccccttatccattgtgtcttgctaacctttttgaagcaagaaattaaacgatttgatacgttattatttgtcatacataaatccttaaaagatcttcagcttgctataaaaggagagatcatcctcacccaagaattggaggaaatatttaactcttttcttaatatgagagtgcctacattgtggcagaaacacgcctacagatcttgtaagccactgagttcctggattgatgatctcatccagcgactgaatttcttcaatacttgggccaaagtggcttatactgcaatacagcgtcggtatatgagatttgtccagtttggaagcagtctat

SEQ ID NO: 85176 - DNA, 495 bp, Homo sapiens
  misc_feature (1)...(495): n = a,t,c or g
ggcacgagccacgtgtttgtggatacctataggaggatgtaaagaagaagagggtttggggggtggggttttgaaggctgaataggagttcatttggtgcagcaggcgttagaagaatgacactccgatagagggaccagcttgagcagtctccgtatcagagttgagatgtgcctttacccctcacgagggccttttggggagtcccaggaggtgctgagctgcgccccctcctccaggagctgcagatgaagcgtactgcaattgaggccttcaatgagactatcaagatctttgaagagcagggccagactcaagagaaatgcagcaaggaatacctggagcgcttccggcgtgagggcaacgagaaagagatgcaaaggtgagtctggcgcctctgccctgccccaccccaccctgatctggtgcagtacaagccacggagggaaggaagcanaaggaggccagccacttggaggcaaagagtactctgtg

SEQ ID NO: 85177 - DNA, 435 bp, Homo sapiens
cttagttccttccttcatgcacatcagcgaattcatgcagagataaagccctacggatgcaaggaatgcgggaaaaccttcagtcgtgcctcatatcttgttcaacatggaagacttcacactggcgagaagccctatgaatgtaaggagtgtggcaaggcctttagtactggctcataccttgttcagcatcagaggatccatactggggagaaaccctatgaatgtaaggaatgtggcaaagcctttattagtcgccatcagcttaccgtacatcaaagggttcatactggagagaaaccctatgagtgtaaggaatgtggcaaggccttcagagtgcacgtacatctcacacagcatcggaaaattcatactgatgtaaagccctatgaatgtaaggaatgtggaaagacttttagtcgagcctcgtacctt

SEQ ID NO: 85178 - DNA, 500 bp, Homo sapiens
  misc_feature (1)...(500): n = a,t,c or g
gacggccnttgatagcctcgtgaccgcntcgaganccccggccgacccacgcgtccgtctttttaacacttctcaagtaggattggctacaattaaacctgtatttagaggcagaaaacactcccttggtaaagaatattatgcgcccgcacctcttccacctggtgtgtctggtttcttgccgtggcgtactgcagaacgtgcaaaaagacacaggtagggtatttttatttcctatcttttaggataaaaatgggattcaaaattctttattttggagcttctattatgtgagagttctctgcttatgtctgtagggtaaaaatgactcatgtggcttctgcctcatgaatcctttaaggaagaaaaacaaaaaataatcctaagtagggtttcaagttattaagtgtcacagcaagctgtatccctgtgggagtccagaggaaactgaaattatctccaattgtgcaggtgagaaaagggttcatttaaagtatggg

SEQ ID NO: 85179 - DNA, 473 bp, Homo sapiens
cggcgtggggaagataatgcagatgatccagggacctgccctggagtggagcctgatgaggggcctggggctaccttcagtcggtcattctctgctttcagcaggtccacctccaactgcatgttgtgcatggtctcccgaagctgatccagttggtgggcagagttgagggcctccaagcggatgtctgtaagcttcatttccttctcccatagctcagagcgcagctccgatacctccttcttctctggctcctcctcctcatttgcatggaacagcctagtgtggggggctgggtgagcagggccctcggtgacatcagtgcccacggaggacgaggtggaggacttgatggagggtgaagcagtctctgtagaaccatgctgtagtttgggggatgagggggctgaagagtcgggtgtagcaatctgctctatatccgagtatgaggaagctgacttgggccccttttt

SEQ ID NO: 85180 - DNA, 419 bp, Homo sapiens
ttttttttttttcaaattttaattaaaatctttattgaataaaaatgtttcagactaggtaagactaagaaagcagaatgttttacatctctaaaaaatattaaagctaaatctctataaatgcagtacaaagaaaagcctacagcttaagacacctctccctcccatccatacaatttggaatatcaactgtgtacaacaaatgtactcaagtttataatgtccccaaattcagaattttctcctgttccaatgacaacaccctttgctttgccacatctgaccagtgttcccataaaggcaatgttacttctcgatgcaagatctccattagttgcagctggctgaggagctgtcaccttagaacaaggcgttgtctcacctgtcaagctggactcatcaatggaaagatccacagc

SEQ ID NO: 85181 - DNA, 420 bp, Homo sapiens
aataattacatacctttaaattttgttctgactttaataattttgaaacacaaattagttaaagagtttgcataggggggaagaaatactatatgctaattgggacaaatgttgattcaggaaaacattttatataaccatgcagaagtttaatttgatggtaccactaagcagaggaaaaaagagcttgctttggaagattaaggactactccacagatttttaaaacaggaggcgtgataaatgaaatatttgttattttatgggagaacgatatgaaaacgaagcatgatagaactcctcttaccaaagatggatcacttctagatctggatgatgataacccagaatccactccaggtgcacttgccacaccagctctttctccaagtttgatggctgatcttgagaggttacact

SEQ ID NO: 85182 - DNA, 414 bp, Homo sapiens
aagagctgaagggagagaacatttctgagggcttgcgacaggacgttaatcccagggaccaaaaggaggaaaggcagggcactgatgggagcattaaaaaaaacatggtcaacgtacccgggttggtaataaccaacaatcgcgggcgccggggcggggccctgctggacaaccgggggatcctcacaattggccacaccctgggtcccaaggaacacgaagcgcaaagcaacgcctctttggatgtgttactgggccacacaaatggggaagagctcatgaagctaggaaatcaccccatccggagggtcagcgtccacccggactaccggaaggatgagtcctacaattgtgagggggacatcgccctgctgcaactggaaaataagggccccctggggaaccaaactactt

SEQ ID NO: 85183 - DNA, 406 bp, Homo sapiens
atccatcttgaatgaacggaggaaaagggccagcgagaccacacagcacatcaatgccatcaagcgggagattgatgtgaccaaggaggccctgaatttccagaagtcactatgggagaagcaaggcaagtacgaaaacaaggggctgatgatcatcgatgaggaagaattcctgctgatcctcaagctcaaagacctcaagaagcagtaccgcagcgagtaccaggacctgcgtgacctcagggctgagatccagtattgccagcacctagtggatcagtgtcgccaccgcctgctcatggaatttgacatctggtacaatgagtcctttgtcatccctgaggacatgcagatggcactgaagccaggcggcagcatccggccaggcatggtccctgtgaacagg

SEQ ID NO: 85184 - DNA, 492 bp, Homo sapiens
aaggccctggatgctgagttcctggacgtgtacaagaactgcaacggggtggtcatgatgttcgacattaccaagcagtggaccttcaattacattctccgggagcttccaaaagtgcccacccacgtgccagtgtgcgtgctggggaactaccgggacatgggcgagcaccgagtcatcctgccggacgacgtgcgtgacttcatcgacaacctggacagacctccaggttcctcctacttccgctatgctgagtcttccatgaagaacagcttcggcctaaagtaccttcataagttcttcaatatcccatttttgcagcttcaggtaagcactcaccacgtggggtggagtggctgctggtctctcacctccttccaggggtctcctgtgtagcaacgggtctccctcctaacccctgagaaagctgtggacctgctcggagattggctgctggcaagggcccagcgttctactgcacctgcctgctct

SEQ ID NO: 85185 - DNA, 485 bp, Homo sapiens
ttgacaccattacgccaagcttggcacgagggaggaccggtgctgtgagctccctgcctcgagggatggagagacctgccccgccttcgtgtctgcctgttcctgttcctcagagacccctgggcccccaggacctcaaggacccccaggcctccctgggaggaatggcaccccaggagagcagggcttcccagggcccaggggagagcccgggccacccggacagatgggaccagaaggtcctggaggccagcagggctcgccggggacccagggccgtgcagtccaggggcctgtgggtccaccaggggtcaaaggagagaagggagaccatgggcttccaggcttgcagggccaccccggccaccagggcatccccgggagagttggcctccagggaccaaagggaatgagaggcctggagggaactgctggcctgcctggaccccctggccccagggggttccagggcatggcaggggcca

SEQ ID NO: 85186 - DNA, 1052 bp, Homo sapiens
atggtcagaaggcagagatataagaagtttgtctatttattaattaattagaacaatggtgaatggttctccaataagcagagaaaataaaacttataatataaacaaataaccattcattcaacatttattgtggcagtttagatttaaataactttatatcaagggctgtatgattctgaaacaaataattaaaaatcccggaaagtcttttctcctgaacacatttaagaaactagaaatcactttgggtatgatttgtttagaagcaggaagatgaaaagggtagcctgtagaagaccttgccaccccaagaaatcactgatcttattgcttggtccttgggggactcactctccttctgtgccaggacacgggtacctgcctctttttttccctagatcattggaggtatcgaccactcgctgtacacaggcagtctctggtatacacccatccggcgggagtggtattatgaggtgatcattgtgcgggtggagatcaatggacaggatctgaaaatggactgcaaggaggtaataaaaccaagggagagcctgggaacataagggggtaggcagtacaatgtgaaggaagactctggttatcatgttgggaggatgaggcagaggtaataggacctgcagaaagggttggaagttgagcctagaacagtcaggggcttaatggtcacacagcaggatctgcggtttggggcctagggactggtagtgaaaaaaaaaacatggaactagttctgatgtctggactctagtcactgccttgcttcgtagccttgggcaagtcttttgtgagacagggtgatagaatgaagagtcttgtttttggagtcaggaagacccagatctgaatctagctctgatttgtactagctatgtacccttaggccagttactattctgtgtctcagtttccttatctgcaaaacaggtaaaaacaactttctcagaatatcagagataatgtgtaaagtgtttatctctgtggttggcagtactcaataaaaggtaactaaatcatttatgtctacc

SEQ ID NO: 85187 - DNA, 1564 bp, Homo sapiens
acctggtcacctgtctggagcaaagaaaagagccttacaatttgaagatagatgagacagtagccaaacccccaactgtgtattcttattacaaccaaggcattttaccagagcatggcatacaagattcattcaaaaaagcaacactgggaagatatgggagctgtggccttgaaaatatatgcttatggaaaaactgggaaagtataggtgaaggtgaaggacaaaaggaatgttataatctatgtagccaatatttgacaactagtcataacaaacatttaactgtgaaaggagacaaagaatatagaatatttcagaagaagcctcagtttctgtcagctgctcctacagaaccatgtattcctatgaataaatatcaacataaatttttgaaatctgtcttttgtaataaaaatcagataaattttaaccatgactcaaatattagtaaacatcatagtactcattttctagaaaactattacaattgtaatgaatgtgaaaaagtattttaccaatcctcaaagcttattttccctgaaaatatccatattcaagaaaagccttacaactctaatgaatgtggtgaaacttctgacccattctcaaagcttactcaacatcaaagaatttatattggagagagctcacaaagatgtaataaaaaatgtataatagtctttagtcaatcacatctaaagggacataagataattaacactggagaaaaatcagtgaaatataaagaacgtggcaaagcttttaccaggggcttacatcttggacatcagaaaattcatactggagagaaaccttacaaatgtaaaaaatgtgacaaagcctttaacaagagttcacaccttgctcaacatcagagaatccatactggagagaagcctttcaagtgtaaggaatgtggcaaagcttttaacagaggctcataccttactcaacatcagagaatccatactggagagagagctttcaaatgtgaagaatgtggcaaagcctttaacagggggtcataccttactcaacaccagagaatccataccggagagaaacctttcagatgtaaggaatgtggcaaagcctttaatagaagctcatacgttactcagcatcagagaatgcatactggagagaaacctttcaagtgtaaggaatgtggcaaagcttttaacagagcttcacaccttactcaacatcagagaatccatactggagagaaacacttcaaatgtaaagaatgtggcaaagcctttaacaggggctcacaccttactcgacatcaaagaatccatactggagagaagtctttcaaatgtgaagaatgtggcaaagcttttatctggggctcacaccttactcaacatcagagagtccatactggagagaaattcttcaaatgtaaagaatgtggcaaagcttttaccaggagctcacaccttactcaacatcagagaattcatactggagagaaacctttcaaatgtaaagaatgtggcaaagcttttaacagacgctcaacccttactcaacatcaaataattcataccag

SEQ ID NO: 85188 - DNA, 416 bp, Homo sapiens
ttaatatcctatcagcaaagatttcattcatgttactgaagccccaacatgaaggggggttgagatttttacattaatgaccgagataaaagtgaaacctcacaaatggatgttggaactaaactcgttcattaatgacagaagagacttcttttgctgataatagctttcaagtactagaaaaatatttcctcaagtttttgtgttcacaaactaaggcgcttttaagttcaatcttcattattaaaatttcttctactctgtcagtctagacattcaacaaaacaaatcaagctctggtttgtcatgcttcccaatttctatagaataggtactcccccatgggtgatttcaaactaccaaattaacatttttgattgcagcgttaggaagggatacgctgaatcataccatcg

SEQ ID NO: 85189 - DNA, 601 bp, Homo sapiens
gtgaccgcagattcttcctgctcaaccgcagattctacaggtgcatcctgtagacactttacaggcgaagttacagggaagaggatttctttaagaaggaaagttggaagacagtggtgagcaattagaattcaccaccagcgtggaacgatggaggatcaacagcagcaggattgttctccttctttagaattcagggcttcagggattagtgttgattgtgatggtgattgtgggggtgatggtgatggtgatgatggtggtgatgatagtagtgatggcgatgataactgtgatgatggtggtgggaatgatagtgataccaactctcctgcttgtcggtgttgtggaccctgtcagcccgtgctgaggacttctgtcctgtctgctctgaggccccagtgctgctttgcttggagcctgggtgcagggcagcagactggcctcagattcctgtgggcaggggacagtgggcatcggatatttgatgagcttgtttcggccagattcaggcactggatggtgactgggccatgtggacaggctttggtgcctgtccgtggcctggtcaggaagacccattgcatggagtggtaaggag

SEQ ID NO: 85190 - DNA, 422 bp, Homo sapiens
tagagactgagagatctaaatgtgacatcacaggtctgcttgagggacaagaatataagttccgtgttattgccaagaacaagtttggctgtggccctcctgttgaaataggaccaaatcttgcagttgatccactaggtcctccaacatctccagagaggctcacatacactgaaaggacaaaggccactatcacacttgactggaaagagccccgcagtaatggtggcagtcccatccaaggatatatcattgaaaaacggcgtcatgacaaacctgactttgaaagagttaacaagcgactctgcccaaccacatcttttttggttgaaaatcttgatgaacaccaaatgtatgagttccgtgtcaaagctgtccatgaaattggggaaagggaaccatccctaccctttaaaggaagt

SEQ ID NO: 85191 - DNA, 597 bp, Homo sapiens
  misc_feature (1)...(597): n = a,t,c or g
cggacgcgtgggcggacgccttttggaaaacatttgggccatagctgtgtgtcctgaacgtctagcgcaggctagatatgacattaacaactcaattgttggcaacaaggccccacgaggcacaaaggcacggaactttaggacactgctgccattgggctttggagaccagccttgcctaatcaaccaaggagatctcttgtttcaggctgatttgggtggaagttgtatggccccagcccgcatgtttacatgctccaaaagaggatggccacacaactaatctctcctttgtcttttcccaggcacatccactgtagtatgcaagcctatagtcattgaaactcagctctatgttattgtggcccagctgtttggtggctctcacatctataagcgagacagttttgcaaataaattcataaaaatccaggntattgaaattctcaaaatccgaaaacccaatgacattgaaacattcaagattgaaaacaactggtactttgttgttgctgacagttcaaaagctggttttactaccatttacaaatgggaacgggaaacgggtttctactcccatcaatcctttacacgggt

SEQ ID NO: 85192 - DNA, 403 bp, Homo sapiens
agaggaccccgaggagctaggccacttctacgactaccccatggccctgttcagcaccttcgagctgttccttaccatcatcgatggcccagccaactacaacgtggacctgcccttcatgtacagcatcacctatgctgcctttgccatcatcgccacactgctcatgctcaacctcctcattgccatgatgggcgacactcactggcgagtggcccatgagcgggatgagctgtggagggcccagattgtggccaccacggtgatgctggagcggaagctgcctcgctgcctgtggcctcgctccgggatctgcggacgggagtatggcctgggagaccgctggatcctgcgggtggaagacaggcaagatctcaaccggcagcggatccaacgctacgca

SEQ ID NO: 85193 - DNA, 418 bp, Homo sapiens
agagtccacatgtctgatgacagttctaaaacaatgatggtggatgagaggcagacagtaagacaagtactggataacctgatggacaaatcccactgcggttatagtttaaactggtcactggtagaaaccgtttctgaattacaaatggagagaatctttgaagaccatgaaaacttggttgaaaatcttcttaattggacaagagatagccaaaacaagcttatatttatggagcgtatagaaaaatatgcacttttcaaaaacccacaggtaagaccaaacaacttacagaggtcaggatttgtaaatatgtctcctattttattcgattactgctaagttagagttaaaagactggtaaacacctggttggagcgatatacctgcaaaattctattgggaccttttcttactc

SEQ ID NO: 85194 - DNA, 451 bp, Homo sapiens
gctgctgcagcacagattcacagtccactctccagagctggtacctctgttataaaggagcggatcccagagagtccttctcctgctccttctctagaagagaatcatcgtcctgggagccagacctcttcccacaccagcagcagtgtgtccagctctccctctcagatggatcatcatttggaaagaatggaagaggtaccagttcaaattccaataatgaagtcacccttggacaagatacagctgactcctgggcaggcattgcccgctggattccctggaccattcatttttgctgatagtctgtcctccgaggagactctgttgaccaacattcaggtcaacaatatttctataaacaaaataaatggtctgctgaaagttgctttggataatgctcgcatccaggagaagcagattcaacaagaaaagaaggagctgcgactgt

SEQ ID NO: 85195 - DNA, 835 bp, Homo sapiens
  misc_feature (1)...(835): n = a,t,c or g
cacaaggacaagccattgtggaaagaatgattcactccctaaaacaacaattacaaaagcaggagaggaggatcaatgattataggaatggtgattataggactctgcacatacaactaaatctagcattattaactttaaattttttgagcctgcctaaaggccggatgctaccagcagctgaacagcatctacagaaaccagcttcaaagacagaagcagaacaactggttttgtggagagatccaataacaaaaagttgggaaataggtaaaataataacatggggtagaggttatgcttgtgtttctccaggccaaaaccagcggccaatttggatatcatcaagacacctgaaacttcatcatgagccagatgctgaggaagagattttgggaggaacccaaggacctcccacttgcagccatgttgagactgacaataagtccacctttcctgcttgtagtgggtcatttaaaacttgatctccctaatcatcatgggacttgtcaagaatgtagattgttttcttgtgtgaattcttccttgtataatactgatcattctattttagtggtaagagcccgagaaggagtatggatacctgtaaagctttctggtccttgggaagcctctccttctgtgcatattattactgaaattcttcaaaagattttgagggcactcttgggcgttaaattgctgctttaattttaggtcattatggggatgattgctgtcacaggctactgccacgggcggctggggagttgctttggcattcccccggtacaaacaggcgggctttggnaaataattggggcngggaaatttc

SEQ ID NO: 85196 - DNA, 440 bp, Homo sapiens
tttaaaatgtatatgtcttgccatactgaacccatgttgaagccatatttccacagggtaatagctggcagaactgagttaagggttgccccttttagatgaggcatatgctctcccatcctccacagttcacactatgcctgcttatctcttactgatattagatattagtaatagtcacatttatgcattgtctttatttaaaaaaatagttctcttttttatgacagtagcaatagttagaatatgaaagagagaagaggatttatccttgccctactcaattccttgatatcatctgcctggtaatgaggtgttggagctggctaatactgacttatgagagcatattgttaaatattcaggaattttaccagcagcaaccaccattggtagattggaatcagccacagtgggagtatttacaccagggaaatcat

SEQ ID NO: 85197 - DNA, 451 bp, Homo sapiens
  misc_feature (1)...(451): n = a,t,c or g
cccacgcgtccgcccacgcgtccgattggcatcacttcctgatagcaagcccatctgcttggaatgtaaaactgggcagcacccatgtttttcgtgtaaagtgtctggtaaagatgtgaagcgttgttctgttggtgcttgtgggaaattttatcatgaagcctgtgtccgcaaattccccactgccatctttgaatcaaaaggattccgctgtcctcagcactgctgctctgcctgctctatggagaaagatatccacaaagcaagtaaaggccgcatgatgagatgtttaagatgtccagttgcctatcactctggagatgcttgcattgcggccggaagcatgttagtatcctcctacattctcatctgtagtaatcattccaaacggagcagtaattcttctgctgtaaatgtaggcttttgtttcgtttgtgccagagggctgatn

SEQ ID NO: 85198 - DNA, 1130 bp, Homo sapiens
gtgctgtcagagggaaggtctagggctgaaggctgttgttcagattcttttgtcccacggcaggaacggcctgccaggggagcccgcgagctcccagggcctttctgctgcttcctctaccccagtatttcacttggctctccaaattgactcagctccagataacattgactgggtagaaatgctatttaataaaaatatggtgactgaacgcttacagaatgtcatggttcttgagcagtgtttcagtgattcttcttctctttatagattcctcacctattcctacctcttggccttcaatgtgtggcttctgcttgcacccgtgaccctgtgctatgactggcaggtcggcagtattcctctggtagagaccatatgggacatgcggaacttagccaccatctttctggcggttgtgatggccttattgagcctgcactgcttagcagcctttaagagactggagcacaaggaggttttagtcggcttgttgttcctggtgttcccgttcattccagccagcaacctcttcttcagggtgggttttgtggtggcggagagagtcctttacatgcctagcatgggctactgcatcctttttgtgcatggactgagcaagctctgcacttggctgaatcgatgtggggccaccaccctgattgtgtccactgtgttgctgctgttgcttttctcttggaaaactgtgaaacagaatgaaatttggctgtcaagagagtccctattcaggtctggagttcaaactctgccccacaatgccaaggttcactacaactatgccaatttcctgaaggaccaaggtcggaacaaggaagcgatctaccactacagaacagctctcaataataataaagcttgggattatctatgctggagattcagaaaaacactgacagatctgccatagacctccagagctctccgactgttcggttaccctggagaaggtttctaacattctaccttgtgtgatgggagtagaaagtccagagaccacccaacaagtcagcccttcctacacaaaaactcccaagaaatgcctcagctaataagccccgaaagagaaatagtgattctccctgaataaagtcaagataataatgtgtaaa

SEQ ID NO: 85199 - DNA, 349 bp, Homo sapiens
cgcatgatggtccggtgctggggctacacccgatgttcggtccggacagcggtagcctggcaaagcaagttgtggtctggtgtgatggacgtaaaccggaagcataccaatggtttctggagcaaattcaggtctggggcgctcggctgcatcgtattagcgccgtcgagcacgatcagaatatggcgtttattcaggcactgcgccactttgctacttttgcttacgggctgcacctggcagaagaaaatgttcagcttgagcaacttctggcgctctcttcgccgatttaccgccttgagctggcgatggtcgggcgactgtttgctcaggatccgcagctttatgc

SEQ ID NO: 85200 - DNA, 418 bp, Homo sapiens
cggacgcgtgggccttcctgcatgtaattccccatccaaagaaatgaaggagattcccttcaatgaagatcccaatcccaatactcactcatcaggaccctcaacccctctgaaaaaccaaacttattccttttcaccttccaagtcctacagtcgacagtcctcttcttctgacacagatttgagtttgacacccaaaactggaatgggaagtggtagtgctggaaaagaaggggggccctttaaagctcttttaagacaacagactcaatcagcgttggaacagagggaatttccattttttaccttgacggcatttcctcctggattccttgtacacgttgggggtgtagttagtgcacgttctgtgaagcttttggatcgtatccacaatcctgatgaaccagaaactcgagaa

SEQ ID NO: 85201 - DNA, 393 bp, Homo sapiens
  misc_feature (1)...(393): n = a,t,c or g
gacgacaaacctagtttctttggtctgcctgccaatatcgctcgctcatctcagcgcatgatcagttcccaggttatttcacagttgaggattttgggcagatccataacagctggttccaaatttgatagagaaatctggtctaatgaactttctcctgtcctcaatctctggaagaaactaaaccagaattcaaacctaatacatcagaaagtgcctcctcctaacgatcgacaaggatctccaatactgtcattcatcattcttgaacaatttaatgctattcgtttagtacaaagtgtccaccagtctcttgctgctctcagcaaagtcatcagaggaactactttactgagttcagaagtacaaaaattggcaagtgctttattaaan

SEQ ID NO: 85202 - DNA, 525 bp, Homo sapiens
  misc_feature (1)...(525): n = a,t,c or g
ctcagtggccacctccttctcaagcaaagtgggcccacgcagccagagaggacagccttcctgaggaatcctcagcccctgattttgcaaacctgaagcactatcaaaaacagcagagtcttccaagtttatgcagcacttctgacccagacacacctcttggggccccgagcactccagggaggatctccctccgaatatctgagtctgtcctgcgggactccccgccacctcatgaggattatgaagacgaagtgtttgtgagggatccgcaccccaaggccacgtccagccccacatttgaacctcttcccccacccccacctcctccaccgagtcaggaaaccccggtgtatagcatggatgacttccctccacctcctccccacactgtatgtgaggcgcagtggacagtgaggatcccgaggggccacgcannggcttcaacaaactttctaaagtgacaattgcaagggaaaggcacatgcctggtgcagcccatgtggtaggtagtcagacactggc

SEQ ID NO: 85203 - DNA, 502 bp, Homo sapiens
catatgaagattttattaaagagaaaaacattcccaatcaataaagaaattacaatttttaagtaactcacagatatggtattcctgtatgctgcttgtataaccatatattgcagaatatccaaatattatgatcatgacaacatctctactatccaactccataatatgtgctgaatgtccctccacagcatactgctgaccatgtccaagaacagtaggagtttttgtactccatgactgactatgtatgttaaaaacccataattcatctgtgacattgccatcatttgtttcaattctgcctccatacataaagatgttttcctgatataaagcaagagagtgtccatatctctggagaggtccccttgatggagttcctacattccatatactgctttctaaattgtaatttaggaccatttgaaaagaactgtagttaaaagtatatcctcctatctcccacataaatttcccgtgtaaaactgctttatgtgaa

SEQ ID NO: 85204 - DNA, 695 bp, Homo sapiens
cgtcgacttttttttccttgggaagcaggagtttatttttatccttttgtaagtattaactcggtaatcacaacaaacacggagcaatctcaatgctgtttatccggaggacagtctgcggggtcgtgacgattcttttcttcttgaagtttttccttttcctgaatctcataatgattcttggccatgattctgtcttttcaatgactgtggcttctactcgaacaagatcctttccgaggagtggcttgccaagcagcgtgaagttgtctgccccaaccagcaggaccttctccagtcgaattctctctccacacgcaaggtctagttcatttccaattaagatcaggtcttcagaggtcaccttccactggcggctggcaaagtgcaccacggcaaagagcctgccatactgccccgtgacgatcatctcattcaccttcttcacgacctctgcatggtgtctggtctcctcaactgggtctggcagaacaacttctggccaaggtggtgaactcagggatgttttaggaacatatcctggtagatatgaagtgctctgtgaattgaaccttcgagaagcagaccaaagggaggctgctccgggccccgaaggtctcaggatgctgtggctgcacgcggacgccagccgccctaaggtgaccgtcagggaagatgctgccgatgccgccgcc

SEQ ID NO: 85205 - DNA, 386 bp, Homo sapiens
cgcactctgttattccgccgctacgccgtcgagtttctctgccggccgaaatggaagaagagattgccgtgctggtcattgacaagggctccgggatgtgcaaagctggatttgctggggacgacgctccccgtgccgaggttccttccatcggagggcgccccagacaccagggcgtaatggtgggcatgggccacaaggactcttacgagggcgagaaggcccacagcaagcgccgtatcctgaccgtggggtaccccattgagcatggcatcgtcgccacctggaacgacatggagaagatagggcaccataccttctacaacaagctgcggcgaggcccgaaggagcacccattgctgctgaccgaggacaccctgatcccg

SEQ ID NO: 85206 - DNA, 450 bp, Homo sapiens
  misc_feature (1)...(450): n = a,t,c or g
gtggccnattgaaaactggaggcatgcgaaacacgccccggaataccgacgcgtcccccgcaacaaggttggaagaaaaattactggcattgagcctttacctggagaaaataagatattggtaacctcaggggactcccgaatcagactatatgatttgagagatttgtcactatccatgaagtataagggttacgtcaatagcagcagccagatcaaagcaagtttcagccatgattttacttacctcgttagtggttcagaagataagtatgtttatatctggagtacctaccatgacctaagcaagtttacttcagtcaggagagatcgtaatgacttctgggaaggtattaaagcccacaatgcagttgttacatcagccatctttgcaccaaacccaagtttgatgttatctttggatgtgcaatctgaaaaatcagaagggag

SEQ ID NO: 85207 - DNA, 512 bp, Homo sapiens
gacgaggagctgcccgacctgtccgtgtctcgcagaagtagccacttgcactggggcattccggtgccggggtatgattcgcagaccatctatgtatggctggatgccctggtcaactacctcactgtaattggctacccaaatgctgagttcaaatcttggtggccggccacctctcatatcataggtaaggacattctcaaattccatgccatctattggcctgccttcctgttaggggccggcatgagcccgccacagcgcatctgtgtccattcccactggacagtctgtggccaaaagatgtccaagagcttgggcaacgtggtggatcctaggacttgccttaaccgctataccgtggatggcttccgctactttctccttcggcagggcgtccccaactgggactgtgactactatgatgaaaaggtggttaagttgctgaactccgagctggcagatgccttgggaggtctcttgaaccgatgcactgccaaaagaataaatcc

SEQ ID NO: 85208 - DNA, 331 bp, Homo sapiens
gctgttataaacatttttacaagaagagccactcatctccaaatcaaagaggactggatcaaatggtgagctatataatccatatcttgtctgaagtaaagcctccattggtgttagcctgtcctgtaactgtctggacactgcagtaagcaaagatgcacaagctgtactgcatccagccagatcttcatctttcacataattcagtaagacaaaataccaatagacagaaccaccagttgttgctgcaggtaaaaatgacatattatcaagtaaagccttcaacagaacaggtccaaatgctggttgacatgggtcacatttggcaatt

SEQ ID NO: 85209 - DNA, 341 bp, Homo sapiens
gaaagtttctcatcctcatcacggatggtgaagctcaggacatagtaaaggaaccagcaatagtgcttcggcaagaaggtgtaatcatctattctgtgggagtgtttggctccaatgtcacccagcttgaggagatcagtgggaggcccgagaaggttttttatgttgagaattttgacattctgcagcgcattgaagatgatcttgtttttggaatatgcagcccccgtgaagaatgcaagcggattgaagttttagacgttgtgtttgtcattgatagctctggcagtattgactatgatgagtataatatcatgaaggattttatgattggcttagcg

SEQ ID NO: 85210 - DNA, 967 bp, Homo sapiens
cttaaaaagaggccgatttcatctcaaaccctggtgcagaggtcctaggcagagtgggaaacttgccctggagaagcagaagcagagaccaaatggctatctagtaaggatgttttataatgaatccttcattcctttaaagagcccattattttctgaggcttcatgggatgcgtaatagcccatgccttcactgctaagcataaaacatggagctcttagtagcctctaagacaatcatccgtcattcccacgattgccttcatcaaggccaggtactaaagaagtgctcaaagaaatacacatttctgatacaacagctgatgtaattttttatcccatttatagaatgagtgagatgatatttcgaagaataaagatgccctggctttggcttgatctctggtaccttatgtttaaagaaggatgggaacacaaaaagagccttaagatcctacatacttttaccaacagtgtcatcgcggaacgggccaatgaaatgaacgccaatgaagactgtagaggtgatggcaggggctctgccccctccaaaaataaacgcagggcctttcttgacttgcttttaagtgtgactgatgacgaagggaacaggctaagtcatgaagatattcgagaagaagttgacaccttcatgtttgaggtattgtatattgttaggttcagatatcattaaacaaatttcagttattgttagaatctttatcattattttttaaaacaatcatattttagagtaggttaactaaagaagactcattatattttaattagaaattacaaaatttaagaaactgattaagtaccagctcaacttcttcagaaaacgattttgactagtgctgggcacagcagtagacacatttgtttttcctcaagaaaacctaagatttgtcagagttttcccaagcagaagagcagccagagattgctctcagttctccatgtg

SEQ ID NO: 85211 - DNA, 194 bp, Homo sapiens
gtcagatctcaggctcctcaactccatgtacgctgtgctcgtggaagtgtctattgtcatggtgactctgccctggagcttctcaatgtactgagtattcccattgtaaccactgatccatcccatccattcaagcccttgtccaggggcctgtcgcacccaggtgataccataattggaagtcgacgcggccg

SEQ ID NO: 85212 - DNA, 963 bp, Homo sapiens; identical to SEQ ID NO: 66752

SEQ ID NO: 85213 - DNA, 391 bp, Homo sapiens
tgcagccctatgtgcaggaaagccagaacaagttcttcaagctgcccgtgtccgtggtcaacaccacactgccgtgcgtggcctacgtgctgctgtcactcgtgtacttgcccggcgtgctggcggctgccctgcagctgcggcgcggcaccaagtaccagcgcttccccgactggctggaccactggctacagcaccgcaagcagatcgggctgctcagcttcttctgcgccgccctgcacgccctctacagcttctgcttgccgctgcgccgcgcccaccgctacgacctggtcaacctggcagtcaagcaggtcttggccaacaagagccacctctgggtggaggaggaggtctggcggatggagatctacctctccctgggagtgct

SEQ ID NO: 85214 - DNA, 395 bp, Homo sapiens
  misc_feature (1)...(395): n = a,t,c or g
cagaaactgtaccaattgcttcaggagaatctgatatagaaaatctggataataaggagattcagagtaagtctggtgatggaggcagcaaagaggtaagatgtttaaatatcctgattgcttagtggtgatttatagtattgttgataaggaagtaaatcagcgccgaagttccacagccagattatccactcaattctaactccatcactcctagctccatcactcttagcctctgactttatgcttttgatcaaattacttaaactttccaagcttcagttttctcatatttaaatgaggctaaaatggtatttagtccatggagggggggaggtaatagtgcatagaacaatacctagtaaagagtaagcacttaggaaacattagatgan

SEQ ID NO: 85215 - DNA, 479 bp, Homo sapiens
tgcgtacgcagacgcagtttggattctctagagcggccgcactacacgccttcatttttgtctaaagcagtccaacacatagaattttcctggccctttaactttttcttttccttgtagttcctggcttcttctgctgcgacacctgctgcttcattgaggtacttgttaccaactttgctttcaaaccattttaggtccacaaagacttcactgaagtgctcccgatcaaaatctgatagtttcacaaggtatttctcaaatcgaggtaagttgaggtgcccactttcattaatataacccccaagttctggcaggatggtaacatatgttccataaagaagaggcagtgcatcatgattaatatgtaaatgaggtagatgagggataaaatcattaccaacaagaaaccccatcaaaatccaatcatctattatcctttcaatatcatatttaaatgtgatcttttcttttaatac

SEQ ID NO: 85216 - DNA, 356 bp, Homo sapiens
gagagttcacactggagaaaggccatatgaatgtaatgaatgtgggaaatcatttcatgacagctctgggtttcgtgttcatcagagagttcacactggagaaaaaccgtttgagtgtagtgaatgtgggaagtcatttcctcaaagctgttccctccttcgacatcggagagttcatactggagaaaggccttatgaatgtggagaatgtggaaagtcatttcatcagagctcttccctccttcgacatcagaaaactcacactgcagaaagaccttatgagtgcagagaatgtgggaaattcttctccagtctccttgaacacaggagagttcacactggagaaaggccttatg

SEQ ID NO: 85217 - DNA, 360 bp, Homo sapiens
gtagcttaagacacacaaaaaccaaagacagtcattttctccatgtacctggccaaattcttctataagctccttctggataagctggaatgcgtgctcagttctcaccattatatcaagagccccagatagtgttttcaactttccaacattgctattctgacctaaagttttaaatacaaaacgttcatttctttaatataaatctagaaacccatctaatgttaatgtattaatgaaaattcagactttcaaaatgctataaaggaagctaatgagaatcttaaatcttctaaatccaacttctatttaataatattcccttgacaaaaatactaagtctggaccaaagcataaata

SEQ ID NO: 85218 - DNA, 353 bp, Homo sapiens
gcttagtgccatcctttataagctcaaatctgtcatcacctgtgatttcctgggttccttttagccaacggaatgttttgggctccctggatacttcacactcaaacttagcctcatctttctcgaagactttaacatcactgagaggtgtgatgaagataagaggcaattctgaaagaagtggacagtggatgaagtcagaatacgtttccattgatgacccttgatcaatgcaggggtgtatcaggaagtcttgcagagaaaatacaaaaacgtggctgacaagtagagcatacctttcactttcagattggctgcagatttggcattagcagcctggaaggaaacctctc

SEQ ID NO: 85219 - DNA, 353 bp, Homo sapiens
cgaggttgaccacaggggcgattacgtgtcccatgaaatcatgcaccatcagcggcggagaagagcagtgcccgtgtccgaggttgagcctcttcaccttcggctgaaaggctccaggcacgacttccacgtggatctgaggacttccagcagcctagtggctcctggctttattgtgcagacgttgggaaagacaggcactaagtctgtgcagactttaccgccagaggacttctgtttctatcaaggctctttgcgatcacacagaaactcctcagtggccctttcaacctgccaaggcttgtcaggcatgatacgaacagaagaggcagattacttcctaaggccacttc

SEQ ID NO: 85220 - DNA, 407 bp, Homo sapiens
ctacctttggttgttcatgcacagattgcttctttcaaaaatgttgtcctgctgaagctggagttcttttggcttataataaaaaccaacaaattaaaatcccacctggtactcccatctatgaatgcaactcaaggtgtcagtgtggtcctgattgtcccaataggattgtacaaaaaggcacacagtattcgctttgcatctttcgaactagcaatggacgtggctggggtgtaaagacccttgtgaagattaaaagaatgagttttgtcatggaatatgttggagaggtaatcacaagtgaagaagctgaaagacgaggacagttctatgacaacaagggaatcacgtatctctttgatctggactatgagtctgatgaattcacagtggatgcggctcgatac

SEQ ID NO: 85221 - DNA, 383 bp, Homo sapiens
ggccaccgggacccaaaggtgatcagggggatgaaggaaaggaaggcaggcctggcatccctggattgcctggacttcgaggtctgcccggggagagaggtaccccaggattgcccgggcccaagggcaatgatgggaagctgggggccacaggaccaatgggcatgcgtgggttcaaaggtgaccgaggcccaaaaggagagaaaggagagaaaggagacagagctggggatgccagtggcgtggaggccccgatgatgatccgcctggtgaatggctcaggtccgcacgagggccgcgtggaagtgtaccacgaccggcgctggggcaccgtgtgtgacgacggctgggacaagaaggacggagacgtggtgtgccgcatg

SEQ ID NO: 85222 - DNA, 349 bp, Homo sapiens
ggtgaagctgaccactggtcagattggtcacgataactcaggactgttagccaaatggctagtggattgtgtcatggtcagaaatgaaatcacaggacatacatacagattcccatgtgggcggtggctggggaaaggcattgatgatgggagcctggagagaattcttattggagagttgatgacatcagcatcagatgaagatctagtaaagcagtgtcggactccaccccagcagaagtcacccaccacggctaggagattgagcatcacttcactgacaggaaaaaacaacaaacccagtgctgggcagatacaagaaggaattggagaagctgtgaacaatatg

SEQ ID NO: 85223 - DNA, 517 bp, Homo sapiens
atgcatgaaaggactcacactggaaagcaactggatgaatctaaacaatgtgaaaaaacctttggatctgtcagaaaccttcaaattcatgaaaagacacaccctggagagaaaccctataaggaatatggaaaagcattcaacaatttctcttcctttcaaatacatgcaacaatgcacagaggacagaatgcctatgaatgtaaagagtgtgacaaagcattcatatctgccaagatccttcgagtacatgcaagaacacaccctggagagaaaccctatgaatgtaaggaatgcggaaaagcgttcaattatttttcttctttgcgtatacacaaaaggatgcacactggagagaaaccatatgaatgtaaggattgtgggaaagcattcagtttgcctggttcctttcgtagacataaaagggctcacactggagtgaaaccgtatgaatgcaaggaatgtggcaaagccttcacttcttctggttcctttcagtgtcataaaaggattcacc

SEQ ID NO: 85224 - DNA, 356 bp, Homo sapiens
ctgatgcttacctggaccagtacctgtggtatgaagccgacaagcgccgcctgttcccaccctggattaagcctgcagacacagaaccacctccgctgcttgtttacaagtggtgtcaaggtagaactttcatgagatcgccctgtgaggaacggggcaggaatttagttctacgtcaaaaatctcatctgggtagcatgattggtttactctcttgatgcgtggtagtaaagggaagtagtgttcgtgttaaactgaggaaaagcccatagtcaaagcaatccaaatgaatacgtggaatcatagtgggattggttatggaaggtaatgatagttcctgtggggctagtcttgca

SEQ ID NO: 85225 - DNA, 366 bp, Homo sapiens
  misc_feature (1)...(366): n = a,t,c or g
gcatctacaggtagcagccagggtattcatgccactgcaggctgtggacagtgcacctaagcctctaaaggggcaggctcaggcacctcaacgactacaaggggcagctcgggtgttcatgccactacaggctcaggtgaaggctaaggcctctaaacctctacaaatgcagattaaggcacctccacgactacggagggcagccagggtgctcatgccactacaggcacaggttagggcacctaggcttctgcaggtacagtcccaggtatccaaaaagcagcaggcccagacccagacatcagaaccacaagatttggaccaggtaccagaggaatttcagggtcaagatcaggtactccgacn

SEQ ID NO: 85226 - DNA, 382 bp, Homo sapiens
gtggaacggagggcagttggcaagaagtcctggattaagataggcgaggtggacggcaaagtcaccaacttctccaccaacaaggtggaagagggaaaagcctaccagttccgtatcctggcagtcaattcagaaggtgtgattgacccactggagacagaagaagtgtttgcaggaaatcccatagagcctcctggttttgcctcccagcctcaagtgactgatgtgactaaagaagccgtgaccatcacgtggaatgcccctacccaggatgggggagccccagtgctcggctacattgtagaacgaaggaagaaaggcagcaacctgtgggtgccagtcaacaaggaccccatccagggcaccaagtgcactgtggatg

SEQ ID NO: 85227 - DNA, 578 bp, Homo sapiens
  misc_feature (1)...(578): n = a,t,c or g
atgttacacaggctagcagaaactgtctaattattagtaaaatctgctattttaccttcatttttaacattgcttgtctgtaaatctgtgggatggccttgaagtgaaaggcgaggttgctgtaagcggctaatcataggctgtggggacactctactatattctattccccgagcaggagatcgtgaacgaggtgaatttctgggtgactgcttaggtgacggtcgaggtgaattgcgtggtgatggtgaaaacctgttaacagcagggtatactgcatgatgcatattgtcatcttcatcatctaaactttgtgcatcaagttcctgatcactaaaagtaccccgtcttgtagaattgcaagatgaaccagaactgcgccgagacgtggtggctgcatattcttgccggagactttcttcctgcatccgggctagaatctgtacatcagttacatcatttagcttataattggatccaattgaatcttcatctaattctgaagcacttaactcactatctatagaggactgaggactgagtggaggatttctgtctgagcttntcaagttacctga

SEQ ID NO: 85228 - DNA, 1053 bp, Homo sapiens
cagaacttggaagacagagaagttttgaatggtgtacagacagaactactaacttcgccaagaactaaggacacattgagtgatatgacaagaacagtggagatttctggggaaggaggcccattgggaatacatgtagtgcccttcttttcatctctgagtggaaggattctaggactcttcatccgaggcattgaagacaacagcaggtccaagcgggagggactatttcacgaaaatgaatgtattgtaaaaatcaacaatgtggatctcgtagacaaaacctttgctcaggctcaagatgtcttccgccaggcaatgaaatctccaagtgtgctcctccacgtgcttcctccacaaaaccgtgaacagtatgaaaagtcagtcattggctctcttaacatttttggtaataatgatggcgttttgaaaaccaaagtgccgcctcctgtccatggaaaatcgggactaaagacagcaaatctcacaggaaccgatagtcctgaaacagatgcatcagcttccctgcaacaaaacaagagtccccgagtaccaaggctgggaggaaaaccatcctctccctcactctcgcctctcatgggatttggcagcaataaaaatgcaaagaaaattaagattgacctaaagaaaggccctgaaggacttggtttcactgtggttaccagagactcttccatacatggtcccggtcccatttttgtaaaaaacattttaccaaagggagcagcaataaaagatggccgcctacaatcaggggacagaattttggaggtaaatgggagagatgtcaccggacgaacccaggaagagcttgtggccatgctcaggagcaccaagcagggggagacagcatcgctggtcattgcccgccaagaaggacattttctgccccgagagttggtaatgttcagatctcagtctcactgaatttttaatgccgagcttaatacactcaatgaactcattatagctgagaaacgagttctaaatcacaggcttcattcataaccaaaattgaatcacactcagggt

SEQ ID NO: 85229 - DNA, 363 bp, Homo sapiens
ggctttctgggaggaaggttttgtaacgtcatccccaagctgctctttgctttcacccagggactcttcactggacgattccacagcatcttcttccacaatgagagggctgaggccagggagaacaggcgcagcctgggaatctgtgtgcaaagcctgcagcagttgttcgagcttctcgtttaggactgaacatttactggccacggcatcagctacaacggcattttccaaggttttgtcatacgtcttttctactttggcaacgaagtcctttacagtttcacatagcgtcttggcagaagatatgaccactgcatgttcatcagaattgaggatttttgtaagatgcgttgcaactgg

SEQ ID NO: 85230 - DNA, 596 bp, Homo sapiens
cctatgagtgctgtgaatgtgggaaagtcttcagtaggaaagaccagcttgtttcacaccagaaaactcattcaggacagaaaccatatgtgtgtaatgaatgtgggaaagcttttggtttaaaatcacagctcattatacatgaaagaattcatacaggagagaaaccatatgaatgcaatgaatgtcagaaagcctttaatacaaagtcaaaccttatggtacatcagagaacccatacaggggagaaaccttatgtttgtagtgattggggaaaagcctttacattcaagtcacagctcattgtacatcaggggattcacacaggagtaaagccctatgggtgtattcagtgtggtaaaggattcagtttgaaatcacagctcattgtacatcagagaagtcacacaggaatgaaaccttatgtatgcaatgaatgtggcaaagccttcaggagcaagtcataccttattatacatacaaggactcatacaggagaaaaactccatgaatgcaacaattgtgggaaagccttcagttttaaatcacagctcattatacatcagaggattcatacaggagagaacccctatgaa

SEQ ID NO: 85231 - DNA, 384 bp, Homo sapiens
gcaaactgggattattttatgaatatcttgaaatgattattcagtttgggttcgtcaccttatttgtggcctcttttccactggcccctctgttggctctcgtgaacaatatattggaaataagagtggacgcatggaaactgaccacccagtttagacgcctggtaccagagaaagcccaagacattggagcatggcagcccatcatgcaaggaatagcaattctggctgtggtgaccaatgccatgatcatagctttcacgtcggacatgatcccccgcctagtgtactactggtccttctccgtccctccctacggggaccacacttcctacaccatggaagggtacatcaacaacactctctccatcttcaaagtcgcaa

SEQ ID NO: 85232 - DNA, 384 bp, Homo sapiens
atggcatggaactgaaaataaccttttatttaccaattcatacaagatgagcttatcagttttaatgggttatactcatatgaattattccttgatgtttagtttgggcaactatttgttctttaaaagcagggtagatattattggtaattttattccaggatttttattcatgcaaagtatctttggatatttggcattgaccattgtttataaatgggcagtcgattggttcggcattaacaaacaaccaccgggattattgaatatgtggattaatatgtttttatctcctggcgctattgaagagcaattgtatcccggtcagaaatttgttcaaatagttatggtattgattgcagctatttcggggccatggttatt

SEQ ID NO: 85233 - DNA, 381 bp, Homo sapiens
cttttgtttctgtagtcgctaacttatttgttaacatcagccaaaaaagaaattgaactaatgtcagaagagctgaggggtctgaaatcagagaagcagcttctttctcaggagggaaatgatttaaagttagaaaacggttcacttttatccaagcttgtagaattggaggccaaaatagctttacttcagggagaccagcagaaactgtggtcagtgaatgaaactcttaatttagaaaaggagaaattcttagaagaaaagcaagatgccgaaaagtattatgagcaggaacatctcaataaagaagctttggctgttgagagagagaaattgcttaaagaaatcaatgttgtacaggaagaactcttgaagataatg

SEQ ID NO: 85234 - DNA, 675 bp, Homo sapiens; identical to SEQ ID NO: 67116

SEQ ID NO: 85235 - DNA, 361 bp, Homo sapiens
agttaattcaacacaaatctgcagtcgagtatgctcaaagtcacctcagcttggtgagcatgtgcaaggagtctcacaagtgttcagagcccaagatggaatggaaggtgaaaattaggagcgacgggacacggtacatcacaaagagacccgtgcgagaccgaatcctgaaggaacgtgccttaaagatcaaggaagagcggagtggcttgaccacagacgatgacaccatgagcgagatgaaaatggggcgctactggagcaaagaggagagaaagcagcacctggttaggggcaaagagcagcgccgtcgccgtgagttcatgatgcgaatcaggttaaagtgtctcaaggagagccc

SEQ ID NO: 85236 - DNA, 343 bp, Homo sapiens
gcaattaccaccaccacaatatccacgatctctcgcacagtaatatacagccgtgtcctcgactcgcaggctattcatttgaagaaacaccatgttcttggaatcgtctctggagatggtgaatctgcccttcacggagtctgtgtagaatgtcctaccatcgcggtaaagagctgagacccactccagccccagtcctggagcctggcggacccagttcaggtagctggtactgacggtgaatccagaggctgcacaggagagtctcagggaccccccaggctggaccaagcctcccccagactccaccagctgcacctcacaatagacatcttttaaaatg

SEQ ID NO: 85237 - DNA, 340 bp, Homo sapiens
ctcctgtcttcaattccacctctgctgatttgagagccggtttaattggttttgtcacatcagcttctatcctatattgctcttctgttattcttaacttttccctaactttttggggcacctcttcaacatttcttcttttctttttttcttgctgtatggcaaatctgtgaatatacttatcttagaatttatcttatcagagaggactaagctctaattttttatcttgcccaaattcctacctaaggggtccagggagtcgtgccctacaaaccatggattctcatcacatgggttttatttgaccctgtatattgtgacttgcttttcaatctga

SEQ ID NO: 85238 - DNA, 521 bp, Homo sapiens
agaatattaaaaattttcaagggacatacagtgacagctattggcatcagaaaacaactacaattaagtttggacctaactacatgatatatggagtcagctaggtttttgtttttgtttttgttttggcctagaggtgccatgaaaaaatttattgaggacactaagagtactgtaaactgagattgggaacctctgtaatgcatcatttcctgaatacatatgttcaaaatgagagaatctttgaatagtctaataattataacttttttaaaaaatgtatagtgattcctcaaaaaataggagagcgttatttttgtgttattctgaattaagtatgtttcacttaaaattggtttatagttcttctgggcatcctacttttaagtgtcccctgtgtcaagaatcaaattttaccagacagcgtttactggatcactgtaacagtaatcacctatttcagatagttcctgtggtaagtacatacgtttgagacagtcttctgcttagaataaaacatg

SEQ ID NO: 85239 - DNA, 387 bp, Homo sapiens
ggcacgagaatattatcaatgcagataccttttgtgggattccagccaatcagaacaagtgaacacatggcagctgcaggtgtctttgcattgctgcaagcttatgctttcttgcagtatctgagagaccgattaacaaaacaagagttccagacccttttctttttgggtgtatcactagctgcaggtgctgtgttccttagtgtcatctatttgacttatacaggttacattgcaccatggagtggcaggttttattcattgtgggatactgggtatgcaaaaatacacattccaattattgcatcagtgtctgagcatcaacctacgacttgggtgtctttcttctttgatctacatattcttggatgtaccttcccagcaggc

SEQ ID NO: 85240 - DNA, 362 bp, Homo sapiens
tggaaggcaaacctgcttctgctatcgtgggaggcaaacctgcaaacatcttggagttcccctggcatgtggggattatgaatcatggtagtcatctctgtgggggatctattctcaatgagtggtgggttctatctgcatcccattgcttcgaccaactaaacaactctaaattggagatcattcatggcactgaagacctcagcacaaagggcataaagtatcagaaagtggacaagttattcttgcacccaaagtttgatgactggctcctggacaacgacatagctttgctcttgctcaaatccccattaaacttgagtgtcaacaggatacctatctgcacttcagaaatctctgac

SEQ ID NO: 85241 - DNA, 382 bp, Homo sapiens
atctaggaaccaacttctttctcagtgaagatgatgttgttaataagagaaacagggctgaagctgtacttaaacatattgcagaactaaatccatacgttcatgtcacatcatcttctgttcctttcaatgagaccacagatctctcctttttagataaataccagggtgtagtattgactgagatgaaacttccattgcagaagaagatcaatgacttttgccgttctcagtgccctccaattaagtttatcagtgcagatgtacatggaatttggtcaaggttattttgtgatttcggtgatgaatttgaagttttagatacaacaggagaagaaccaaaagaaattttcatttcaaacataacgcaagcaaatcctgg

SEQ ID NO: 85242 - DNA, 376 bp, Homo sapiens
gcaactgcgccttcgagctgcttttcattttccagaaactgcccgacatttccggggagcggatcattaacttcgacaagaggtcgccccccaacctcaccatcatttcgcccgtctacttctacattaacgaagagcagattcttatcaccgaccggaacacggccaaggggaatggcacacaagggaatgctccatttataactggtttggcaaccaaaatctacagcagggaggggtttctggggattgacaccagcccagacatccagatatactacaatgggttcaacgtcattaaaatcagcatcagcgagaggctgcagaacaaagggtgcgggctctggggcaacttcaacgggggcctaacagaagg

SEQ ID NO: 85243 - DNA, 140 bp, Homo sapiens
cggcccgttgtacccgcttcttagaaggggtgatcaagttaaaggccttaaccccggaagtggagctcacaattgaacctgattgcgtcactgctattcagccttgggggctaaatttcatcggttttataaaaaaaaaa

SEQ ID NO: 85244 - DNA, 1042 bp, Homo sapiens
atggagaagtgggaggagctgaacagccatcagccaggagaggagtacgaccccagcaaagcgacctttgtgaaggtggtgccaacccccaacaatggctccacggagctcgtggccctgcaccgcaatgagggcgaagacgggcttgaggtgctgtccttcgaattccagaagatcaagtattcctacgatgccctggagaagaagcagtttctccccgtggcctttcctgtgggaaacgccttctcatactatcagagcaacagaggcttccaggaagactcagagatccgagcagctgagaagaaatttgggagcaacaaggccgagatggtggtgcctgacttctcggagcttttcaaggagagagccacagcccccttctttgtatttcaggtgttctgtgtggggctctggtgcctggatgagtactggtactacagcgtctttacgctatccatgctggtggcgttcgaggcctcgctggtgcagcagcagatgcggaacatgtcggagatccggaagatgggcaacaagccccacatgatccaggtctaccgaagccgcaagtggaggcccattgccagtgatgagatcgtaccaggggacatcgtctccatcggccgctccccacaggagaacctggtgccatgtgacgtgcttctgctgcgaggccgctgcatcgtagacgaggccatgctcacgggggagtccgtgccacagatgaaggagcccatcgaagacctcagcccagaccgggtgctggacctccaggctgattcccggctgcacgtcatcttcgggggcaccaaggtggtgcagcacatccccccacagaaagccaccacgggcctgaagccggttgacagcgggtgcgtggcctacgtcctgcggaccggattcaacacatcccagggcaagctgctgcgcaccatcctcttcggggtcaagagggtgactgcgaacaacctggagaccttcatcttcatcctcttcctcctggtgtttgccatcgctgcagctgcctatgtatggattgaag

SEQ ID NO: 85245 - DNA, 397 bp, Homo sapiens
ggggtaggaatacgtggtactccgaagccctactagcaaaccatgttctactactgactttgctctctcactcacaacattaatatggcacgctggcgggctaattagagagcaactttcccaggggcatgaagcggcagatgccacctctcagcccacgaataccgctattaccccgtggacggctacttcctgcttaaacgcttccctattgatcctctatacaggacccaaatgccctgtgcaaacagggggacaatggttggaaagcattgggctacctcagtactataaccacctgatggctaatggaattgacaatgctcatcttatgggaagcaatgttatagaaaatcacgattttttgcaaataggaatccttaattgtgggcacagg

SEQ ID NO: 85246 - DNA, 631 bp, Homo sapiens
tcatgtccaccccagagtccagactggtgtcattgctctgggttctcttgccctttttcaggtctataaaggagtgcctcacttgtgcaactggctttccatcaagagacacaaaccaggctctgggatgcggggagggctttcctttggacagctccaggagggtctgttctgaaattccttgaagttccgatgaaaatggagtcattacaacagcctcatttagtgttccaggaacagagacggattccagtaagctgcttgagtatcggctccaatctgaagcctgggatggcaggctctgttgaccttcaagtatgatatcctcttccctggcatctgggggctgtgcatgagaatgaattggcattttgggcaaggtctgcgtaaagttctctcgatttactggttccatcaattggccatagactaactgtccctttcttggcaaagtagctgacttagcagtatgtaattgttccggtgtggagaaaaggtcagatgtttgaaggatggcaatgggttggctgtaaatatgcataagctgttcaggaatatgggaacgcccatacgcctcctcattacctgtgagatacctcttttcatcttgagcatcacctaaagaagaaga

SEQ ID NO: 85247 - DNA, 375 bp, Homo sapiens
gttcttaaccctcggaagaaatgtaagaagaagaaatatgtcaactcaggaactgtgacgctgctctccttctctgtggactctgaattcacttttgttgattacatcaagggagggacacagctgaacttcacagtagccattgacttcacggcttccaatggtgagacacggatgagtgaaaaagtcggagggaatcctctgcagcctacctccctgcactacatgagtccctaccagctcagcgcctatgccatggccctcaaggcagtgggagagatcatccaggactatgacagtgataagctcttcccagcttatggctttggggccaagctgcccccagagggacggatctcccaccagttccccctg

SEQ ID NO: 85248 - DNA, 489 bp, Homo sapiens
  misc_feature (1)...(489): n = a,t,c or g
aggccctggntttganaccgattgaacaccgtcttgaccatgcttagcgccaagcttggcacgagggcggaggtgggagagggcttctgttggtactgctgttaagttgcatttctccagggtgagctgctccaagctaagaagcccactgaatgccctgtgtgatatataaaccaaatcattgtcccccacttctagagacttcaggttatgtagatcttggaacatgtagtctagtaaaatgacaatcttattctcactaatgtcaagcttagtgagattggacagccccgtgaatactcccaaagggaccagctttagacgattgccttttaggcggagggaacgcaggttaaagagattgttgaatgctcctggttccacattggcaatgatgttgtcactcaagtctatctcttccagcagaggatatgatatgaattcttcagggttgacgctttttagcctgtttttactgaggtccaagat

SEQ ID NO: 85249 - DNA, 459 bp, Homo sapiens
  misc_feature (1)...(459): n = a,t,c or g
ttttagatggannaccgttatgaccatgatttcgcacagcttggcacgaggcttaatagtcatcgcatggtccacacaggagagaaacggtacaaatgtgaggaatgtggaaaacgcttcatttataggcaagatctttataagcatcagatagaccacacaggggagaagccatataattgtaaagaatgtggaaagagcttcagatgggcctcaggtctttcaagacatgtgcgagtccacagtggagagacaacattcaaatgtgaagaatgtgggaagggattttatacaaattcacaacgttattctcaccagagagcgcacagtggagaaaagccatatagatgtgaggagtgtgggaagggctacaaaaggaggttggatcttgactttcatcagagggtccacagaggagagaaaccctataattgtaaggaatgtgggaagagctttgga

SEQ ID NO: 85250 - DNA, 443 bp, Homo sapiens
  misc_feature (1)...(443): n = a,t,c or g
aggcnnnnnnnntttgctcgtcgtcactagtccgtgcggtggaattcctgcggactactgcagtggagcttgactcttaatgggtcccaaagcaaaaaagtctggcagtaagaaaaagaaagtcaccaaagctgaacgattgaagctgctacaagaggaggaggagagacgactgaaagaggaagaggaagcccgtttgaaatatgagaaagaagaaatggaaaggcttgaaatacagcgaattgagaaagaaaaatggcatcgacttgaagcaaaagatctagaaaggagaaatgaagaacttgaagaactttatttattagagaggtgttttcctgaagcagagaaattgaaacaggaaactaaattgctttctcagtggaagcactacattcaatgtgatgggagtcctgatccttcagtagcccaagaaatgaacacgt

SEQ ID NO: 85251 - DNA, 722 bp, Homo sapiens
tttttttttttggtttccggtactgtcacctccaggctgagccgggctggcggaagaggcacgtgcgctgctgaatggagctggtcgctggttgctacgagcaggtcctctttgggttcgctgtacacccggagcccgaggcttgcggcgaccacgagcaatggactcttgtggctgacttcactcaccatgctcacactgcctccttgtcagcagtagctgtaaatagtcgttttgtggtcactgggagcaaagatgaaacaattcacatttatgacatgaaaaagaagattgagcatggggctctagtgcatcacagtggtacaataacttgcctgaaattctatggcaacaggcatttaatcagtggagcggaagatggactcatctgtatctgggatgcaaagaaatgggaatgcctgaagtcaattaaagctcacaaaggacaggtgaccttcctttctattcacccatctggcaagttggccctgtcggttggtacagataaaactttaagaacgtggaatcttgtagaaggaagatcagcattcataaaaaatataaaacaaaatgctcacatagtagaatggtccccaagaggagagcagtatgtagttatcatacagaataaaatagacatctatcagcttgacactgcatccattagtggcaccatcacaaatgaaaagagaatttcctctgttaaatttctttcagagtct

SEQ ID NO: 85252 - DNA, 466 bp, Homo sapiens
  misc_feature (1)...(466): n = a,t,c or g
cgcccgccgcgggngtttgannnctagagtaccattagtccagagcggtggaattccttgcaggactcactggatagatggtattcaactcctttcagttatccagaactgcctgattcatgccagccctacggcagttgcttttactcactggaggaagaacacgttggcttttctcttgacgcggatgaaattgaaaagtaccaagaaggggaagaagatcaaaacccaccatgccccacgctcaacgaggtgctgatggaagcagaagagcctgaagtcttgcaggactcactggatagatgttattcgactacttcaacttactttcaactacatgcctcattccagcagtacagaagtgccttttactcatttgaggaacaggacgtcagcttggcccttgacgtggacaataggctttttactttgacagtgataaggcaccacctggccttccagatgg

SEQ ID NO: 85253 - DNA, 395 bp, Homo sapiens
tttcgtatctcttggagtgaaggctgttagtcgccgcgtagaaccctggaagaagaggaagaggaaggcaaaggagtcagggatggctcttcctcagggacagttgacattcaaggatgtggccatagaattctctcaggaggagtggacatgcctggaccctgctcagaagactttgtacagggacgtcatgttggagaattataggaacctggtctccctggatatctcttgtaaatgtgtaaacacggatttgccaccaaaggggaagaacaatatgggagaagcgttctacacggtgaagttggagagacttgaaagctgtgacactgtaggcttgtccttccaggaagttcagaaaaatacatacgactttgagtgtcagtggaaagatg

SEQ ID NO: 85254 - DNA, 393 bp, Homo sapiens
ctggatggaaaggcggggcccgctgaaagaaggcgacccgagttctgctacttcctagtaagggacgtctctggagagattctgaggtgtttgagcctcttttgcctacacaccggcagtgtccttcccgcactcagagggcctctctggagccagttccaggccacccatgggccttggccccgccccctactcatggctggcagattcgtggccccacccatctcgaagcccctcggcccaggaacccaggggaagctgctgccctagcaatcctgacccggacgacagatattacaacgaagcaggaatctccctgtatctagctcagacggccaggggcacggccgcccctggcgagggtcctgtctatagcaccattgacccagcggg

SEQ ID NO: 85255 - DNA, 593 bp, Homo sapiens
agaaaatataaaggagactccactattagagaacttaaagcaaaactttctggtgttgaagaggagctacagcggactaagcaagaagtcctctctttgcgaagagagaattctacactagatgttgaatgccacgagaaagaaaagcacgttaatcagctacaaacaaaagtggcagttttagaacaggaaatcaaggataaggaccagcttgttttaagaacaaaagaggcatttgatacaatccaggaacaaaaggtggttttagaagaaaatggtgagaaaaatcaagtacaactaggaaagcttgaagctacaataaaatcattatctgcagaacttctgaaggcaaatgaaattatcaagaagttacaaggggatctgaaaactttaatgggtaagttgaaattgaagaatacagttactattcagcaagaaaaactcttggctgagaaggaggaaaaattacaaaaggaacaaaaggaattacaagatgttggacagtctcttcgaattaaagagcaagaggtatgcaaattacaagaacaattagaagctacagttaaaaaacttgaagaaagcaaacaacttct

SEQ ID NO: 85256 - DNA, 755 bp, Homo sapiens
cggttattctctttgccacaacaatttatagaattggattgaaagtgccacctgatgaaagggatcctcgagtccccatgctgacctggagcacctgcgctttcactatccaggcaattgaaaatctattgggagatgaaggaaaacctctgtttggagcacttcaaaataggcagcataatggtctgaaagcattaatgcagtttgcagttgcacagaggattacctgtcctcaggtcctgatacagaaacatctggttcgtcttctatcagttgttcttcctaacataaaatcagaagatacaccatgccttctgtctatagatctgtttcatgttttggtgggtgctgtgttagcattcccatccttgtattgggatgaccctgttgatctgcagccttcttcagttagttcttcctataaccacctttatctcttccatttgatcaccatggcacacatgcttcagatactacttacagtagacacaggtaaggttttcatctgggtgttgactgtgaataacattttgccatgctttactggcaaaattaattattcttgtgattatataatgtatttctaggttctgtgttatgttttttgttgaatgattatttatctgttttttaatggatactgtttaaacaaggaaaggtagaataagctgtgaaaaagataattaggtgaaactacctaattatcaactgctctacagatatgcagggagaccacttggacctgcttttccctc

SEQ ID NO: 85257 - DNA, 419 bp, Homo sapiens
  misc_feature (1)...(419): n = a,t,c or g
agaaggcagaactctcattttggaaggtttggaaaaggcagagaggaatgttttgcctgttttgaacaacttgctggaaaacagagagatgcagcttgaagatggacgcttcctgatgtctgctgagcgttacgacaaacttctccgagatcataccaaaaaagagttggattcttggaaaattgtccgagttagtgaaaatttccgagtgattgccttgggcttgccagtgccaaggtattctgggaatccattagacccccctcttcgttctcgatttcaagccagggatatttattatttacccttcaaggaccaacttaagttgttatattcaattggagccaatgtttctgctgagaaagtttctcagctcttgtcctttgccacaactctgtgttcccaagaatcttctactn

SEQ ID NO: 85258 - DNA, 409 bp, Homo sapiens
agcctacaagcaggatgatgacctggacaaggtgctggccctactggctgccctgaccactgcgaagcctgagaacatccccctgctgcagaggttcagcatgttcgtgcatccataccacaagcagcacttcttgccgacatgcacagacctggccagccagcccaacccaggcatggagccgccaggaccccaagaggagagccttgccacgcctcctatgctcacccacggggcttcccaaccagaccgctcatggtgcaagaagcctgggaagacccagagcaagatctcatcattcctcagacagaggccagcacgggccttgggggaggatggtgcggctgcagggcgaagccagtcccctggactttcccacgggcatgcagtatctgagtggggcctctag

SEQ ID NO: 85259 - DNA, 476 bp, Homo sapiens
  misc_feature (1)...(476): n = a,t,c or g
ggatgcggnnngnnnnnaatcggattgcatatcatagtcagtgtggtggaattctgccgccaggccttggaggacctggagcgcagctcgggccactgccaccctgacgtggccaccatgctcaacatcctggcgctggtgtaccgggaccagaacaagtacaaagaagccacagaccttctccatgatgccctgcagatccgggagcagacgctgggccctgagcaccccgcggtggccgccacgctcaacaacttggctgtcctctatgggaagcgtgggcgttaccgggaggcagagcccctgtgccagcgcgctttggagatccgagagaaggtcctgggtgctgaccacccagatgtggccaagcagctcaacaacctggccctgctgtgccagaaccagggcaagtttgaggacgtggagcggcactatgcccgggccctgagcatctatgaggcactgggcgggcccca

SEQ ID NO: 85260 - DNA, 497 bp, Homo sapiens
gtgagatgtgggtatgtgcgcgccaccagccgcctgatcccaacatgagaacccttttgtacccagggtccctttatcaggagatttacgagacgccaaactgttagggcagtaattatagcccccataaatttaattgccctggcagaggcttcaggccatgtgtctttgaagcttttcttcagccccaatgcccagcaccattctttatggctctcgggtgtttcccgttgtcaatagcctgtgaaacattttctttgccgttttatgtatcttgcgtgaacttggtgtcaggttattatataatgatgatgtccaattgctcttccccaccccaccttctctctcctcctcctttccctctcttccgctccctcctgcttggccttctatttcggggttctgggttttcagttaaccccagatataacggaggggagcctaaacgctctcgaaccgcctacacccggcagcaggtcttggagctggagaatgag

SEQ ID NO: 85261 - DNA, 504 bp, Homo sapiens
  misc_feature (1)...(504): n = a,t,c or g
tgttatggttccagggcncccccnccaattgaaaaacctgagtccactgcgccagngcggnggaannccagaggccaggatgccacgcctgtcccaggggaaggggcctgacatcttccatcggctggtgagcacacccgtccccaggcaccgcccagcatgggcagcttgggctgtgtggctctgaccagcacatggcctcagacaggccattgatggtggtccagccctccccacccaccttgtggaaccccacggtgtccctcggtgcacaggttggatggatgtgctagtcaggtggggtctcctcagtgtgtggcccagctgggcctctgacctctgagcccctgccaggggcccctgtctgtgttctcagccaagaaccggtggcggctggtggggcccgtccacctgacccgaggagagggcggctttggcctcacgcttcggagagactcgcctgtcctcatcgctgccgtcattccagggagccaggccgcggcg

SEQ ID NO: 85262 - DNA, 486 bp, Homo sapiens
  misc_feature (1)...(486): n = a,t,c or g
agtcccggccncccgncaatgagttcataggcaagngncgnggaatttatgctcaagagttaaggctgaggttggaggcgggtagtttgtggtgctgtctaaccagggcaggggcagagatctcaggaagttgcctgagcagccctaacttggtcccagccacaggaattctggccaatggagatgcagcccatagtcacagacatggtgacagtgcactgggtggccgagagcagcacagtgggctggctctgtgccctcttcagggtcacacatgtaggtgttggggccacagggcatggggtggtgtgtgggagaagagtcctgtgtgggctccctctgccctctccagcaccaatgccgatcatgtctttgcccgagggggagagtaggaaggaaagggaggtgcagagactgcagtttccatacctggagcctgggcatgagctgcccgccaccaccctgcttgccttcctggctgctgtg

SEQ ID NO: 85263 - DNA, 534 bp, Homo sapiens
cccacgcgtccgaaatatcagtccaagcaagaggaattacagaaagatatgcaaggaagtgcacaggcattggctgaagtagtgaaaaacacagagaacttcttaaaagagaatggtgaaaagctgtcacgggaagataaggctttgattgaacagaaacttaatgaagctaagataaagtgtgaacagcttaatttaaaagcagaacagtctaaaaaggagctggataaagttgtgacaacagcaatcaaggaagaaactgaaaaggtagcagcagtgaagcagctggaagagagcaaaaccaaaatagaaaaccttttggactggttgtcaaatgttgacaaagactcagaaagggcagggacaaaacacaaacaggtaatcgaacagaacgggacccattttcaagaaggtgatggcaagtcagcaattggagaagaggatgaagttaatggtaacctgttggagactgatgttgatgggcaagttggaaccactcaggagaatctgaatcagcaatatcagaaagttaag

SEQ ID NO: 85264 - DNA, 350 bp, Homo sapiens
cctggcagggacgggcaagcaggacagcagggggagcagggagacgatggggaccctggccccatgggccctgctgggaagagaggaaatccaggtgtggccggcttacctggagcacagggacccccaggattcaagggtgagagtgggttacccggacagctgggtccccctggcaagcgaggaacagagggcagaacggggctccctggaaaccagggggagcctgggtccaaaggccagccgggcgactctggcgagatgggcttcccaggaatggcaggtctcttcggacccaagggcccgcctggagacattggcttcaaaggcatccagggccctcgggggcc

SEQ ID NO: 85265 - DNA, 377 bp, Homo sapiens
  misc_feature (1)...(377): n = a,t,c or g
ctttttctataagacttgggcaactgatccaggcttcactaaggcttctgaagaagaaaagaaagtgaatatcatcacccttgcagaaactggctctctggacttcagaacattttgtacatcatgtcttataaggaagccattaaggtcactccactgccatgtatgcaactgctgtgtggctcgatatgatcaacactgcctgtggactggacggtgcataggttttggcaaccatcactattacatattcttcttgtttttcctttccatggtatgtggctggattatatatggatctttcatctatttgtccagtcattgtgccacaacattcaaagaagatggattatggacttacctcaatcagattgggn

SEQ ID NO: 85266 - DNA, 365 bp, Homo sapiens
gtaacaaggaggcctgccagtcatcaaacctttcctttacagttagaaaacggccatactgtggagagaacagtggcgcagtatttcagagaaaagtatactcttcagctgaagtacccgcaccttccctgtctgcaagtcgggcaggaacagaaacacacctacctgccactagaagtctgtaatattgcggcagggcaacgatgtatcaagaagctaacagacaatcagacttccactatgatcaaggcaacagcaagatctgcaccagatagacaagaggaaattagcagattggtaagaagtgcaaattatgaaacagatccatttgttcaggagtttcaatttaaagctcgggatgaaat

SEQ ID NO: 85267 - DNA, 335 bp, Homo sapiens
  misc_feature (1)...(335): n = a,t,c or g
ctggtagaaacagagaaaatgtacgtggacgacttggggcagattgtggagggttatatggccaccatggctgctcagggggtccccgagagtcttcgaggccgtgacaggattgtgtttgggaatatccagcaaatctatgagtggcaccgagactatttcttgcaagagctacaacggtgtctgaaagatcctgattggctggctcagctattcatcaaacacgtgaggcttgagggggcagggcctggggcggggcttangaatgggctgggattctctggagatgcgtcctccctccttgcccaccctgctctctcttaaacattacccct

SEQ ID NO: 85268 - DNA, 454 bp, Homo sapiens
cctcgaacaccagtccgtgtggtgcaattcccttttcactgctgctttattaccatagcagtgtcatacagcctgccatcatgtcagctaatgcaagaatttccactgagcagttgtttgttcactgttactgcaacaggttgtaatgagaatgaggcagaccacttggaccgggaccagcagccttatccaccctcgcagaagaccaagcgcatgcgaacctctttcaagcatcaccagctccggaccatgaaatcctactttgccatcaaccacaacccggatgccaaggacctcaagcagcttgcccagaaaacaggtctgaccaaaagagttttgcagggagaacaaatcttggggcattacagccaaacatcccgacgtttgaaaattccctaaagtattaaaagaaggggaaaagtttgatcggaaatccactgcagtgaagacaaag

SEQ ID NO: 85269 - DNA, 699 bp, Homo sapiens
ctgaaattcccaaaactatcaatagagcagcagtcttaatgctctcttggaagcctcttttggatctttttcaggcaacactggactatggaatgtattctcgagaagaagaactattaagagaaagaaaacgcattggaacagtcggaattgcttcttacgattatcaccaaggaagtggaacatttctgtttcaagccggtagtggaatttatcacgtaaaagatggagggccacaaggatttacgcaacaacctttaaggcccaatctagtggaaactagttgtcccaacatacggatggatccaaaattatgccctgctgatccagactggattgcttttatacatagcaacgatatttggatatctaacatcgtaaccagagaagaaaggagactcacttatgtgcacaatggccagccgccacggttcatgcctgtaatcctagcactttggaaggccgaggcgggcagatcacgaggtcaagagatcgagaccatcctggctaacacagtgaaaccctgtctctacgaaaactacaaaaaattagccgggcgtggtggcgggtgcctgtagtcccagctactaaggaggccaaggcaggagaatgatgtgaacccaggaggcggagcttccagtgagctgagatcacaccactgcattccagcctgggcgacagagggacaaaccgtctaaa

SEQ ID NO: 85270 - DNA, 326 bp, Homo sapiens
aaaatgtagcagaaatgatatgcaaatttttaagcaaggaatatctgaaacataaggagaaagaaaaatgtgaggtgattaagaacttgaagaatattggcaatggcaacctgtgtcctgttttaaagcgcactatcccatttggagttgcctatcaccacagtggcttaacaagtgatgaaaggaaactcttggaggaggcctactccacaggagtgctctgtctttttacctgcacatctaccctagcggcaggtgtcaacctaccagctcgaagagttattttaagagctccctatgttgctaaggaatttttaaagaggaat

SEQ ID NO: 85271 - DNA, 587 bp, Homo sapiens
aagagggctctgtgaatttcaagtttggggttctttttgccaaagatgggcagctcactgatgatgagatgttcagcaatgaaattggaagcgagccttttcaaaaatttttaaatcttctgggtgacacaatcactctaaagggctggacgggctaccgtggcggtctggataccaaaaatgataccacagggatacattcagtttatactgtgtaccaagggcatgagatcatgtttcatgtttccaccatgttgccatattccaaagagaacaaacagcaggtggaaaggaaacgccacattggaaacgatatcgtcaccattgtgttccaagaaggagaggaatcttctcctgcctttaagccttccatgatccgctcccactttacacatatttttgccttagtgagatacaatcaacaaaatgacaattacaggctgaaaatattttcagaagagagcgtaccactctttggccctcccttgccaactccaccagtgtttacagaccaccaggaattcagggactttttgctagtgaaattaattaatggtgaaaaagccactttggaaaccccctgtatt

SEQ ID NO: 85272 - DNA, 309 bp, Homo sapiens
tctctatctgagtgagcggtgcatctgcatctctgggttctattttatgtggggctgattctctatctgagtgagtggggtgtctgcatctctgcatcctgctgtatatggggtagattctctatcgaactgagtggggcatctgcacctctgtggtctgtcgtatgcgggagcgatgctccatctgagccgggcgaccgcatgtctgtgcctatgtgtccctatgcccaactcactcacatgttggccctccatgtgctggactttcctctgccttacccatgtgtgcgtaattcttatataacattg

SEQ ID NO: 85273 - DNA, 335 bp, Homo sapiens
  misc_feature (1)...(335): n = a,t,c or g
tctttattatttaaggatttggagattgaaaatgaagatttgaaagagaggttgagaaaaattcagcaagaacaaagaatacttttggataaagtcaatggtttacagttacagctgaatgaggaagttatggttgctgatgatctggaaagcgagagagaaaagctgaagtcccttttggcagctaaagaaaagcaacatgaagaaagcttaaggactattgaggctctgaaaaatagatttaaatattttgagagtgatcatttangatcaggaagtcatttcagtaaccgtaagtataaaagtatggattatcattacagttcacctagttc

SEQ ID NO: 85274 - DNA, 302 bp, Homo sapiens
gcacgagcggattttgaggaaatttttcttgaatttgaaaatgaaacagaaagaatttttggaaataataagggagtaagccctgaaccaattcatcttaagaatttttcacccaacgatgtcaatttgacacttggggatttgccaggaatgaccaaggtgcctgttagtgatcaacctaaggatattgagcttcaaatcagagagctcattcttcgggtcatcagtaatgctaattgcattatcctcgctgacactgctgctaatacaaatatggcaacatcagaagcacttaaaatttt

SEQ ID NO: 85275 - DNA, 377 bp, Homo sapiens
tggcacgaggctacatgttcagttccatggccaaggctgaacgaatgaggaaactagatgacttgatcaagaacctgaaaggggttgactatggggaacacatcccccgagacctgctggagggcatctaccagcgcatacaggggggtgaactgcggaccaacgatgaccatgtgtgccaggtgcaggctgtggagcgcatgattgatggaaagaaaccagtgctgtctctacctcaccgtggactggtttgctgctgccagctctacgaggtgccagatccaaaccgcccccagaggctagggctgcattaccgggaggtcttcctgttcaatgatctccttgtgggccccaaaattctccagaacacgaagatg

SEQ ID NO: 85276 - DNA, 352 bp, Homo sapiens
ggcacgagcattccagtggtttctgaaccttgaggtgattcaggaaggggatggaccagtaatctccagagatggcagggtcctcaccatccccacagtcacacgcaatgactccagcacctaccactgtgaggccaggaaccacctgggatccaggctcagtgaagccctcgtggttggcgtggcttatggcccggatacccccatcgtgaccgcactggacccagattttgtgattggttccaacctcactctggtctgcttagcctactcccacctccttgcccagtacacatggagcttcagtggggtcaccacatgggagggccagaccctcttcatgcccagtctt

SEQ ID NO: 85277 - DNA, 377 bp, Homo sapiens
ggcacgagagcttaatttgcctgaactgaaatgtaaacttggattttattgttggccttttttttctacacttatttgtagttatgtttaaaagcttctgctaaaggcatgtatttctgaatcgtaagactcttttataaattttaaaaattctataaaacatataaaattgtttgatatcaaatttttccccttctttccaaggtacggtttgatagcataggtggattgagccatcatattcatgcgctaaaggaaatggtagtattcccacttttatatccagaaatttttgaaaagtttaaaattcagcctccaaggtaagcaatgtcatagatgtttattattggtattactgctactttctcaaatgttat

SEQ ID NO: 85278 - DNA, 659 bp, Homo sapiens
aaaaaaagaaaaagaaaaacaaccagaggtgttgcagctcctgaattgtgcttcacattgctggctcttctccttggggtctcagcttagatgtcatttccaaagaaagacttttctgaccaccctatctcatgtggcccccctctacctctatttacagcaccctacttctcactatttatcacaattactttaaaaattacgtgtctatttatttacctgtttattacctatctcctaacaccagaatggaagttcctagttctagcacagcatctagcacagaatgctgtaagtatttcaaaaaatattttctagctgaatcaatgaatttaagggaaggaaaggacaggagtaataaaagaagctaattaacaagccaaaaggttgaggtggattgtggtcatgcagtcatttgtaaacttgttaagagtacagcctaacttggttattttctgagttggggcccacccactttatcctcagcttcagatcatgttccccaggggggcctgccaaccaagtcaggtgtttcaggatccatcctcctggtgggacccaatggcatgggaatgaaccgccttgtgcccccattgggcacgctgggggaacagccctgggggacccagctgccgcaaaaaagttgtggacggtcttcc

SEQ ID NO: 85279 - DNA, 368 bp, Homo sapiens
ggcacgagggctgagggctacaagaagcacgactgccccggggacgtgatgaacaaggcttccgagcggctgcgcgagggctttgaactcttccccactggggagaccctggaaaaggaaaacccctggaactggcctttctgcgagcagctccagctgtacaccaacaaactggacctgtgggtgctggcggagattctcatcatccgcctgaaacgcttttactacaccaagttctcccgagagaagctggacaccctcgaggagcttgctatgcgggacctggacttgtctgaggttggcatgcagccacagaatgagtcggatacggagctgtacatatatgagctcatcgaggcttccaggcc

SEQ ID NO: 85280 - DNA, 472 bp, Homo sapiens
ggcacgagaagactattcatcacacttaacagttgttatctcctggccatggttgcagggaggggatttaggggagctttaacttttgcgtgtttctgaattatttaaattattttacaatggacattttgaaaggtgagggggaaaccaagtattttaagtttctttttcagggtaaagaaatattagaagtaggattgtaagatgagagctgaggatgtttattttgtaagtgattatacatatggcatttatgaaagctacaagcatgattccgttagcactaggccagctgtaaataaggtaggagggagatataatatttagcaagtttggttatgtggattttgtactgaacagatttctctccctctcttggcagggccccacggttcccctgatagacctggagcacgtccttccactcatgtttcaagttgtcatctcaaacgcaggccacctgaatgaaacc

SEQ ID NO: 85281 - DNA, 746 bp, Homo sapiens
ggcacgagaggaattagaaaggaagggaaattgaaaggaaagggcacttcctctccctctctcagccctttctgggatttccctgcactcagcaccagtggaaggcagatgggtacccatggcctggaccatgctctgctttttctctgttcttcccattcctgagagtgcacttaaaaactggactgttgttgtgcacttgtctgattcctgctaccaccctttcaaaacaggaccaattttgtaatgggaaattgactatctcaggtgccgacatgatgaaggtatagcttgttgtttggtactagcatgtctccaggcgggaatggacttggagtatgccttggctgagtttggatgccagattttgggcaaggcctgaaaactttcagataatagcccccatgtgtgaaacgggtagaatgaggggacctgccttataggaccgctgtgaagatgatacatggaataacgtaacttgggagatcaagttaccatctttggttgggccacacagctcgtgcaacgggacgagttaacccctagtgtgacaaaggcgcacaacatatccttaaagggcgttattacaccccttggggcataaagaccatcgaacgttggcacccaggcccctgcgcgcgagaacgtcacccccgctcgtcagggtgtttttttgtcaccccagggggcgaggcgagagtagaagcggtggcatcggcgctgccaccccggggtagaaacaaacg

SEQ ID NO: 85282 - DNA, 427 bp, Homo sapiens
ggcacgagcaggaagcaatgaggctccccaagaacacacctgaggaaaaggacaggtgagcctggagggccggccgcaccgtgggcctctgtgtctggggagttggtggccaggatcccgagtacctgggtgctgtgacggggcgtggttggcctgggcgtgctgggtgtttgggaatgacttcccatcgcccgcttctgcagcctgctcagccctgttggggtgcagtgtgtccactgcctgcctgtgtgtgccgctgtgctcaggctctcctcttgctcctttcaggcgcacggcggccctacaggagggtctgaggcgggcagtctctgtgccgctgacgctggcggagacggtggcctcgctgtggccggcgctgcaggaactggcccggtgtgggaacctggcctgccggtcagacctccag

SEQ ID NO: 85283 - DNA, 409 bp, Homo sapiens
ggctttgcagagcactctgggggcggtgtggctagggcttctcctcaactctctctggaaggttgcagaaagcaaggaccaagtgtttcagccttccacagcggcatcttcagagggagctgtggtggaaatcttctgtaatcactctgtgtccaatgcttacaacttcttctggtaccttcacttcccgggatgtgcaccaagactccttgttaaaggctcaaagccttctcagcagggacgatacaacatgacctatgaacggttctcttcatcgctgctcatcctccaggtgcgggaggcagatgctgctgtttactactgtgctgtggaggtgcctaacaccgacaagctcatctttgggactgggaccagattacaagtctttccaaatatccagaaccctgac

SEQ ID NO: 85284 - DNA, 352 bp, Homo sapiens
gcacaggctctgcaaccgcgtatgtgttgactcaggcaccctctgtggcggtggccccaggaagggcggccagacttacctgtcgaggggacaatcttcagaataaggctgtccactggtaccaattgaggccggaccaggccccctcactcgtcctctattatgattctcgccggccctccgacatccctgaccgattctctggcttcaagtctggtaacacggccaccttgactattgacaaggtcgaggccggcgatgaggccgactattactgtcaggtgtacgatcttcccactgaccattacgtcttcggaggtggcaccacactcaccgtcctaggtcagcccaa

SEQ ID NO: 85285 - DNA, 413 bp, Homo sapiens
cgagcgcctggggaggggggtccacgacacggatccctgggcaacacccccttactgccccaagatacagtcgcccccgtattcgtcccaagggacaacctccgacgcgtctctttggacgccaccccaaggctgtccctggacgcagtcgtccccagagccccggaacccaccagtgccctggacggcggccccagcaactttggagctggccgcagtgtaccagggtctctctgtgtctccagagccctgtctgtcgctgggagctccatctctcctgccccacccatcatgccagagactgcagcctcagacccccgagaggtgctggagccacagtgcagaggtggtgcccaactcagaggaccagggaccgggcgccgccttccagctcagtgaagcaagccctcccc

SEQ ID NO: 85286 - DNA, 420 bp, Homo sapiens
  misc_feature (1)...(420): n = a,t,c or g
ctggagcgcagagaagctgggaggagaacatatataccagtcatgtctggtgagaacaaactgtcatggactgtgaaggatctcataccaaatggtgaatacttcttccgtgttaaagcagacaacaaggttggtggaggagaatatattgaactgaaaaatccagtcattgctcaagatccaaagcaaccccctgatccacctgtagatgtagaggttcataatcctacagcggaggcaatgactattacatggaagccacctttgtatgatggagggagcaagataatgggctacatcatanaaaagattgctaagggtgaagaaaggtggaagagatgcaatgaacacctggtaccaatcctgacctatacagcaaaaggacttgaagaggggaaagagtaccaattccgtgtgcga

SEQ ID NO: 85287 - DNA, 394 bp, Homo sapiens
ggccatccacgtgcgttgcctcctgtctcccggccacaccgccggccacatgagctacttcctgtgggaggacgattgcccggacccacccgccctgttctcgggcgacgcgctgtcggtggccggctgcggctcgtgcctggagggcagcgcccagcagatgtaccagagcctggccgagctgggtaccctgccccccgagacgaaggtgttctgcggccacgagcacacgcttagcaacctggagtttgcccagaaagtggagccctgcaacgaccacaagagggatgaggatgacgtgcccactgtgccgtcgactctgggcgaggagcgcctctacaaccccttcctgcgggtggcagaggagccggtgcgcaagttcacgggcaaggcg

SEQ ID NO: 85288 - DNA, 528 bp, Homo sapiens
  misc_feature (1)...(528): n = a,t,c or g
cgcagtggattggtacgccgagatccggacgtcgggaatcgctcttaggactttcttagaaaanagcgagagattgatttgatnccctgaggacnctcgccagnaaccccgggncgacccacgcgggcgcctctgtctcggagggacacaggggcanaancaacccacgncctgcttcaaaaggaatcagagcttttgcacttcaggggattcacatagctgaagggcatacaaaagctgtgctctgtgtggattctactgatgatctcctcttcactggatcaaaagatcgtacttgtaaagtatggaatctggtgactgggcaggaaataatgtcactggggggtcatcccaacaatgtcgtgtctgtaaaatactgtaattataccagcttggtcttcactgtatcaacatcttatattaaggtgtgggatatcagagattcagcaaagtgcattcgaacactaacgtcttcaggtcaaggtactcttggagatgcttgttctgcaagtaccagtcgaacagtag

SEQ ID NO: 85289 - DNA, 389 bp, Homo sapiens
  misc_feature (1)...(389): n = a,t,c or g
cccacgcgtccgcccacgcgtccgcccacgcgtccgcccacgcgtccgctgtaatctctctgtagaaaaaattaaaattatcagaggtcttcgtgaccttacctgtacagaaactcaaaatgtggtgtttgaggttgagctgtcccactctggaattgatgtcctgtggaattttaaggacaaggaaatcaagcccagttctaaatataaaattgaagcaccatggggaagcgggacaatcgggtggtactgccaaaattatgacatgataccaaggaaattagaatgtgatcaatattgttgaaaacaaaaacaaaaacctgagaccagttaaatttaacaaaggcctatatgaacccaatagcaatggcgagatcaaggggtccaan

SEQ ID NO: 85290 - DNA, 408 bp, Homo sapiens
cccacgcgttcgtccacgcgtccgccctctctgttcgtccacgcgtccgcaaaaggaggcgagaaggaagagggagatgatggccactatcttatgagaacggaatcacatactggcctaaaaaaggggggaaatgctaacctggtatttatgcttaaaagaaacacggagccaaagaagggctcataccattttgacctggagcgactgcgtgctgcccacatactgtttgagagggaacaggagcaccttgcgccgggaggcatatccatgcccctgcccccacctttgcctctacccgcctgtttgggttaaccaagcccaaggataataatgtcatatattataagatctaagccttccgctctcaacccggtgatggtcccccgtcacaagtctcatcctagg

SEQ ID NO: 85291 - DNA, 407 bp, Homo sapiens
cttccctcaaagcaagcaaggacacagtttgtgaagaaattcacaatgctctcaatgtaatttcaaatgcttcacaagggatccagaatatgacaaccccaccagaacctcaggcagcaaccctgggaagtgcccttgatgagctggagaatttaattgtcctgaatccactcacagtaactgaggaggaaatacgaccatcactagagaaacgccttgaagccattatcagtggggctgctctgctggcggattcttcatgtacgagggacttacaccgagagcggattatcgcagaatgcaacgccattcgccaggctcttcaggatctgctttcagagtacatgaacaacgctggaaaaaaagaaaggagtaataccctgaatattgctttagacaacatgtgt

SEQ ID NO: 85292 - DNA, 473 bp, Homo sapiens
  misc_feature (1)...(473): n = a,t,c or g
tgtggggnntttgaacttcgtgtangcactggggccgcagttccggagttcacccacgcgtccgacatacgtggatatttcttggaagcctcctttagatgatggaggcagtaaaatcaccaattatattattgagaagaaggaagtgggtaaagacgtctggatgccagtgacatctgcaagtgctaaaacaacatgcaaagtttctaaactacttgaaggaaaagattatattttccggatacatgctgaaaatctgtatggaataagtgatcctctggtgtctgattcaatgaaagccaaagatcgtttcagggttcctgatgcacctgatcagccaattgttacagaagttaccaaagactctgcattagtaacctggaataagccacatgatggaggaaaacccatcacaaactacatcctggaaaagagagaaactatgtctaaacgatgggctagagttaccaaag

SEQ ID NO: 85293 - DNA, 211 bp, Homo sapiens
tgtccatggactccttctacaaggagcggcctgtttctgctgctgctcagtcagcaccttgtaaaaggagtccatggacaggaacaccacccagggcacatccagggcctcgaagatcattctgggcacaggggtcttcccaaaggcactgccgccccccaagccgatggcgaaggcctctttggattgcgtgccgtgttcattgaaccaa

SEQ ID NO: 85294 - DNA, 396 bp, Homo sapiens
atttttacgacaggctgtaaataacttcaaaaatgaaactggctatacaaaaagactacgaaaacagttaccttctccaccacccccaataccacctccgagaccactgattcagaggaacctacaacctctgatgagatctccgatatcaagacaacaagatcctcttatgattccagtgacatcttcatcaactcacccagctccgtctatatcttcattaacttctaatcagtcttccttggcccctcctgtgtctggaaatccgtcttctgctccagctcctgtacctgatataactgcaacagtatccatatcagttcattcagaaaaatcagatggaccttttcggtaaggcctgtgtgtttttcactgttagaaaccaaatgaggtcag

SEQ ID NO: 85295 - DNA, 400 bp, Homo sapiens
aaaccagcataaagagagcaattgaaaccacagatgttacaaggagctttggatgggatagcagtgaggcttggcagcagcatgatgtacaagaactatgcagagtcatgtttgatgctttggaacagaaatggaagcaaacagaacaggctgatcttataaatgagctatatcaaggcaagctgaaggactacgtgagaagtctggaatgtggttatgagggctggcgaatcgacacatatcttgatattccattggtcatccgaccttatgggtccagccaagcatttgctagtgtggtgtgtacctttcacctgactgcttgtgtatccttacacagaatacataatagcacagtggtataatctcttgtaagggaagtatcatcctagatacacct

SEQ ID NO: 85296 - DNA, 386 bp, Homo sapiens
ctatggcctgggggcacattttgggagactctttatccaggcgggcattaatgaaaatgatttttatgacggagcgtggtgcgcgggaagaaatgacctccagcagtggattgaagtggatgctcggcgcctgaccagattcactggtgtcatcactcaagggaggaactccctctggctgagtgactgggtgacatcctataaggtcatggtgagcaatgacagccacacgtgggtcactggtaagaatggatctggagacatgatatttgagggaaacagtgagaaggagatccctgttctcaatgagctacccgtccccatggtggcccgctacatccgcataaaccctcagtcctggtttgataatgggagcatctgcattg

SEQ ID NO: 85297 - DNA, 108 bp, Homo sapiens
  misc_feature (1)...(108): n = a,t,c or g
tagagtatannccctttgggaaaaagggggaatacgttgtaaaaaacctaccttgttaaaaaaacacatacaaacccatacggaggtccgcccctaccactggatttg

SEQ ID NO: 85298 - DNA, 433 bp, Homo sapiens
  misc_feature (1)...(433): n = a,t,c or g
cccacgcgtncgcctcgatgcccttttcgcgcaaatgcgccgctggacctatccccgagagcatcagcaactgcggcgaattgatcgcgccggcgcacaacaccacctcacgccgcgcctcaagggttcgacgctgtcccgcctcctcgatctcgatgccgctggcccgcccgcgatcgaagaggatgcggcgcgccagggtgtcagacagcaccgtcagattggggcgtttgagcaccggatgaagaaaggcacgtgcgctcgacagccgcgtacctcggcgctggttgaggtcataggtcccgaaaccggcctgtttctctcccgcaaaatcctggttatgggcgtgtccggcctgctgcgcggcctcaatgatggcgtgagtgatcgggttgaaggagcgcggntgctgcacatccagttcgccaccctt

SEQ ID NO: 85299 - DNA, 375 bp, Homo sapiens
cccacgcgtccgcaagaaatgcagctggaaactttagtgaaccatctgatagtagtggtgccattactgcaagagatgaaattgatgcaccaaatgcctctctggatccaaaatataaagatgtcatcgttgttcatgcaggagagacttttgttcttgaagccgacatccgtggcaaacctatacctgatgttgtttggtcaaaagatggaaaagaacttgaagaaacagctgctagaatggaaattaaatctactattcagaaaacaactcttgttgtcaaagactgtatacggactgatggaggacaatatattctgaaactcagcaatgttggtggtacaaagtctatacccatcactgtaaaggtacttg

SEQ ID NO: 85300 - DNA, 377 bp, Homo sapiens
aagaaagttcctgaaaaacctcaggttccagaaaaagtggagcttacacctctgaaagtgcctggaggtgaaaagaaagttcgcaaattacttccggaacgtaaacctgaaccaaaggaagaagttgttctgaaaagcgttctaagaaaaagacctgaagaagaagaacctaaagtagaacctaaaaaactagaaaaagttaaaaaacctgcagtaccagaaccaccacctccaaaacctgttgaagaggttgaagtacctactgttacaaaaagggaaaggaagattcctgaaccaacaaaagtgcctgaaatcaagccagcaatacctctccctgcacctgaaccgaaaccaaagcccgaagcagaagtgaaaac

SEQ ID NO: 85301 - DNA, 401 bp, Homo sapiens
agccaatcattgatggaggaagtttagtcattggctatcatctagaatgccaggaaagaaatagcatcctctgggttaagttgaataaaacacctattcctcaaaccaagtttaagacaactggccttgaagaaggcgttgaatatgaatttaaagtctctgcagagaacatcgtgggcattggcaagccgagtaaagtatcaaaatgttatgtggctcgtgacccatgtgatccaccaggacggccagaggcaatcattgtcacaaggaattctgtgactcttcaggggaagaaacccacctatgacggtggaagcaagatcactggttatattgttgagaagaaagaattacctgagggccgttggatgaaagccacttttacaaatattattgacact

SEQ ID NO: 85302 - DNA, 493 bp, Homo sapiens
agaaccaaaacagatgtgtacatcctgaatttggctgtagcagatttactccttctattcactctgcctttttgggctgttaatgcagttcatgggtgggttttagggaaaataatgtgcaaaataacttcagccttgtacacactaaactttgtctctggaatgcagtttctggcttgtatcagcatagacagatatgtggcagtaactaaagtccccagccaatcaggagtgggaaaaccatgctggatcatctgtttctgtgtctggatggctgccatcttgctgagcataccccagctggttttttatacagtaaatgacaatgctaggtgcattcccattttcccccgctacctaggaacatcaatgaaagcattgattcaaatgctagagatctgcattggatttgtagtaccctttcttattatgggggtgtgctactttatcacagcaaggacactcatgaagatgccaaacattaaaatatctc

SEQ ID NO: 85303 - DNA, 364 bp, Homo sapiens
gtcaacatagcttgattcagtatttggcacaggttgtccagaatggcttactagaaaggctattagaagaaacctagtctacagggtagttcgtggataaaggagcatggtgttcagtatatagtgatgatttggtacatggtgaagggttttaaagattcatcttcataaacccagggaataaagtgcatcaggctgtgctcaccattcacatacacggtggtgcctggaccagagaaaaactccatgtcagggtgtcctacccttaacttcacacagtagtaggtgccagcatcctctggcaacacgtcactgatgcgaatggaatagtcagtttgatcaaccattgtgttttccactggag

SEQ ID NO: 85304 - DNA, 326 bp, Homo sapiens
gtaatacacagccgtgtcctcaactctcaggctgtacatttgtagatatagggtgttctcgggattgtctctggatatggtgaatcggcccttcacggaatctgcgtagtgtgtcttgcttccatcatgtgatataactgccacccattgcagccccttgcctggagcctggcggacccaatacgcagcataacgactgaaggtgaatccagaggcggcacaggagaccctcagggacctcccaggctggaccacgtctcccccagactccaccagtagcatctgacattggacacctcttataagagcagcgaggaatacccagt

SEQ ID NO: 85305 - DNA, 335 bp, Homo sapiens
ccctgggtcaaatacagcatgccttagaggaactaatgagaagtctgactgataccgaaaaactgatatatgctcatataccaatcagtggagacccaaaagtcatatgtgttgagctggcttattgccatgtcctaaaaaaggatgtttcggctcatcaagccacagaggacacagtcttcatagctggcaatgagcttcttgaatccagagctggagatgatgccagcagcttaaagagccgtttggaaaccatgaaccaatgctgggagtcagtgttacagaaaacagaggagagggagcagcagcttcagtcaactctgcagcaggcccag

SEQ ID NO: 85306 - DNA, 352 bp, Homo sapiens
catcgaatctttagtaatagttgtcacttcagggtttttgggcggatcagggggtccataaggattcactgcaagcacaggctctgattccagtggctctcccactccatatttatttacagccatgacacggaatatgtattcattgcctttcaagagtttagtgacctttagctttgttacttggacttctgaggctacatttgtccatgccaatctgctggtttcacgtttctgtactatgtaatgatcaattttggcacctccatcatccagtggagggaaccatgatagtacacacttttctgatgtcacttcagttacagccaaaggtccttcaggtgggcctggt

SEQ ID NO: 85307 - DNA, 345 bp, Homo sapiens
ctcccatccacagctcacaggcgtgtgtctccccgaacaccgtgtacaggtccagggcttcctgcagcctctgctgacgcaggaccgcctggtccaccacctgttgaaagagctcccgcagggcctgcagcaatacctgcacggccaggaggacctgctgctggaagtgaaacagctggacgtcttcctgctggacctgcatcactacaaggcccggctctacattactcaaaacgctaaagtgactgatgacaagaccgaatcccttccattggctgtgcacctcctgctggaggatccaggtattgtggatgagattgacgggcaccaatactgctaccagcg

SEQ ID NO: 85308 - DNA, 356 bp, Homo sapiens
ggccttttaaagcctgtaaactctccttacaattccgctattttacctgtccaaaaaccagacaagccttacaggttagctcaggatctgcgacttatcaaccaaattgttgtgcctatccaccccacagtgccaaacctatatactctcctatcctcaatacctccctccacaacccattattctattctagataaacctagtggaccccatagatcctaaatcctttccccactctgctttccattccttaaaaaacagctcccacactagctctccctaacttatcactcccttttcattacacacagccgaagtgcagggctgtatggttggagttctcacacaagagacgg

SEQ ID NO: 85309 - DNA, 359 bp, Homo sapiens
cttcccctgaaatcagagaccagcatgctgatgatgtcaaagaagactttgaagagagaacagaaagtgaaatgagaacatcacatgaagccagaggtgcccgggaagaacccaccgtccagcaggcacagcgtcggtcagctgtctttctgtcctttaagtccccaattccatgtctgcccttgcgctgggagcagcaaagcaaacttcttccaactgtcgcaggaatccctgccagtaaagtttccaaatggagcacagacgaggtgtcagaatttatacagagcttacctgggtgtgaagaacatggaaaggtatttaaagatgaacaaattgatggagaagcatttctacttatg

SEQ ID NO: 85310 - DNA, 316 bp, Homo sapiens
ctgttctaagatggaagaaaaagtttgttccataatcgtatgcatgactcaccatcatctgcatacacacactacagtagtcttttttgtttcccctgatgtgattaattgtacatcctctctgtttgggatgcagagccttggagttgtcctctacgtgcttgtgtgcggtgccctgccatttgatggaagcacactgcagaatctgcgggcccgcgtgctgagtggaaagttccgcatcccattttttatgtccacaggtaagggagtcgctagcacacagctatgaatggggttcatgaaagttagaccccct

SEQ ID NO: 85311 - DNA, 350 bp, Homo sapiens
cagacatgtatcatataatatcttccacatgcatattaataaagggcaaagttatcattacctttgctttatgaagatcaactccatacatagacaactttttggcattctcaagaaactccaagtcagcctgagctggagtcatggacctttgatagaataaaaacataaaattctttcagtggtatagtgtcatcatttacagtaacatttatatattcactgtattttaaacacatgaacatatacataccactatattaagatatatttcctagtcctgaaagtaggttattatggaacagaacccatcactgcctgtatctaaataattaaaatataccttagag

SEQ ID NO: 85312 - DNA, 429 bp, Homo sapiens
gtgaattctaacatgtttctgtagatgtgaagaagcacggaaggttttcccacattccttacatatatacggtttctctccagtgtgagttcttatatgttcaatgagttgtgaagatgtagcaaaggctttcccacagtccttacattcatagggcttctctccagtatggatttttacatgattatgtaagcttgaggaaacagtgaatgctttcccacactccttacatttatagggttttattccagtgtgaattctaaagtgattcttaaggcatgaagagcttctgaaggattttccacataccttacattcaaagggcttctcctctgtgtgagttttaaaatgttcagttagtagataaaacctattgtaggctttcccacattcgttacattcatagggcttctctccagtgtgtattcg

SEQ ID NO: 85313 - DNA, 340 bp, Homo sapiens
  misc_feature (1)...(340): n = a,t,c or g
gcaatttctaagttgcgcattgttcatttttgctcttcaaaacctcgggtagagtacagcaccaaaatcgtagaagtgttttgtgggaaagagttgtatggctatctctgtgtgattaaagtgaaggcattctgttgtgtggtgttctcggaagctcccaagtcatggatggtgagggagaagtacatccgccccttgacaactgaggaatgggtagagaaaatgatggacgcagatccagagtttcctccagactttgctgaggcctttgagtctcagttgagtctatctgacagtccttcactttgcagaccagtgtattctaagaaaggtctggacn

SEQ ID NO: 85314 - DNA, 323 bp, Homo sapiens
gtttacttcccatgtatccttcacagggaaggccctaaagtatgtactccattaaaacaagaaagtaaaccaagaacaagggaaactgtccagaaaatagtcaactcaacaaaggacagaggccagagaaattttcaggataatggtgaagagaagaaccttaacagcagctctgcagcaggcatatcgatcaatctgcaatacaagaggaggataaagagctctaagggttgggtagggtgtacgttgggaaaggaacgaaaaaaactgcatgatgtgcttgactggtaaagactttggggacagaaagatgtagaaaagtg

SEQ ID NO: 85315 - DNA, 391 bp, Homo sapiens
cgtttgcttccttgtttcttccaaaactgaggcagaagcaccttgagcagaagcattcatatcttcctcaacgttgtcacaactggggcctgacggagcgtcaaaaacaatagctgagccaacaagtagctacagtggccccttaatacacacaaaacattcacaaagtactaatgaagatcgtaattctgaacaatccatactatatgctttatcaatataatattatgaatattttactgatataggataaaacgaagataaacggaaggatgaaatacataaatatcctaggaagatataaaagatattaaaatgctcagtaaagctactttctctacttctaggaattactcccctgaaaaaagcaaaataactgagttagaaagat

SEQ ID NO: 85316 - DNA, 342 bp, Homo sapiens
ctgttgtctccgaaacaatttcttccaagaatatcattagccggtccagcaatggacagatgaatggaatgaagcctcccctatctggctacagagctgcccaaggtcctcaaaggcttcccttccctactggttacaaaaggcagcgagaatatgaagaggaagatgacgatgatgatgaatacgactctgaaatggaagattttattgaagatgaaggagagcctcaggaagaaatatccaagcacattagagaaatctttggttatgaccgaaaaaaatacaaagatgaaagtgattatgccttacgttacatggaaagtagttggaaagagcagcaga

SEQ ID NO: 85317 - DNA, 339 bp, Homo sapiens
gcagatggcactaaatgccacatatatctttaatggtttgacggtctctgtaccagggatggaaaaagccttacaccagtacacgttggagccttcagaaaaaccgtttgacatgaaatcaattcctcttgctatggctcctgtctttgaacagaaagcagaaatcacacttgtggctactaagccagagaagttggctccttccaggcaagacattttccaagaacaattggctgccattcctgagtttctgaatataggacccttgttcaagtcttctgagcctgttcaacttacagaagcagagacagaatattttgttcgatgtatcaagcacat

SEQ ID NO: 85318 - DNA, 364 bp, Homo sapiens
  misc_feature (1)...(364): n = a,t,c or g
cgacacgctcatgtagagggagaccgcgtacttgatgatgctgtgtttggagggtgtggtgggctccactcccgccttgacggggctgctatctgccttccaagccactggcacggctcccgggtagaagtcacttatgagacacaccagtgtggccttgttggctagaagctcctcacaggagggtgggaacagagtgaccgagggggcagccttgggctgacgaaggacgggcagcctggtccctccgccgaacacccaataagaagcactggcgtctgctgactgacagaaatagacagcctcgtcttctgcctggactacactgatggtcaacgtggctgatgacccggagctggagccn

SEQ ID NO: 85319 - DNA, 592 bp, Homo sapiens
cacgccaagcttggcacgaggctttcaaagtgaggaaagaaattcttactgttatctgttgtcttctggcattttgtattggcctgatatttgtgcaacgctctggaaattactttgttacaatgtttgatgattattctgctacactgcctctgctaattgtagtcattttggagaatattgctgtatgctttgtttatggcatagataagtttatggaagacctaaaagatatgctgggctttgctcccagcagatattactactatatgtggaaatatatttctcctctaatgctattatcattgctaatagctagtgttgtgaatatgggattaagtcctcctggctataacgcatggattgaagataaggcatctgaagaatttctgagctatccaacatggggactggccgtttgtgcctctctggatgtctttgcaatactccccgtccctgtagctttcattggtcgtcgcttctcccttatagatgatggagctggccctttttgctccgcggcctatactaccactgggtgccggacgccatacctttaaaatcataggcctgtagaacccacgcccttccc

SEQ ID NO: 85320 - DNA, 459 bp, Homo sapiens
aaaaaaaaatttgataccgtgtttgatgccatccgaagcttcgcacgaggaggtctgggacatgaccacgcaccgtgccaaggagatgcactgtgtgcagaccatctcctcggtggcccgtgtgaagtggcggccagagtgccgccaccacctggccacgtgctccatgatggtggaccacaacatctatgtttgggacgtgcgccggcccttcgtgccagctgccatgtttgaggaacaccgagacgtcaccacgggaattgcctggcgccacccccacgacccctccttcctgctgtctggctccaaggacagctcgctgtgccagcacctgttccgcgacgccagccagcccgtcgagcgcgccaaccctgagggcctctgctacggcctcttcggggacctggccttcgccgccaaggagagcctcgtggctgccgagtcggggcgcaagcccta

SEQ ID NO: 85321 - DNA, 385 bp, Homo sapiens
ggggctgcggctcccagggaaggggcagctgattctgaaggaggctcctgagaaagacccggaggagccagggggagagagggagacttctgggcagcagggacagccaggacaggcctccggagtgccggtcaccagggtgcatcagggccaagatggtgtcaggaaaggtggctggagagtggccgtcagcttgaaccgacctgagcctgagggctctgggccaccacttggttctcgccctgcctctctcagccagaagcccacagggcctcggccccagcctgcccgaccctcaccaaagatccctgggagtcggttggcctgcggcagctccgtggttttcttcggctggcttcttctcagagggctcactgcccgaggg

SEQ ID NO: 85322 - DNA, 638 bp, Homo sapiens
ggcatcagagtcagctccaggaaccatcatgaatggacattttggtggtcgtagtcagcagacactagacactccaaagacaacaggccctccctctgccctcccgtctgtgagctccctgcccagcaccacctcctgcactgcacttctgccgtccacatcccagcacactggcgacctgactagcagccctctctctcagcttagcagttcgctctccagccaccagagcagcctctctgcacatgcagccctctcctcgagcacgtcacacacacatgccagtgtggagagcgcctcttcccaccagtcctcagccaccttctccacggcagcgacctccgtctcaagttccgcatcctcaggcgtcagcctgtccagtagcatgaacaccgcgaacagcctctgtctgggtgggacccccgcgagtgcatccagcagcagtagcagggccgcgcccttggtgacctcaggcaaagcacccccaaacttacctcagggggtgcctcccctgctgcacaaccagtacctcgtaggtcccggaggactgcttcctgcctacccgatctatggctatgacgagctccagatgctgcagtcacggctgccagtggactactatggaattccctttgctg

SEQ ID NO: 85323 - DNA, 369 bp, Homo sapiens
tggaccaggccggctaattttaggtttaaaagaattctgattcctacatggttcagaataaaaatacgaagccataagcttttatctagcagcttattgggaagcagctttcactcttctaagacagagtcttccagattagcacatggcttaaagatcactgtgtgatttaaaataacattagcgtctagtcatttctacatattctcagttttcatccaagctcctgctgccatgaggacagcactagaaggatgcatttcaactcaccctctcagaagtttgaaaagcatgcagcccagggagaaccagtcggcactgctgtcataggccgtccccttctgcagcaccttcggagccatgtcccct

SEQ ID NO: 85324 - DNA, 632 bp, Homo sapiens
  misc_feature (1)...(632): n = a,t,c or g
ggcacgagctaacagtggctgcagctgaccgtgggcagccaccccaaagctcagtcgtgccagtcactgtcactgtactagatgtcaatgacaacccacctgtctttacccgagcatcctaccgtgtgacagtacctgaggacacacctgttggagctgagctgctgcatgtagaggcctctgacgctgaccctggccctcatggcctcgtgcgtttcactgtcagctcaggcgacccatcagggctctttgagctggatgagagctcaggcaccttgcgactggcccatgccctggactgtgagacccaggctcgacatcagcttgtagtacaggctgctgaccctgctggtgcacactttgctttggcaccagtgacaattgaggtccaggatgtgaatgatcatggcccagccttcccactgaacttactcagcaccagcgtggccgagaatcagcctccaggcactctcgtgaccactctgcatgcaatcgacggggatgctggggcttttgggaggcttcgttaccacctgtnggaggctgggccaggacctgagggccgtgaagcatttgcactggacagctcaacaggggagttgggtcaacttttgaactcgcggaatgnttga

SEQ ID NO: 85325 - DNA, 445 bp, Homo sapiens
ggacgagggacttgagatatccgtttgacatggtcggccgcttggcgagcaacccgaagttgggtgtcagccttgcccgcgtcgcaggatcctcgacgacgcgggccaggtaacgccgatacccggcgatgcaccacgcgtcgaacctgtccatgagtggatgcacgatgctgcgcgggcccttgatgattccccgcaacaccaagtcgatgacgactagtgcgctgccgtgaagggccggttgcacgcccggcacggccagtatcgtcttgagccaagggggcacccggaagtccggcttgggaatcgaccacaccggcgtgcgctgaaagacggtcagcgtgccgacctcgggtgcgatggacggaatgatctgcaccgcactggctcccgttgccgattgattgccaactctctggcccgtcatgtcgtagtcggggtccca

SEQ ID NO: 85326 - DNA, 445 bp, Homo sapiens
gggcggatcctgttcatctacgccaagctcaaccctggtatcgcttatgtgcaaggcatgaatgaaatcgtggggcccctctactacacctttgccaccgaccccaatagtgagtggaaagagcacgccgaggcagacacctttttctgcttcaccaacctcatggccgagatccgggacaactttatcaagagcctggatgactcgcagtgtggcatcacctacaagatggagaaggtttactccaccttgaaagataaggatgtggagctctacctgaaactgcaagagcagaacatcaagcctcagttctttgccttccgctggctgacactgctgctgtcccaggagttcttgctgcctgacgtcatccgcatctgggactccctcttcgccgatgacaaccgctttgacttactcctcctcgtctgctgcgccatgctca

SEQ ID NO: 85327 - DNA, 418 bp, Homo sapiens
ggcatttctttgtgttggagacattccgtatcttctcactattggaaaattacaataaatggttgtaaattcagtcaccttatagagcactgcacctgtccctcctgtccatcgtcctcctgtgcctgttccccagcctgtggctgccccctccccaaagaagccgatgcttgctggagcttggtcggtgctctgggtaaggagacgctggggctcacgccgtgctcaggctgctccctggtcatccgggcacttctcacctgcctttctcctccctgaccacctcccccctaggactgaagcgggtcacgggcgggtttaactccaagaacagatgtgatgccaggacctattgctacctgctgcccacgtttgcctttgcgcacaaggaccgggacgttcaggatgagacctaccg

SEQ ID NO: 85328 - DNA, 411 bp, Homo sapiens
ggctgataggcatctgggcctggaggccttcttcgccgacatcattccgcaggccatcgagcgcgtgcttatcgattccgggaagtccgagctggacctgattgggtggagcctgggcggcaccctgagccttttgaccgccgcggccgaccgcgaattgccgatccgctcgatcgtcgccatcggcaccccgctggactacggacaaatccccggatatcccgaggcacgccgaatcaccaaacgcaccaacggctacgccgtcaccacggtgttacgagcgctcggcggtattcccgcaccggtggtacaggccgcctaccgcgcgacctcatgggaccgagaaatcaagcggccctggttcctcctgaacaatctggacaacaccgaagcgttggccaaggctgaagt

SEQ ID NO: 85329 - DNA, 422 bp, Homo sapiens
tcacgaggcaccaccaccaccacctggcagcctggatcatccttacccaatggagcatggaagcaatggtggtttaggaagcaaggaaaaggggggcctaccggagagaatctcaagtccggtattatcactcaccccagaaggggaagccaccagcgtgaccttggtaaaggagctgatcctgttggaagcattgataaaggagcccggtgagagcagcagcataaaggcctgcgaaatgtgtggacaggcctttccctcccaggcagctctggaggatcatcagaagacccaccccatggaggggccgctcttcacttgggttttctgcaggcagggctttcttgagcgggctaccctcaagaagcatatgctcctggtacaccaccagaaccattatgtggcattcctgtcaaatggcc

SEQ ID NO: 85330 - DNA, 671 bp, Homo sapiens
cctagataaattactggaccgcatggaaaactacaacattttcaatgaatatattttaaagcaagttgcagcaacatatatcaagcttgggtggccgaaaaataattttaatggatctcttgttcaagcatcctaccaacatgaagaactacgtagagaagttataatgctggcctgcagttttggcaacaagcactgtcaccaacaggcatcaacacttatttcagattggatttccagcaacaggaacagaataccactaaatgttagagacatcgtatactgtacaggagtgtcactactggatgaggatgtctgggaattcatatggatgaaattccattccaccacagcagtttctgagaagaaaatattattggaagccttaacttgcagtgatgacaggaatttattaaacaggcttctaaatctgtcactgaattctgaggtggtgctggatcaagatgcaattgatgtcataatccatgtagctcgaaatccacatggtcgagaccttgcctggaagtttttcagggataaatggaagatattaaataccaggattaggcagaaaacattagaatttgactttgcggagccactcattttagcttttcccataatactttatacagccatagataatcctcctctggtccgtgaacatgagg

SEQ ID NO: 85331 - DNA, 473 bp, Homo sapiens
ggctgcctcatcccttcgaggaggccacctcgagcagaagtattgtccatggtttctgaacgctcccgggcagagatgccagggtgtggatactctaggatgctaaaactggtggagaaagagctgtaagccgagtctctcttgttatggaagtggctgagctggtcaatgctgccggtggacttggcaggggaaagatgacagggtgggtatgccccactgggctccaggctctccatgctcccctgggagctgcactggtcagggctccgccttagataagcatggtcatagttggagaggtcactagtagaggagctggaagaaagacaaagcatgcaggaccactgagctgttatcatttattaggcttacaggcagaggacccagcttataaatgttctcttgtgcaagaggtttggtgtttggaagggtgggtaaaaagggccatatttgggccttgctcagcctcg

SEQ ID NO: 85332 - DNA, 400 bp, Homo sapiens
gggcccaatgtgtgataaacactcagcttttgcggaaaaattccatgctggtttcatcgactacattgtccatccattgtgggagacatgggcccatttggcactgcctgatgctcaagacattctttataccttagaagataacaggaactgggttgacagcatgatacctcaaagtccctcaccaccactggacgaacagaacagggactggcaggggctgttggagaaccttcatgttgaactgactcttgatgaggaagattctgaaggacccgaaaaggagggagagggacaaacctatttcaccagctcaaagacgctttgtgggattgtaccacaaaacactgattccctgggagagactggcatacacatttgcgcacatgacaagtccccc

SEQ ID NO: 85333 - DNA, 365 bp, Homo sapiens
  misc_feature (1)...(365): n = a,t,c or g
attctcttatgtttactaagggccgagaaccacttaaaagcttttccacattcattacatgtgtagggtttgtctccagtatgaattatcttatgtttagcaaggtctgagaaccacctataggctttgttacattcttcacatttgtagggtttctctccagtatgaattctcttatgattagtaaggtctgagaagcacttaaaggctttgccacattcttcacatttgtagggtctgtctccagtatgatttctcttgtgtttaacaagggttgaggagcaggtaaaagttttgccacatccttcacatttgtaaggtttctctccagtatgaactctcttatgttcagtaaggtttgaaan

SEQ ID NO: 85334 - DNA, 361 bp, Homo sapiens
  misc_feature (1)...(361): n = a,t,c or g
gtttgcttctacgtctcggccatggtgcctgtgaagtcccccagggagtactacgtgcagcaggaggtcatcgtgctcttctgcgagacggtggagagggccctggacttcgggtacctgactcaggacatgattgatgactacgagccggccctcatgttcagcatccccaggctggccatcgtgtgtggcctcgtggtctatgcggacggacctctgaacttggaccgcaaggtggaagacatgtccgagctgttccggcccttccacacgttgctgcggaaaataagggatttgctgcagacgctgacggaggaggagctgcacacgctggaacggaacctctgcatttcccaagacn

SEQ ID NO: 85335 - DNA, 338 bp, Homo sapiens
gctacaaatattgcagcaggactgcacctccaggctcagagagggctttggggagagaaggagtggatgcacagggacctgggatggtgaagtgccccacacacgcaccctaccttgctggatgtaaaagacatgccatgccagtcagtgttgttctttgcccataataggctctacagtctgatcaagaaatcgaggcccaccttaggctcttattgcagcaagtagcatcccaggaagatatcttactgaaaacagcagccccaaacctacgagcactggagaacttaaagactgtcagagacaagtttcaagagtccacagatggtaaaattgag

SEQ ID NO: 85336 - DNA, 371 bp, Homo sapiens
ccatcgtagacttcatactgaagagaaaccttacaagtgtaatgagtgtggcaagaccttcaatcagcagttaacccttaacatttgtagacttcatagtggagagaaaccttacaaatgtgaagaatgtgacaaagcctacagtttcaaatcaaaccttgaaatacatcagaaaattcatactgaagagaatccttacaagtgtaatgagtgtggcaagaccttcagccggacatcatcccttacataccatcatagacttcatactggacagaaaccttacaaatgtgaagattgtgatgaagctttcagtttcaaatcaaaccttgaaagacataggagaatttatactggagagatactacacgtgg

SEQ ID NO: 85337 - DNA, 486 bp, Homo sapiens
caatattgtagatgattttttatgaggctaaacttatttcattttgcttgtaccaaaatgaaaacaactttcttatgttacatgatgccaggctatatcctaggtaaggtcatgggtggggaatgttactttaactggcactttattcagtgctacaagtttattaagaggtgtttcaggcattccaacaaaaatttaaaatataactttgtggagttgctattgatttaattgctttagagttgcttcagattcatttcttgaaaattcttcccttctgattatgattttacctctgaggaatgccactcaagaatttataattaggccaggtgcagtggcttacacctgtaatccaagcactttgggaggctggggtgggtggatcacgaggtcgggagttcgggaccagcctggacaacatggcggaaccccatcttaaaaatacaaaaattagccaggcttgctggtgggtcgacgcagccg

SEQ ID NO: 85338 - DNA, 330 bp, Homo sapiens
ctggcttcccttgctttctgtgatgccatagcctattggcacactttcttcttttctgatccttgttggcatatcacttccataccctcaaatattattcatccttggattcattgttggctcttgtttctatgcatactgtttggattccttggtgaagttgctctgtatgtgcctgttattcttagtcatacccacagcccagagcacttcctcgaactctgtctcatgaatgtctctatttggtgtacagcacgggcttgtcagtctccaaaactgaattctgatcttcatccatatgtgttcctgtgtttcttgcttagtaaatgg

SEQ ID NO: 85339 - DNA, 320 bp, Homo sapiens
cacgaatttgctttgaatgggaatcctcaaaacccctactgtgatggcattgagggggtcatggaggcttattacaggagtctgaaatctgtacaactatatgggcccaccaactttgctcctgtaattaatcatgtagcaagatatgcttcttctgtaaaggatggctcccagtattttgtgcttctgattgttacagatggtgttatctcagatatggcccagactaaggagtccatagttaatgcctcaaaacttccaatgtcaataattatagtaggtgttggaccagcagaatttgatgcaatggtcgaattgga

SEQ ID NO: 85340 - DNA, 587 bp, Homo sapiens
cggacgcgtgggcagataccctcctagctcctcagaagagtgtgaagacatcaaaaagatactgaagcacttgcaggagcagaaagacagccagtgcctgcatgtggaggagtaccagaacctggtgaaggatctgcgcgtggaactagaggccgtgtcggaacagaagagaaacatcatgaaggacatgatgaagctggagctggacctgcacggactgcgggaggagacatctgcccacattgagaggaaggataaggacatcaccatcctgcagtgccggctgcaggagctgcagctggagttcaccgagacccaaaagctcactttgaagaaagacaagttcctccaagagaaagatgagatgctgcaagagctggagaagaaactgacacaggttcagaacagcctcctgaaaaaggagaaggagctggagaagcagcagtgcatggccacagaacttgaaatgacagtcaaggaggctaagcaggacaagtccaaggaggcggagtgcaaggccctgcaggctgaggtccagaagctgaagaacagtctcgaagaggccaagcagcaggagaggctggctg

SEQ ID NO: 85341 - DNA, 418 bp, Homo sapiens
tttcgtccgactgccgaggaacgagagcgcgaagctaataaactgaggcttcttgaagagcttgaagacacttggctcccttatctgacccccaaagatgatgaattctatcagcaggggcagctgaaatatcctaaactaattctccgagaagccagcagtgtatctgaggagctccataaagaggttcaagaagcctttctcacactgcacaagcatggctgcttatttcgggacctgggtaggatccaaggcaaagatctgctcactccggtatctcgcatcctcattggtaatccaggctgcacctacaagtacctgaacacccagctttttacgggccccttgcccagtgaaaggtctaatataaaacacaccgaggcttaaataagccgctgtttgtgagacctccctcagg

SEQ ID NO: 85342 - DNA, 416 bp, Homo sapiens
aagtacagtaaaaagagaaggtggtttcggcagcactgatagcaaaggaaaagcaacttattggtcatgagtgtgccacagaaaatgaaaacggacaacggacaaggatattgcagtaaaacttttgaaagttttgttcagcaatggaaatttgtacacactacaggaataccctataatttgcaaggtcaggccacagtagaaagggccattcggactcttaagacacaattggaaaaacaaaagaaagggggaagcagtaaggagtataccacgccccacaggcagttacaattagcccttttgactctaaattttttgaacatttccagagatcaggtctccacagcagcggaacaacacttttctggacagaaagttaatttacatgaaggaaaaacggtctggtggaagga

SEQ ID NO: 85343 - DNA, 811 bp, Homo sapiens
gaattcggcacgaggcggcttggagtggttcagcagttggtggagaagggcgccaaccctgagcacctcagcgtgctggagaagaccgccttcgaggttgcactggactgcaagcacagggaccttgtagactacctggacccgctgaccaccgtcaggcccaaaacagatgaggagaaaaggcgacctgatattttccatgcattgaaaatgggaaacttccagctggtcaaagagattgccgatgaagaccccagccacgtgaacttggtcaatggggacggggcgacgccactgatgctagcagctgttacggggcagctggctctggtgcagctgctggtggagaggcacgcggatgttgacaagcaggacagcgtgcatggctggacggccctcatgcaggcaacctaccatgggtcagtgccagccccacgccctcagcgacaaggccagacagatgctctggcctgagatggaggttcccaatgggctcttctggtcctgagatgctgcatacaaaccccaggactatgacgacattgaggcatggaaaaaaaaaaaaaagcggcacaggctcattttagtcccacccttctgtgtccagatttcctgttcccccatcacagaatttcacaatggccctgaaaaaccatgcagcaggagcattttatgcagagagataaggttctctaggttggtttcagttgaacacagtgactgattcattggggttttcacattgagatatagtgacctccttaagtagctcctgtatgaagtaaacattggttattcatacaaaaaaaaa

SEQ ID NO: 85344 - DNA, 502 bp, Homo sapiens
  misc_feature (1)...(502): n = a,t,c or g
agtaggttccnnnggggnggnncaactgagantcttcgnctacngngtcgtcgnananngcggaggaattnagnnantagattatttcagtcatttctactggaagaacttattttgcaaagtaatgataagaatgaagtgctgggagagacatgaatggatccgggaattactataaaaatatttaaacagaaagcaccacactggttaacagagactacatcacagatgaaatatgaagccatgtttacatctaacttcatttatgtttacaagataaaccttttgttaaatgttcattttgttaaaagataatcttacaaattgtcactgagattcctacctgcaggttttttaactttatctagttttttaggttctactttaggttcttcttcttcaggtctttttcttagaactttaaagacaaaaaggtttatatgtaaaccaagacaaactaatgaagatgttgaataagcttgacaaatgcaaataatgtacn

SEQ ID NO: 85345 - DNA, 465 bp, Homo sapiens
  misc_feature (1)...(465): n = a,t,c or g
aacaggggcctggctaccccatccccctccccatgcccagtnccacgccccctggcagcgctcaaaccagtgaggctgcacagcttccaggaacatgtcttcaagcgagctagcccttgtgagctgtgccaccagctcatcgtaggaaactccaaacagggcttgcgatgtaagatgtgcaaagtcagcgtccacctctggtgctctgaggagatctcccaccagcaatgcccaggcaagacgtccacctccttccgccgcaacttcagttcccctctcctggtgcatgagccgccaccagtctgtgccacaagcaaagagtccccacccactggggacagtgggaaggtggaccctgtctacgagaccctgcgctatggcacctccctggcactgatgaaccgctccagtttcagcagcacctctgagtccccgacaaggagcctgagtgagcgggatgagctg

SEQ ID NO: 85346 - DNA, 721 bp, Homo sapiens
ctgcccacctgggtggcgcgtggcttacgcaacggtcactgggctcctgggccgctcccgggccagcgagggctgcgaaagaagttgtagcatgcataccacagaatcaaaaaatgaacatttggaggatgaaaacttccaaacatctacaactcctcagttttgttctaggtgctgtctctcctgctgttgttgtcccttacatgatggtgctgcaagaaaatggatatggtgttgaggaaggcattccaaccttattaatggctgctagcagtatggatgacattctggctatcactggattcaatacatgcttgagcatagtcttttcctcgggctgtgctaggtcctctggctctagaaacagcaagagtctccgcaccccacttggaaccatatgcgaaggatgtgatgacagtagcatttttagccatctcgatcacagctccaaatggagctctacttatgggcattctggggcctaaaatgcttacacaccattatgatccaagcaaaataaaactgcaattgtcaacattagaacatcattaaaaaatttacctgtcatcatctgcctgcttcttttaatgaattatttcacatgacagaagaattttaaagtagaaatatgtagggcctgtacagaaaatccaggatttagtaaacatgtgatttcagtacagggcttttcttgaactttttactccaaaaaaaaaaaaaa

SEQ ID NO: 85347 - DNA, 412 bp, Homo sapiens
ggaattcctgagttccaaccagatcacccaactgcccaacaccaccttccggcccatgcccaacctgcgcagcgtggacctctcgtacaacaagctgcaggcgctcgcgcccgacctcttccacgggctgcggaagctcaccacgctgcatatgcgggccaacgccatccagtttgtgcccgtgcgcatcttccaggactgccgcagcctcaagtttctcgacatcggatacaatcagctcaagagtctggcgcgcaactctttcgccggcttgtttaagctcaccgagctgcacctcgagcacaacgacttggtcaaggtgaacttcgcccacttcccgcgcctcatctccctgcactcgctctgcctgcggaggaacaaggtggccattgtggtcagctcgctggactgg

SEQ ID NO: 85348 - DNA, 441 bp, Homo sapiens
ttgaagaccccttgtccagcgtggtggaattcaagaagaatacaaggaaaagaaaagtaaattgctgctagccaaagaagaattcaagaaacttctagaggaatctaaagtgtctcccaggaccacgtttaaggagtttgcagagaaatacggccgggatcagaggttccgacttgttcaaaaaagaaaggaccaggagcattttttcaaccaattcatacttattcttaagaaacgggacaaggaaaacagactaaggctgcggaaaatgagatgagtttgtgaaaaaatgcaataagcccgggggttgaccctgggcgtgccgggggcgagggggtcacggtggagacggacacgggcgtggggcggccgagacctgcacggcccagcgggcaccggcactgcggggtcttcgttctcagaggattactgtttcatatt

SEQ ID NO: 85349 - DNA, 405 bp, Homo sapiens
  misc_feature (1)...(405): n = a,t,c or g
ggaattcgctatgacaagaccaaggtcaacaaggacaacaatgagatcgtggacaagatcatgggcaaaggacagatccaggtgaggccagggcgccggggcgaggctgagggagcctccaggaggtggttccagttgaaaaggaattctggtcaaggagcctgctctttcgtgattttggttccaagctggttggaggaaagttcccaggaggtggttctcccctccctgctagaggtggctgcctgttgtggccccggaagcccaggcgtgtgcgtggctcctcaggtgggtcatctgcgcttctgcaagatggaaacaaccagctttgttttcacacgccagctttagtctatgggtggttgtttcccggaacgccatgttgagaaggactcanaggctgcg

SEQ ID NO: 85350 - DNA, 493 bp, Homo sapiens
  misc_feature (1)...(493): n = a,t,c or g
atgggggcnnnnaatgaaaatcgtagaccgtgtggnggagtgcatggcctcctgtgccgtgtacttgctcggatccacaccggcacacgcaccccaatcatagccaccgtggtctctggcattattgcagcattcatggcattcctcttcaaactcactgatcttgtggacctcatgtcaattgggaccctgcttgcttactccctggtgtcgatttgtgttctcatcctcaggtatcaacctgatcaggagacaaagactggggaagaagtggagttgcaggaggaggcaataactactgaatcagagaagttgaccctatggggactatttttcccactcaactccatccccactccactctctggccaaattgtctatgtttgttcctcattgcttgctgtcctgctgactgctctttgcctggtgctggcccagnggtcagttccattgctttctggagacctgctgtggactgcagtggttgtgctgt

SEQ ID NO: 85351 - DNA, 474 bp, Homo sapiens
  misc_feature (1)...(474): n = a,t,c or g
tggaggannnnntttgatcgacgtcactagtccgtgcggtggaattccccgactctgcctacatctgccactgcccacccggtttccaaggctccaactgtgagaagagggtggaccggtgcagcctgcagccatgccgcaatggtgaggcctggaggcctgaacggcgagggatggggtgggggtcctggatggctcagacagtccagggttggaatcctggctttgactcttctaaccctagggcctggggacctgaccttccacctgcaagcctgtaaaatgggcaaggagacattccctatctcataactattaatatttactgagaatttactgtgtgccaggccctattctaggcactgaggatacagcagggaatgaaacagacaaagtccctggccctgcctgatagagctgaggtgcctggtgtgctgaggataagcagggaagccagtgtggttatactgagaa

SEQ ID NO: 85352 - DNA, 498 bp, Homo sapiens
  misc_feature (1)...(498): n = a,t,c or g
tgggtataggagagncnnnnaatcgagncccatgatgacctcggccagngcggnggaattcgttttttcctagaaacaggacttcagagagcccatgtcctctatttcattaatgggatcttgacaagaggagtcggaagatttagagagcttctcagagcagttgaaacaagaacaactcaaaacctgcgaatgacaatagccaggcagctggcagagatcttgttgcggggtatgtgtgagcagagctactggaaccctctggaggatccaccgtgccagtcacctctggacgatcctctccgcaaaggagcaaacacaaaaacctacactctcactcggagagcccgtgtctactcaggagagaacattttttgtcctcaagaaaatacggaagaagccctgttgttattgctgattagtgaatcaatggccaaccgggacgctgtgctgagcaggatacctgaacacaagagtgaccgcctcatcagtctgcag

SEQ ID NO: 85353 - DNA, 390 bp, Homo sapiens
ggaattcggcatcctggacgccagcaccgcggcgcagagtggcgtgggtctggcacgagcacattttgagaagcagcctccctccaacctcaggaaatccaacttcttccacttcgtgctggccatgtacgaccggcaggggcagcccgtggaggtggagcgcacagccttcatcgacttcgtggaaaaggaccgagagcccggggcggaaaagactaacaatgggatccattaccgcctccggctggtgtataacaatggactgcggacagagcaagacctctacgtgcgtctcatcgactccatgtccaaacaggccatcatctatgaggggcaggacaagaaccccgaaatgtgccgagtgctgctcacccatgagatcatgtgcag

SEQ ID NO: 85354 - DNA, 459 bp, Homo sapiens
  misc_feature (1)...(459): n = a,t,c or g
caatgaagacctggtcangncgngcaattcacttttggggggtctcttacacacacctgaatagcatactctcaataaaggataggcacacccctgtttgtcctcccccaatttccagactagcattttaccctgggtctagaattggtggtgataagccgacttagatggagtatttgagaaaaggggaggtgaccctttgcctgaatgggggagggggcgctctccactcaccgcctgagtccctggaacgaggagggccaggacatcctggatttcttcaggccgggccggtggccggtctccaccgcgtaggaggtgcggtccatggcgcgacagtacagcagggagaatgcccaatgtttcctcttgaagatcttcctccaacttggcctcgggagtggtcctcgctggaaatcaaggcgagtcgtccttagttgcagagccatggctgagcct

SEQ ID NO: 85355 - DNA, 474 bp, Homo sapiens
  misc_feature (1)...(474): n = a,t,c or g
agggcaggnnnnnnnnattagagaccctgtgaagcgctggaattccangccctgcaacgcgcctacgccctgctccaggagcaggtgggaggcacgctggacgctgagagggaggcccggactcgggagcagctacaagctgatctgctgaggtgtcaggccaaaatcgaagatttggagaagttactggttgagaagggacaggattccaagtgggttgaagagaagcagctgctcatcagaacaaaccaagacttgctggaaaagatttacagactggaaatggaagagaaccagctgaagaatgaaatgcaagacgccaaggatcagaacgagctgttagaattcagagtgctagaactcgaagtaagagactctatctgttgtaaactctcaaacggagcagacattctctttgaacccaaactgaaattcatgtaaagctctcagatgttttcaagcatgtgtaaaggg

SEQ ID NO: 85356 - DNA, 554 bp, Homo sapiens
  misc_feature (1)...(554): n = a,t,c or g
agcgtgtnnnttcgatcactgtccgagnggcgcaanncatgagacgntggtaaaatcccagtttgttgcttgtatggctacttgtcattcacttacaaaaattgaaggagtgctctctggtgatccacttgatctgaaaatgtttgaggctattggatggattctggaagaagcaactgaagaagaaacagcacttcataatcgaattatgcccacagtggttcgtcctcccaaacaactgcttcctgaatctacccctgcaggaaaccaagaaatggagctgtttgaacttccagctacttatgagataggaattgttcgccagttcccattttcttctgctttgcaacgtatgagtgtggttgccagggtgctgggggataggaaaatggacgcctacatgaaaggagcgcccgaggccattgccggtctctgtaaacctgaaacagttcctgtcgatnttcaaaacgttttggaagacttcactaaacagggcttccgtgtgattgctcttgacacagaaaattggggcaaaactgacatggctataaacn

SEQ ID NO: 85357 - DNA, 461 bp, Homo sapiens
  misc_feature (1)...(461): n = a,t,c or g
tgatgagcaggaaaancctgataacctgcggctgacttcgtactacaggcccgacccacgcgtgcggatattttgggaattcattctaaatatgatgaagttagaaaggctggtgcatgcttttataagatgactggcctgggtcctgggcctcaagctctttataatggtgaaccctttaaacatgaagagatgaatattaaagaactaaaaatggctgttcttcaaagaatgatggatgcatctgtatatttacaaagagaagtttttttgggcacattaaatgatcgcacgaatgcaattgattttctaatggataggaataatgttgtaccccgtataaatactttgattttgcgtactaaccagcagtacctcaatttactatctacatcagtaactgctgatgctgaagatttctctactttttttttcttggattcacaagataagagtgcttn

SEQ ID NO: 85358 - DNA, 400 bp, Homo sapiens
  misc_feature (1)...(400): n = a,t,c or g
tggttggaggaggtagatcaccctttctgcgggggacgatttcgtcggtggtaggctgctaccatgaggttgaatcagaacaccttgctgcttgagagttttgggnnccnccgaccctacacctcggagcatgcccccacgtaccaccagtggatgaaagcagatgagcttctgcgttggacaacctccgagccgctgaccctggagcacgagtatgccatgcagcgcacctggctggaagatgcatacgagtgtaccttcattgtgctggatgccgagaagcggcacgcccagccaggcgccaccgaagagagctgcatggtgggagatgtgaacctcttcctcacagatctagaagaccttaccttgggggagatcgaggtcttgattgcagaacccc

SEQ ID NO: 85359 - DNA, 525 bp, Homo sapiens
ctgaggagctggaacctaaagcaatgcctctagattaagttactcaatcaccaaaacacagatttgtatttttgtctgatattactaatgaaccaccaaaaatgttacaagaaatgccaaagcatgccaggtgtagagaaggggattccatcattcttgaatgtttaatatctggtgagccccagccagttgtaacatggtttcaaaatggagtccttttaaagcagaaccagaagtttcagtttgaagaagttaattgtagccaccaattatatattaaggatgttaattctcaagattctggaaaatataaatgtgttgctgaaaacaattcaggggcagttgaaagtgtttcagatctaacagtggagcctgtcacttatagagaaaatagtcaattcgaaaatattggtgaaatttatggaaaatattccagagatcagcaactgcaagaccagggagaatctgtaagggcacatttttatgattatccagctggtccctttactccctggacaaatgtaa

SEQ ID NO: 85360 - DNA, 488 bp, Homo sapiens
cgacccacgcgtccggtagacggggaaaagatagcacatatctgatccctgccccagcctcagggaggtttagtcaacatggggctcagaaaccagtgacattccaaataaggtatttttctctctgtcttgtaaggtctacctgaagggtgtgcaccccaaatttcctgagggagggaagatgtctcagtacctggatagcctgaaggttggggatgtggtggagtttcgggggccaagcgggttgctcacttacactggaaaaggtaatgacctgtcttctccttgagcctgtctcccactttatcagttcccatagtcctcttggcacagtatggctgagtgtacacatgtgtatgcacgtaagggccagggccgcccttccttctatacatagcgctgatacaatagaaaggcatgtttctcagccccatttgccacaggaaagcagtccttcttcactagaattccctagccatggcagctgg

SEQ ID NO: 85361 - DNA, 480 bp, Homo sapiens
  misc_feature (1)...(480): n = a,t,c or g
nagagctggttnctcannnngggaaactttagnanngncntnnactntngggtngannnaagcgtncgaccgagatggggatggttacattgattattatgaatttgtggctgctcttcatcccaacaaggatgcgtgtcgaccaacaaccgatgcagataaaatcgaagatgaggtaagggaaataattatattttgagtacacttctggctgtaggtttgtaatatcctgaatttggttgggttcagtgatcatattagcctttgacttgtctgttgggagataattatttggagttctattttgagatctctttttggatagcatttcaaagagtcccagaggatctctgacatctgagctctagctcaggctagatggattactcaagtgagtcatgtctgtgtggtgctctgaagtttacagagaacctttgcagggcagcatactcatcctggntcactcgtcctgtgtctgta

SEQ ID NO: 85362 - DNA, 438 bp, Homo sapiens
ccatttgtctatatatgagtaccacacatttaattattttgctaaataatagattttaatagctaaattttttagaaatgataaaattagaatcagtcttccttcacaacttacctggttgcactttttaaccacatctggcccaggtgtggcattgagaagtgctataataaggtaacgatttagcagcttccctagtcctagttcttgcaaggtgtcatctgtaaggagtccattccaaagaagaatattgcggaagagctaaaataaaatatcaagtaaatatgtcccttttctccaaagagaaactgtaatagtctctaacaaacatgaaaagttggtcaaactaaaattctccctacaattagccctgttggaactgtcaattttagaatacaatatctctgaataaatacttgattctttccaaaaaaaaaa

SEQ ID NO: 85363 - DNA, 424 bp, Homo sapiens
cagaagttgtgtctcctgatcaggaaatgcctgtttatccacctgccatcatcaccccgcttcaggacactgtcacttctgaagggcagccagcccgttttcaatgccgggtttctggaacagatctaaaagtgtcgtggtacagcaaagacaagaaaatcaagccatctcggttctttagaatgactcaatttgaagacacttatcaactggaaattgccgaagcttatccagaagatgaaggaacttacacgtttgttgctaataatgctgtaggccaagtatcaagcacagccaacctgagtctggaagctcctgaatcaattttgcatgagaggattgaacaagagattgagatggaaatgaaaggtattgttataatggatgtgagatttaagtagaaattctaaaggattaataggat

SEQ ID NO: 85364 - DNA, 521 bp, Homo sapiens
  misc_feature (1)...(521): n = a,t,c or g
gtgaattctcagtaaacctcttcccacactcttcacatttgaatggtttttctccagtatggagtctcttatgtctcaaaatacctgaggcccacctgaagctctttccacattccttacaattataaggtctctctcccgtgtggaccctctggtgcaagtcaagattaaacttactaatgtagcccttcccacacttctgacatttatacagttcttcttctctataggctctctgatgtgaatggccctgtgaattcatataaaatctcttcccacatccgtcgcacttgaatgttgtttctccattgtggacccgctgatgtcttgaaagacatgaggaccacctgaagcccttcccacatacattacaattatatggtttgtctcctgtatggtccatctgatgcttacaaagatcttgcntacaagtgaagctccttccacattcttcacatttgtatagtttctcttttgtgtggtccatgcaatgactattaagtgctgatctctgaccaaag

SEQ ID NO: 85365 - DNA, 1581 bp, Homo sapiens
atggaaggaggtgttcactctcaggttcatgcaggggccctagctgggaggaaacatgtgactggagctttcatcagtgtggcactgggttctgagaaggagcacttccggagacccagtggaagttgcaagacttcttatgacttagacttgaagtcaaatagagtctcacttctgctgctttccattggctgcataaggcgagccatgattctttgtgagaacagactacacaaaggccctttccgacactctttgggaagagaatctctaatgacggcaacagtggagaacctaacgttccagaaggacactttgggaaatgctgttgacaaaaacaggcgccacggctcgacagagccactcgtcctcgcctggtcatcccagttccggaggctgacctggggatgcgccctggacgccctgcaccgcagtccttgcgtcgctgctagtcagcacggcgttacccacctcatccgcagctccaggacgccgcactccacgcgctgccgcaaggaggacgcgcagcctggtcaccatggaaacggtgccgcctccgtcacggctcaagcgagaggtcaaaggtcagtcctgcaagttccgcttccggttccgagatcctgtttgttttctgaaagctttgtggtttcggtgagctctcagagccgatttctagcgtccgtgccggggacaggtgtccagaggtcggctgctgcagacatggcggcctccaccgcggccgggaagcagcggattcccaaagtggccaaggtgaaaaacaaagccccggctgaggtacagataactgctgaacaactcttaagagaggctaaagaaagagaacttgagcttcttccacctccacctcaacagaagatcacagatgaagaagaattaaatgattataaactaaggaaaaggaagacttttgaagataatataagaaaaaacaggactgtgattagtaactggataaaatacgcacaatgggaagaaagcctaaaggagattcaaagggctcgatccatatacgagcgtgctttagatgtagactaccgaaatattacactctggctgaaatacgcagaaatggaaatgaagaatcgccaagtcaaccatgctcgaaatatctgggaccgggccataacaacgctgcctcgagttaatcagttctggtacaagtacacgtacatggaggaaatgttgggaaacgttgccggtgcccggcaggtgtttgagcgctggatggagtggcagcctgaggagcaagcctggcactcctacatcaactttgagctgagatacaaagaggtggatcgggcccgcaccatttatgagcgatatatcctttggacgagatctccatgctgttttgcctgggatttccttaattcccttgcacttgtcctcgtgcaccctgatgttaagaactggatcaagtatgcccgctttgaagaaaaacatgcttattttgcccatgcacggaaagtgtatgagagagctgtggaattctttggagatgaacatatggatgagcacctttatgttgcctttgccaagtttgaagaaaatcagaaagag

SEQ ID NO: 85366 - DNA, 497 bp, Homo sapiens
  misc_feature (1)...(497): n = a,t,c or g
cgccccccccatcgcancgcctgcaggtagtaccgccntgacggccagctatgtggacgatttaattggnctcgtcaggagcttgactgtacgtgggtcagttacatgttgtttcttcagtttctagtttcttgaagtacgtggctggctccaagggatgtttaggtccagaagaaatgaaaagatttgccttaacattagttatgggagccctagaaagccccaaccccttgctgagatgtgcagctgcagagtcatgggctagattagcccaaatggtagatgatggagcttttactgctggattagctcaagttagctttgacaaattgaaatcagcaagggatgtggttaccagaacaggacactcattggccttggggtccctacataggtatttaggaggaataagttcttctcaacacctaaattcttgtattggaatcctttatactttggcgcaggacagcacttctcctgatgtgcagacctgggcn

SEQ ID NO: 85367 - DNA, 449 bp, Homo sapiens
gcaactgaacctgagatggggctgcaggatgacaccagcacttcaggaaccgcgatccgcctctgaagagcacagctgtgtggaaacaggaagtcaagaaccagtggccatttatttcaccagtgggacgacaggctctcctaagatggcccagcactctcagagcagcttcagcattgggttcaccgtctgtggaagatataaattcaagaggctgcggcactgcttgacaggaggggaggccctcaccccggaggtgctggagcagtggagggcacaaactgggctggagctacatgagagctatggacagacggaagtggacagtccagagaaaactgctgccacggtaccgtattgggccatttgaagtggagagtgtgcttgctgagcatccagcagttgtcaaatcagctgttgtcagtagtccatatccaatttgtggagag

SEQ ID NO: 85368 - DNA, 502 bp, Homo sapiens
  misc_feature (1)...(502): n = a,t,c or g
gagccnnnnnnnattgacatcgatcggctgcggattcggcacgagtttataacctggatgtctatggataccaaatatatgataaaatgggcatttatggttcagtaccttatctcctggcccacaaactgggcagaactataggtattttctggctgaatgcctcggaaacactggtggagatcaatacagagcctgcagtagagtacacactgacccagatgggcccagttgctgctaaacaaaaggtcagatctcgcactcatgtgcactggatgtcagagagtggcatcattgatgtttttctgctgacaggacctacaccttctgatgtcttcaaacagtactcacaccttacaggtatttgcacgaagaagtgccagtttcttgttctgttatatatccaatgtcccatgtgtcatcacgggaagttaatatttgttgtatactatgtagagtttataacttacccaagcattntaattagcaagcatttctgttc

SEQ ID NO: 85369 - DNA, 469 bp, Homo sapiens
tgtttggaccgcgctgcaggaattcggcacgagcggaatgttatttatatcaatgaaactcacacaagacaccgcggatggcttgcaagacgcctttcttacgttctttttattcaagagcgagatgtgcataagggcatgtttgccaccaatgtgactgaaaatgtgctgaacagcagtagagtacaagaggcaattgcagaagtggctgctgaattaaaccctgatggttctgcccagcagcaatcaaaagccgttaacaaagtgaaaaagaaagctaaaaggattcttcaagaaatggttgccactgtctcaccggcaatgatcagactgactgggtgggtgctgctaaaactgttcaacagcttcttttggaacattcaaattcacaaaggtcaacttgagatggttaaagctgcaactgagacgaatttgccgcttctgtttctaccagttcatagatcccata

SEQ ID NO: 85370 - DNA, 660 bp, Homo sapiens
aatacaggggctcatgtagtgcagggatgtggactgtgaagggttcccattggaggcagtgaaatcaatggccacagtgaagctgatctgggtccttcctttgatgtagtcaaggaaggtgcactctgactccacagcaaaggaaagcagggtgactgtgccagaattcacgtatttctttttcttcattttctttttcggggttaccacctcatagatgttgaattggctctgcccacgggccagctcccggtaactggtggtgaactccccaatgaagtcatggctgccgtcccgatcccagtcatacacctccaccttgatggtccgatcgtagtcgccgttgcagagggctctcacgggaatggagaaagtttgccagactggatttagggtgttcttcatgacctcggtcttgtggcaaatggtgaacgttccatcctcgttgcttctgtagaataccaagaaggggtcagatttcccaaagaaatctttcttgtccagcttgttggcacagaactgcatggtggcgacatccctacagttgctgagctcctcagcggacaggatgatggtgccacatttctttcctgggacaccaccgttggacacagctggcatgggtttgcccgtcctggaattcaggctgaatgcgcctat

SEQ ID NO: 85371 - DNA, 474 bp, Homo sapiens
  misc_feature (1)...(474): n = a,t,c or g
attcgtagaccaatagaacagcgttgcggaannccgntagnataataattttatatcacaatagtttttctttggaatatagaatgatataacctatctacttttttccccctctacttgttttaattgttattttattaggctattcattcaattgattggcatcatgagggcaaacagttcatgtgcagccattcagatggtagtttgactttatggaacctgaaaagcccaagtcgccctttccagaccacaattccacatggtaagatgtatgctttcaaaaggaataaacactggcaattcagtgccttgacttgaagtaagagagatggtattaatgcgtttggtagaaaaaagtaataggacatagcttctggttctaaacatcccttttataccacctacagatcccaacattggaccccaaactttccatacttcccttcttcctaccaacccacatccctgttn

SEQ ID NO: 85372 - DNA, 1203 bp, Homo sapiens
atgactggtgctggggtcttccatggctcagggaggactcagaaaattgagaaaccccatgcatgcattgaatgtgagcaaaccttccttaggaagtctcagctcatttaccatgagaacatttgtatacaagagaatcctggaagtggtcaatgtgagaaattatccagaagtgtcctgttcactaagcatctgaaaactaatacaacagacaaaatctgtatacccaatgaatatagaaaaggctctactgtgaagagtagtctcattacacatcaacaaacccatacagaagagaaatcctatatgtgcagtgagtgtggaaagggctttacaatgaagcgctatctaattgctcatcagcgaactcatagtggagagaaaccttatgtgtgcaaagaatgtggaaaaggtttcactgtgaagagcaatctcattgtacatcagcgaactcatacaggggagaaaccctatatatgcagtgaatgtggaaaaggcttcaccatgaagcgctatcttgttgtacatcagcgaactcatactggagagaaaccctatatgtgcagtgaatgtggaaaaggctttaccgtgaagagcaatctcattgtacatcagcgctcccacacaggagaaaaatcttacatatgcagcgaatgtggaaaaggcttcactgtcaaacgcactctcgttatacatcagcgaactcatacaggagagaaatcttacatatgcaatgaatgtggtaaaggcttcaccacaaagcgcactcttattatacatcagcgaactcatacaggagaaaaaccctatgaatgcaatgaatgtggtaaagccttcagccagaaaatatgcctcatacaacatgagagatgtcatacaggaaagactccctttgtatgtaccgagtgcggaaaatcctattcacacaaatatggcctcattacccatcagagaattcacacaggagagaaaccttatgagtgcaatgaatgtggaaaagccttcaccacaaagtcagtactcaatgtacatcaaagaacgcatacaggagagaggccgtatggatgcagtgattgtgagaaagccttctcccacttatcaaaccttgtcaaacataagaaaatgcacacaagagaaatgggtagaatcagtcaagttgaaaactcctgtaatggagagtcacagctccttccttataagtga

SEQ ID NO: 85373 - DNA, 470 bp, Homo sapiens
tgaggcacgagggcaccaggaccctctggagcggcctccccgccaccctggtgatgactgtgccagctaccgccatctacttcactgcctatgaccaactgaaggccttcctgtgtggtcgagccctgacctctgacctctacgcacccatggtggctggcgcgctggcccgcctgggcaccgtgactgtgatcagccccctggagcttatgcggacaaagctgcaggctcagcatgtgtcgtaccgggagctgggtgcctgtgttcgaactgcagtggctcagggtggctggcgctcactgtggctgggctggggccccactgcccttcgagatgtgcccttctcagccctgtactggttcaactatgagctggtgaagagctggctcaatgggctcaggccgaaggaccagacttctgtgggcatgagctttgtggctggtggcatctcaaggacggtggctgcagtg

SEQ ID NO: 85374 - DNA, 549 bp, Homo sapiens
  misc_feature (1)...(549): n = a,t,c or g
tttttttttattgcaatgttcactttattgtggtggtctggacccaaacccatgtgtctctctaaggtgtgaatgtctgtggtgacattggcatccactgaatcgcccagacagtcctctttgtgtgagtgtaggtcttttggttctaggtgtccagaaggtgcccttggctccagagctggaccattcaagtggatggcacgcacgtgcccacctgtgcccctgcctagtgtccccataacaagcttggccaagtgccttgacggttccctcaacttgtcaggcaggtcagctgcccctggtgaagccttacctgcggtcagtccagagccacaacaacaagagtgtgaatgaggcactcaaccacggagttggccttaggcattcctgagtatcttcacaggacacatggatacttgccacttcctgtcccgcacaggggcctcattctcatggctcctggtctgcggctgttggctcagactccgtggaggcctctgatgccgaattccaccgcntggcctaggtatgcagtcaaannnanncgct

SEQ ID NO: 85375 - DNA, 489 bp, Homo sapiens
ctgctctgacacgccctgaggccttcaatgaatatgttatcttcgcttttaccaaccgtgttcctgcctgactacctgaagggactcttcaggagtgtgccggccagccggcccagcgagcagctgctgcagcaggtgtccaagctggcttcactgcagcatcgcgccaaggaccacttctacctgccgagcgtgcgggaagtccaggagtacatcccagcccagctctaccgtacaacggcaggctcgacctggctcaacctggtcagccagcaccggcagcagacacaggcgctcagcccccaccaggcccgtgcccagtttctgggcctcctcagcgccttacctatgttcggctcctccttcttcttcatccagagctgcagcaacattgctgtgccagccccttgcatccttgccatcaaccacaatggcctcaactttctcagcacagagactcatgaattgatggtgaagttccccctgaag

SEQ ID NO: 85376 - DNA, 475 bp, Homo sapiens
  misc_feature (1)...(475): n = a,t,c or g
aaggccggggnaatgagactgagagcctagcaagngcggtggaattcgcctcctgctgactggcacacagctctatgggcgattcggctctgccatcgcacccctgggcgacctcgaccgggatggctacaatggtgagggaagagaggagccctacttgctgcagaggggttaacagccactcaaaaagcatggagttggcctgagggcagccagaaccaggatgggttttaagcatataagtatgtggcttatacacatggggtgctgagtggagagcagatgggagagttgaagactaattaggaagtgtttgccttaatccaagcaagagacaatgaccacctggatgtggattttggcagtggagttatagatgggagtgacttcacagatatttaggactcggattattatgacttggtgggagactggatgtggggccaggggagaggatggagttgggtgcctgtgt

SEQ ID NO: 85377 - DNA, 476 bp, Homo sapiens
  misc_feature (1)...(476): n = a,t,c or g
aggcaggggnattggaactgagacactagcacangcggtggaattccagaagttgcttattttgcgctgtttccgtgtggatcgggtctatcgggccgtgactgactatgtgactgtaacaatgggagagaagtatgtgcagcccccaatgatcagctttgaagctatttttgagcagagcactccacattcgcccattgtgtttatcctgagtcctggctccgaccctgccactgatcttatgaaattagcagagcgaagtggttttggaggaaatcgcctcaaattccttgcaatgggtcaaggtcaagaaaaggtggccctgcagctgctggagacggcggtggctcgggggcagtggctgatgctgcagaactgccacctcctggtcaagtggctgaaagatctggagaagtccctggagaggatcaccaagccccacccagacttccgcctgtggctcaccacggacccca

SEQ ID NO: 85378 - DNA, 486 bp, Homo sapiens
  misc_feature (1)...(486): n = a,t,c or g
ttagtgggagggannnggggcctcgatgaccttagacagcgtcgnggaattcgtgcaaagttctgaatgtgtgtgtatgtgtttagcttcacaaatgaagcgacatagttgtttccctagaatgtagatttatctaatattacctcttacctcttttgctgagtaggttcgatcactctccatgtgatccaacaattacactacatggacctttcttcagctcctttgcttgtgtagtatgttataaaaaatttgttactcaacaacaatatagagatcacctttttgataaggtaagagcatgtcctaaattaaaagtattatttttctagatagccatggagttaagtggaggttttttcctgctgttcttaagcttgcaattaccagtgatacacataagtatcaaaactgtaattgtcaattgaaaataaaatgatttgggccatttagttattataggcaggtaaacttgataccttacag

SEQ ID NO: 85379 - DNA, 478 bp, Homo sapiens
  misc_feature (1)...(478): n = a,t,c or g
ggggttcggagcgaannnaaatcgagatcatagtccgcgtcgtggaattccttgatcgagaagcggctttggcaaaacaagccaagattgactttgaagaacaattccttaaagaaaagagatttcatgatcagattgctgtggaaagagctcaagctcgttatgaaaagcattattcagtatgtgcagaaattttggatcaaatagttgatttgtccactaaagtggcagactatcgaatgttgacaaataatctgattccgtataagttgatgcatgattggaaggaactattttttaatgcaaaacccatatatgaacaagcctctgttaagacactacctgctaacccctcaagagaacaacttacagaactggagaaaagggacttgctagataccaatgattatgaagaatataaggtacctactgatatgaaataattagaatgctacataataaatcctttttctttaac

SEQ ID NO: 85380 - DNA, 500 bp, Homo sapiens
  misc_feature (1)...(500): n = a,t,c or g
tgggggtgccnncaattgaagnccatggagagtcctctgcagngngccggaattcttctgccacgaactgtcctaggaagcctgcagacttgtcctgacccctaggcttgtggcttatccaaagacacccccctagttcattgggcattcgcgtagactcatacacattgtgggaagcaccttccctgccacgaagagagctatgccggctcccgaggtgctcccttgctaacatgtgtgacattggccccagaggtccaggctgagaggaaggatgatagtcatccagtccacggggacaactgcatactgaatgccgagaccctcgtgtgtgtcaaagagcccccagcctacaccttccgcgactactggtgagtgcggggcaggtgcacggtgaggaggtctgtggcctcctcagaggccccacagtgccctgcactataccaccccaccctatcacacacacactgggtggggctagctgttgccacagtccattg

SEQ ID NO: 85381 - DNA, 500 bp, Homo sapiens
  misc_feature (1)...(500): n = a,t,c or g
gtggcntcnnattcgagccctgatgaccttaggccagngcggnggaattccggcgcctcgggaatgagtctgttccatgttctgtgttgggagctggcgctgggggatcacaaccctcaaagtccccagcaccaaggcaaagtgcctggggctcagagaggggaagcccacctgacgggaagctgagggcagggcctgggtcatctccccactggctgcaccctcaggagggcgggatccatcaccctcatccccatgcaggggaaaggcccaggggaccaggtcagaatgacacagagcccttgagctgatgcctcccctgacccctcactgagggccatgctagaaggggggatccctacaaaaggggaaatcctgaggctctggaccgggcctccagtaggggctgtcacccctggctctgaccttgctcccggagcccacctcccctgggtcgcctcctggtcatgggagcctccctggggaagagccactcctag

SEQ ID NO: 85382 - DNA, 393 bp, Homo sapiens
  misc_feature (1)...(393): n = a,t,c or g
actcatataagagaaaaaaattagaaaatgagcgcattcataaatatgaataatagactttgctgtacctggctaataagagacagtccatttcttcgccacatctcagcaacaacctgggcaaccaacaccagacaacgtaaaggatattccactagtacctctacttgaaagtcctcctgaaatagagtgagttcaattttatcatttctcacagagcttagatgtgtctccaagttatgccactacatattcttcagttttctcacgtgtaccatggaagagcttgaactagatgacgtctaagtccctgtgactcagattacaatgtactatatgaagatgtcaaattactaaatgggnaatgccnccgcntgggctatgaacgtcaat

SEQ ID NO: 85383 - DNA, 415 bp, Homo sapiens
gacatatgatttgtgctggtacagaaaaagttgatgatgatgctttgttggtgttttgggatgcaaggatgaattctgagagtttatctacaactaaagactcacttggtgcatattcagagacacatagtgatgatgtcactcaagtacgtttccatcccagcaatcccaacatggtagtctcaggttcatctgatggcctggtaaatgtatttgatattaatattgataatgaggaggatgcactggttacaacctgtaactcaatttcatcagtaagctgtattggttggtctgggaaaggttataaacagatttactgcatgacacatgatgaaggattttattggtgggatcttaatcatctggacactgatgaaccagttacacgtttgaacatccaggatgtcagagg

SEQ ID NO: 85384 - DNA, 495 bp, Homo sapiens
  misc_feature (1)...(495): n = a,t,c or g
gtgggataacacnatttggaaccccntggnagnngtttgagaaccactagtccagngcggaggaattctcgcttttatttgaaggaggtgggaatgaacacaaagatgattagaaagaatgttcctgagaaagatcaaatcacatatccagcctcaatcacgctaagaaacaaagtgcttggagtgcctctatttgggagcatctgcaggcatggtacagccaccccagtgtgtgccaagggagaagcttccctctgcttttccaaggttgctctgctgtccctgggggaagacaagccaatcatacaacagccctggacatatagggcttttgaacagtcatgttttccactcaggccagaacaacagttttccatccacagttatactcaccagaaacaccacaggaggcccgccgatcaaagccatggctgtagagagcttgcgtttgttgcctccactatagttaccagcatatttttctccatacttcan

SEQ ID NO: 85385 - DNA, 2254 bp, Homo sapiens
atggcacttaagaacattaactaccttctcatcttctacctcagtttctcactgcttatctacataaaaaattccttttgcaataaaaacaacaccaggtgcctctcaaattcttgccaaaacaattctacatgcaaagatttttcaaaagacaatgattgttcttgttcagacacagccaataatttggacaaagactgtgacaacatgaaagacccttgcttctccaatccctgtcaaggaagtgccacttgtgtgaacaccccaggagaaaggagctttctgtgcaaatgtcctcctgggtacagtgggacaatctgtgaaactaccattggttcctgtggcaagaactcctgccaacatggaggtatttgccatcaggaccctatttatcctgtctgcatctgccctgctggatatgctggaagattctgtgagatagatcacgatgagtgtgcttccagcccttgccaaaatggggccgtgtgccaggatggaattgatggttactcctgcttctgtgtcccaggatatcaaggcagacactgcgacttggaagtggatgaatgtgcttcagatccctgcaagaacgaggctacatgcctcaatgaaataggaagatatacttgtatctgtccccacaattattctggtgtaaactgtgaattggaaattgacgaatgttggtcccagccttgtttaaatggtgcaacttgtcaggatgctctgggggcctatttctgcgactgtgcccctggattcctgggggatcactgtgaactcaacactgatgagtgtgccagtcaaccttgtctccatggagggctgtgtgtggatggagaaaacagatatagctgtaactgcacgggtagtggattcacagggacacactgtgagaccttgatgcctctttgttggtcaaaaccttgtcacaataatgctacatgtgaggacagtgttgacaattacacttgtcactgctggcctggatacacaggtgcccagtgtgagatcgacctcaatgaatgcaatagtaacccctgccagtccaatggggaatgtgtggagctgtcctcagagaaacaatatggacgcatcactggactgccttcttctttcagctaccatgaagcctcaggttatgtctgtatctgtcagcctggattcacaggaatccactgcgaagaagacgtcaatgaatgttcttcaaacccttgccaaaatggtggtacttgtgagaacttgcctgggaattatacttgccattgcccatttgataacctttctagaactttttatggaggaagggactgttctgatattctcctgggctgtacccatcagcaatgtctaaataatggaacatgcatccctcacttccaagatggccagcatggattcagctgcctgtgtccatctggctacaccgggtccctgtgtgaaatcgcaaccacactttcatttgagggcgatggcttcctgtgggtcaaaagtggctcagtgacaaccaagggctcagtttgtaacatagccctcaggtttcagactgttcagccaatggctcttctacttttccgaagcaacagggatgtgtttgtgaagctggagctgctaagtggctacattcacttatcaattcaggtcaataatcagtcaaaggtgcttctgttcatttcccacaacaccagcgatggagagtggcatttcgtggaggtaatatttgcagaggctgtgacccttaccttaatcgacgactcctgtaaggagaaatgcatcgcgaaagctcctactccacttgaaagtgatcaatcaatatgtgcttttcagaactcctttttgggtggtttaccagtgggaatgaccagcaatggtgttgctctgcttaacttctataatatgccatccacaccttcgtttgtaggctgtctccaagacattaaaattgattggaatcacattaccctggagaacatctcgtctggctcatcattaaatgtcaaggcaggctgtgtgagaaaggattggtgtgaaagccaaccttgtcaaagcagaggacgctgcatcaacttgtggctgagttaccagtgtgactgccacaggccctatgaaggccccaactgtctgagaggtgagagaaagctgagtgctatggctaggagtgccatgcctcatagcagagcagaaacagcaaaaacagccagactgcttctgcctgctatgaaacataatgaccccacaagacttctgctgctgg

SEQ ID NO: 85386 - DNA, 430 bp, Homo sapiens
ctgatcgctgctgccctgctctcctcctcctctcattcctctgcctcctggattcctgaagtttaggagaaataaggtagccaagggaaccacatggaagttgtgacagctcccagcggcgcgcccctttcgtgtgtgccggtacctcggcttaggagttgcccgctgacaccttgaatgaaggaggtccccttgccagccagcctgccgggatgggccattgctgctgcaagccttataactgccttcagtgcctggacaagacgaatgaaagtgcccttgtgaaagaaaaagagctgtcaatcgaacttgcaaacatcagggatgaagttgccttccatacagcaaagtgcgagaaactacaaaaggagaaggaggagctggagaggcggttcgaggacgaggtgaaaaggctgggctggcagcaccg

SEQ ID NO: 85387 - DNA, 438 bp, Homo sapiens
ggaattcgattctgcctgcaacgtattggccatctcctgagcctgggctctccctggcagcacagacactgcctctgtctgaagcttgtcaaacaggagctttactttgttcccccagggaagccagcatttggcttcagaggggctcacaagatgctgctggcactgcaccactggtaaacgtgtgggcttcagggcagcaggccaaacactgcgtctttcaaggtcgaatgtagggtgaggtggcctagctttccaccacgagtcccccagttcacagggccttccactcagttctttgccagtttcttctttcatccacctgtacttctgactgtacttcacaggcctcttcagaaacgccagggtgcactgatagagggaattccgatgacttcatcctgatttccaaagatgatgatgggagcagtgccaggg

SEQ ID NO: 85388 - DNA, 434 bp, Homo sapiens
  misc_feature (1)...(434): n = a,t,c or g
acgccacctagcttttaaaaatgtcttgggaaaagggtgaaacagactagaagttgattgtattgtaagtgtaggaaagtaaggagaaagtttccgggtgtgaacattctaggtttgaacactgggaaggagggaaggcagccatgcattgtagtctcttaagtgaaagtttatccaatttaccaactgatattatagaccttaaaatattttgtaattgtataaagcaagttattataattgcctgttggtgtgatgtgtgtattttgtgactcataactcaatggcatttcttcctaaattttaaaaaagttgcttttaccttacattttctacaagatactaaataatttatttcattntcagaatggtgaggttctggagaattgatgaggattatccagtgcaagttgcacctttgagcaatggtcttt

SEQ ID NO: 85389 - DNA, 462 bp, Homo sapiens
  misc_feature (1)...(462): n = a,t,c or g
ggggggatctgagaccctttggnaattgtagatcattagtccagtgaggtggaattcgtgatgaaatgtgtgtgctcatttctcatccttctctccttccactctctgtgtagaattctctgtcatagttctgagcgcttggaggagaaaagaatggcatgtgcaaagcagtgtgacatggattttagttgcttggttaattgctttacattccattgggggcttaaagcttggcagtggagatatacatttccatgtatagaattctctttatttttaggaatctaaaatttcctgtaatgaactgtattaatttacttctaccctgaacattctctttttccctagcatgtttcgccaagggatgcatgacttgaaagtctggcctaatgtagaagcagatggatcagaacccacaaaaactcctggcagaacaagtagcactctctcagaagatcagat

SEQ ID NO: 85390 - DNA, 444 bp, Homo sapiens
  misc_feature (1)...(444): n = a,t,c or g
ngggccgggggnnnnnnattgtatacattacaccgtgcggtggaattccgagtgtggaaaagctttcagtaagaattcatctctaactcaacatcggagaattcacactggagagaaaccttatgagtgtatggtgtgtggaaaacatttcactggacgatcatcccttaccgtgcatcaggtcattcacactggagagaaaccttatgagtgcaatgaatgtggaaaggcattcagccagagtgcttaccttattgaacatcaaagaattcatactggtgagaaaccctatgaatgtgatcagtgtggaaaagccttcattaagaattcatcccttacagtgcatcagagaactcatacaggagagaaaccctatcagtgtaatgaatgcggaaaagccttcagccggagtacaaaccttacacgacatcaaagaactcatac

SEQ ID NO: 85391 - DNA, 398 bp, Homo sapiens
ctttaagaaattagggaacaattttctccagtttttccctaaagcccatggaaaaatttcgtacttggtttcttcttcatcttcttcaactgtattagccagatacctaacaaagaagatcacaacccaaaaaagaaatgggtaaaggacagaaacaggtagttcacatacaccaagacataaaagtggtttataaacacatgaaaggtgttcaacgttaattaaagaaatgcagttcaaaaatagagatacatgtagttaattttaccttgttgggttctaggtatttcttattcctacaaatcttgagctttgttctgggatgcagttagttactttgaaatagtctgattctttcagatgttgcttttatgatttttttaggtggatctggaacc

SEQ ID NO: 85392 - DNA, 426 bp, Homo sapiens
  misc_feature (1)...(426): n = a,t,c or g
catcgcattcgtagacactagtccagngcggtggaattctcagttttactgttaacatttctgacattggaaaaatacatctgcattgtctatccttttagatgtgtgagacctggaaaatgcagaacaattacagttctgattctcatttggattactggttttatagtggctttcattccattgagcaataaggaatttttcaaaaactactatggcaccaatggagtatgcttccctcttcattcagaagatacagaaagtattggagcccagatttattcagtggcaatttttcttggtattaatttggccgcatttatcatcatagttttttcctatggaagcatgttttatagtgttcatcaaagtgccataacagcaactgaaatacggaatcaagttaaaaaagagatgatccttgcn

SEQ ID NO: 85393 - DNA, 487 bp, Homo sapiens
gagtttcagtcggaagtcatcccttcaataccatcatacacttcacactggagagaaaccttacacatgtaatgaatgtggcaaggtttttagtcgaagagaaaaccttgcacgtcatcatagacttcatgctggagagaaaccttacaaatgtgaagaatgtgacaaagttttcagtcgcagatcacaccttgaaagacataggagaattcatactggggaaaaaccatacaaatgtaaggtttgtgacaaggctttccggagtgattcatgccttgcaaaccatacgagagttcatactggagagaaaccttacaagtgtaataaatgtgcgaaggtttttaatcaaaaaggaatccttgcacaacatcagagagttcatactggagagaaaccttacaagtgtaatgaatgtggcaaggtttttaatcaaaaagcaagccttgcaaaacatcagagagttcatactgcagagaaaccttacaag

SEQ ID NO: 85394 - DNA, 446 bp, Homo sapiens
gaggtcgcaaattccggattgctatgctatgccttgtatgactaagacctcttactatgaatacgtgtcataccataaaaccactgccaaggagtgcgggggtggcaatgaaacagcccaacaggaaaaggaagcttaatatggattccaaagagcgtttggatcaggacggacgcttggagcatgctgaagaggaaaagaagcccaaggatagcacaacccctttgagtcacgtcccttcagcggctgcacagggagcatggtcttgggagtggtacttgaaagaacagaatgctgtagcagcacctgttgagctgttttccaaggatcagtcctttccagagcatgacaatgtgtttcagattggaatgagattagaaagcattgatccccgacatccatcggtattctgtgtgctttctggaacggaggtatgtggctaccgg

SEQ ID NO: 85395 - DNA, 634 bp, Homo sapiens
gaatcaaccgctttgatgttcagtcctccttgaaatacgaagatctggctccctgcataactttgaagaactgggtccaaacactgcggtatcattcaatgttttaggaactacagatattgaatatagattggggggatctcttacactcttaaaaaagggcctttttttttaatccacctgcatgctagaggcgagaattttatccttgccagcagatctctgcaaggcagccccagtatcagcttctagcttgactgtcccacctgaccagcaaagtcaaggatggtggatagccgatcccagtcatgactagttaggatcagcggacattaacctttttatttcttgctgtaaaatagcaagttaacattctctctgatattattttgtgaatcctaatgcagtcatttttagaaactgcaataccattagaaactgtttattaaatggtagaaacttaagtactgtagcctgctgtttgtgcctcagcagctccccttacaaaagcagggcaccttgacctgtgttcacatactcactgtgttataaagatacctggtttcttttgtttaatctgaccttaactcatcggcatgaagcctagtcttaagtgtattaaaaataaaaaaaa

SEQ ID NO: 85396 - DNA, 656 bp, Homo sapiens
tcaactctgcattttactgaaaagaaaaatggaagttttgataagccatcagtgaatctcttgtaacatctatcataactggagtaaacctcttcacatgcaactgttacataagattacttacccgtgtccgatcttcaatgttgtatatttttaactgcatagggatgttgaagctatgcaaaaaattgcccccaaacactaatgtgtctgtaggagtatacacagcatgaatccagcctgagggaatgacgaaggtatagccctgcttgagctcaatgcgctgacaatctgatacccggtcacccagaaagatgtctccctgtttccctgacagcagccaattctcgtacagctccaggttgtgggctgtaggggggatgagccagaagacctttcccccttgatggatgtgataccaaacagaggtaccaccaaagtccacatggaagtcagtatagcagcctcgaacactcattagacagtacttctgcactttagggtactgcatctccaagatggcatttgttgattcagtctggctttccttcaagtgccttggccacatgttgtctacccagtcaatgaaatccaccgtggagggcctctgcaccatattctccagcctggtgtggctaaactcgaggctgatgaca

SEQ ID NO: 85397 - DNA, 369 bp, Homo sapiens
gtcaccggttcggggaagtagtccttgaccaggcagcccagggccgctgtgcccccagaggtgctcctggagcagggcgccagggggaagaccgatgggcccttggtggaagctgaggagacggtgaccaatttcccctggccccagacatcaaaaacatcttggcgccgataaccaatactgtcataataagacgacatcacctctctcgcacagtaataaatggccgtgtccgctccggtcacagaggtcagtctcagggagaagtggttcttggacgtgtcgaccgacatggtgactcgactcttcagggaggggttgtagttggtgctcccactgtaacgtacataccctatccactccagtccc

SEQ ID NO: 85398 - DNA, 386 bp, Homo sapiens
attgaatatttgttaatattttatatatcaatgagtgatatttttaccttattttgtatctaaattaagttttatttggatgcatttttagcttactaactgtgcttgctctatgaaagcaatattgtctaccactttttattcaggtagtctacgtaagaataataagatattcactcaatcatacttataaaaaaaccattgggaaaaacagttcgtgaacaccatgcttttaacatgaaattctaatcatacacgtttgtggttttttgggcaggtatattttggaacttcacatccaagatactatatctctgccaatgtaactggtttcaaatgtgtgacaggaatgtcttgtttaatgagaaaagatgtgttggatcaag

SEQ ID NO: 85399 - DNA, 272 bp, Homo sapiens
ctttgaaacaggcctccgttgtgatccaacagcaataccaagcaaatagagctgcaaaactgcagaggcagcattatctcagacaaagacactctgctgtgatccttcaggctgcattcaggggtatgaaaactagaagacatttgaagagtatgcattcctctgcaacccttattcagagtaggtttagatcattactggtgaggagaagattcatttccctcaaaaaagctactatttttgttcagaggaaatatcggtcgaccgcgccg

SEQ ID NO: 85400 - DNA, 348 bp, Homo sapiens
aagaagttcaacaaggctctgccgtccacattctggttttgcttggtttatcttgagaaaagcatgaaatcttggtttctgtttttcacatttaataattgtttccttgctcatttcaaagaagtttacaaagggagggtaggtttttaccaaatcttttgaatatttcagaaaaatgtcaccaatgcttttgctctcatcccaattaactataaggtcttcaagatcatcctttatcttagtgtgtacatcaaagatatctgggatgctaccaaaaatagtcttaatctcctctggtgcaaggataggtccaccacgttgtccttcctcttccaatggtacttgaaa

SEQ ID NO: 85401 - DNA, 534 bp, Homo sapiens
  misc_feature (1)...(534): n = a,t,c or g
ccagactcctgacatgcaacgaggtctagattatttcaaaccatggttaagttctgatactaaacagccctttattctggtaggaccagaaggatgtggcaaagggatgctgctcaggtacgcattttcacaactccggtccactcaaattgctacagttcattgtagtgcacaaaccacttctcgacatctcctgcagaaactgagccagacttgcatggtaatcagtactaatactggtcgtgtatacagaccaaaagactgtgaaagacttgttctgtacttaaaagatatcaacctacctaaacttgataaatgggggaccagtactttggtagcattcctacaacaggtattgacgtatcaaggattttatgatgaaaatttggaatgggttggtctagaaaatattcaaattgtggcttctatgtcagctggaggaagactgggaagacataaacttactaccagatttacttccatcgttcgtctttgttctatagattacccagaaagagagcagttacanacgat

SEQ ID NO: 85402 - DNA, 119 bp, Homo sapiens; identical to SEQ ID NO: 85074

SEQ ID NO: 85403 - DNA, 34 bp, Homo sapiens
ttttttttttttaagagatggggtattggttaaa

SEQ ID NO: 85404 - DNA, 486 bp, Homo sapiens
  misc_feature (1)...(486): n = a,t,c or g
agagcgtgccngnnnaactgataaactgagaccctacgacagngcggnggaattctgttggtttaagtacataatttcactccatttgtgccaggaaaatgcccaaacaccttcattagaaataaagcaaatctgttcaacagtactccgaacagcaggcactgtatgctttattgaacagaaaagctttaacaagccttatcgtgtacacatgttcattgtgcctgtgtctgcttatgttctcaaacttcctgaaaatgtgggtacaacaacaaagcagtgtttagctaccctacttaacttggccaggtggttgattatatggtttggcatattttttgcaggtggtatacaaaatcatatgtacgagctgttcagcccactgaaacagttttttgtaacattttttttgctaaatgacacagccccagccacacataacaacataaaatgatgccagagtgatatcttctctggattcattta

SEQ ID NO: 85405 - DNA, 480 bp, Homo sapiens
cagaagtgaaggaccttcctggagcagggccccttcgctttcagaagggccgtattgagtttgagaacgtgcacttcagctatgccgatgggcgggagactctgcaggacgtgtctttcactgtgatgcctggacagacacttgccctggtgggcccatctggggcagggaagagcacaattttgcgcctgctgtttcgcttctacgacatcagctctggctgcatccgaatagatgggcaggacatttcacaggtgacccaggcctctctccggtctcacattggagttgtgccccaagacactgtcctctttaatgacaccatcgccgacaatatccgttacggccgtgtcacagctgggaatgatgaggtggaggctgctgctcaggctgcaggcatccatgatgccattatggctttccctgaagggtacaggacacaggtgggcgagcggggactgaagctgagcggcggtgaga

SEQ ID NO: 85406 - DNA, 976 bp, Homo sapiens
ccatgaattgtgaatatctttagtatcagcctatagactggaaattgagctccaccctcccatcctccagtcagttaggtattctctaggccagtggttttcaaagctttctttaatttggtggaaagacatttttttctaatcccagctgaacccccaaaatacgggagagaaaagcaagactctgctttggagtacagcctttcaaccctttccatccctaagggcacccagtgaggcccttctgcagaacctggggtcagtgggacacagtgaggcagctcctggagcagaccatgtggcctgagcccctttgggtggcagggcgggcagggcctctgctgtctggcatggctgacagaggggcgtggctcacgagctgccccttgctgccctaggggatgagtcattccaggtcggcatcctccggcaatggcagctgaccctatatggctctgtgtggagtgcagtagacatcagggacagacaaaggtgggtaaagccgcatgtgtcagagggaaggccagtcacaggggaagggccgcctagggagcccatcgccctctgaaccccagctgtgcttcccagttccagcgtcaagccggtagatggagccccgggctgggaactcacagtctgggcctctcctttttgctgtggggcttccctgtcttcacctgtaaggcaggaaaatgggtgagggcagatggtataggaaccatagtcagtggggcatcctcacctcttttcttctccacaggctgttagagagtgccatgagtggaaaatacctgcacgatgacttcgccctgccctgcccaccggggctgaaaattcctgaggaagatggttacaccatcacccccaacaccctcaaggtactagggccaagactcaagctgcgggtagatgggactgtcctgtctgggggatggagttcttagtgtgtttctcagggtgacctgccgggaattcc

SEQ ID NO: 85407 - DNA, 391 bp, Homo sapiens
gagtcactggcctcttaacctgtgactttgatataaacccaatatcacctaaatttcctcttttttcaccctgtgggagaaagattttatcttatttgccctatttaatatgaaataggccaaggaatacatctcttgtttcaaaaagaaaagatattttgatgtgagatgctaggcatttttgcgcccacatgattgtgatttatgagaatctttggcaacaaattttcctctaaaacttctaggacaaatcccattggtatgaaggggcatatggctaaatgctatggtgatttagtgcaggaactttggagtggaactcaaaagaatgttgccccattaaagcttcgggtaagcaggttaaaataatataaaagtatttaattcctaa

SEQ ID NO: 85408 - DNA, 408 bp, Homo sapiens
aaggaggtagccttgacaggccagcttggattcagattgcatgttgtcctgtctccagcagtatgaccttaagcaaaacacgttgcctctctgagtcagggttctctcatgtaccagagaggctaataattcctgtaaaatttctagcacagttcctagcaaatagatattttcagtaaatggagatgatgaaggcggcagtggtggtggtggtggagatgatgatgatgatgatggggatggggatgatgtatcaataccggctagtattccaatttttatgtataaagtctgcagaaatccaagaattatttcaaattatgtactttcaacacatttctatcacactttttatttttctggcttggtagaggccaagagttctgcctgcaccatccttttatgaaa

SEQ ID NO: 85409 - DNA, 391 bp, Homo sapiens
atggagaaaacaatgaagatgaaatttccaggaaataacccaatcaggtgttgcttaatggagtctactgtcattaaaatccaatttgattcatttggagagtgaaatatcacaattgcaactgcaccataatggctttttggaagatggaatttgtataaactgggttaatcccttgatcaccaattcaaataaaaatagataaaacatgaggaggttggcaggggtgaaggactgggaatagcaacggtgttgccagaaggtgtctttcctgccaaggggaattggcatagggaaccgtctctgagcccaagttctggaagccacaacctgatggagacagaagacagattgcctaggtccagctggggagtggagccctgctggccca

SEQ ID NO: 85410 - DNA, 396 bp, Homo sapiens
aagaaacctcatttgttttaaaaatgcatcatttttctgatattaccccatgttagaagagcagatgccatggaagtacaagactatgaaaaagtagcaataatttattaacaaaatattgaaaggaatattttcccctttaatttgatagataattcctgagaacttcagtgttttcagtttgatccgggaaatgcggacacagaggccttcattagttcaaacgcaggtatgaactatagtgaatggatcagaacatgtgtctgagtcttgctccatctgtttaatggggaggcatccaaaaacagctgactgctcagatataacaccaatttaccattacgtgctctagagtccattgccattttctctaactctgaatatcccaatattttt

SEQ ID NO: 85411 - DNA, 388 bp, Homo sapiens
gaatttgtacaaggaggtgatgttggagaattatagcaacttggtgtcacttggactttctgtttctaagccagccgtaatctcctcattggagcaagggaaggagccctggatggttgtgagggaagagacaggaagatggtgcccagacttggcatccagagatgagccccagaagttatctccaaaaagggatatttatgaaacagaattatcccagtgggttaacatggaagaatttaaaagccatagtcctgagagatcaattttcagcgctatctgggaaggcaactgtcattttgagcaacatcagggacaagaggagggttattttagacaacttatgattaaccatgaaaacatgcccatttttagccaacatacttta

SEQ ID NO: 85412 - DNA, 1086 bp, Homo sapiens; identical to SEQ ID NO: 66528

SEQ ID NO: 85413 - DNA, 393 bp, Homo sapiens
attcacagtctacaaaagttgaggaagactttaatcttactaccaaggagggagcaacaaagacagtaactggacaacaggaacgtgatattggcattattgaacgagctccacaagatcaaacaaataagatgcccacatcagaattaggaagaaaagaagatacaaaatcaacttcagattctgagattatctctgtgagtgatacacagaattatgagtgtttacctgaggctacatatcaaaaagaaataaagacaacaaatggcaaacgagaagagtctcctgaaaagccttctcactttgagcctgccactgaaatgcaaaactctgttccaaataaaggcttagaatggaagaataaacaaacattgagagcagattcaactaccc

SEQ ID NO: 85414 - DNA, 421 bp, Homo sapiens
  misc_feature (1)...(421): n = a,t,c or g
ctttcaacaaacaagtgaccatatgatctttcctccccaagtcctcactgcccctttgatagttccactttggatcttgatctggaactgctatacctcctgcctgatatatataatggtttgggttgtgagccaatacctcgtctgcatgggtcctagctgtccccaaaatgtgttgtttctcttccactaaacaacacagagacaaaaagacatgcagatcctgccaagttaaactataggttggagttaatttctccaactcatctatgaattgtcctggatcttcagagaaaagaccaaacttctctttgcatagagccaaatcagacatagaaaagggaacatgtgctctcacagtgccttcttccccatttgccacctctctaagtggataaagggttcccactggaggttgatn

SEQ ID NO: 85415 - DNA, 400 bp, Homo sapiens
agaatactttccaaactccatatggaggtcacttttctccacaatggatctcggggatattggattttatacatacagaatattacaagctctttcatatacgcattcaaagggaattatgcatagagatgtcaaaccattaaacattctttgcaattcgcctagaaacaaagttatccttgctgactggggcctggccgaattttatcacccaatgagaaagtattctgtccacgtcgcgacaagatattacaaatctcccgaaattcttcttgattacgaatattacgattactcgctcgatatatgggctgttggggttatactcctcgagcttttaactctcaaactccacgttttcgaaggcggagacaacgagcaataaattgactccattggg

SEQ ID NO: 85416 - DNA, 498 bp, Homo sapiens
  misc_feature (1)...(498): n = a,t,c or g
agatggggccnnnnnnaacggatnacctgaccacgctgcaccggnccggaantaccgggtcgacgatttcgtgccgccggctggagatgtgctgtttcagttggactttcgagttgaccttgacattgcagatctcacagtggaaagttcggtcctgggcaggagcctctggttcccccggggtgggaggccccagccgagggtaagctttgatgggcccgagcccacttcgggcctccagaattgtcttgtgcttagtacctggagcccaaagagggcaggaggtaaggggtggaagaaaaattatccaggcctactgggcctcagaatgcacattcccagttacaatatgagggggaagagggtgggcacagtgtgggttctttctaagctccttgggaccctcccaaagaggtggatcacgagagagtcatatgtaaaggagtaagatggagggaggagctgaggaagtaaagggctaaggaacaggggagatgg

SEQ ID NO: 85417 - DNA, 764 bp, Homo sapiens
tcccgggtcgaggatttcgtgctgcacttgctccgggcgctggcgcaagatgatgttgttccatattttaaaacggagccaggcctaccacagatccacctggaagggaaccgccttgttctcacctgccttgccgaagggagctggcctttggagttcaagtggatgcgcgatgacagtgagctcaccacctacagcagcgaatataagtacattattccatctttgcagaagctcgatgctgggttttaccgctgcgtggtgcgaaacagaatgggagcactcctgcaaagaaaatcagaagttcaagtcgcatatatgggaagtttcatggatacggaccagaggaaaacagtttctcaaggacgtgcagcgattctaaacctgctgcccatcaccagctaccccagacctcaagtgacttggtttagagaagggcacaagattattccaagcaacagaatagccatcacattggagaatcagctggtgatcctcgccaccacaaccagtgatgccggggcatactacgtgcaggccgtgaatgagaaaaatggagaaaacaagacaagcccattcattcatttgagcatagcaagcttttgtggaaacaccacacaagattgaggaaaatttgtaaaaactttctggccagcgtttctgaaaaatcaaaagatattacagccaattatcatttaatgaagatacatttttgcttgctgtcgggagaataaagcagggaacctttatgtagtgaaaaaaaa

SEQ ID NO: 85418 - DNA, 401 bp, Homo sapiens
  misc_feature (1)...(401): n = a,t,c or g
tttcgtctgactctggctcacctgtggtgacacatgctcttcctgtgactgcctttgtccctgcacaggctgggacctgcccagcaaccctgaggccattgtgctggacatcgactacaagtctgggaccccgatgcagaggtgggcgcctcaccctacccatcccccacttccacgcatgcgcgtgcgaagtttttctcggctgcatcatgggtgccacattctttttgttgttttcagtgctgcaaaagccccatatctggccaagttcaacgtgaaccgaggtggagttagtgaacttgaccaagaaggtcggtacctaaccctgactttgtttgggagctcagtgcttttccttgctaacgccaggttcttatggcatgtgttaaatttattacaan

SEQ ID NO: 85419 - DNA, 435 bp, Homo sapiens
tttcgtcccccatgtcctgtaagcagagccttgtagtctgtccgcttggttactgactcgggctgtctgaccagcccctcttctgtgccttgtctgaggtccttgtccatctctgtgattgggcagcttctctctctggattgggtcacgtgaagcgggaaactgcagccagaccccggcctgcagcccccacaacacgcacccctgcaggcagcaggagagccaggccccaaatgtggcgtgtgtggtcacgacctggcgcacctgtccagtccgcatgagcaccagtgtctggcgggccatgaccgctcattccagtgcacacagtgtctcaagatcttccaccaggccactgacctgctggagcaccagtgcgtgcaggctgagcaaaagcccttcgtctgtggggtctgcaagatgggcttctcactactc

SEQ ID NO: 85420 - DNA, 409 bp, Homo sapiens
  misc_feature (1)...(409): n = a,t,c or g
tnnnnnccagccctgagccctgagacgctcgctttctggttggcaatggaaagtcttagcaggagttccacgttcagcttttctttggagaattctgatggtgaaggaaaggagtgggtaagatgccaacgtcagaaggaagaccaggacaagaaaggagtgactgggtgacatcctataaggtcatggggagcaatgacagccacacgtgggtcactgttaagaatggatctggagacatgatatttgagggaaacagtgagaaggagatccctgttctcaatgagctacccgtccccatgggggcccgctacatccgcataaaccctcagtcctggtttgataatgggagcatctgcatgagaatggagatcctgggctgcccactgccagatcctaataattatta

SEQ ID NO: 85421 - DNA, 404 bp, Homo sapiens
  misc_feature (1)...(404): n = a,t,c or g
tttcgtagttgttgacaagaagagtgctctggtcagagcttggctttaggaccatcagtcaagcagccatggaggatgcttgggaggcagagcctcccatcaggaaaccccaggagtcttgtgtagagatccaggagaggtgaccacctggcgtgaggccgtggggctgaggtggagggaggtgggactgaagggtttggggagggaagggccagaggtggacagtggggaccctgtggttgccaggccgcaaggcggggtggggcgggctgtgatgagttcacggttggccctggcaaggctgacacacacggtgaagtgctgtgtgagggagacagagctgacggctgcctgccaggcggcccanggcaggaaggctggatcggggagccgagggagccggg

SEQ ID NO: 85422 - DNA, 391 bp, Homo sapiens
tttcgtgttccctttcataatattcttgctgttttctctttgcttcatttactttcttctccagttctagaagctggtgcttctgctcttcatccagactttgggttttgcttcgcaaaaaagctctttcctcttcaagttgagataatctctcattgactctcgatttttctgattctaaatctttaattgtaacttcctgggtcatttgagttgcttgaagcattccaatatgactagctttgaggacaagatctgaagcttgctgttgtaaacgttctctggcagctgctagctcactttccacttctttgtgcttgcttaatagggccatttctccctccttggcatcatcaagctgtttttgaagaacctgaacattgttctctgg

SEQ ID NO: 85423 - DNA, 450 bp, Homo sapiens
  misc_feature (1)...(450): n = a,t,c or g
aggagtcnaattgaagcgttttgagaccatcngacngacnnncggnnnagatttcgtctcaagtgggcaccgtggtggctctgctcaccgtgacggacgcatattctcccgcggccaacgggaacatctccgtgcaaattctcgggggcaatgagcagcgccactttgaagtgcaaagcagcaaagtgccgaacctgagcctaatcaaggtggccagcgccttggaccgcgagcgcattccttcctacaacctcacagtttccgtctctgataactacggggcgccccctggcgcagcagtcctggcgcgctcttctgtggcaagcctggtgatttttgttaatgacatcaatgaccatcctcctgtcttttcacagcaagtgtacagagtgaacctgagcgaggaggcgcctccgggaagctatgtgagtgggatatctgccactgatg

SEQ ID NO: 85424 - DNA, 675 bp, Homo sapiens
atgggggttgcctctgactggaccaagaggattgagtaccagcctggctccgggagcatgcccctgttccccagcatccacctggagacgtgcgatggagccgtgtcttccctccagatcgtcacagagctgcagactaattacattgggaagggttgtgaccgggagacctactctgagaaatcccttcaaaagttatgtggagcctcctctggcatcattgacctcttgccatcccctagcgctgccaccaactggactgcaggactgctggtggacagcagtgagatgatcttcaagtttgacggcaggcagggtgccaaaatccccgatgggattgtgcccaagaacctgaccgatcagttcaccatcaccatgtggatgaaacacggccccagccctggtgtgagagccgagaaggaaaccatcctctgctactcagacaaaaccgaaatgaaccggcatcactatgccctgtatgtgcacaactgccgcctcgtctttctcttgcggaaggacttcgaccaggctgacacctttcgccccgcggagttccactggaagctggatcagcaggctctggccaaggtggatggacagccaggtaaatctattaccaggcagctccaggagatgcctgtgacaatccagggcatctcactaaagccatcataa

SEQ ID NO: 85425 - DNA, 590 bp, Homo sapiens
ggcttcctgtcccacaactttctcacggtggcgcctggacacagcagccaccacagtccaggcctgcagggccagggtgtgaccctgcccgggcagccacccctccctgagaagaagcgggcctcggagggggatcgttctttgggctcagtctctccctcctccagtggcttctccagcccgcacagcgggagcaccatcagtatccccttcccaaatgtccttcccgacttttccaaggcttcagaagcggcctcacctctgccagatagtccaggtgataaacttgtgatcgtgaaatttgttcaagacacttccaagttctggtacaaggcggatatttcaagagaacaagccatcgccatgttgaaggacaaggagccgggctcattcattgttcgagacagccattccttccgagtggcctatggcctggccatgaaggtggccacgcccccaccttcagtcctgcagctgaacaagaaaggtaaggttactgctccctattgatctgttcagctcatccacagagaaactctgttggtttatttttaggctaataaaataaaagatgactttaacaatactca

SEQ ID NO: 85426 - DNA, 426 bp, Homo sapiens
tttcgtcggacggtggcggagagcccggccgtgaccccctccccgcagtgctgcagttcggcttcgtcaccatcttcgtggccgcctgtccgctcgcgccgctcttcgccctgctcaacaactgggtggagatccgcttggacgcgcgcaagttcgtctgcgagtaccggcgcccgggggccgagcgcgcccaggacatcggcatctggttccacatcctggcgggcctcacgcacctggcggtcatcagcaacgccttcctcctggccttctcgaccgacttcctgccgcgcgcctactaccggaggacccgcgcccacgacctgcgcggctttctcaacttcacgctggcgcgagccccgttctacttcggcgccgcgcacaaacggacgtgcaggtatcgggctttcctggatgacgatggac

SEQ ID NO: 85427 - DNA, 419 bp, Homo sapiens
atgaacaacccgttcttgcctcatgccagtcgcctccaggccaagagggatccttcacccgtgtctggtgagtgaggagcgctgttggccggcgcgggggtggccgtggggagcatcaacagtggaggatggatgagtgaccctgagagttacggcccggagtctaaagcattggtttgtcagccttctaaaattaatgtggaagtacgagagaatataccagaacgttcttgtagcgaattaaattatctccagacttattccttcctttcctttccgagaggtaactgctgttaatagtctggtgactttgcagacgcgtttctgtgcttttacgtgcgtgtctatgcaactggaaaacgtatagttgttgtaatctaatcgcttttttaaaaaatcatgctgagcgagtatttggg

SEQ ID NO: 85428 - DNA, 385 bp, Homo sapiens
aaaacggaagggtgaggtctgctaaaatcgagaaaaagagaaattccagggaggggccctatagcccactctgaggaatcaagatgcccacagagtgtattttcagtggccttggttccagacaggatgtcagggtaaccctggcaggcaaggtgcccgccagcctcttgccgcccgcacagatgcggcgtaagctccaggaccaccctctgtcccccgcccccagccctgccatcaccctgcgactcggacccctgcttcaacggaggctcctgcgatgcccatgacgactcctacacctgcgagtgcccgcgcgggttccacggcaagcactgcgagaaaggaactgttaggacccagggaaaatgtggcaatgccaatgcag

SEQ ID NO: 85429 - DNA, 399 bp, Homo sapiens
  misc_feature (1)...(399): n = a,t,c or g
tttcgngaaacngcngttacgaggttaggatttaacttttaaattccggagccatcggaaaccgaggggaggacgacgggtgtcggtgctaatgaggctgggggcggtcgatgcgcggtgggccttctagtccggggcaggtctcgggggttccccggggaaggccctgggagcccttggccctggcggcctccgccatcatactgggaatgtctctgattgggtggccaggaggcggtggccctcctccccgcccagctgaggggtgtcgtcttccgcgaagatagggtctcacctgggaggcaaggagggagggggctgcctgaagccctgggcccctccgggactggcgcaccccgtctcacccacattccttcgcctttccctgcccagagtgga

SEQ ID NO: 85430 - DNA, 447 bp, Homo sapiens
aagccccgcctctccacaccctgtcctattctttcccccaggttgctgggagaaaaacggcaggagctgctggcccaagccaataaactgcggacaggcttgttcaagatcgacgaaactagggaaaaggtgcaagtgatgtcgttggagctggaggatgccaagaagaaggtggctgagttccagaagcagtgtgaggagtacctggtcatcattgtgcagcagaagcgggaggcagatgagcagcagaaggccgtaacagccaacagtgaaaagattgcagttgaggaaatcaagtgtcaggcactggctgacaatgcccagaaagatctagaagaggcactgcccgccctggaagaggccatgcgggccctggagtctctgaacaagaaggatataggagagatcaagtcttatggacggcccccagcccaagtggagatagtg

SEQ ID NO: 85431 - DNA, 412 bp, Homo sapiens
  misc_feature (1)...(412): n = a,t,c or g
tttcgtnnnnnnaccccacgcaggccacatgtggcaatagcctgtcatcttcatcttcatctcccaatcaggaaactgaggcaccgagaggaaggtgcccttcaaggtggcgggaacagtctcccccaggcccccaccatgcggactccccagcctcctccccttgccgtgctcccgagcctgacctcagccccgacaccgccaccctctctattgtgccgtccccatcctgcccgcctcccctttctaggaatccctggggtgcggagtcttcatcccacgctgccccgtccctgtgtccaccatgcccaccccaccttctgagccacctggttggggtgtcctctgccgaggcttgggttagttacaggggcccgcgggcaggttctccctcctccccagcctcagtttc

SEQ ID NO: 85432 - DNA, 607 bp, Homo sapiens
  misc_feature (1)...(607): n = a,t,c or g
agtcgccgcctggccaccttcaagtgcttggtccggcccaggtgctcccctaggaggtagtaccaaccactgatctccttgtctggagtcaggagagacttcaccccaaagctcatacagccaatgagtccactctgtctggactggctggccctgttccacacagtaaccaagagacgcttctgatcatcctcctcttggacaggaaagaagaagtgctcgtggaaagccgggtctctgcagtctggaacggtctgcgtcttctggtggcgtagtctactatcttcagggatcaaagaaatcttcacatacggatcacaggtgccaggctgtttgctgatcaggcctttaccttctataatgtgaagcagcagaacccggtcctgggcatcaatggacagcctcagctgaccaaaggtggtgaggtagaaggacaagtccgggtgggcacgccggctcccgagggagacgcggtgcagggagcgctccatggcgtcccactgcgacccggacaggagcgtctgcaacccacgaaatcgtcgacccgtnncttccnnnnccnnnngnncgtacnttcgggatccnnggggcgnnnccccggccagct

SEQ ID NO: 85433 - DNA, 418 bp, Homo sapiens
  misc_feature (1)...(418): n = a,t,c or g
tttcgtctcatcnngntgcttgtccatgcccatcgtctacaagaaggaggagattgtgggagtcgccacattttacaacaggaaagacgggaagccctttgacgaacaggacgaggttctcatggaggtaagcacctgggcagacgtggttccgccggggatgccctgcgaggggtggggcctgtgcggtgtgggggcctccccgccaagcattcggctgtgtgcgtgtgctcatgtgtgtgcggtatgcatgcggccagggagaggacgacaaagggcccccccgggagcaggagcctctgcagagcacccgggagaccccacacagaagcactgcgacaccatggtggcagccccaggacctgcccgccgagccacggggcctggcacacaggcacatgggagggggcgcgccggg

SEQ ID NO: 85434 - DNA, 511 bp, Homo sapiens
ccccgtccctcgctgtctcatgtatgagatttacgtggagacctgtgggcaaaacactgagaaccaagtcaacccggccacctttgggaagcttgtgagattggtttttccggaccttggcacccggaggctgggcactagaggaagtgccaggtatcattatgatggaatctgtatcaagaaaagctctttcttctatgcccagtattgctgcctgataggtgaaaaaaggtatcacagtggagatgccattgcctttgaaaaatctactaattataacagcattatccaacaagaagcaacatgtgaagatcattcaccgatgaagacagacccagttggatcccctttgtctgaattcaggagatgtccatttctggagcaagaactggcaaagaaatactcctgtaatatgatggccttccttgctgacgaatactgcaactattgtcgagacattttacgaaatgtgaggactgagaacttgagagggtagggttttatctataaa

SEQ ID NO: 85435 - DNA, 396 bp, Homo sapiens
tttcgtgggacgcctgtcagcgggctcaccaaccgggacaccctggctgtcatccgccacttccgcgagcccatccgtctcaagactgtgaaaccaggcaaagtcattaataaagatttgcggcattacctaagtcttcagtttcaaaaaggatcaattgaccacaaactgcagcaagtgatcagagataatctctacttgagaaccattccatgcactacaagggcccccagggatggagaagtaccaggagtggattataatttcatttccgttgaacagttcaaagcactggaagagagtggagcattgttagaaagtgggacatatgatggaaacttctatggaactcccaagcctccagcagaacccagcccttttcagccagatccagtg

SEQ ID NO: 85436 - DNA, 409 bp, Homo sapiens
tttcgtagaggccaccccatgtgacaacggaccctgcacgggcaaggtggagtggtttgccgggagctggagtcagtgttccatcgagtgtgggagcgggacgcaacaaagggaggtgatttgtgttagaaagaatgcagacacctttgaagtgctggacccctctgaatgttctttcctggagaaaccccccagccagcaatcctgccacctcaagccttgcggagccaaatggtttagcaccgaatggagcatgtgttccaagagctgccagggtggctttcgggtccgggaagtgcggtgtctgtctgatgacatgactctaagtaacctctgtgaccctcagttgaaaccagaagagagagaatcttgtaaccctcatgactgtgtccctgaagttgatgaagac

SEQ ID NO: 85437 - DNA, 1234 bp, Homo sapiens
atgaatttgggaaccgatttgatgtcaacaactgctccatctgctaccactgggtcacctccaggccgcaggagcctgcagtcttctcggccgattacagaggctgccacgtgctggagaaggatgggcgtttccacctgagggtgttcatggaggctgtgctgcccaatggtcgtgtggatgtggcacaagacgctactctgatctgtcccaaacctgacccctcccggactctggactcccagctggcaccacccgccatgttctctgtctcaatcccacaaaccctttccttcctccccacctctggccatacctcccaaggctctggccatgcctttcccagcccactggacccagggcacagctctgtccacccaacccctgctttaccatcccctggacctggacctaccctcgccaccctggctcaaccccactggggcaccttggaacactgggatgtgaacaaacgagattacataggtacccacctgagccaggagcagtgccaggtggcctcagggcacctcccctgcatcgtgagaagaacttcaaaagaagcctgtcagcaggctggctgctgctatgacaacaccagagaggttccctgttactatggcaacacagctactgtccagtgcttcagagatggctacttcgtcctcgtggtgtcccaagaaatggccttgacacacaggatcacactggccaacatccacctggcctatgcccccaccagctgctccccaacacagcacacggaagctttcgtggtcttctacttccctctcacccactgtggaaccacaatgcaggtggctggcgaccagctcatctatgagaactggctggtgtctggcatccacatccaaaaggggccacagggttccatcacgcgggacagcaccttccagcttcatgtgcgctgtgtcttcaacgccagtggcttcctgcccattcaggcatccattttcccacccccatcgcctgctcctatgacccagcccggccccctgcggcttgagctgcggattgccaaagacgagaccttcagctcgtactatggggaggatgactatcccatcgtgaggctgctccgagaaccagtccatgtggaggtccggcttctgcagaggacagaccccaacctggtcctgctgctgcaccagtgctggggcgctcccagtgccaaccccttccagcagccccagtggcccatcctgtcagacgg

SEQ ID NO: 85438 - DNA, 594 bp, Homo sapiens
  misc_feature (1)...(594): n = a,t,c or g
attcggcacagggccgaggactgctccggccgcaccatgcnccagctggccattgagatcggggtgcgagccctgctcttcggagtcttcgtttttacagagtttttggatccgttccagagagtcatccagccagaagagatctggctctataaaaatcctttggggcaatcagataacatacctacccgcctcatgtttgcaatttctttcctcacacccctggctgttatttgtgtggtgaaaattatccggcgaacagacaagactgaaattaaggaagccttcttagcggtgtccttggctcttgctttgaatggagtctgcacaaacactattaaattaatagtgggaagacctcgccccgatttcttttaccgctgctttccagatggagtgatgaactcggaaatgcattgcacaggtgaccccgatctggtgtccgagggccgcaaaagcttccccagcatccattcctcctttgccttttcgggccttggcttcacgacgttctacttggcgggcaagctgcactgcttcaccgagagtgggcggggaaagagctggcggctctgtgctgccatcctgcccttg

SEQ ID NO: 85439 - DNA, 411 bp, Homo sapiens
tttcgtgtgataaatagcctgtcctgcaacctggcttataacagggaatgccggagttaggcaacagagtgcctagctttgtcagtcattcaaacacaagcacggaagaagagattgcactgaccagaggaccgccagggtgtgatgctccgtagtcgcagggatgaaggaaaaccatgggcggagcttgtcatggacagctcctaggtggacataaatggaaactcattggttctggggcacggcgggaagagggagacggccctggacggccgcaccaagaatttcacaacccaaacccgactagaaagcctgggttatggccacaccgtgcccttgtcagatggaggtaaggccttctgcatcatctactccgtcattggcattcccttcaccctcctgttcctgacg

SEQ ID NO: 85440 - DNA, 500 bp, Homo sapiens
acgaattcccgggtcgacgatttcgttacaaaaccaaaccagaaagccctgggaagcggtatgcttaggaacatggaaagctcaaccgtcgggtgtggggcccgcagatctctctggttcccctctctgccccgtctccagcttttttgcagggcacaaaacagcttctgctagcaaacgtgtcctgccagacacatggagaaatagaaagttgatggccccagtgaatgggacacagacagccaagaactgcacagatcctgcgattcacgagttccccacagatctgttctccaataaggagcgacagcacggagccgtcctgctgcacatccttggtgctctgtatatgttctatgccttggccatagtgtgcgatgacttctttgttccgtctctagagaagatctgtgagagactccatctgagcgaagatgtggctggagccaccttcatggctgcaggaagctcaacgccagagctgtttgcgtctgttattg

SEQ ID NO: 85441 - DNA, 403 bp, Homo sapiens
tttcgtatagagctggagacctacaaactgaagtgcatggcactgcaggaggagaaccgcgacctgcgcaaagccagcgttaccatcgtgagtgccccccggggacgcgccgcagcgccgacctccgcccgccccgggaggggctgcacccgaatccagccaccccccaagtcttccccagattcccggggaccctctgagagcacactccctgcggggacctgctggcttccgggaggagagggaggtatcccttcggggccacgcgggtctgtcctcctcgggggtctgaggacccttgcgcggtgcgggggaaggctactgtggcaaccattcatggtcccttttagcctctggagaggaggcccctccggggctgggctggaggctggcggcgtggctg

SEQ ID NO: 85442 - DNA, 291 bp, Homo sapiens
cccagagctctcctcagggctcctctccctgaggagtgcagcgcctttgcctggtggggcctccccagctcccagcagatggctcccgcctctgctcactggtctgggcccttccctcccgcagcgggggtcacttcatgaatacggctgagcggatccggctgcctgatgactgcaccatcggctacatcgtggaggccctgctgggtgtgcccctcatccgcagcggcctcttccactcccacctggagaacctgcagcaggtgcccacctcggagctccacgagcagg

SEQ ID NO: 85443 - DNA, 412 bp, Homo sapiens
tttcgtccaagtaccaacacgaaggcttctacttcgttgagacgcccctggccctggcagcatggaccaaccagcccgagattgggcagctgctgatggagcacgagcagacggacatcacctcgcgggactcacgaggcaacaacatccttcacgccctggtgaccgtggccgaggacttcaagacacagaatgactttgtgaagcgcatgtacgacatgatcctactgcggagtggcaactgggagctggagaccactcgcaacaacgatggcctcacgccgctgcagctggccgccaagatgggcaaggcggagatcctgaagtacatcctcagtcgtgagatcaaggagaagcggctccggagcctgtccaggaagttcaccgactgggcgtacggacccgtgtcatc

SEQ ID NO: 85444 - DNA, 424 bp, Homo sapiens
  misc_feature (1)...(424): n = a,t,c or g
tttcgtcaggaacatcccagagagagctgggcccatcctcagccctacccagccccgcagcccctagccctccgcccagaaacccagccctgtcgnnngccgctcttctcctccaggccggctgctgctgcggccagcgttgccggggcatcccttcctccttcccatcatggcagngtaccgcctgtgtgtgaccactggtccctacctgagggccggcacactggacaacatctctgtcacactggtgggcacgtgtggtgaaagccccaagcagcggctagatcgaatgggcagggacttcgcccctggatcggtacagaagtacaaggtgcgttgcacagcggagctgggtgagctcttgctgctgcgtgtacacaaggagcgctacgctntcttccgcaaggactcttggtactgtagc

SEQ ID NO: 85445 - DNA, 415 bp, Homo sapiens
  misc_feature (1)...(415): n = a,t,c or g
tttcgtgcttcgccattcgtgctatgcgtggtggggacgcccacaccccaaaccctgccggctcccagcccaaccacaggaggctgcagtctccgggagcctctggggctctcccgggccaacagcaggtttggcgggtagggctccccgaagccccagccctcccggacctgccgtaaagagctgggtgccgggggtggggagcccggctgtggcctgtgggagctgcccgaggttgaggagtggaggtcactcccccgacacctgcacacacacccggagccctctagccttggcgaggtgggaaccctggcagtcaccagctcaggaagtgagccaagcagggatccccgcctcacgggcctgcacggaggacctgggcggccgtccaggaaccctctcggcacgggttctn

SEQ ID NO: 85446 - DNA, 410 bp, Homo sapiens
  misc_feature (1)...(410): n = a,t,c or g
tttcgttgctgctctcctccagtgaccccgacgggctatgccacatcgagaccgccaacctggatggagagaccaacctgaagcggcggcaggtggtccgcggcttctcggagcttgtaagtgacccacgtttccagggcctcgcaggcattacagccacacagtgtccccatgacagccttctggggctcagagcacctgcattttcctgtctgtcagaccaggctgtttttcctagtangcgagtctgagggtctgagaggacccctgacctacctgagcccatgacctgcctgtgactgtgggaagcaggattcagtttctctgactctgatttcttttgtgcatgtctaagtttcgcagaatgttatttgttcctgtaaagttacaaggaacatttatgagcagct

SEQ ID NO: 85447 - DNA, 83 bp, Homo sapiens; identical to SEQ ID NO: 85109

SEQ ID NO: 85448 - DNA, 1042 bp, Homo sapiens
cggacgcgtggggtcatggagctggcactgcggcgctctcccgtcccgcggtggttgctgctgctgccgctgctgctgggcctgaacgcaggagctgtcattgactggcccacagaggagggcaaggaagtatgggattatgtgacggtccgcaaggatgcctacatgttctggtggctctattatgccaccaactcctgcaagaacttctcagaactgcccctggtcatgtggcttcagggcggtccaggcggttctagcactggatttggaaactttgaggaaattgggccccttgacagtgatctcaaaccacggaaaaccacctggctccaggctgccagtctcctatttgtggataatcccgtgggcactgggttcagttatgtgaatggtagtggtgcctatgccaaggacctggctatggtggcttcagacatgatggttctcctgaagaccttcttcagttgccacaaagaattccagacagttccattctacattttctcagagtcctatggaggaaaaatggcagctggcattggtctagagctttataaggccattcagcgagggaccatcaagtgcaactttgcgggggttgccttgggtgattcctggatctcccctgttgattcggtgctctcctggggaccttacctgtacagcatgtctcttctcgaagacaaaggtctggcagaggtgtctaaggttgcagagcaagtactgaatgccgtaaataaggggctctacagagaggccacagagctgtgggggaaagcagaaatgatcattgaacaggtaaaaaggggaaacactcagaggcgagcctgcttggctttttctggtgggtacagggcccatggttggtgttgtcaaacttggagtctacactgaggctccccacatatctgcaaatgattgcatgctggataataaatctcttgggtctaagcagtgatgtagtggctccttacagagtcagaaagccacccaggcctgcaagacttgcttgtccttcactaaatgtaaaaattctatt

SEQ ID NO: 85449 - DNA, 403 bp, Homo sapiens
tttcgtggccacagacctgtaccaggtgcccccagggcctggaggccctgcccaggatatttaccaggtgccaccttctgccgggatggggcatgacatctaccaggtccccccgtccatggacacacgcagctgggagggcacgaagcccccggcaaaggtaaggctgtcctggcacagttgtgcagccacacaggtatagcccaggccctggtttgtgggcacagaagggcccagccaccctcaatcaccggcattccaggagtggctgtgtgtttggtctggggtcaaagtgggaagtgagtgtttggggggtgttcatttgtccggggaagatggatgtgaatggacccagaggggagatgctccgctggcctcagccaagccgacccgagtggtggtg

SEQ ID NO: 85450 - DNA, 402 bp, Homo sapiens
tttcctgtgcgaggccggagccgcgggggcggctgcacgctgggacctgcagaagcactctttgctaattgtgatcggcgatatcggtacagagagtcagctgagggccgtgcgggcccaccttgaacaagggattctctcctggaacattgacctgtcatcctttgaggaacctcaatccaggtgaggaaagcacctgactcctaaccctcagtgtcctctcttgcctggctgactgcagcagctgccacctgggctcctttcttttacttgtagcaccaacccagcctccacatagtgaccagagtaaccttttacagatatacatcagatggggttattccctgcttaaaacctccaataacttcttcattgcatttggaataaaatccagtctcgctc

SEQ ID NO: 85451 - DNA, 392 bp, Homo sapiens
tttcgtcacaactgtcaaatatacaatgaagactctagccagctgtgctgagaccgtgatcttcatgctgcttggcatctcagccgtggactcttctaagtgggcctgggattctgggctggtgctgggcaccctcatcttcatcctgttcttccgagccctcggtattgctggcaccctctgctttcccactctccttcctgtcccgcccctccctgcagctcatctccctatctgagtccacatctttgtcaattcctaagcctcctcttgttgctcacctgtcccagcccctgttagacctcagcccagatacttggtcccatccggtcccacgtcctccactcccaacgctttgctcccactggcctccctcccgctgtaggcgtagg

SEQ ID NO: 85452 - DNA, 404 bp, Homo sapiens
tttcgtgcgggtgaaggaatagctgggcgggagttgtgttgctccgtacacctcttgggtcctgggctctcacatggagaagctcgggctcgcggctgaactctggatctgctacacccaagattggcgccggtggtcccaagggggcgccggagagtttggggcactggcgatccattgtattggaacctgggtggtcgacaatgcggtcttggggactcccgcgtgtgagggctgcggatgcgggagaggaagagtcgcggaaccgcgtcccggtgacactggtgggcccgggagggctgggctacgggacaatccccggggcgcatggcataatagggggcccggaagggcgcgaacgctgctccagggccgggtgacatatgtttgcgctggtggccaaa

SEQ ID NO: 85453 - DNA, 390 bp, Homo sapiens
tgcatagagggtcccaggggagcccaaggacttccaggcttaaatggattgaaagggcaacaaggtaggaggagggcctcaaaactggccaccagaagggcaggagacatgagactcctgctctgtgctttgctgcttaacatgggaactgtccagccacaagtcctgaccactgttcaatgagaaatacttcagaagtgtaaaccttgctgttatgggtttgttgcacacagtagtgtgtaccacctataaaggaagaaacttgaagttaatatagtgagttgctttgtgtcttttatgcaagaaaaatatgaatgctgaagacagagattggtgtgtgtttacatatatttatatacatattaaattctcagaaaacattttaccttt

SEQ ID NO: 85454 - DNA, 404 bp, Homo sapiens
aaacttgtaccactgtggtagtaatccctcgcatgttggtggactttctatcagagagcaagaccatttctcttcctgagtgtgccacacagatgtttttctttctgggctttgcatccaacaactgtttcatcatggccgctatgtcctacgaccgctacacggccatccacaacccactgcagtaccacacccttatgacaagaaagatctgcttgcagatgatgatggcttcttggatggttgggttcctgttttctctgtgcatcatcgtcactgtattcaacttgtctctttgcgacttgaacactatccagcactatttctgtgatatctcaccagtggtctcccttgcttgtaattacactttctatcatgaaatggctatttttgtgctctctgcc

SEQ ID NO: 85455 - DNA, 415 bp, Homo sapiens
gaaaggagtggctcagtttccctcctcaggaagacccagagtgagggtgtgggttcccagaatatctctaagggtggctttcctgaaccacatggtttggctttctgcaggtggaggctgctattaacaggcaccggccccagctcctggtggaacgttaccatttcaacatggggctgctgatgggtgagcagggcctggaacggggctatattgttctctctggtcatgccttttcttctgggcacgagtgagaaggaggtgggggaaggaacaggagtgacttaaagtggtctggctgggctcaggctctggttctggtggtcagccaggacctttccttgggaaagaggtggggggagtactcttttttgcctttctgcagctccttgtgcctatgcttctaagagaggct

SEQ ID NO: 85456 - DNA, 2070 bp, Homo sapiens
aaacacaaactaccatcagagaatactataaacacctctacgcaaatagactagaaaatctagaagaaatggataaattcctggacacatacaccctcccaagactaaaccaggaagaagttgaatctctaaatagacgaataacagaatctgatattgaggcaataattaatagcttaccaaccaaaaaaagtccaggaccagatggattcacagccgaattctaccagaggtacaaggaggagctggtaccattccttctgaaactattccaatcaatagaaaaagagggaatcctccctaactcattttatgaggccagcatcatcctgataccaaagctgggcagagacacaacaaaaaaagagaattttagaccaatatccctgatgaacatcgatgcaaaaatcctcaataaaatactagcaaaccgaatccagcagcacatcaaaaagcatatccacggtcaagtgggcttcatccctgggatgcaaggttggttcaacatacgcaaatcaataaacgtaatccagcatataaacagaaccaatgacaaaaaccacatgattgtctcaatagatgcagaaaaggcctttgacaaaattcaacaacccttcatgctaaaaactctcaataaattaggtattgatgggccgtatctcaaaataataagagctatctatgacaaactcacagccaatatcatactgaatgggcaaaaactggaagcattccctttgaaaactggcacaagacagggatgtcttctctcaccactcctattcaacatagtgttggaagttctggccagggcaatcaggcaggagaaggaaataaagggtattcaattaggaaaagaggaagtcaaattgtgcctgtttgcagatgacatgattgtatatctagaaaaccccatcgtctcagcccaaaatctccttaagctcataagcaacttcagcaaagtctcaggatacaaaatcaatgtacaaaaatcacaagcattcttatacaccaacaacagacaaacagagagccaaatcatgagtgaactcccattcacaattgcttcaaagagaataaaatacctaggaatccaacttacaggagatgtgaaggatttcttcaaggagaactacaaaccactgctcaatgaaataaaagaggatacagacaaatggaagaacattccatgctcacgggtaggaagaatcaatatcatgaaaatggccatactgcccaaggtaatttatagattcaatgccatccccatcaagctaccaatgactttcttcacagaattggaaaaaactactttaaagttcatatggaaccaaaaaagagcccgcattgccaagtcaatcctaagccaaaagaacaaagctggaggtatcacgctacctgacttcaaactatactacaaggctacagtaaccaaaacagcgtgccatagagtgggccgtgcacagcagcattccatcagcaaatggaagtggtatatacatgattggtctcaagtaggtcctgaaggcacaaatgattctgcacgatatccagataccacccgaaagtggacagctgcagcactactgcccctttctaggacatccctgaaggacagtggcaaagggaaatcttcccagtgggcagaacttcaagcaatgcacctggttgtgcactttgcatggaaggagaaatgaccagggacttggaagaagcatgattggaaaactggtgacaaagaaatctggggaagaggtatgtggatgggcctctctgagtggtcaaaaactgtgaaggtatttgtatcccatgtgggtgctcaccaaagggtgaccttggcagaggaggattttaataatcaagtggatgggatgactcgttctgtatgcaccactcagcctgtttccccagccacctgtgtcattgcccaatgggcccatgaacaaagtggtcatggtggcaggggtggaggttatgcatgggctcagcaacatggacttccccttcccaaggctgacttggccatggccactgctgaatgccattttgagggctcagttttggtctctg

SEQ ID NO: 85457 - DNA, 406 bp, Homo sapiens
  misc_feature (1)...(406): n = a,t,c or g
actcttgngctgatgtacacctgtgttaaatttgtcttcaagaatcgtggacttgcttttgtaacggcattgctttttgctgtacatcctattcatactgaggcgggggctgggatcgttggcagagcggacgtgttagcgtgcctgctgtttctattggcctttctctcgtacaacaggagtctggatcagggctgtgttgggggaagattcccttccacggggactaccttcttcttgctgctcagattgtttctggggacctgtgcgatgctggtgaaagagacaggcatcacggtgttaggagagtgcttgggttatgacctcttttcccttttcaacaagcaagacaagtcgtatctgatagcaagcagcaatagaaaatttcctgcttaccatgagaccn

SEQ ID NO: 85458 - DNA, 410 bp, Homo sapiens
  misc_feature (1)...(410): n = a,t,c or g
cccacgcgtccgctgacctttgcacccatggtcatgcccttgtgccttctgctgctctgttccctgcttgcatggcactcacctccttggggcctcaccaggtggaggtggctgtgtgctacgcctgccctagttcttccctgccatccgctgagtgggggtctcaagccactttaggaaaaaatgaagcatgatgtcacaccagagtgcgtcagggtttagtatttcgagtcagaagcactaggcctccatctcaacaaggaggagtcccaggcagcccgccccagctggtgcctcccctgagctggcccatctctccccagcaacctgcggcagatcttccagtccctgccgcccttcatggacatcctcctgctgctgctgttcttcatgatcatctttgccatccn

SEQ ID NO: 85459 - DNA, 392 bp, Homo sapiens
acggattcttcattcggactctacttctggaaggggcaaaatttgcgccccacaccacacagggtagccagggagaaatctatctcactactcccccgacaggccttgtagggcaccacaaatgcttattctcagagctttgttcacacattctttaatttggtatctccctctctcctgcctgcaacattaatattataggtgccctctgcttcttcttttacaacccccttatgcttgacttctctcttttagatatcggatgtgtacaatatgagggtgtggtctctagcagggggtcaagttttgtctaacacaggcataggccttggctccgttgcctccttagcctcctacatgccccagtccaacaactgtctcagtgatgcctt

SEQ ID NO: 85460 - DNA, 885 bp, Homo sapiens
ctaggccacagagctagttggtgacagcaggatgagaagccaggcctcttggttgcctaacaaagaacgttgcaggcgttccatgctgagtcgatactgcttcttcctagatgacaggactgtagtcaaatagaaaagttggtgccctttgcccacacatttaggctcaacaactagagagcttgctgggcagggatccaaattgcaggacttcaggagctgtgggggccggcggctggtcacgcacaggttctcctcagcaggctcccgagtctgtttgttcaagcagctcaccacagcctcctggacacctcctccacaggactcggagcacttggtgaacccctcatactcccagtcatacagctcgtcgaaatcctgcaggccaccaaagagcccatctgtctcgtctgggttgaactcaggaatttccccgctgcatgggcctgcataacaggcacgctgggatgctggcttgggcccttcacactcgtcaataggcaggtcagccacggactgagagaaagacaggagcacctggcacctgactattcgcacctgggtccccacaccacaggtgactgtgcaggccgaccaggcctctgggatgaacctgcagtcggcaagcaaacaagaggacaggatgagaagccccaggcaggaagccatgggggctggagtcgtgctgcagaggcatgcaaacctggctccttaaccttgactttggcagacaatgaaagaactgataagaaggcatcactagctcatcgtgtgtttttgctcttcagcccttatgaatgtaactcggaatccgtatctgcacagtactccaggaaaactctgtcagtcattagatttggcttcaggatctcaaacctgtttgct

SEQ ID NO: 85461 - DNA, 497 bp, Homo sapiens
agcggccgcagggcccacactgggccaggacccctgggctgctgagccccgtgccgcctgcggccccagcagctgctacgctctcttcccacggcgccgcaccttcctggaggcctggcgggcctgccgcgagctggggggcgacctggccactcctcggacccccgaggaggcccagcgtgtggacagcctggtgggtgcgggcccagccagccggctgctgtggatcgggctgcagcggcaggcccggcaatgccagctgcagcgcccactgcgcggcttcacgtggaccacaggggaccaggacacggctttcaccaactgggcccagccagcctctggaggcccctgcccggcccagcgctgtgtggccctggaggcaagtggcgagcaccgctggctggagggctcgtgcacgctggctgtcgacggctacctgtgccagtttggcttcgagggcgcctgcccggcgctgcaagatgaggcgggccaggccg

SEQ ID NO: 85462 - DNA, 1926 bp, Homo sapiens
atggccttcaaggaaatcaagaaggctttgatccacgccctggcattaggactgccagacatgacaaagcctttttacgtgtatatctatgaaagaaaaggaatatctataagagtcttggtacaaacactagggtcatggtattggcccgtggcatgtttgtcccagcgactagacttggtggctatgggatggcctccctgtttcaaggcagtggcagccactgccctgttagcagaagatgctaacaagctcacatttggacagaggttgataattcaggtgccccatacgatcgtcaccctgatggggcagagggggcatggctggctttctaaccctaggatgttaagatatcaagaacttttgtgtggaaacccctacataatcctggtgactctgaatactctagatccacgcacactgctgccaaaagagtgggcagagcacagaaagcccccgttgtgttgcccagcccaaagagttgagctaacagccctcactagagcatcgctcgtggccaaaggaaagtcagtaaacatctatactgacccaaggtgtgcttttgccattttgcattcccatggagccatatgggccaacatggcccccagggattcaagaaactggactacaccctgtgaaaacctgcctgtggactttatcgagctgcctcaagttggaggctgccggtacatgctagtgtttgtctgcactttctcaagttctgtaaaagttgaaagaatgaaggagacactcaaacagctgttaaaggttttgccaggaaacttatctaaggtgaaatcaggagctgcccatggtccttctgtgagtcagaggcaccctactaaattaactgggtattcaccctatgagatggtgtttggctcaccacccacaatcataactcagataaaaggggatttaaaagaaattggggaattaaccttaagaaggcaaatgcaagccttaggtgaggccatgcaggaaatacaaaggtatcacaccttgggttcatcacagccagctgaaaccagcagcgaccacaactcaggacccgcggccagtcaacaaaacccagactacccaaaacagttgatcctgcggcaaaactatgccactgctgacaaggataactgccctgctctgaccataccggaggctgaaatcagggtcagtaaacctgtaaacaaaaaagaagtattccctcactcgcataaaggccctgtctccatacattttgatgcctgccaagcttcacatctcagtaaactaaatactattgggaccatccgtaaaaatctaggacaagaaagagtcagccagcagagctaccaaggctgtaacaggaaaatccaaaaaggagtgccctgattgtgataatcagtggaccacacatgaatttatcagcacctatacacaggaagggttgctctatttgccagccaagaggtgaagatagggtgcacaactggaacttgcaacccactcaatctgacaatactaaagccaaatatgcctttctggactaaagggcctaaagggctactaatctttgatcaggaaagagcactcctaggacttcgtattcctctggtcattaccaggaaaacccaaaggacccaagttcaagttagcccaatgcaacactttaggttttatacatctttcaatgaacactttaatcctgaagtatcaaaaaatcaaattcctcctatatcagctgaaaacctgtttgcccagctagccgaaagtactgctaacaatttaagagttactattccagacattgtatggaaaagcactgtgaaaatccctgtcctgttctgttccattctgattactggtgcatacagccccctgtcatgtaccgctgcttgctcaatcgatcacgaccctctcacatggaccctcttaaagttgtga

SEQ ID NO: 85463 - DNA, 539 bp, Homo sapiens
tgtttggcctccatctgagcagccactctgggccactgtccctcatctatacagtgctggaggtctgctggaagctgccccagagcaagctcatcggggccacaggcatctcctatggcatgggtctaaagcacagatttgaggtagatgtcgtgggcaacatccctgcagggctggtgcccccagtggcccccaacacccagctgttctcaaagctcgtgggcagcgccttcaccatcgctgtggttgggtttgccattgccatctcactggggaagatcttcgccctgaggcacggctaccgggtggacagcaaccaggagctggtggccctgggcctcagtaaccttatcggaggcatcttccagtgcttccccgtgagttgctctatgtctcggagcctggtacaggagagcaccgggggcaactcgcaggttgctggagccatctcttcccttttcatcctcctcatcattgtcaaacttggggaactcttccatgacctgcccaaggcggtcctggcagccatcatttgtatt

SEQ ID NO: 85464 - DNA, 404 bp, Homo sapiens
ataagaaacctagcctcttcagacaggggcacttatgaatgcattgctaccagttccactggttcggagcgaagagtagtaatgcttacaatggaagagcgagtgaccagccccaggatagaagctgcatcccagaaaaggactgaagtgaattttggggacaaattactactgaactgctcagccactggggagcccaaaccccaaataatgtggaggttaccatccaaggctgtggtcgaccagcagcataggattctggatttttacttctcagaggcagaagccatgccatgctcctgctgtaaccacaagaccgaatacccagcttactactgtcagaggtggccagtcaccaaaaaagaagtataatcctgttgtagaagcaaatcacttatctccag

SEQ ID NO: 85465 - DNA, 383 bp, Homo sapiens
tttctttgcatatgttgtcttctcaaattgttgtttgcctttgacattgcaagaactttagttgaagggtacgtctctaaatttttactaaggatatcttcctaaaaatttcttagtttttatttctttctttttctccctcctttcatccctccctcattttcctcttctttccctcccagcccaatttcttaaaaaaggatttgagagcctgacgatgatttatcattgaacaataatcaattcagtgggtggatgttaagtgcttttaatatatatgaccctggttcatttattttgaaggccatgtttttggtatactgtgcactggagaaagaacctgtgccaatgtccttgcctccagccttggtgccaccatctaa

SEQ ID NO: 85466 - DNA, 449 bp, Homo sapiens
ttttttttttttagaatataaatttctttaatttgtgggtctgtgggatactggaaaaagaatcagatcatttaaaatacgtaagaatgcattaaaatgttcatagtaactagaaatattacttaactgaattttagtgtaattaagaacagccatgttttatgtatgaatttacagcaaagaaaaaagcattgggggattaaaatgatgacacatgatgtaggtatcctatgattcttttgaaatgcagactgaagtgagtagatagttttcacatcatagaaagatttccctgaccgcctctgtggtctgccccatctagatttccgacgggagaacatcctgcctcactctacctccagatccaggatcacgttgctgttacagtctccccccgtgaagttcctcatcagcccagagttcttcaccgtgctgcattctaaccctgt

SEQ ID NO: 85467 - DNA, 375 bp, Homo sapiens
cgctgcgcctgcgcgctcggcacacgccccgcgcgcaccccggtcacctgcacaaggcgcgcgacggcccttgcgagttcgctcctgtggtcgtcgttcctccccgaagtgttcacaacgtcaccggggcgcaggtgggcctgtcctgtgaagtgagggctgtgcctaccccagtcatcacgtggagaaaggtcacgaagtcccctgagggcacccaagcactggaggagctgcctggggaccatgtcaatatagctgtccaagtgcgagggggcccttctgaccatgaggccacggcctggattttgatcaaccccctgcgaaaggaggatgagggtgtgtaccagtgccatgcagccaacatggtgggagagg

SEQ ID NO: 85468 - DNA, 643 bp, Homo sapiens
aatgctctccctggtagaaagagccgtgtcttctctgggtgcgtctctgctgacacctggaagccaccatcctctgcaaaggtcacggagaccaaaggagccagcccggccttcctcagagcaggccaacctcggttggtgcctggggaaactttggaaaagagcttggggccagggaaagacccacaagttgagccccagcacccagttcacctccaaggtatctcctctgagggctttccctgggacggcttcaatgagcagacacctaaagaccttcccaacagagatggaggcgcgtgggttctgggctacagagcgggaccagcctgtccatttttgcttcatgaggaaagggagaagtcaaacaggagcgaattgtacttggatctccatcctgaccacagcctgactgagcaggatgacaggactcctggcagacttcaagctgtctggccacccccaaagacaaaagacacagaagaaaaagtgggactgaagtacactgaagcaggtaatgtgaaaggaagctagggacccgggaatgaatctcttcctgcaatggcttttagttctagcttagttgactctcagaatttggggttttatttcattataaaatgtaatgctgaagggtttcttc

SEQ ID NO: 85469 - DNA, 417 bp, Homo sapiens
aggaattagggggtcgagccacgcgtccggctacgtccgctgggagggcgttttccgctgcatccccatcttcggcatgtccttggcctggcggtcccaggtgctgcccacctacgacagcctggatgagccgtcagtgaaaaccatgagctccatatttgcttcctcccttaatgtggtcaccaccttctacgtcatgggggggtttttcggctacgtcagcttcaccgaggccacggccggcaacgtgctcatgcactttccctccaacctggtgacggagatgctccgtgtgggcttcatgatgtcagtggctgtgggcttccccatgatgatcctgccatgcaggcaggccctgagcacgctgctgtgtgagcagcagcaaaaagatggcacctttgcagcagggggctacat

SEQ ID NO: 85470 - DNA, 441 bp, Homo sapiens
gcggtggaattcggcggctccagcgccggggcggccggcggaggggacgacctcggggcgaacgacgagctgatccccttccaggacgaggggggcgaggagcaggagccgagcagcgatagcgcctcggcgcagcgggacctagacgaggtcaagtcgtccctggtcaacgagtcggagaaccagagcagcagctcggactcggaggcggagaggcgcccgcagcccgtccgggacactttccagaagccgcgggactatttcgccgaagtgagaaggcctcaggacagcgcgttctttaaaggacccccgtaccctgggtaccccttcctgatgatcccggacctgagcagcccgtacctctccaacggacccctgtctcccggaggagcgcgcaccggaaaaatggaaattgaagaggaagaaatcaatgacccattt

SEQ ID NO: 85471 - DNA, 543 bp, Homo sapiens
gtggaggaattcgagccgggtttctggtgagcaggaaaaatgtctactcgttaccaccaagctgctagtgatagttacctggaacttctaaaagaggctaccaagcgagatctaaatctttcggatgaagacggcatgactcctactctcttggcagcctaccatgggaacttggaagccctagagataatctgcagtagaggaggggaccctgataggtgtgacatctggggaaacactcctctacattttgcagcctccaatggccatgcccactgcgtctcattcctggtcaactttggtgccaacatctttgccctggataatgacttacagactccactggatgctgctgccagcagggagcagaatgaatgtgttgctctcctggacaaggctgccactgcacagaacatcatgaaccccaagaaggtcaccaggctgaaggagcaggctcagaagaatgccaggaggcagatcaaagagtgtgagaggctccaggagaagcaccaaaataagatggcccacacctacagcaaggag

SEQ ID NO: 85472 - DNA, 668 bp, Homo sapiens
ggcacgagtgactacgtccactgcctgctgttcagatttgctcagcccttgagccccatggcccctcccactgctccgctccccccagtcccgccctcattcactgggctctctattcccctccctccctggcctggcagagctggacctgcagcggacgctgagtttgcaggcgccacctgtgaaggaggggccactcttcatccacaggaccaagggcaagggccccctcatgtcctcctccttcaagaagctctacttctccctcactaccgaggccctcagcttcgcgaagacgcccagctccaaggtgggtaaggagggaggccggcaagtggggctctgagaggccggcaaggggggcacctggccccttccttggagcccacttgaggtacccccggggtcagagaagaaagccaggtgtgtggcatctgtactgcttgtcagaacctagaattccatttccaacatggagaaaccccgtctctactaaaaatacaaaaagtcagccgggcatggtggcacacgcctccagtcccagctactcgggaggccgaggcaagagaattgcttgaacctgggaggcagaggttgcagtgaaccaagatcaagccatttgcactccagcctgggcaacacagtgagactccgccccaaaaaaaaaa

SEQ ID NO: 85473 - DNA, 384 bp, Homo sapiens
  misc_feature (1)...(384): n = a,t,c or g
caggacctgttggcttacctggagaagttgggatgactggaagcattggcgaaaagggagaacgtggaagtccaggcccactaggtccgcagggagaaaaaggtgttatgggatatccaggtcctcctggggttccaggacctatcggtccattgggattacctggtcatgtgggggcaagaggaccacctgggagtcaaggtcctaaaggacaaagaggatcaagaggaccagatggtctcttaggggaacaaggtatacaaggtgccaagggtgaaaaaggagatcaaggaaaaagagggcctcatggtcttattggtaagactggaaaccctggagaaagaggatttcaagggaaaccaggtttacagggattgcctggan

SEQ ID NO: 85474 - DNA, 407 bp, Homo sapiens
ctgtaagtaatattttggatgatcttgatttactaacccagattgaccttgaggataacccctgggactgctcctgtgacctggttggactgcagcaatggatacaaaagttaagcaagaacacagtgacagatgacatcctctgcacttcccccgggcatctcgacaaaaaggaattgaaagccctaaatagtgaaattctctgtccaggtttagtaaataacccatccatgccaacacagactagttaccttatggtcaccactcctgcaacaacaacaaatacggctgatactattttacgatctcttacggacgctgtgccactgtctgttctaatattgggacttctgattatgttcatcactattgttttctgtgctgcagggatagtggttcttgttctt

SEQ ID NO: 85475 - DNA, 423 bp, Homo sapiens
  misc_feature (1)...(423): n = a,t,c or g
caaatgcatcccctgggggatctgaagagaacaagcgtgcatacatgaatttagtaaagaaactgaaaaaagagctaggagacaagcgatcagaaagtattgacaaagttcgacagttactacctttgccgaaacagacatgtgatgtcatcacttgtgaacctatgggttccttgattgacacaaaaggaaacaaaattgctggatttgactctatagataaaaaacagggtctccaggtctctacgaagcagaaggtgtccccgtgggacttgtttgagggtcagaagaacccagctcctttgtcctgggcctggtttgggacagtccgagtggaccgaagagtgatcaagtacgaggagcagcatcacctcctgctgtatcacacacaccccatgcccaagccccgcagttactacctcn

SEQ ID NO: 85476 - DNA, 412 bp, Homo sapiens
  misc_feature (1)...(412): n = a,t,c or g
agtgggtggatttttcttcttaaaaatatgtcttgatgtctaatatataatgcgatgaattcctgtctgtgttgtggttcttcatattttctttgcttggattttaacttcttttttctttggaatcatagtactgatagactttttatactcttcttctcttgcctccccaccccctggccatcctaacacacgggcacacgtactctgggcttcttaaactttgttcctgaactacttacggagagtggggttgggggatattggaagaagtctgtgaaatatagcctgactcctgatcttcacctctgcccccacagacaagttcaccgattcagccattgccatgaactcgaaagtgaatggggaacacanagagaaggtgcttcagcgcttggaggggggtgacaan

SEQ ID NO: 85477 - DNA, 389 bp, Homo sapiens
cgatcgtgttttggctcagctcttaacagaaatggatgggattgaacagctaaaggatgtgaccattttggcagctactaaccgtccagataggatagacaaggctttgatgcggcctggaagaattgatagaatcatctatgtgcctttaccggatgcagcaacaagaagggaaatatttaagctgcagtttcactccatgcctgtcagtaatgaagttgacctggatgaactcatccttcaaaccgacgcatactcaggagcagagattgtagctgtctgcagagaggcagctcttctggctctggaagaagacattcaagccaatctcatcatgaaaagacatttcactcaggccttgagcactgtgacacctagaattcctgagt

SEQ ID NO: 85478 - DNA, 743 bp, Homo sapiens
  misc_feature (1)...(743): n = a,t,c or g
agaggaccgggaaacgctggctctcctggcagcaaggagtgaaaacgaaggcacatcagatggggagacgtacattgagaagtacactcgaggcgtgctgcaggtggaaaacattctgagtcttgaacggctccggcaggccgtcacagtcaaagaagcactttccaccaaagcccggcacattcggaggagcctcagtacaccaaatgttcataatgtctcttccagccgaccggacctttctggctttgatgaagatgacaagggttggccagagaaccagttggacatgtctgactatagctccagttaccaagatgtagcatgttatggaactttacccagggattctcctcgaaggaataaagaaggttgtacatcagagactcctcatgccttaaccgtcagcccttttaaagcattctctcctcagccaccaaagtttttcaagcccctaatgcctgtaaaagaggagcataagaaaaggatagccctggaagcaaggcctcttctaagccaggaggactctgaggaggaagaaaatgagctggaagctattaacaggaagctaataagttcacagccttatgtacctgtggagtttgctgacttcagtgtttacaatgccagcttggagaacagggaatggtttttcctcttaaagtagatctgttcaaactcacgggtnttgggagaaagaagtgtccccgtaggccctaccaccagcagtatttaaccagtgg

SEQ ID NO: 85479 - DNA, 715 bp, Homo sapiens
ccgagcaggtccggaattcctgggtcgaggactccggcgagtacttgtgtgaaattgacgatgagtcggcctccttctctgtcaccgtcacagaacccccagtgcggatcatataccctcgcgatgaggtgaccttgatcgccgtgaccttggagtgtgtggtgctgatgtgtgaactgtctcgggaggatgcccctgtgcgctggtacaaggatgggctggaagtggaggagagcgaggccctggtgctggagagggatgggccacgctgccgcctggtgctacctgctgctcagcccgaggacgggggcgagtttgtatgtgatgctggagatgactcggccttcttcactgtcactgtcacaggtgggcagtctctgcagcacagagaggaggtagagaggtagggggctaagggacagacacccacctagccccacctcccccaccccatccccagccttccccttatccagcttcctcatgtttggccatcagaatcctgcttagccacatcaggtcaggaccagaggcctggtgggagggtgcccagcaattaagaaccattcgttcattcatccattcgttcaatactcattgagcaactaccatgtgcttggcactgttttagatgctggggatacagcagtgaaccaataagactaaacctcttgtcttcacagagtttaaactctggtgagggtggacagacaaa

SEQ ID NO: 85480 - DNA, 443 bp, Homo sapiens
gcggtggaattcgtgggtttggaacaggctttctccaaaggaagctggtgacctcaggctgacctttctgcaagccccagctgttcacggttgccaccttcctgagaggagtgggcagcatcagggttacaggtgtttccccagggcagtgtttccagctgagcttccagttccccacaaacacagccactttcctctgaatccaagattcagatgctctgccttgggcccctgaaggaacttgtctgatgaagggacttgtcagggttggggcttgggatggaactggagctgggtccctacaactcctgctgattcatttggtgacgccaccccctcctgctgcctattgtgctctagtgggaagtggtggttcaagtggaggatgatggggatggcgattacatgtctgagcctgaggctgtgctgaccaggaggaagtc

SEQ ID NO: 85481 - DNA, 119 bp, Homo sapiens; identical to SEQ ID NO: 85074

SEQ ID NO: 85482 - DNA, 601 bp, Homo sapiens
ggcacgagggatgacgaggcctacgggaagccagtcaaatacgacccctcctttcgaggccccatcaagaacagaagctgcacagatgtcatctgctgcgtcctcttcctgctcttcattctaggttacatcgtggtggggattgtggcctggttgtatggagacccccggcaagtcctctaccccaggaactctactggggcctactgtggcatgggggagaacaaagataagccgtatctcctgtacttcaacatcttcagctgcatcctgtccagcaacatcatctcagttgctgagaacggcctacagtgccccacaccccaggtgtgtgtgtcctcctgcccggaggacccatggactgtgggaaaaaacgagttctcacagactgttggggaagtcttctatacaaaaaacaggaacttttgtctgccaggggtaccctggaatatgacggtgatcacaagcctgcaacaggaactctgccccagtttcctcctcccctctgctccagctctgggacgctgcttttcatggaccaacattactccaccggcgctcccagggatcaccaatgacaccaccatacagcaggggatta

SEQ ID NO: 85483 - DNA, 474 bp, Homo sapiens
  misc_feature (1)...(474): n = a,t,c or g
agatgggggnnnnnaccctaagncctacgatctggcaagnnnccngngnnnngnccaagacggggcgtgtcgtggtggtgcacgacttcangnnccgtgtcaagatttttgactcagggggaggatgcgcgcaggagtttggagagaagggggacgctgcccaagacattaggtaccctgtggatgtcaccatcaccaacgactgccatgtggttgtcactgacgccggcgatcgctccatcaaagtgtttgatttttttggccagatcaagcttgtcattggaggccaattctccttaccttggggtgtggagaccacccctcagaatgggattgtggtaactgatgcggaggcagggtccctgcacctcctggacgtcgacttcgcggaaggggtccttcggagaactgaaaggttgcaagctcatctgtgcaatccccgaggggtggcagtgtcttggctcaccggggcca

SEQ ID NO: 85484 - DNA, 508 bp, Homo sapiens
  misc_feature (1)...(508): n = a,t,c or g
ngaagagatggggnnnnnaaattgaatnattgtaccaccgtggcggaagncgctgcccgagccctcagccgggctgccctccagcctacaccgggacggtcctggagcagacgctgagccctctgtgggatgaactcctggtatttgagcagttgatcgtggatgggaggagggagcacctgcaggaggagcctccattagtgatcatcaatgtatttgaccacaataagtttggcccccccgtgttcctgggcagggcactggccgccccaagggtaaagctgatggaggacccataccaacgcccagagttgcagttcttccccctgaggaagggaccctgggcagccggagagctcattgccgcctttcaactcattgaactagactacagtggccgacttgaggtcagcatgccctggcgtggctagcacaggctgtgagcccaacttgttagtccatcaggccatccagccctagggaatataaaacatggatatgtcccagg

SEQ ID NO: 85485 - DNA, 426 bp, Homo sapiens
tccagctctgtgagccccctaagttccattgtttcagcagtccagaggacctcccagcaaaaaagatcagggtctcaaatgtcaattgccactctctagagcttctgctaacacaattctggagaggagctctgaggggaggagcacagggcacaccttgacacagccactgacaagtagagacttcatactccccacccacccccaacttggcctttctgacagctaaaccctcctgccaccatcactatttctcttaaagggcgaccgctcgttaacatatacaactgctctggggtgcaagttggagacaacaactacttgactatgcaacagacaactgccttgcccacatggggcttggcaccttcgggcaaggggaggggcttgcagcaccccccaccagtaggttcgcaagaaggccct

SEQ ID NO: 85486 - DNA, 476 bp, Homo sapiens
  misc_feature (1)...(476): n = a,t,c or g
ntgatcgacacccttngcagngngcnggaattcggcttcctgggagcggcatcgccagccctgtggacnnnnatccctatgggcttctgggtatatgatcaggtgcccagcatgcgcccccagacaggagctcccctctgccctgcctctgggacccactttcacccaagtcctgtgggactggcatagcctagggcctgggtgctggcagcgtctggctggagcctggggcggggcagggcagggccttccaggcgcgttcccgagcgtgcactgaaggtgttagcgcgtggcaccggagacaccaggctggatgaggctggacaagcgcctccgccagaagccgacaggcctgacacaggcaaacctcccggagaccaccccacggaccccagcccctgctgaccctcccaggaggcgttgctggaaatccaccctgagaattctgctccaggagctgaaccagcggtatcagc

SEQ ID NO: 85487 - DNA, 463 bp, Homo sapiens
  misc_feature (1)...(463): n = a,t,c or g
tgggactaaaagaactgatgacacctggatgacatcaggacagngcggnnggaaactatggaaagtgtggatcatacttctgactgccccatgcaattgttcttctacgatctccagatggcagtgaaagctctccttcagcagatcaatatacctctacaccaggcaaggaacttccgcctctacacacaggaggtgttggaaatgggtcacaatgcgtcctttcttctcctgctccctgcctcagacgacgtctgtacagccccaggacagaataatccttacaccccacactcagggtttcttaacctccctcttcagatgtttgaacttgttcatttttgcagctacagagagaaatttattagtctgtattgccgcctttctgctgttgtggagctggattctctgaacacccaacagtccctcatggaagcaatctcagacagcgaggttgcagctg

SEQ ID NO: 85488 - DNA, 455 bp, Homo sapiens
  misc_feature (1)...(455): n = a,t,c or g
nattgatgattagtaggccgtgcggnggaattccacggggcaaggttggtgcggtccccgtccccacgcgtcccacggggcgaggatggtgcggtctccgtccccacgcgtcccacggggcgaggttgatgaggtccccgaacccatgcctcccacggggtgaggttgatgcgttcctgtccccacgcctcccacaggatgaggttggtgcggtccccgtccccatgcgtcccacagggcgaggatggtgcggtccccatcacctgcaggtagatctgggtgaggttggcttcccccgtcttcagattaataggaaattcttcataatatctgaaaagaacacagatccagacagacttcagaatttaggccaagaaagtcccgttctccctgatttcaccagcaaagccatgggcttcatttaaaagaaggctggggctgggcgtcatggctca

SEQ ID NO: 85489 - DNA, 471 bp, Homo sapiens
  misc_feature (1)...(471): n = a,t,c or g
agggatagatncccctnnnnnnatagtagaccttagtccatgcggtggaattcggagggccgcgcggcgcaagactccagccgcagcttccagcgcgacaagtgggagctgttgcagaacttcacgtgtctggaccgcccggcgctggactcgctgatccgggatgtcgtccaagcatacaaaaacggagccagcctcctcagcaacaccaccagcatggggcgctgggagctcgtgggctccttcttcttttctgtgtccaccatcaccaccattggctatggcaacctgagccccaacacgatggctgcccgcctcttctgcatcttctttgcccttgtggggatcccactcaacctcgtggtgctcaaccgactggggcatctcatgcagcagggagtaaaccactgggccagcaggctggggggcacctggcaggatcctgacaaggcgcggtggctggcgggctcn

SEQ ID NO: 85490 - DNA, 330 bp, Homo sapiens
gtctttgtctttatttcttttctcattccctcgtctccaccgggaaggggagagcctgcgggtggtgtatcaggcaggttcccctacatctttggcacccaacacggtctcctcgaacccaggtgaagttacacctgagcgtggtcgttgtgaagaacggtctgtccaggaactcccgagaacgtgtggtcggccttgcgtcatgggtgtgccacagaaaggaaaaatggtctggtggaaggataccagaaccaaaacttggaaattaagaaaaagtattacttgggggaggggttttccttgtgtttcaccaagagacaatcaaacact

SEQ ID NO: 85491 - DNA, 597 bp, Homo sapiens
taaagcctgtggcttgaacaccctcaccacctatgttccgcggaacctgcatgagccagaaagaggcaaatttgacttctctgggaacctggacctggaggccttcgtcctgatggccgcacagatcgggctgtgggtgattctgcgtccaggcccctacatctgcagtgagatggacctcgggggcttgcccagctggctactccaagaccctggcatgaggctgaggacaacttacaagggcttcaccgaagcagtggacctttattttgaccacctgatgtccagggtggtgccactccagtacaagcgtgggggacctatcattgccgtgcaggtggagaatgaatatggttcctataataaagaccccgcatacatgccctacgtcaagaaggcactggaggaccgtggcattgtggaactgctcctgacttcagacaacaaggatgggctgagcaaggggattgtccagggagtctttgccaccatcaacttgcagtcaacacacgagctgcagctactgaccacctttctcttcaacgtccaggggactcagcccaagatggtgatggagtactggacggggtggtttga

SEQ ID NO: 85492 - DNA, 1284 bp, Homo sapiens
catcgcatgcggtcccctgcggtaccggaccggaaatcccgggtcgagccacgcgtccgcccacgcgtccgtaaaaataataatgataattctcaggatggttctgtgaataactttcagggtcacactggaaacaagcgacgctcgcggacgccctcgagggctcaccttctgcagatcacgaagacacagaccagggccagcagcgtccccagcgcgatcagcagcgacgtccgccaggccacctgagtaccaggaccgggagcgacttccggacctcccagccccagtctggaaccctaagggagcggaaagaccaccagggatccctgtctgcctggtgctcgggacacggggagcgccagggacttccactgtgcccagcaggccggcagagaccgggtttcaccgtgttggccgggatggtctcgatctcctgactttgtgatccgcccgcctcggcctcccaaagtgctgggattacaggcgtgagccaccgcgcctggcccacctgcccattttttaaaaactttattcttcctggtatcaaggggagaaagaaaaaaattttttaaaatatttaaaactttattttgaaataatttcaaaatcacagcagtttgaagggtacaacaaagaacattttgccacattttctctttcattcgttccctcctcttctccctcacccctgtttcttcctatcctctctgaaccatgaaccatttgaggattatttgtatacatcatgctcgtttatccgtaagatgttttagtgaacatttcccaagaacagggacagcctctcacatgcccatggtacagttctcaaattcaggaaatgtgtaatattctctgatcagcccaggagttgctaatttgtagttcctgtttcaaatttgccaactgtcccaataatgattttgaaagccgttgtttttctggtccaggatccaatccaggatcaagcgctgcctttagttgtcctctctgcagcctcctttcgtttggagcaggtcctcagcctttctgtctttcatgacattgatgtttgtgaagagtacagtccagtttctgttgtagaacgtccttgaagttggtcccggaatatttgtttaaagtgagttgggaaaccacattcacatgtcttttggttatgtgtgtatttgtcaaacagccagccttgtgctgcgtgctgtgatggggagcattactcaacagagcctggccctgaccttggggatgtagtttgggtttgtggggaaagcagctaccgccacgaaa

SEQ ID NO: 85493 - DNA, 904 bp, Homo sapiens
tttgtacttacagattttatggatcttaaatatttaggggtctagtttacatggacatttgaacatattgcccctctccttttcacaggccactgaaggaccttgtaacatgcccaaaccaggtgtatttgacttgatcaacaaggccaaatgggacgcatggaatgcccttggcagcctgcccaaggtgagtttactagttactgtgcttttatttgctgtacttctaaagaagtttgtgcttctcattaagccattgtaaatggagtcttcaagatcttgatgtgcttctattctttcttcattgcaaggtgttagttattagtatagtaactttctcaaagtgcttattcattgaccatgggctgaggttgtttgtcatcgtccgttcaggaagctgccaggcagaactatgtggatttggtgtccagtttgagtccttcattggaatcctctagtcaggtggagcctgcccacggagtttgtcctgttttactttcttcttctatgtgtttcacacaaaagctgtagagtttcagcatcattcctattttaagatatctcttgtttgatttgtgcaggaaggttggtaattgtggctacttcatacaacagagttgagcattcattgtttagagtttgtgaatttcaggtaggttctgatatacccagaaggcactgtgattttcctttgtctgatcccagagggcccgttcttagtcatcaaagtggtatttagttgagcaaaagtgcaatatctgcttctctgtgtcagtgcagttaattgtgactttggacaagcatatttctctaaactgcctccatccataggtgggcattcattctttctctttgacctctgttacctgttcatcctgctggtctcatgagatttgactgtttg

SEQ ID NO: 85494 - DNA, 377 bp, Homo sapiens
  misc_feature (1)...(377): n = a,t,c or g
cttacccagatgttctttattcatgccctctcagccattgaatccaccatcctgctggccatggcctttgaccgttatgtggccatctgccacccactgcgccatgctgcagtgctcaacaatacagtaacagcccagattggcatcgtggctgtggtccgcggatccctcttttttttcccactgcctctgctgatcaagcggctggccttctgccactccaatgtcctctcgcactcctattgtgtccaccaggatgtaatgaagttggcctatgcagacactttgcccaatgtggtatatggtcttactgccattctgctggtcatgggcgnggacagaatgttcatctccttgtcctattttctgataatacg

SEQ ID NO: 85495 - DNA, 389 bp, Homo sapiens
cccacgcgttcgcccacgcgtccgtcggtaagaccctccttgacgccattgacgcgatcgagccgcccacgcgcccgaccgacaagcccctccgtctccccctccaggacgtctacaagatcggcggtatcggcacagtgccggtcggccgtgtcgagaccggcaccatcaaggccggcatggtcgtcgtctttgccccggccaacgtcaccaccgaggtcaagtccgtcgagatgcaccacgagcagctcgaggccggtctcccgggtgacaacgtcggattcaacgtcaagaacgtttcggtcaaggacatccgtcgtggcaacgtctgcggtgacacgaagaacgacccgcccaaggaggccgcctccttcaaggcccaggtcatt

SEQ ID NO: 85496 - DNA, 447 bp, Homo sapiens
tgacacttcactgtgaagtccagagaggttccccacaaatcctataccagttttatcatgaggacatgcccctgtggagcagctcaacaccctctgtgggaagagtgtccttcagcttctctctgactgaaggacattcagggaattactactgcacagctgacaatggctttggtccccagcgcagtgaagtggtgagcctttttgtcactgttccagtgtctcgccccatcctcaccctcagggttcccagggcccaggctgtggtgggggacctgctggagcttcactgtgaggccccgagaggctctcccccaatcctgtactggttttatcatgaggatgtcaccctggggagcagctcagccccctctggaggagaagcttctttcaacctctctctgactgcagaacattctggaaactactcatgtgaggccaacaatg

SEQ ID NO: 85497 - DNA, 392 bp, Homo sapiens
  misc_feature (1)...(392): n = a,t,c or g
ggaagntatannnnccgtgtattctagaaactcgtttatggttctaaggggttgtatcatgattagcaccaatgagagcagttttctctgttctctttcccttgccaagttgtcacactccaagagcagcattaaccttcagtcagatccccttagcttagagatgtcaagtcactgttgtgcaattctgttctcaccactcttattccactgtgaacttaagaaaactttggaacgagagactcgccagtgccaggctctggtgatctggactgactgtgatagagaaggcgaaaacatcgggtttgagattatccacgtgtgtaaggctggtaagtgctgctgctgctgctgactttctctactttggaactccataaatagagtgttct

SEQ ID NO: 85498 - DNA, 709 bp, Homo sapiens
attgaagatgatggggaaattataagtgatgttctaaaaattcctgttcagcttgtttttaaaaataagataaagctatattggagtaaagtgaaagctgaaccatctgagaaagtctctcttaggatctctgtgacacagcctgactccatagttgggattgtagctgttgacaaaagtgtgaatctgatgaatgcctctaatgatattacaatggaaaatgtgagtttagctattttttcattatgaaaatatgtattacaagagaaagaggaaactttattgtactactttaaatatttaaagaaaatttcattagttcctttgcatgtgtaagtcaataattagtaaagcttccaaataaaaagtaatctgtatcgtaatggttatgttggaaagaagcttatgtggttaagtgtccttgctctctttcatcagaattatcacctaaagttagatgggaggaataaattctggaggtctgtggtacaacatggtgactgtagttaatgataatgtaccatatacttgaaaattgctaaaagagtagatttgaaatgttctcaccacaaaaaatgatcagtatgtagtatgcaaggtgaaagatatgttatttagcttaacatccccccggttatacaaaaaccaatttttcccattgtatcccttaatgttttcaataaaaattgccccctatacaaaaaaaaat

SEQ ID NO: 85499 - DNA, 405 bp, Homo sapiens
  misc_feature (1)...(405): n = a,t,c or g
nnctncnaccctctgaagttccctggaagtatgtcatcaacacctgcgggcaagactttcccctgaaaaccaacagggaaatagttcagtatctgaagggatttaaagggaaaaatatcacccccggagtgctgcctcctgaccacgctgttggacggactaaatacgtccaccaagaactgttaaaccacaaaaattcctacgtgattaaaacaacaaaattaaaaactcctcctcctcatgacatggtgatttactttggcacggcctacgtggctctcacaagggactttgctaacttcgtcctccaagaccagctcgcacttgacttactctcctggtccaaggacacctacagccccgacgaacatttctgggtgacactcaacaggattcccggtatgt

SEQ ID NO: 85500 - DNA, 409 bp, Homo sapiens
  misc_feature (1)...(409): n = a,t,c or g
nnnnnnnggggcagagattgggaccagccaccctcatgccatggagcttcagacgcagcacaatcactttgccatgaactgtatggnaagacactcggaacagctggaccctggcatgtgacagtgttttagcaaatgggaggcatttggcaaattgtatgctagggctttcaaggggccttcggagtggctgttgattgtagcagctgaccttcacatggagggtgttccctagggttccattgtctcactatcccacattttaagttttaaacaaaaatgaaaacaagcaaacagacgaaccagtgaaacttgaaccaatgacttggctagttcagcacagacacttgggatgctggctcctgtgctgcacttcataggagcccacgggggccccagcaaagctgct

SEQ ID NO: 85501 - DNA, 544 bp, Homo sapiens
ggatggaccctccgagcgctgtggggagcggcaacgccggtggctcggggccccgcggaaaaggagctgaaggtggtggatcatcgtctggaaatgtgtctggggttgcccctgctgcccctgcagggggctcgcgctcctcctcccggaacttagggtcttctggtggcgagaaggaagaaggcaaaaaggtccggcggcagtgggagtcgtggagcacagaggacaagaacaccttcttcgaggggctgtacgagcatgggaaagactttgaagcgattcagaacaacattgcgctgaagtacaagaagaaaggcaagccagcgagcatggtgaagaacaaggagcaggtccgccacttctactaccgcacctggcacaagatcaccaagtacatcgactttgatcatgtgttctctcgaggcctgaagaagtcatcccaggaactgtatggcctgatctgctatggcgagctgcgcaagaagattgggggctgtatggatgacaagaatgcaacaaagctgaatgaactcattcaggttgg

SEQ ID NO: 85502 - DNA, 377 bp, Homo sapiens
accatttaaacatgttaaaattaataaattatttttgtagcggaggtgaaacgtgttggagatacccttctaggtatggccacacagtgtgtccaggtaaaaaatgtagtgaagacctcacctcaaaccctttccaatctttgcctgaagataaatgcaaaacttggaggaattaacaatgtgcttgtgcctcatcaaaggtaagattctgaatgctttccccacttttgtttaagatctaacttacataatttatgggaaagcacacaaatattatatatgcatctagattaccttttctcttgtatatatatgcacccatatacccaattcccagataaagatatagaacaaattcagacccccccatctcaaaa

SEQ ID NO: 85503 - DNA, 279 bp, Homo sapiens
acgtggctggggcgagtagtgagtgaggtggggcggccccctggcccctgtgggtggcgggggctgtgcagggctctgactgggtgctcccccaggggcagagatgcagccttatgtgcagatggtcctcaacaacctggtggaaatcattaaccgacccaacacacccaagacactgctggaaaacacaggtgggcacctggcccggctgctgcctgcacccctgcctgccttctggagggggggttctgggctgggaagggcatcagaaagagcctt

SEQ ID NO: 85504 - DNA, 396 bp, Homo sapiens
taaagttacatgaagaaagttggtaattcccttacagaattttttataagggaattaaaatttatagcattttggtaagaggaaaaacaggatgtagagagaaggatttgtttaaaccttctaagactatagaaccatagtctatatatagacttaaataatatagatcaatttagatgtttattttgctttatgagactctaaaagtagtttcactagaaaacacctaacatctaatacattcttgctgcctatgaataatataaatatattttctaaggaatatttctggaaattattttttattttctcagtacttgttgggcccactttatgcagctttgaaaatggaaagtatggaaatcattgaggagattcaatgccaaactcaacagg

SEQ ID NO: 85505 - DNA, 394 bp, Homo sapiens
ctaaaatgtcaatggagcccctggagattttagtggtgatacctatagcctggaaaaaggaggtcttctcggccccgagaccagtgttctgggctggcacaatgacttcacatggggcaatggcaccaacacgggcagcagctgggaccttattggccaccaacatgtgcctgatatcagtgaggtcctccttggtgaacacaaagaccacattcctgcggatatgaagcagcagtttctcccttatgctacacaggaggtttttgttcttgctgaactcgacttatgacacctgcgttaccgtttgacaggagtaccgccccagtgaaagtcccgagctgggactgtccccggatcgggtcgtgccctaatcgagagaccctcggggctcgcc

SEQ ID NO: 85506 - DNA, 486 bp, Homo sapiens
caaataggctaggaaatagtttgctagtataccattttccacaactctttacatggtttttaagtgtttatgtgtaaatactattctttataaaaggttcagtttcatcacatattggggaccatgatgctttacaaattctgttcaaggtaaagtcttaattgtaaatgcaatgtatgctattataagggagtagatatgtagtcactactttggtttctttataaatatatatatgtatataaaattctgaaatgaatgtagatattaactatattattcttgttgtcacttgtgctttaagttcttgtgttgttcgagatgccactggaaacgttaatgacactatcgtaacagagctaacaaactgtacttctgcagcctgcaaattaaactttgatttttcatcttgtgaaagcagtccttgttcctatggcctaatgaacaacttccagaaagacgaattgaatgctgcagtgcattcag

SEQ ID NO: 85507 - DNA, 396 bp, Homo sapiens
agagtcggatttcagctgaagtagaagaatctgtggacatcggatgtcaagccatgggggtcccccttcccaccctccagtggtacaaggatgccatctccatcagcaggctccagaatcctcgatacaaagtgctcgccagcggaggcctgcgcatccagaagctgcgtccagaggactccggaatcttccagtgcttcgccagcaatgaaggaggggagatccagacccacacctacctggatgtaaccaatatcgctccagtgttcacccagcggccagtggacaccacagttactgacgggatgacagccattctaaggtgtgaggtgtccggggctcccaaacccgccatcacctggaaaagagaaaaccacattctggccagtggctctg

SEQ ID NO: 85508 - DNA, 472 bp, Homo sapiens
  misc_feature (1)...(472): n = a,t,c or g
nttgatntcctcgcaatggtatcccnnnnagtcccgggtcgaccgacgcgttcggtcccttcagcagagggcacagcaggctacatttttcaggtgccccatgtgaccctgtctctgcctggagcccaagttgcaggtggtgagctgctggtgggtgagggtgtttttaaaatgcccaccgtgacagtgccccagcttgagctggacgtggggctaagccgagaggcacaggcgggcgaggcggccacaggcgagggtgggctgaggctgaagttgcccacactgggggccacagctagggtggggggcgagggtgctgaggagcaccccccaggggccgagcgtaccttctgcctctcactgcccgacgtggagctctcgccattcgggggcaaccatgccgagtaccatgtggcagagggggagggagaggccggacacaagctcaaggtacggctgccccggtttggcc

SEQ ID NO: 85509 - DNA, 545 bp, Homo sapiens
tgcaggtggagatttcacttctgctgatgcttttgcatccagttggggaaaagaagtacctgaagattcaaataattttgatggtttcgatgtgtacatgcacagggactataatgtgtgtagggtgagatccacggataattcacactggggagagacaggcactgagcaggatgaggaggaagatagtgatgagaacagctactatcaggctgatatggagtactcggaaattgttggattgccagaagaaaaacaaatcccagctaataagaaaactaagtttatgagtgctcctattaaagttttcaacacatactccaatgaagactatgacaggagaaatgacgaagttgaccctgtggctgcttcagctgagtatgaacttgaaaaacgtgtagaaaagctggaacttttcccagtggagctagagaaaggaatgtatggagaggaagacagggtgcagctgggttctcgatgggtcagccacaggaataataagtggcctttaaggatgaggttccagacttcactcagagaaagct

SEQ ID NO: 85510 - DNA, 383 bp, Homo sapiens
aaaaatctaagaattctgtcttcgatttgctgtgtaaagtctaaattgttgtaggcctaaaacataatctgaattgtctggctgaagaagatagttttgtatctcatttgctaaatattaataaagacaatagttaatatatcttctgtaggaaggtccccttggcttctgccctgatatgaaaactgaatagcttttgtgaccttacctgtgcacagcaaacaggagagccaaggctgccacacacttttctccccctgacaaattgtccattggcataaaccgtttgcctggggccacacagttatagctaattccctccaagtaaggttcttcagggttctctgggctaagaaatgcctgaaacgcatgttatttattta

SEQ ID NO: 85511 - DNA, 843 bp, Homo sapiens
ctcacctcactgtctctcccatgtacctttaccacgtgtggtggcttccccattgtgcatgtgagaaaactgaggttggatctcatgacacagtgtgtgctgaggtatcacctggagagaagcctccctgcctccactaagcacatgaaagccaggctggagtagcatctccctgagggagtgcatgggacctcgtgactcactttgaaactacgtcctgggtaatctccagtggggcttcatcgtcctgctggcccagaaaaaaagatggtctagcaggtctttcctagatctaactcttctgatgccaggcttgggaaaagggagctgcccatcttgtttcctgcacccacacttactgtccgttccagggccggggctgtgatttgaataatgcctttaaccacggggttcattttacacagtctgtgacattaacagcaatcagcctttttgtcatcttgttctcatatgacagatctctggtatcttaatgctaccaccacactcagacacatgcacactttgtctctctgcttatagaattgagagaggcgagagtagacatgctattgtgtccatgcacaattttctccaaggaaatggaatacttggcaaatgtcactgatcaccatcatgattaggttaagaactagagctctttgccaagtagctgtaggtggacagagagccataccctaattttcagccgggaggcaatggtttcctgtccagcctgacatttgccactggtttcgtggggcttgggcccaagctagggggttaaaacatgggataggccttttctccttgggccagccctggaaaccccgaaagaaaaag

SEQ ID NO: 85512 - DNA, 403 bp, Homo sapiens
aaaagactttgttcccaatttttttcttaagcaagaagtttgagtctttctctgtagtgtatttgggttttgtttaattaatttatgtgactcttcattacttctaggtaaatcttacaaaccattgtggttttatgggaggactacaaaaaaacaaaagcactggattgaccactccatattttgctacctctacagtagaggtaatatttcacgtgtcaacaagaatgccttctgattctgatgattctttgaccaaaaaagtaagtgctgagaagtgctttcaaattaaaatgctcataattgagacagttaatacagaaaatacgtaagtaagaaatcgaattgatcaagcactgtttctggttgtagtacaccactccacccagtgctgtcttgaaaa

SEQ ID NO: 85513 - DNA, 409 bp, Homo sapiens
cccacgcgtgcggcctcagcaacgaaaaatgtctttttttttcaagactgagctaggagaaaagctggtgactaaattcttatttgagactgatttctcagatgatccaatgcttccttcacctgaccaactcaaaaagaaagccccttttacaaacaagaagctaaaagcccatcagacgccagtggatatcttaaagcaaaaggctcatcagttagcatctatgcaagtgcaggcttataatggtgggaatgccaacccccgacctgccaataatgaggaagaggaagatgaggaggacgaatatgattatgactatgaatccctttctgatgacaacattctggaagacagacctgaaaataaatcatgtcatgaccagcttcagtttgaatataaagaagaaatg

SEQ ID NO: 85514 - DNA, 1333 bp, Homo sapiens
tctttttggcaaaccgactactgaaaattcacagtctacaaaagttgaggaagactttaatcgtactaccaaggaggcagcaacaaagacagtaactggacaacgagaacgtgatattggcattattgaacgagctccacaagatcaaacaagtaatgacaattttattttttataccaaaataatagaagtgaagaagagaagagatgtcgatatattaaaagaaaaaattagacctgaagagcaacttaggaaaaagttagaagtgaaacaacaacttgaacaggctctcagaatacaagatatagaattgaaaagtgtaacaagtaatttgaatcaggtttctcacactcatgaaagtgaaaatgatctctttcatgaaaattgcatgttgaaaaaggaaattgccatgctaaaactggaagtagccacactgaaacgtcaacaccaggtgaaggaaaataaatactttgaggacattaagattttacaagaaaagaatgctgaacttcaaatgaccctaaaactgaaacagaaaacattaacaaaaagggcatctcagtatagagagcagcttaaagttctgacagcagagaacacgatgctgacttctaaattgaaggaaaaacaagacaaagaaatactggagacagaaattgaatcacaccatcctagactggcttctgctttacaagaccatgatcaaagtgtcacatcaagaaaaaaccaagaacttgctttccacagtgcaggagatgctcatttgcaaggaataatggatgttgatgtgagtaatacaatatataacaatgaggtgctccatcaaccactttatgaagctcaaaggaaatccaaaagcccaaaaattaatctcaattatgcaggagatgatctaagagaaaatgcattggtttcagaacatgcacaaagagaccgatgtgaaacacagtgtcaaatgaagaaagctgaacacatgtatcaaaatgaacaagataatgtggacaaacacactgaacagcaggagtctctggagcagaaattatttcaactagaaagcaaaaataggtggcttcgacagcaattagtttatgcacataagaaagttaacaaaagcaaggtaacaattaatattcagtttcctgagatgaaaatgcaacgtcatctaaaagagaaaaatgaggaggtattcaattatggtaaccatttaaaagaacgtatagatcaatatgaaaaagagaaagcagaaagagaagtcattgtgagacaacttcaaaaaaaattggctgatcttaataaacagtgtgaggcttcactaaaggttacatcacattct

SEQ ID NO: 85515 - DNA, 416 bp, Homo sapiens
cccacgcgtccgcccacgcgtccgcatttttataaaatacactttgacacaaattctttttctatacagtttaactaattaactttatcataatagcagatatttttctgggattcctgaatacttctttttaaattttagatgaatttaaaatgaatttaaatgaacttaaaatgaatttagcattttggttctctctgacaaaataagatgttcacctcttttcattttagattcgaatgcaggctcaaggaagcttgttccaagggagcatgattggaagctttatcgatatataccaacaagaaggcaccaggggtctgtggagggtaagtactcttttcctgctattatcctacactctcagttcctacaatttgcagagaatttttttttatataaagacataaaatcgg

SEQ ID NO: 85516 - DNA, 406 bp, Homo sapiens
  misc_feature (1)...(406): n = a,t,c or g
cggacgcgtgggctcaaaaggtgctagagattatttacccctgcacatttatttaaaacatttagacgctgactgtttatgtataaaagttcctagttattcttgtgcattttattctaggttaatggaaaaggttccttatggtgtgttgatccggaatataaacccaatcttatccaggcactgaagaagcaacctttttcttcagcatcttcacaaaagtaaggatcttccatataactgtcagtggtgatttataggatttcactgtgtgagatggagaaacttaaaggtccagggtattatgtttctgttttattgtataaagaaagatttatgttttatttagnttttaagttttaagttttggttttggtttggtttggggacacagtcttactctgtn

SEQ ID NO: 85517 - DNA, 448 bp, Homo sapiens
ggtagaagctgtccctgagtagagagccgtaattcccgggtacagccacgcgtccgattaaatgatcgcacgaatgcaattgattttctaatggataggaataatgttgtaccccgtataaatactttgattttgcgtactaaccagcagtacctcaatttaatatctacatcagtaactgctgatgttgaagatttctctactttctttttcttggattcacaagataagagtgctgtaattgcgaagaacatgtattatttaacccaagacgatgagagtataatttctgcagccactctctggattattgcagattttgataagccttctgggagaaaacttctttttaatgcattaaagcacatgataaccagtgttcatagtcgggtggggattatttataatcctttcttctaaataaaggaagagaacacagctatttctg

SEQ ID NO: 85518 - DNA, 539 bp, Homo sapiens
tggagatggaggggccgagcctgaggggtcctgcgctccgcctggcggggcttcccacccaagcaggactgcaacattcaagaaaaaatagacttagaaattcgaatgcgagaaggaatatggaaactcctttctctgagcactcagaaagatcaagttttacatgcagttaagaatctcatggggtgcaatgctcgactaatggcctatacatcggagctacagaaattagaagaacagattgcaaatcacactggaagatgtgatgtgaaatttgaaagtaaagaacgaacagcatgtaaaggaaagattgccatatcagatattcgaataccactaatgtggaaagactctgatcacttcagcaataaagaacgatcacgacgctatgccattttttgtttattcaaaatgggagctaatgtgtttgatactgatgtggtgaatgtggataaaacaatcacagatatatgttttgaaaatgtaaccatattgtaagtattttttaatcttcagagaataaaaataatttaaaattc

SEQ ID NO: 85519 - DNA, 400 bp, Homo sapiens
  misc_feature (1)...(400): n = a,t,c or g
attgactgaaataatggacacactttaataaagctgttcaggtttctgattgctgtactataatttaatttctggaaaaacattacttgtctacgtttggctgccttataaagtatttaaagtgctcttgcaggctatgactttgcctgtctcctggaacaacagaaccatcattgtttaccttcttcatattgcctcccagtttgggggatggcggtttgtttactctgttccactcaacaggaactttgatcttttcatagagcgggaaaaagaccacggcatctgacaagtctctgatcatggcccacacagaaggattgtgggatatccatcatttattcagggcctacaatggtccagactctttcttacataccaatgaagagaacattcacan

SEQ ID NO: 85520 - DNA, 411 bp, Homo sapiens
cggacgcgtgggaaaaaacacaattttctaccagaggcatttaccacagatttcagagtacactgggctcaacatcctttaaggccagaatttgcagaaagtacctacttcttatataaagctacaggagatccttactaccttgaagtagggaagacacttattgaaaatttaaataaatatgctagagtgccttgcggatttgctgccatgaaggatgttcgtactggaagtcatgaggacagaatggattctttcttcttggctgaaatgtttaaatatctttacctgttatttgctgataaagaagacattatttttgacatagaagattacatctttacaacagaagctcatctgttacctctttggctctctactacaaatcaaagcatctctaaaaagaacaca

SEQ ID NO: 85521 - DNA, 610 bp, Homo sapiens
acttcaccccaggcgaggaagttcactttgagctcctggccagggagaaagcaagctctgggagacctaaactctgaatctcacttggcttttcagtctaatccgttgttgccaaagacatacttggcaatcccgaatcctcagagggctccatacgtgctgcgcttcagccttcgctcacggttcatcccacctggaatgcctttttctctccaaagatgttcccaagagccaagttaaatgtcacttccatttatcttcctccaaaaggaacatgtgttttacttcatctttctcctaaaaatgtggaagccttaatgagactaataatggttgttagtgcttgccaggcgtggagctaagagtgttacatatattatttaatctgagcaatcctgcatcatgggtactattaccagctccagtttttttgagacggagtccgttttgtcgcccaggctggagtgcagtggcatgagttcaagcgattcttatgctccagccttctgagtggctgggactaccagcacacatcaccacgcccggctaattttttttgtattttagtagagacggggtttcgccgtgttggccaggctggtcttgaact

SEQ ID NO: 85522 - DNA, 412 bp, Homo sapiens
  misc_feature (1)...(412): n = a,t,c or g
cccacgcgtncgtaaaaaagaaacagaataaatgcaaagaaagtagaagaaaataaagataagagcagaaattattgaaataataatcagaaataaaaaagcactaaaaaagatattagtaagattttatgccagtaaatttgaacatttaaatgaaatggttaaattccttaaaaatacaactaaatttgatatatttttagggaatctgaattatcctatatctattacagaaattagcttcataattagaaatcttcccacaaaaaagagcccatttaaatttaccagcaaattcttccaaacatttaaggaagaagcaatatcagttatatgtaaactcacatcattagaccagcataaccttgaccccaaagatgaggggtattaaatgaaaataaatccacagttc

SEQ ID NO: 85523 - DNA, 491 bp, Homo sapiens
  misc_feature (1)...(491): n = a,t,c or g
agaggacctgaaacggatagagcgagtgcacggccacgagntncggggtcgacgccacgcgtccggcgagaggtgagggcagttaccagtgccaatatccaggagtttgctggctgcaagaagatctttgggagcctggcatttctgccggagagctttgatgggtaagagtgggcatgatgacctgagacagtgtcagggcagacagagtcctgaggatccagatgtggcagcatctcttggggatggcaggagacagaagtggggggatcaagaatgcaaagaaagcagatgggagaccagaggagcagggcctttggtgggtgggggtgattatttttgtaaatgacgtgctatccgcgaacaaggacttgtatggaggtcanaccatctagataaaagaaaactccctttgagttcatagcanctttatttcaattagtcccccaattggaaacaactcagacgcgcttcactaggagaaggaatat

SEQ ID NO: 85524 - DNA, 143 bp, Homo sapiens
aggggggcttttttttttttttcccccccccaaaaaaagggttttttttcccccccttttttttttttttcccccggtttttttcccccccccttttttttaaaccccccccccctttttttttttttggcccaaaaaaaaaa

SEQ ID NO: 85525 - DNA, 852 bp, Homo sapiens
  misc_feature (1)...(852): n = a,t,c or g
ccaagagaggtggcaaatggctctgcggagccaacgccaccagcttaggagctgttaccatgggtgtcctggggggctggtgggaatggcccgtccaaggccagggccctggagaggggctgaggaagggctgccaggtcaggagatgcctgcctgcctgcctgcctgcctgtctgtgtctgcagatcctctgggctccctccccaactccactgggagatgatgcctctctgatggtctgtaccaggcaggtttggggatctatgcactaaatggcctcttacaataaacaatgcacactgggatgaaggttctgaaacgtctcaaatctgtttaactttcgcctttctcaaactgagctggccagggatccctttcataaggaaccaagctctgccccgcctctgggatgggctgcttcaggcagaggcttgcccaccttgggacccaaccatgctgtgtgcccttcctgggatggtctcttcattccgcctggaaaccagcccagcatcttcaaccctggagccgggtgtgaatcctgattcaccactgactcacatcgactcctcttttgtaaaatgggccaatgtccacctcacagcagagttgcggggaccaaatttctccctgcagcccatgttcaaccaggcattaaaaacaacacagtgaaagaagccggtcacagggtctgcctatcacccatttacaccagatgtccaggagagacatatacacagagggcagaaaggggatttgcggntgcctggggctgggggaaccgggggggcttaaagggggngcttcttttttgggagaaaaaaggtttgaataaaccggagcggcgaggtcagc

SEQ ID NO: 85526 - DNA, 403 bp, Homo sapiens
cacaaaatcatgttacccccacgaaacagaggaactgtaacttacattgctccacctgggaattatgatacctctgtaagtatcatttgaactttatcctgcagagtgcctctatttctatatgatagctgcccagttttagtgccctaagtaattaaagaattgatatttaatacataagttttgagtaactcctataatttttgaaagtttttgtttgtttatttttaacttggatttagggatgaaaaagcagaacatagtatttctttttaaagaaatgtaacagttttctaccatattaactgatgctacatttatttaaagccctagttgtttaggcatagaatagactttgattttaatggtgtatcaatattcacatagtaattatataatggga

SEQ ID NO: 85527 - DNA, 435 bp, Homo sapiens; identical to SEQ ID NO: 66462

SEQ ID NO: 85528 - DNA, 388 bp, Homo sapiens
gtctgccctcacctccccctgcagcctgggatgggtcagggaatggggatggtgggggatctaaggtcccctcgacccacatgccctctccctctgccccagctcacactggtggtggtccaggtcagcatcctctactacgggggccaccttgtcatctcaggccagatgaccagcggcaacctcatcgccttcatcatctacgagtttgtcctgggagattgtatggagtccgtgggctccgtctacagtggcctgatgcagggagtgggggctgctgataatgtgttcgagttcatcgaccggcagccgaccatggtgcacgatggcagcttggcccccgaccacctggagggccggggggactttgagaatgggaccctcaccc

SEQ ID NO: 85529 - DNA, 512 bp, Homo sapiens
cgatttcgtgggaagctcagattgcggaaatcattcagtgggtcagtgacgagaaagatgcccggggttaccttcaagctcttgcttccaagatgaccgaagagctcgaggctttgaggagttctagtctggggtcaagaacactggacccgctgtggaaggtgcgccgcagccagaagctggacatgtccgcgcggctggagctgcagtcggccctggaggcggagatccgggccaagcagcttgtccaggaggagctcaggaaggtcaaggacgccaacctcaccttggaaagcaaactaaaggattccgaagccaaaaacagagaattattagaagaaatggaaattttgaagaaaaagatggaagaaaaattcagagcagatactggtaaattaatgttgtgcgattctgcattatttgaatataagtatttttcaaatgaatgtttttattttcttttcgacttaatagttactttagaagcacctacagaattccaaattcagtat

SEQ ID NO: 85530 - DNA, 1003 bp, Homo sapiens
ccttcctcctactcatctgacgagctgtccccaggcgagcccttgacttcgccgccctgggcccctctgggcgcccccgagcggcccgagcatcttctgaaccgggttctggagcggcttgctggaggggctaccagggacagcgccgcctcagatatcctgctggatgacattgtccttacccattctctcttcctcccgacggagaaatttctgcaggagctacaccagtactttgttcgggcaggaggcatggagggccctgaagggctgggccggaagcaagcctgtctagccatgcttctccatttcttggacacctaccaggggctgcttcaagaggaagagggggccggccacatcatcaaggatctatacctgctaattatgaaggacgagtccctttaccagggcctccgagaggacactctgaggctgcaccagctggtggagacggtggaactaaagattccagaggagaaccagccacccagcaagcaggtgaagccactcttccgccacttccgccggatagactcctgtctgcagacccgggtggccttccggggctctgatgagatcttctgccgtgtatacatgcctgaccactcttatgtgaccatacgcagccgcctttcagcatctgtgcaggacattctgggctctgtgacggagaaacttcaatattcagaggagcccgcggggcgtgaggattccctcatcctggtagctgtgtcctcctctggagagaaggtccttctccagcccactgaggactgtgttttcaccgcactgggcatcaacagccacctgtttgcctgtactcgggacagctatgaggctctggtgcccctccccgaggagatccaggtctcccctggagacacagagatccaccgagtggagcctgaggacgttgccaaccacctaactgccttccactgggagctgttccgatgtgtgcatgagctggagttcgtggactacgtgttccacggggagc

SEQ ID NO: 85531 - DNA, 403 bp, Homo sapiens
cgtctgtgaccatcagggtttggagtcttctctccctatgcatgtgtgttaaacatcttccacagacagcctttgccaatgggtcgcttagggtgggaccactgagaaattcctgtgtttctccctagatcaaatttggaccccttcaaccagtacactgaagaccagatttgggatgccctggagaggacacacatgaaagaatgtgtaagtgaagagcttaggggaagccgtgctgagatggtgagggtggaagcacagcagtgcccttgccacaccccgtctgctctggccgtgcctccaggatgcctgtggacaaaggcttcgtggcagggctctccaagtctttcagatacctgggaaaagctgatccctctcaaccccaccggccacactgtctacg

SEQ ID NO: 85532 - DNA, 399 bp, Homo sapiens
tccactaaaagcccttcagtatggtactgtatttggaaatgggaaaacctcggattatctgctactgggaaactttgtgtacactgtgagtgcgggatgtcggtctcgtttgcgtgtaaaatcaaaacctttcatctgtcctcattttatttttaaatttaaacgtgatatgagtgtttctggatttaagggttgtttacggttccctttaaaaattaagtaagacccagggcttataatggggtcttatttcatttttatcaaataatgaaataaaataactgaatgataggaaatcagtgccgttaagtagcagaaggaatgaggttttgccaaatctggggggtctcctttctcttggcatcaacccaccgaagtagtaaaagacaagcaaaagtg

SEQ ID NO: 85533 - DNA, 672 bp, Homo sapiens
gggagaacccctttgatggagggcatgcttgtgttattcgtggccaagtgatgacatcagatggaacccccctggttggtgtgagcatcagttttgtcaataaccctctctttggatatacaatcagcaggcaagatggcagctttgacttggtgacaaatggcggcatctccatcatcctgcggttcgagcgggcacctttcatcacacaggagcacaccctgtggctgccatgggatcgcttctttgtcatggaaaccatcatcatgagacatgaggagaatgagattcccagctgtgacctgagcaattttgcccgccccaacccagtcgtctctccatccccactgacgtccttcgccagctcctgtgcagagaaaggccccattgtgccggaaattcaggctttgcaggaggaaatctctatctctggctgcaagatgaggctgagctacctgagcagccggacccctggctacaaatctgtcctgaggatcagcctcacccacccgaccatccccttcaacctcatgaaggtgcacctcatggtagcggtggagggccgcctcttcaggaagtggttcgctgcagccccagacctgtcctattatttcatttgggacaagacagacgtctacaaccagaaggtgtttgggctttcagaagcctttg

SEQ ID NO: 85534 - DNA, 437 bp, Homo sapiens
  misc_feature (1)...(437): n = a,t,c or g
ctcctaccgcgcctctgagcagaagctgcgtgtggagctgctcagcgcctccagcctgctgcccctggactccaatggtgagtggaggctgcctttggccactctccatggncccgtcctggccctcctgtctcagcgaccctgggggcttcgctcaccctgcaggagctctgggtgcatttcctccagttaccaggaggggtcagtgccgctgagcagagcatagctgctggggtggggtgcctgggagaccctcagctgacgcacactccccggccacttaccaggctccagcgacccctttgtccagctgaccttggagcccaggcatgagttccctgagctggccgcccgggagacccagaagcacaagaaggaccttcacccattgtttgatgagacctttgaattcctggtgcctgctgagccgtgccgca

SEQ ID NO: 85535 - DNA, 440 bp, Homo sapiens
agatcagtcctgagaccgcacagttatcgtgctttcgacgggagcctgctgtacaatgcaggcaacatctgcaaccacttcttcacccgaggcttccttaaggcgggcaccagggagtttgagcctttgctgaagccacacgtggctgtgaagaaggtcccgtatgtggatgaggaggggaatctggtaaagccgctaaaaccgaacgggataaagatggagaagtttgtgtttgatgtgttccggtttgctaagaactttgctgccttggaagtgctgcgggaggaggaattttccccactgaagaacgcagagccagccgacagggacagtccccgcaccgctcgccaggccctgctcacccagcactaccggtgggctctgcgggccggggcccgcttcctggatgcccatggggcctggctcccagagctgcccag

SEQ ID NO: 85536 - DNA, 1335 bp, Homo sapiens
tttcgtcctgaagctgagtgagaagcaggaggtgaagaaggagctggtgacagagatcctgacggcactgggcctgatgtcgtgctcccacacgaggacagccctgctctctggcgggcagaggaagcgtctggccatcgccctggagctggtcaacaacccgcctgtcatgttctttgatgagcccaccagtggtctggatagcgcctcttgtttccaagtggtgtccctcatgaagtccctggcacaggggggccgtaccatcatctgcaccatccaccagcccagtgccaagctctttgagatgtttgacaagctctacatcctgagccagggtcagtgcatcttcaaaggcgtggtcaccaacctgatcccctatctaaagggactcggcttgcattgccccacctaccacaacccggctgacttcagcgggactgacttgcccttgggaagtgagtgtgaatctaaactgagctctccactctggtgtccccagtgcttccaggttgcctctggcgagtatggacacctgaaccccatgttgttcagggctgtgcagaatgggctgtgcgctatggctgagaagaagagcagccctgagaagaacgaggtccctgccccatgccctccttgtcctccggaagtggatcccattgaaagccacacctttgccaccagcaccctcacacagttctgcatcctcttcaagaggaccttcctgtccatcctcagggacacggtcctgacccacctacggttcatgtcccacgtggttattggcgtgctcatcggcctcctctacctgcatattggcgacgatgccagcaaggtcttcaacaacaccggctgcctcttcttctccatgctgttcctcatgttcgccgccctcatgccaactgtgctcacctgtgagctgagctgccctgggcatggggcaaggcctgtgtcctcagtccccttagagatggcggtcttcatgagggagcacctcaactactggtacagcctcaaagcgtattacctggccaagaccatggctgacgtgccctttcaggtggtgtgtccggtggtctactgcagcattgtgtactggatgacgggccagcccgctgagaccagccgcttcctgctcttctcagccctggccaccgccaccgccttggtggcccaatctttggggctgctgatcggagctgcttccaactccctacaggtggccacttttgtgggcccagttaccgccatccctgtcctcttgttctccggcttctttgtcagcttcaagaccatccccacttacctgcaatggagctcctatctctcctatgtcag

SEQ ID NO: 85537 - DNA, 543 bp, Homo sapiens
ggctgccgcgttcttctgtagtgtggcgatcgtggctgtagctggagcagcaaatggcacgtaactggccccgtagatcccggcagtaggaattctctgaacgtttggagccaccgtgtatactggagttattgggcggccctgaggagaagagacaaaaaggagccttcctgaacacgtgtatgtacctatcatccattcattcaacaagcctctcccagaagacgggaatacaaagacacaaaagcaagggagagaaaggcagaggggcgggcaaacagcaattattgtaagcaagtgggagaagagccactgaagaggtaaggtggagctgcatcctcaaactcagtgatgccaccttgtgaaagtgagaggcctggaaggctgagggaaaggtgaaatacagttgcccctcagtatcctcacaggtgattggctctaggacctccgtggataccaaaatcctcagatgctcgagtccctgagagaaaatggcgtatttgcatttaacctatgcacatcctcctgtatactgtaaaaaaa

SEQ ID NO: 85538 - DNA, 417 bp, Homo sapiens
attacttaggggatggacttgctcagataccaagttgcctctctctgcatccaatgtcatgttcatgcaaaatcctgcctccagtgggcattagcctggtagctcagagcacaacacttcctggtgttgggctttgggtggcaaagttaagctctctaggcttcaggggctgagagatgtatgttctatgctgatactcaaagctgcacacatagtctgcagggtcagaactgccgacttctgcttcgtgaagaggccacccacatctaccggaagccaggtaagcccaagcctatgcctttgcagccatcctgggaaactgggtctggggaagggactatttaaacacttggtgagttggaggacagtggcttttgttggccaaagttctgggctaggtggcactcacttgaggag

SEQ ID NO: 85539 - DNA, 407 bp, Homo sapiens
caatgtgaaaaaggacaagatgaagtcagtttggcaaacagtcctttgcctttcaagcagtctccaatagaaaataactcagaacctttggtaaagaaaattaaacccaaagtggtcagtagaacaatttttcacaaaaaaagcaaccaactcgaaaaccataccattgttggcacaagatcaaccaggagtggatctcggaatggggaccagggggttatgaacgcagggggatttgtggagagagcctgtactctggggagaataaggtcattgcctaaagccttgatcgacatgcatttgtcaaaaagtgtctctaaatctgattctgatctcattgcctatccttccaatgagaaaacatcaagagttaactggagtgaatcttccactgctgaacacagttg

SEQ ID NO: 85540 - DNA, 403 bp, Homo sapiens
gaacaacctaaactgtgctgagccactgtttgaacaaaataactcacttaatgttaatttcaacacacaaaagaaaacagtctggcttattcacggatacagaccagtaggctccatcccattatggcttcagaacttcgtaaggattttgctgaatgaagaagatatgaatgtaattgtagtagactggagccggggtgctacaacttttatttataatagagcagttaaaaacaccagaaaagttgctgtgagtttgagtgtgcacattaaaaatcttttgaagcatggtgcatctcttgacaattttcatttcataggtgggagcttaggggctcatatcagtggatttgttggaaagatatttcatggtcaacttggaagaataacaggtcttgaccct

SEQ ID NO: 85541 - DNA, 389 bp, Homo sapiens
cacttccagaggaaatgggtgatatgcaaaaattaaaagtcattaatttaagtgataatagattaaagaatttaccctttagctttacaaagctacagcaattgacagctatgtggctctcagataatcagtccaaacccctgatacctcttcaaaaagaaactgattcagagacccagaaaatggtgcttaccaactacatgttccctcaacagccaaggactgaggatgttatgtttatatcagataatgaaagttttaacccttcattgtgggaggaacagaggaaacagcgggctcaagttgcatttgaatgtgatgaagacaaagatgaaagggaggcacctcccagggagggaaatttaaaaagatatccaacaccataccca

SEQ ID NO: 85542 - DNA, 387 bp, Homo sapiens
tcaaggcatgttttggcctcccccgctccttgcagctagaacccagcagggagctcgagctttgggaattaagtatcgtctccgctcctcgtggaggccgcaatcctccggcaagattgaaaggaccagtcacactttaaagcaaaccctggcaaaattatgccaggaaacttctgggtcttggtatactctgtcatctatcgcgttcatgagaatacaaacggtccccaaagcgaaaaggaaacttagtctttttgaaatgacttatgggagaccctccctcaccttagacctgttaatcaaacctgaaactcagtgtattgtaaaacatattcaaaatctaggccaggtacggctggctgtccaggaatatggcaacacagggct

SEQ ID NO: 85543 - DNA, 398 bp, Homo sapiens
tcgtactcatgcacccccggtaaatgcagcaccaacaggaaatgctcgctgcgcacgtgcaggaaggtttccgaaccgctgatctcggccacctccacggtcaccgccagttccaggtcatcgtcgttgctcggcaccaggctgatatggctggggcgcacgccaaaccggaactcgccttcgccgatgggacgcagatccacgttcaacgggaagtgcacgacattggcaaaactcacttcattgccactgatacgccccggcatcaggttgatcggcggctcggaaaacagctcggcggccagcaccgtctggggctggtgatacacctcggcggccctgccgctctggatcacccggccttcgtgcaggatggtggtggtgccacccagggccag

SEQ ID NO: 85544 - DNA, 406 bp, Homo sapiens
cccacgcgtgcggagagcaggacgcggtgtaccaattcgctcgggaaaacggtattgcctttatacagaggaagcctttgacaggctgcgtcaaactacggctcctgagaggccgcgtactaatttggcacctgacatcctgcggctgaaagcactacgaattgacaatgccctcaggttccacttcatggagccccctccagcacagtcgatggttcaagccttggagttactgtatgctctgggaggtctggacaaagactgtcgcctaactgaaccgcttggcatgagaattgcagagtttcctttgaatcccatgcttgccaaaaagctgcttgaatcacgaaacctccgctgctctcaggagaatctaagcatcgctgacgtgatgcacaagcacaatatc

SEQ ID NO: 85545 - DNA, 451 bp, Homo sapiens
  misc_feature (1)...(451): n = a,t,c or g
gcgggtnaactgagccgtctcgagcacntccggnccggaattncnnnntaacccacgcgtccgctaccaggctgggcgcaccccctgagcatcttgctccagtctgtttctgatacccttccctccacaccccccagcatctggcctctgccctttgattagagatggccaggtcctccctaagcccagctgcagctcctcctgcccctccatagggtgctgggagtgggggtggggaggtgcagggagctctccaactccaagtccagtgtgggactgaccctgtgggggggccctctgggcctcatccagttacagaagaacaaggagcaggaagaacagcttggagagatgatccaggcctacgagaaactctgcgtggagaagagtgacttggagacagagctgagggagatggtgaggcctggggagccggaggtgcttgaggatg

SEQ ID NO: 85546 - DNA, 424 bp, Homo sapiens
  misc_feature (1)...(424): n = a,t,c or g
cccacgcgtccggcttgtctgaggcctctcattcaaaaaagactgttaaaaaggtggtggtagtggaacaaaatggttcttttcaagtaaagattcccaaaaattttgtttgtgaacactgctttggagcctttcggagcagttaccacctaaagaggcacatccttattcacactggtgagaagccatttgaatgcgatatatgtgatatgcgtttcatccagaagtaccacctggaacgccacaagcgtgtgcacagtggtgaaaagccttaccagtgtgaacggtgtcatcaggtaaggctcatccctgctacaataccccacacacacttttccttccccaagaatcagggccaccctccactcctgcctgacaaaagagccaccagcgttactcgccataatagttaacacatcggggn

SEQ ID NO: 85547 - DNA, 415 bp, Homo sapiens
cggacgcgtgggtctcgaaagattcctgtccttggaaaacatactaagagaatcacttgtggatgttggaatgcagaaaatctgcttgctttaggtggtgaagataaaatgattacagttagtaatcaggaaggtgacacgataagacagacacaagtgagatcagagcctagcaacatgcagtttttcttgatgaagatggatgaccgaacctctgctgctgaaagcatgataagtgtggtgcttggcaagaaaactttgttttttttaaatctgaatgaaccagataacccagctgatcttgaatttcagcaggactttggcaacattgtctgctataattggtatggtgatggccgcatcatgattggtttttcatgtggacattttgtggtcatatctactcatactggag

SEQ ID NO: 85548 - DNA, 764 bp, Homo sapiens
gttggaaggcactgagagggggcaggggcagctgacacagggggcgctggggtcgtccctgctgctcatgaagccagcctggcagcgctcacagtgggccccttcggtgttgtgctggcagtccacacagacgccagagccagggaggcagcggtctgagtgtccatggcactgacaagggacacatcggcccaggaagagacctttgacgtcccgatagaagccgggggcacattcctggcatgagtccccccggtagctggcggggcacaggcacagctccacattgctggccagggccccctggcctgctgggctggccacctccagtgccaccctgcgcagggagacagccgaggagatctgtgagaagagggcacggatctgcagctgctccaggctggccagcaccatcatgagctcctcgcgggacacagtgttgcgagtctccgtatgccggaagttcccctccaccagctgcagctgcccacggtgaacgtggccaggcgtggggtatgccggctccaggaatgtgatgctcatctggttgccctgcagcaccacatccggcctgctctccatggggacaaagacatctccccgctgggtctctgagtacagttcataacggagggtcccaccgtaggatgacacccggtcccccaggtaggagggtggggcctgccagtacagctcggggaaagcctcgggcacagcctcaggcacgtgccgcaggtctgcacggagcatctccatccctggct

SEQ ID NO: 85549 - DNA, 410 bp, Homo sapiens
  misc_feature (1)...(410): n = a,t,c or g
cggacgcgtgggcagaggcaggaggtggggacggggacggggacaaggctgggggccttgtgtgaggataggggacagagaaccagggtgggcactgggaacgggggcagggatggagatggggacagggcttggaagaacagggtagagtggggtacagggcttatgacaggggtggggactggggcaagcagcangaaccagcgatgagggtggggaattggggttgggatagggctgggggccattggacagcagttgagggcctggggcgggagactgggtgacggggcaaaggttattgacctgagtgggagctggggacagggggtaagctcctccctgagagtttctctctggctgggacctgcttggtctacttgtctccgctggncagatactgcccaggg

SEQ ID NO: 85550 - DNA, 439 bp, Homo sapiens
  misc_feature (1)...(439): n = a,t,c or g
caatgattctcgcatgctggttgctttaggagaatgttacgagaaactcaatcaactagtggaagccaaaaaggtaccttaaattgggtcctgaagaatttgagtggaaatctgctgtttagatgaaggttgggctatctgtgctctaatttttcccttattctgatctaggtgcataggaaagtctgaatatttatagatacatagtctgaaagcaaagctgggccaaggtcatcagtgggaatgtcagtgtgtagcctanacctatcagaactagtaaaaatgtcttgcattctataaatctgaacttctgggaggcttgcagggtcttaaccttcatatgatttagttgtgacacatgggacaatggtcaaaatgaccagtttatttttttgacagtgttattggagagcttacgccgtgggagatgtggagaaan

SEQ ID NO: 85551 - DNA, 637 bp, Homo sapiens
  misc_feature (1)...(637): n = a,t,c or g
gcctgaagtcatttgatctcccaaaatgagataatctccaatgtaccatatgtttgtaaagcagacttggcctttagtctcgagagctgtattccaggaaaggaaccagttaatgcgattttccttgactgctttctgccttgccctatgagacaaacgcatgggcataaattggtcaaatgccataagtgaggaaaacggctaattgttagacgacagctatgcacagctttattttacaaggtccagcctggttccagccaggttaaactaatttgtaaaggaaatgcatttactgcaggaagcatgaagcaactgtcatgtgataagaaagtagacattccttttcactaggcgtggacttggccacatttatttctacaggaaaagcttgtgatgacttgcctttatgaactgaccgtaaatctcattctctccaaggtttccagatgcatttgtgaccttcagttcctttcaaaagaagtttcctgagggacccggggatttgcactgtgctgacagccaaaggcggagactggctganacaggtgagtgatatnntttaggtgatctgaagggagggagggggactcctcagggctgaaaaccgggtacaatgcttgccccaccccaccct

SEQ ID NO: 85552 - DNA, 499 bp, Homo sapiens
tttttttttccatctgttctaccaatgccttctgctttgcttttagtaggttaagttgctgtttatgatgaacaagctgctttctgatttttctggaatataatctatcaaggctactgctgcctttagaagatctatttaagctctgagtgtgtagattattgttaataaaactccactgattacctgtcagaaacctctccctgtctttaccattcaaaggtttctttgcagctgctgcttcatcttcaacagttgccacataatccagcaacctggacaccagcataacaacccaactgatcatgggaatatctagtactccttctgtcctcctatgcatgggtaactgtggctgaagaggtgacaataaattatccaagagattaagtaagctttctaatactccactattactaagtgatctttgaccaatgcaggaaagtaacatgaagaccctatcctgtggaaagatgagaagctgttccgaattgtacaa

SEQ ID NO: 85553 - DNA, 637 bp, Homo sapiens
aagttttatatgcttccttctttcactttcaatatcttctgctagggtctttgttaaattatggtctacagaacctgtctggcacatgatttaattgttttggaaaatttgccttttagtttctcagtgctcttaggcagttcagtgactctcctgacagggtcctttgtcttgcaggcattgagttaatcgccgccttctatggctgcctgtatgcgggctgtatacctgtgaccgtcagacctccacatgctcagaacctcacggccacgctgcccactgtccgaatgattgttgatgtaagtaccagctgtatcttgccttgtcctcatctcctaaaatccagattcagacaactaaggatccttactaattttccaattttgttaagtcaggaattcaaatttgtcttctggagactacctcctttttgttaatccagccaaagcagtcatcattattcagtgaaggaactgggggaaagtggttattggtgagatacagaattgtgtgcagttattatgaacatccccgaccgcgaagcacccacccacccttcctcaagttaaacaccccggcagcccggccttggggcacttgccttgtattccaacgacttaagaggcttaagtgggag

SEQ ID NO: 85554 - DNA, 342 bp, Homo sapiens
agaagggaaacatcatgggaagaaagactattttgtttctgattgcaggggtccttggggcatattatgtttatactcctctctcagataatattgaggaactctggtgactggtgtggatagctacacctgtgaaaatggtaacaaatttgctcatagaagacccagatgtcaagatcaaactcaagcttcagtctttaatatatcctgcccttcagacgcttgacatggatttactatcacatcagaaaaaactagactctctagttctgtccaaaccattcatggtcaggttctgtagggaatactttaccacagacagatcacttgaaaaagtcatgt

SEQ ID NO: 85555 - DNA, 490 bp, Homo sapiens
  misc_feature (1)...(490): n = a,t,c or g
cgaattgccnnncggggnccaccattgatgccacattgatagtcatggnacggaactnccgggnngacccacgcgtncgagggccttcgagacccagatgacgcgcctggaggctgagttcgtgcggcgggaggcacccgccttcaagctctactcattccacccgtggaggactttcctgtctacagtgcgtcccagaacactcccagaaagaaaatgggcacccccgtaaggatgatgatgacgccnaccccacagaccataggctctgagatgaagctgaagaccagcaggaaggcccagaagaccaagtacgccacggggatgagaaggttcacctggggaagggggagcagaaacaccgatggtgcagggcctccagctgtctgtatcccccacccctgggggtctggggaattttcctcccttccctgggagctgaggcctgaagggcaattgcacccactacaccccctcttggcgacagccc

SEQ ID NO: 85556 - DNA, 502 bp, Homo sapiens
  misc_feature (1)...(502): n = a,t,c or g
gggagttnacgcgctnnnnaaaaaacttaggngcatcgangnatctgncgaanggcaannnngggnngacccacgcgtncgcggacgcgtgggaaaatgtctctagacatcaatcattttacttttttactagaatcaggaattttcctaggtccgcagaaacatctttttcaaaattgccaaaggctgctttaagatactttgtcattttaaacctagtagatattttggttttccttttaggtgttgacagctcttctaccacaagcagtgcttctccaatgcccaacagttatgatgccctggaaggaggcagctacccaggtaatttgttttgtgcttgcttgatcttcattttgaaagttattgaccatcagttgccttcaaatgtgaacatgtattacacataatagcaggctatatttttaacaagaaaaaaaggacatttttctggcacttctcagcctcaacttaatagcgttgtcactaacaactatgaagn

SEQ ID NO: 85557 - DNA, 398 bp, Homo sapiens
  misc_feature (1)...(398): n = a,t,c or g
aaaatcttcccaaactccgtgaggatattaaagaaatctccatgtctgatctcaaagactttttggaaagtattcgaaaacattctgacaaaataggtgaaacagcaatgaaacaggtgagattaaaaataattttgatttaatattatttagtaatacaggatctggaaaatatccaaggtttacttctttaacttacataaaatgcttatttttgttttacctttttcttatcttttctggttattgtttagaaaggattctatcagtgttttctttggcttcacatttattccttttttaagtaaaatcagtctaacatgaattctttagttactgcccgaactctcagcattcttctccatatatgtggngntatgttatcctttaccaccagc

SEQ ID NO: 85558 - DNA, 392 bp, Homo sapiens
gaagtgcaaagaaagaacccagctgccaacctcattcagtgtgtttggcgtagttacgcagctgatgagaaatctgtttccattgcaacctggaagccacacttgaaggccttgcacacctgcagccctaccaatcagaagctaagttttaaggagcgagtgcgcatggctagccccaggggccagagtattaagagccgacaagcctcagtaggtgacaggaggtccccaagcaccgacatcacagccgagggcagtcccaccaaagtgcagaagagctggagcttcaacgaccgaacccgcttccggccctcgctgcgcctcaaaagttctcagccaaaaccagtgatagatgacaagggccacattaagatcaatgggactgtcattct

SEQ ID NO: 85559 - DNA, 780 bp, Homo sapiens
  misc_feature (1)...(780): n = a,t,c or g
agctgagattggtcataactgacattatcatatgacttgggtaaaggctacctgatatccaggggccacatcaaacacagggatcacccttgaggctgacaaacggagggagagacccagcagccgcatcctcttaggggagaatctgggcttgcttttgccaagataacctgttgagattttgttttaattttcaagattgagaacacagaagcagtacatcaacaattccaaaagtttttgactgaaataagcaaactcactaatgattatgaactgaacataaccaacaggctgtttggagaaaaaacatacctcttccttcaagtaagtttgccatgcctaccatatctgtgagtggtattctggaatggccaaatggccctggtaggactatgggtcctgaagtcgtgctgcctggctctggccacatccctgtggtgcttttccatcctgatctacagatattcagaactgcagggagttcctttttagtcctggcaatctgaacctgatttttgcctcatccccagaatagctgcataaaaatgtgcagcaggaactcaatgtgagatgcccagggccttaaaaattctcttactgtattagtcatcctaatgtatacataaatttatttagagatgttggcaattgataaattgagtttttaacctctttttattccttccttgtttctcctaaagaaatactttaaattatgtttgaaaaatattatcatggccatctctgggaacccggntgatttttgggaaaaaggca

SEQ ID NO: 85560 - DNA, 571 bp, Homo sapiens
  misc_feature (1)...(571): n = a,t,c or g
tcctttcagttcacaaatgctgggatatgctctttcatattttgaagacccagtagagattttttaaggactagtgagtttacacaagcgtttcgaaggctgagcagttttcagatattatcactgtagtctaatattcaaaataattataaaaataatttacaaaataataatctttttaaagtgactgaggagcctgaagaagagcctatttcagaagaagaaatcccagaagaaccacctagcatagaggaagttgaagaggtggcaccacctagagtgcctgaagtgattaagaaagcagtacctgaagcacctactcctgttcctaaaaaagtggaggcaccaccagctaaagtgtcaaagaaaattcctgaggaaaaagtacctgttcctgttcagaaaaaagaggcacccccagccaaagtgcctgaagtaccaaagaaagtcccagaaaagaaagtccttgtgcctaaaaaggaagctgttcccccagctaaagggagaactgtccttgaagaanaagtatcagttgccttccgccaagaagtagtagtaaaagacagactag

SEQ ID NO: 85561 - DNA, 577 bp, Homo sapiens
tttacatttcatggctctttctttattatgaattttcttatgttgcttaagggctgaacttcggggaaaagctttcccacattcattacatttataaggtttttccccagtatggagtctctgatgttcaacaaggcctgagctgtgccgaaaggctttcccacatttcttacagtgatagggtttttctccagtatgaattctctgatgtccagtaagggttgagctctttgtaaaggccttcccacagtcacgacactgatacggtttatttccactgtgagttttctgatgaccagcaaaggatgagctatacctgaaagattttccacatttactgcagtgatagggtttctccccagtatgcattctttggtgactaataagagttgagctcttcctaaaggcttttccacattcattacactgatatggcttctcaccagtatggattttctgatgttccaacacagttgaattatccctgaaagctctcccacacttgttacatttaaaaggcttctctccactatgtattctttcatgacgagtaagagctgcattctgagcgaaggct

SEQ ID NO: 85562 - DNA, 411 bp, Homo sapiens
atgactctgtatgaacagtgtgtgtgtcgtatctgtggagcatcgtcagatcctctaccttttacagaatttgtgcggtacatttctacaacagccttatgcaatgaggttgaaagaatgttggaaaggcatgaacgctttaaacctgaaatgtttgcagaattgctacaagcagcaaatacaacagatgactataggaaatgtcctagtaactgtggccaaaaaataaaaattcgccgtgttttaatgaattgcccagagattgttacaattggtttagtctgggactccgagcattctgacttgaccgaagctgttgttcggaatctaacaacacatctttatcttcctgggcttttttatagagttactgatgaaaatgccaaaaatagtgaacttaaccttgttgga

SEQ ID NO: 85563 - DNA, 1368 bp, Homo sapiens
gcgaccgccaccacccgcggcagccaggactgatgcatgctagtcaatcatccggtcagcctcgtcgataatctgcaggagacagggagcccgggactgggtggcgcggccctgagctcaaagcccaggcccctggggcggggacctaccaggaagcggcgtgcatgcgaggctcgaatcctcggggtctcggtcgatcgaggtccaccaggcggccgggggtggctaccacgatgtcagccaagcagcggtacccatcagctctacagaccagagagcagctcgagagaaggaagctttctcaagggcttccggatagcaagacgctgcctcaccccacagccccgactccaccccacatgggaagggggccggtgggagctcctcctcttcacgggaacaggtggtttaaagatggtggcccctcctctgctcccacggtgcctcaggccacctgcagggctgatgcagggaccccctgaaaaacccgcaccctgacacaacctacgttttctggacgaggctctcctgctccttggccagagacttctgttcccgtaatcagggagactctcagaggtgtggcatctgtgtagatgttgaaaactttgctcacctgcaggagaagtctgtcactggcctggaggtagctggtgtccacctactgcagcaaaaaggaccccagatctaatctgggtcccccaggggctgatcgctgtgcactcagcagggaagctgaggcgggcggtgccacgctccaggtctagggtccacatacctgccgggccagctccttggtgggcagcacaaccagggcacggatgtggcagaccactctcgaaagcagggcctgcaccacagggatgacgaaggccagtgtcttcccactgcctgttggggcagaaacacagaggtcgctaggccggtagccacctctgcccaccagaaacccacaggctgcgctctccaggagggcaggaatcacagctgcctggactggaaagtaggacgagatgccgtgtgcccgcagctgcttctgcaggtcaggatggacgtcagggatgtcctcgataggaaccaggtcttcggtgacattccttctgacacagttaggctcagccagccaccttggcaggaaaggctggacctgccatcaaaaagaaagagaggccaggtgagcgctttccaggctctcgcgcagaagcccacggtggaaaaagctaggggagggaggctggggaaacctctgtcgtcttcagctccttctcagccccaggatgcgctttccatacagccttcagaagttaaacagtaaaagcagatgccactccctgagcaaactcactctgtagcctcccgacagcaacg

SEQ ID NO: 85564 - DNA, 409 bp, Homo sapiens
  misc_feature (1)...(409): n = a,t,c or g
ccattgtcattataactgtcaaacatcaccatcatcataaccatcaccgtcactatcaccaccatcatcatcaccatcaccatcattatacatttgaagttacagccagtagctacacatgacttacttcatcttgttttctgttatttcgtttcagtttgattgataatgcactcttccctgataaaggagttttgtgtaggcagcactgattcactagatgcaaaagagttctgattatgtatttgaaattataaaacggcatgtgagccaaggcaatttaaattcgaaaataactataagcagctaacactttcatttaatagacatataatggaccttcattgacattctctaatttcttacattaatattaaccatgatcggccgggcatggtggcttacgccn

SEQ ID NO: 85565 - DNA, 443 bp, Homo sapiens
  misc_feature (1)...(443): n = a,t,c or g
ntcgtagttcctagtccatgtggtggaattctgggcggcggngccggggtaggtggcgattccgagggtgaagtgaccagtgcgctgagcgccaccttcagcggccccaagatcgccttctatgtgggtctcaagagcccccacgaaggctatgaggtgctgaagttcgatgacgtggtcaccaacctcggcaatcactatgaccccaccacgggcaagttcagctgccaggtacgcggcatctacttcttcacctaccacatcctcatgcgcggcggcgacggcaccagcatgtgggcggacctctgcaagaacgggcaggtccgggccagcgccattgcacaggacgccgaccagaactacgactacgccagtaacagcgtggtgctgcacttggattcaggggacgaagtgtatgtgaagctggatggcgggaaggctca

SEQ ID NO: 85566 - DNA, 467 bp, Homo sapiens
  misc_feature (1)...(467): n = a,t,c or g
ntgggntnnnnnaaatgatactgaaggcctcngcaanaacnnnngnnnnanccacgcgtncnnntnnccaaaatacatcattctccaaaaagacctagtctacaccctcagaattagagatgcacacttagatgaccaagccaactataatgtgtctttgaccaatcacagaggtgaaaatgttaaaagtgcagccaatctaatagtagaagaggaagaccttaggattgttgagcctcttaaagatattgaaacaatggagaagaaatctgtcacattctggtgcaaggtgaatcgtctcaatgtaacactgaagtggaccaaaaatggtgaagaagtgccttttgacaaccgtgtctcatacagagttgataagtacaagcacatgttaaccattaaagactgtggcttcccagatgaaggtgaatacattgtcactgctggacaagataaatctgttgctgagc

SEQ ID NO: 85567 - DNA, 541 bp, Homo sapiens
cgaccacgcggccgaaaaaaatgagtaaataaataagtgacatgaaataatattaaacagcgaccttcctagctaagggatgcagggcttctgtgaaaggggaacttggagattcgagaatgaacaggccttactcatctctttgccgtctcccagtgaccttgcctatggcccccatgatgctcccacgtccctctttctcacccctagagagtgcctgcctggaatgcccagcgggccagcacgcggggaccacccagccgcaaaggcagtctcagcattgaggacacctttgagagcatcagtgaactggggcctctggagctgatgggccgggagttggacctggccccctatgggaccctccggaagtcccagtcggccgactccctgaactccatctcctccgtgagcaacacctttgggcaggacttcacactgggccaggtggaggtgagcatggagtacgacactgcctcccacacgctgaacgtggcggtgatgcagggcaaggacctcctggagcgggaggaggccagct

SEQ ID NO: 85568 - DNA, 414 bp, Homo sapiens
agcgaatggatttctatgccatgatccacgcctgctggctgatcgctgtcttatatagacgcagaaggaaagccatcgcagagatctggcccaagtactgctgcttcctggcatgcatcatcaccttccagtatttcatctgcattggcatcccacctgctccttgccgagattacccgtggagattcaagggtgccagcttcaatgacaacatcataaagtggctgtacttcccagatttcattgtgcggcccaaccctgtgtttctcgtctatgacttcatgctgcttctgtgtgcctccttacaacggcagatttttgaggatgagaacaaggctgcagtgcgaatcatggcaggtgacaatgtcgagatctgcatgaatcttgatgcggcctccttcagccaacataacc

SEQ ID NO: 85569 - DNA, 476 bp, Homo sapiens
  misc_feature (1)...(476): n = a,t,c or g
ggcggtgcnnnccctcgagatcatatgcagtgtcgaggaattcggaggctgttgtgcctcggggtttggaagggaaagaaatgcgctgataggacacaggaaggcagaaggctcctggccggagccggggcggcagctgagaggtgggcgggcgcatccccattccatcggatcctctgttccattgtctgtctgtctcctggacccatcctggcctcgtctttgccctccgtcgcagcctggccttgggcctgcccttcccggggacactcggtctgatccccttccctcctccctcaatgtctcatgtccctgtctgatctctccctttcccctgccccaccgtcccatctgtccccacgttgcccctccccccaggccgggagcaggctgggagccatgcggnggtgtgcgagggagatggatgccaccccgatgcctcctgcaccctcatgcccttcggagcgagtgactgn

SEQ ID NO: 85570 - DNA, 809 bp, Homo sapiens
cttcatcgatggcttcatcctgaaccacttcggcacgctgtcctttacgcccgacttcctgcagaacgtctccatgcagaagctgtgtgtctacctgagcagcagcgaggtgcagcgggagtgtgagcacgacctcctgcaggccgccctgcagtggctgacgcagcagcccgagcgcgaggcccacgcccgccaggtgctggagaacatccacttcccgctcatccccaagaacgacctgctgcaccgcgtcaagccggccgtgtgctcgctgctgcccaaggaggccaactgcgagggcttcatcgaggaggccgtgcgctaccacaacaacctggcggcccagcccgtcatgcagaccaagcgcacggcgctgcgcaccaaccaggagcgcctgctgtttgtgggcggcgaggtctccgagcggtgtctggagctcagtgacgacacctgctacctggacgccaagagcgagcagtgggtcaaagagacgccgctgcccgcccggcggagccaccactgtgtcgcggtgctggggggcttcatcttcatcgccggcggcagcttctcacgggacaacggaggggatgcggcctccaatcttctttataggtatgacccccgctgtaaacagtggatcaaggtgagattaaagccagattatttcttttctcttgaggactctctcggtttccttaacctagccttgactttccttacctctctggggccttgacaactatcctgcttctgaatgaggtgtgatgataaagtgacgagcagaataccccggggcctacatcctggac

SEQ ID NO: 85571 - DNA, 119 bp, Homo sapiens; identical to SEQ ID NO: 85074

SEQ ID NO: 85572 - DNA, 392 bp, Homo sapiens
caaacacacaaaagaggtggctgctgataaagtacaagtaagtattctaaacacttctgtttctttgtctgcaggagagctggaggtgtttcagaaagatggggaacgaaaaattcagagtcgacagcaacttccagtgggaacaacctgggggccgtttcctgggaagatggactggaagattaattctttggtatgtggatattccgagatggttaatattttgtcatcgactgttagtattttgccatagctcagaaattctctctgcttgctttccaatgaaatcactaaaaataaccatttgtttttgctttttcgtggacagcaaaacttggatacttttcaagtggtttgtgtctgacagtaatatacgcagaatttagacagaa

SEQ ID NO: 85573 - DNA, 869 bp, Homo sapiens
gagcgagacccctgcctcaaaacaaaaaagaaaaaaaaagaaatgattttcggtggagttaacttacctgacttctgggtcagcaccgtgccgtaacaggcagagcagactctgggccttgtggtacttggcagccagatggatggggatgatagactctgtcggctttggagggaaaacaaaacacattacaagtggccctgtgtagttaaaaatactgtttgtgttagcttgccgtttcaaaggcaatacatttatttagtgtctcattggctcactctttttctggtatgtgcattgaaagtttcctttctactacctgttttaaatgatcaaaattcagtgaattccatcctataaaatctgtgtttcacagaaatgcacatttactgaggcaacagaaataacactcaaaagctttggaaatttttgaaagttgattcttcagaagagcctgtggtgtgatattaagggtacttgctatgaagtcacttattccttaaattaacccacagggtgatggacaagtaggtgctgtgtcgttgccaaagtcgtattatcagcagtaaaacctgaatcttcaggggtttcaaatataacgcagcatatgttctgcctatgattagcagagctgtttgtgccacctcttaaacaacccccggggaactactggggtcacaccgcggccgcaagacaagaccgctccgtccaagggagggcgacctccttttcgaatgacatggcacacgcgccgcaccgcggtgacagagactgtcacaccggacccggccagaccgcacccgcggcagacccactctattgccctccggccacgcgacgcgcaccggggctctccccgaccccgccgc

SEQ ID NO: 85574 - DNA, 451 bp, Homo sapiens
  misc_feature (1)...(451): n = a,t,c or g
ggggccgnnaattgaaacctgatgaccctacgacgccacgctnggcacgaggggggagagttcaaatagcataaaaaatcaagagcttccattgaggaccacctgggatttctggaggaaaatgtatctgagagaaccacagaattatcagagtaggtgtcagcaaattgatgtaaaaaataagctctgtaaatgtgatcattgtgttaggcaaagaattgctcatcaacatgatgatcatggagtacacaaaagagagaaagcttttagccacaataattgtggaaaagactgtgtgaaggaatcatcccagcatagcataatccaatcaggagagcaaacctctgatgaaaatggaaaaggcttaagtgttggctctaatcttgaacttcaccagcaactacacttaagagacaagcctcatgtaaatgttgagtacgggaagggcata

SEQ ID NO: 85575 - DNA, 400 bp, Homo sapiens
gggtcgcgcgtgttgtacgccgactcggacatgccccacggcagccgcagcccgtcgccgtaggcgatctgccgacgcaccaccaggtggttggtccgcgcgagcaggctgccgtccggcgcgcgcatcacgagcgacggcatcaggtattcgaacatcgatcccgaccacgagaccagcgcggcgccgtgcccgatcggcgtcgccaggcggcctagccggaaccagtggcgcgccgggacatcccctttcgcgatcgcgacgaagctcgccaggcgagcctccgacgccagcaggtcgtagttgcccggatcgcgctgcccgtcggccacggcgtagccgatcgaaagcaggttccgcaccgggtcgagcagaaagccgaactccatcgcataggcca

SEQ ID NO: 85576 - DNA, 116 bp, Homo sapiens
ttttttttttttgggggaaagttttttttccttccccccaggttgaaaagccaccgggcttatattttgggaaaccttcccctttccaagggttaaaaaaaaatctctcccccctc

SEQ ID NO: 85577 - DNA, 474 bp, Homo sapiens
cgaattccccactgctgggaatgtgtgagtgcagcccaggctttgccggggaagggagggaggcagggatgaccaggggcacatgcaggctgagccttccaaactcctcaggtgggttgggggaggattgggaacttgatgaaaaatctcctccattctccagaaaatgcaggcgatgtgggtttgcacatatacaactcttcatgctcctttagtgacccacctgtcatacccatgggcaccaggttaaaaagtccttcttttagcaatgagcagggcaggcagggtcatgagcgcaaaagctggggaagtccagaagccccagaacagtgcattgcaaagaggcaaaggggccctgaggagtggctgctttataatggggcttctgaccttcccccactacacagcccatggtgcagccgcccgagaggaccatcagaggccctgcggagttgttcagaaccccaactctct

SEQ ID NO: 85578 - DNA, 447 bp, Homo sapiens
  misc_feature (1)...(447): n = a,t,c or g
ctagaaacccctcgtagaccactangccatgtcgtggaattctgggcgagctcgcttctgacgaccgctatgccctggataacttgcctgaactcacaaatctggaagccaccattaaccctaagctctcttacatccaccgcttggctttccgaagagtccctgctctggaaagcttgatgctgaacaacaatgccttgaatgccatttaccaaaagacagtcgaatccctccccaatctgcgtgagatcagtatccatatcactcccctcaagtgtgactgcgctatccactggattaactccaacaaaaccaacatccgcttcatggatcccctgtccatgttctgtgccatgccgcccgaatatacagggcaccaggtgaaggaagatttaatccaggattcgagtgaacagtgcctcccaatgatatctcacgacagcttcg

SEQ ID NO: 85579 - DNA, 745 bp, Homo sapiens
ttttttttttagtattccaaacagcagggggtcactgtctttactttaggattcataaagcctgttaatgaatgggtgtgctgggggcactgtcatgttcttcagcatgctgcctgggcgacgaggaggcccttcctagggtctgacctggcttcccttcccaggtgggtgcaggtggcatgtccacgtctctccattgactggggcacagccttccccaagccgctgctgacaccctatgaggtaacaccaagctctgggagagagtgggctttggacgtggttctcaaaggtgaggtctggagtggagtggggtgggtgggcagcacttcgttatgttcgtagattccggagtctgtctcgatttctccagcggagtcacttcctagctgtgtagccttaggcaaggccctgaaccacacagttcccttctgtggcaggggacagtgtgcccttcacaggccgtcgtgaggactgaattcagtaatccaggggcagaaaaacactggcagatgttattgtccctccctcccctcccctaggcggccgtggctctgagggacatttcctggcagcagccctacccgatggacttctacgctggcagctccttggggccctggacggtgaaccacggccaggaccgccgtccccacgccccgggccggcccgcgcgggggaaggtgcaggaggggtccgcgcgtcccccttcggccgtggcttgcgaggactgcagctgcaggga

SEQ ID NO: 85580 - DNA, 223 bp, Homo sapiens
  misc_feature (1)...(223): n = a,t,c or g
nactagaaacggtcccagcattgctcccacgtttcctcctaataaataagaaaggcccactgacacaaccccactttaccttgtgtgagcttggcctgcttctgctgtctgtcccgtaacctgtgctccaccactgaaagcccgtgactgtgaaatccatacctgcctagaccaagacacggcaggggcagagtgagaggacaccatattcacttcccatacg

SEQ ID NO: 85581 - DNA, 604 bp, Homo sapiens
atgaatgacgaagactacagcaccatctatgacacaatccaaaatgagaggacgtatgaggttccagaccagccagaagaaaatgaaagtccccattatgatgatgtccatgagtacttaaggccagaaaatgatttatatgccactcagctgaatacccatgagtatgattttgtgtcagtctataccattaagggtgaagagaccagcttggcctctgtccagtcagaagacagaggctacctcctgcctgatgagatatactctgaactccaggaggctcatccaggtgagccccaggaggacaggggcatctcaatggaagggttatattcatcaacccaggaccagcaactctgcgcagcagaactccaggagaatgggagtgtgatgaaggaagatctgccttctccttcaagcttcaccattcagcacagtaaggccttctctaccaccaagtattcctgctattctgatgctgaaggtttggaagaaaaggagggagctcacatgaaccctgagatttacctctttgtgaaggtaaggtctgcctctgacaggcataccctgttcatgcagatattatggctggtgttttattttg

SEQ ID NO: 85582 - DNA, 429 bp, Homo sapiens
aggtacatcaagagagtgtacacatgattgaagtcacaagtaatttgattaatgaaactctagcaaatcaccctgagtgggcaaattggcttcctgaggctcaggtagtccaaagagccctgaattctgcggctaacaacgtgtatcagtatggacgagaatggataactcacaagctccataaaattctaggagataaggtgaacaatactgctgtaattgaaaagcaagtactagaactttgggacagactgtatcactcttggtttgtaaagaatgtaacacactctggaaggcacaaaggacagaagttgcatgtcagtcgtcagaatagctggctgggagacattctggactggcaggatattgtttcctttgttcacgagaacattgagacatttctttcgatcttggagtctctgtggatcg

SEQ ID NO: 85583 - DNA, 465 bp, Homo sapiens
  misc_feature (1)...(465): n = a,t,c or g
ggcgggtggggnnggggggnnnnnaattgagncccctattgtagacttctgnccagngcggnggaattccacggcgggcttgcctggcgcctgggcagcatggacgtgcaggccgagcgagcctggagggtggtgtttgaggcagtggccgcaggcgtggcacactcctacgtggctctggatgatctgctcctccaggacgggccctgccctcagccaggttcctgtgattttgagtctggcctgtgtggctggagccacctggccgggcccggcctgggcggatacagctgggactggggcgggggagccaccccctctcgttacccccagccccctgtggaccacaccctgtgcacagaggcaggccactttgccttctttgaaactggcgtgctgggccccgggggccgggccgcctggctgcgcagcgagtctctgccgggcaccccagactcctgcctc

SEQ ID NO: 85584 - DNA, 453 bp, Homo sapiens
  misc_feature (1)...(453): n = a,t,c or g
aactgtggggggaaaaccgaacgtangcaagcacgngncgnggaanncganggccagcgccacgcggtacagcaccttgtagccctccaccaggaagacgtcaaagacccgggcgaagtagcagaggggcagctccccaaacagccagcgctgccagtccgcatagacctgcaggacatcctccgacacggccaccatcagcttgtgggccgcctggcagtacttgttcaccaggtccccaaacgtcatgcaggacgactcaaaggccaggaagctctggtcgatcagcctcctgccggggtcattgcaggccaggatgcggcaggccttctcgaagcactcggcctcgtcgatgctgtagtgcagcagcagggccaccacggccggcagggcggggcagaaggagatgtcggggaactggttggccaggcacaggaggatcttgcgcacggc

SEQ ID NO: 85585 - DNA, 487 bp, Homo sapiens
  misc_feature (1)...(487): n = a,t,c or g
cgtgcgncccaatgacncccaaagagcttacgcangcgcnnccggnccggaanncccggggcgaggcacgcgttagaagagggcctcctgcaccctggtctcannnnncccatcctcatgagatctcagcccagactcaagggaggatcaccctcagggtcacaggaggctacttccaaagaggcctgtgagaggaagcctaatgcctgggcacacccatcacccctgccctgtgtcctcaacaactaatgacacaccagaccaaatctgggtctctgtgggcagtcttaggatgggaacaggagggatgggagctaatgcctcaacctcccccaggtgctgggacttgagctccgggaacaaaaagtggatcatccaggtgcccatcctggcctccattgtggagagcaggggtgggctgctggccacaggggtgggtgggatgtgcgcctgcgtcccccggaaccagcccctgacagggacctag

SEQ ID NO: 85586 - DNA, 456 bp, Homo sapiens
tttcgtccaggctctcctgcttctccacggactctgcgggaagttagagcctctgcgtgcgctccggggcccggcgagaggatgcgcaaggtggagagccgcggggaagggggcagagaggaactgggaagtaacagccctccacagagaaactggaagggaattgctattgctctgctggtgattttagttgtatgctcactcatcactatgtcagtcatcctcttaaccccagatgaactcacaaattcgtcagaaaccagattgtctttggaagacctctttaggaaagactttgtgcttcacgatccagaggctcggtggatcaatgatacagatgtggtgtataaaagcgagaatggacatgtcattaaactgaatatagaaacaaatgctaccacattattattggaaaacacaacttttgtaaccttcaaagcatcaagacattcagtt

SEQ ID NO: 85587 - DNA, 537 bp, Homo sapiens
tttcgtggctagtctctgcggccacctccggaagggtccgccggctgtgctggtgaggcccagttccaaggctccggcatcctgtgtctcactgagcactgctgcccgatggccatccccaagcactccctgagcccagtgccgtgggaagaggacagcttccttcaagtgaaggtggaggaggaagaggaagccagcctctcccagggcggagaatccagccatgaccacattgctcactctgaggctgcacgcctgcgcttccggcacttccgctatgaggaggcatctggtccacacgaggccctggcccacctccgagcgctgtgctgtcagtggctgcagcccgaggcgcactccaaggagcagatactggagctgctggtgctggagcagttcctgggtgcgctgcccccagagatccaagcctgggtgggagcccagagtcccaagagcggagaggaagccgctgtgctggtggaggatctgactcaggtgctggacaagagaggtgtcatcccagatacctggtactag

SEQ ID NO: 85588 - DNA, 439 bp, Homo sapiens
acattttgtttgcttttccattaatccactggtttagtttccagaacgcaatgtcagacctgaggtgacagaaaagggaaaacgtgagagagtgtcttcttccctgaagagaggtgggcctgaggcttgacagtggcgctgcctgagtgacctagccgctgggctgggccctggacagctgatcccaggttcctgcacttgtcgccacccttccgtagtccacaggcctgatggcggcggcggctgagccgatgggcccggcacaggttcccatgaactcagaagtaattgtggaccctatacagacacaagcagcaagtccaacacaatcacagcaacagactctcctgcagaccttcccaggaagacagagccacacacaccatcatggtcctggacaaggaaaacactctttcctaatctggttgtcatgccatga

SEQ ID NO: 85589 - DNA, 488 bp, Homo sapiens
cccgggtcgacgatttcgtctcagatcggtggacgtgctcgcctccactcggggccaggtctatgtcccggtttcccgcagtcgcgggcagggcgccaaggcggcaggaggagggtgagcggtcaagagacctccaggaagagcggctctcggctgtttgcatcgccgatagagaagagaaaggatgcacgtcccaggagggaggaactactccaacttttcctattcagaaacaaagaaaaaagattattcaagctgtgagggacaattcattccttattgttactggaaatacaggaagtggtaaaacaactcaactcccaaaatatctatatgaagcagggttttcacaacatggtatgattggtgtaactcaaccacgaaaagtagctgctatatcagttgctcagagagtagctgaagaaatgaaatgcactttgggatccaaagtaggataccaagttcgttttgatgattgcagttctaag

SEQ ID NO: 85590 - DNA, 417 bp, Homo sapiens
  misc_feature (1)...(417): n = a,t,c or g
gggtaatcggtgagcagcaccggcgtcttgtcgaaaagctcacccttgtagctgcgccacttgccggcgggcaaatagacgtcgcgctcctgcctgcctggctccagcaccggggccacaagcagcgtgtccccaataaggaactgcgagtcgatacggtgagctgtctcgtcgccgggcgcaatccaccaaagggggcgcacgatagggtcacccgtgtcggtgacctcgcccgccagctcaagcaacagcggtgccacaagcgaggcccgcagggcggcgaacttctgcgcgatggccaccacttccgcgtcgtagcgccagggcgggatagagaactgcatggccggcataaaggcggccacttccagccagcgaatgtagagctcgcgctcgggcacatcgccgccggctgtn

SEQ ID NO: 85591 - DNA, 600 bp, Homo sapiens
tttcgtggcgcctgaggggtcttgggggctctaggccggccacctactggtttgcagcggagacgacgcatggggcctgcgcaataggagtacgctgcctgggaggcgtgactagaagcggaagtagttgtgggcgcctttgcaaccgcctgggacgccgccgagtggtctgtgcaggttcgcgggtcgctggcgggggtcgtgagggagtgcgccgggagcggagatatggagggagatggttcagacccagagcctccagatgccggggaggacagcaagtccgagaatggggagaatgcgcccatctactgcatctgccgcaaaccggacatcaactgcttcatgatcgggtgtgacaactgcaatgagtggttccatggggactgcatccggatcactgagaagatggccaaggccatccgggagtggtactgtcgggagtgcagagagaaagaccccaagctagagattcgctatcggcacaagaagtcacgggagcgggatggcaatgagcgggacagcagtgagccccgggatgagggtggagggcgcaagaggcctgtccctgatccagacctgcagcgccgggcagggtca

SEQ ID NO: 85592 - DNA, 494 bp, Homo sapiens
  misc_feature (1)...(494): n = a,t,c or g
atgtgtgnacctgggactgacgtacgtgcgacnggcccggaannnccgggncgacgatttcgtgtgcagggcacaggccnnnntttcatcgccttcactgaggccatgacgcacttccccgcctccccggtctgggccggcatgttcttcttgatgcttatcaacctgggcctgggcagcatgatcgggaccatggcaggcatcaccacgcccatcatcgacaccttcaaggtgcccaaggagatgttcacagggggctgctgtgtctttgcattcctcgtggggctgttgttcgtccagcgctccggaaactactttgtcaccatgttcgatgactactcggccaccctgccactcactctcatcgtcatccttgagaacatcgctgtggcctggatttatggaaccaaaaagttcatgcaggagctgacggagatgctgggcttccgcccctaccgcttctatttctacatgtggaagttcgtgtctccact

SEQ ID NO: 85593 - DNA, 491 bp, Homo sapiens
  misc_feature (1)...(491): n = a,t,c or g
atgttttactgggactacgtcctgcgacggncncgnagnnncngagtcgacgatttcgtaccggggcggcggggaannnncagaggcgggaggagcatcggctcaggcgcctgcaaactggtggcctgaacgaggtataccatgactgtggtttcagtggcgtcactcgctgggctgctcttcctgaggttttcctaagccatcccctggcggaaccgcccccagtgattataatggtaacaggagttgttggaagagcagaacttttgtcatctatcttttttctagcagcttttttgtcatataccagatcaaaaggaccagacaattccataatatggactccaattgccttgacagtgtttttagtggctgttgcaacattatgtaaagaacaaggaataacagttgtaggaatttgctgtgtgtatgaagtgtttattgcccangggtatactttgccattactatgtactactgctggacagttt

SEQ ID NO: 85594 - DNA, 484 bp, Homo sapiens
  misc_feature (1)...(484): n = a,t,c or g
gtgggnagcaaaaactaggctctcgaactgatcancgtncgaaaannccnnnnnnntatttcgtgtcacggtggatgggcacccggtggccttgcccttcctgcaggagccgttgctgtatgtggagctgcgaggacacactgtgatcctgcacgcccagcccgggctccaggtgctgtgggatgggcagtcccaggtggaggtgagcgtacctggctcctaccagggccggacttgtgggctctgtgggaacttcaatggctttgcccaggacgatctgcagggccctgaggggctgctcctgccctcggaggctgcgtttgggaatagctggcaggtgcaagagggccgcgggtatcccccagggctggagctgccccctgtactgctgcagatggagtggagccggcgggcccaggagcagctcctgtgggacttggaactgctgactggtgtggagctgggcctcttctggccaccccag

SEQ ID NO: 85595 - DNA, 477 bp, Homo sapiens
  misc_feature (1)...(477): n = a,t,c or g
agggggaactgatgctgctgcancagcnaccggnnccgaaanncccggnncgacgatttcgtgtcggggggtgcagatggcggcggcagttgtggtggcggagggggacagcgactcccggcccggacaggagttgttagtggcctggaacaccgtgagcaccggcctggtgccgccggctgcgctggggctggtgtcttcccggaccagcggtgcagtcccgccaaaggaagaggagctccgggcggcggtggaggttctgaggggccacgggctacactcggtcctggaggagtggttcgtggaggtgctgcagaacgatctgcaggccaacatctcccctgagttctggaatgccatctcccaatgcgagaactctgcggatgagccccagtgccttttgctactccttgacgcttttggcctgctggagagccgcctggatccctacctgcgtagcctagagctgctggagag

SEQ ID NO: 85596 - DNA, 877 bp, Homo sapiens; identical to SEQ ID NO: 66807

SEQ ID NO: 85597 - DNA, 849 bp, Homo sapiens
atgcagggagattctggcttaatacctcggatctgtgaaggactcttcagtcggataaatgaaaccaccagatgggatgaagcttcttttcgaactgaagtcagctacttagaaatttataacgaacgtgtgagagatctacttcggcggaagtcatctaaaaccttcaatttgagagtccgtgagcatcccaaagaaggcccttatgttgaggatttatccaaacatttagtacagaattatggtgacgtagaagaacttatggatgcgggcaatatcaaccggaccaccgcagcgactgggatgaacgacgtcagtagcaggtctcatgccatcttcaccatcaagttcactcaggctaaatttgattctgaaatgccatgtgaaaccgtcagtaagatccacttggttgatcttgccggaagtgagcgtgcagatgccaccggagccaccggggttaggctaaaggaagggggaaatattaacaagtccctcgtgactctggggaacgtcatttctgcattagctgatttatctcaggatgctgcaaatactcttgcaaagaagaagcaagttttcgtgccttacagggattctgtgttgacttggttgttaaaagatagccttggaggaaactctaaaactatcatgattgccaccatttcacctgctgatgtcaattatggagaaaccctaagtactcttcgctatgcaaatagagccaaaaacatcatcaacaagcctaccattaatgaggatgccaacgtcaaacttatccgtgagctgcgagctgaaatagccagactgaaaacgctgcttgctcaagggaatcaggttgggtttttctga

SEQ ID NO: 85598 - DNA, 387 bp, Homo sapiens
tctgtcctggagtccatgattgatgacctgcagtgggatattgacaaaattcgaaagagggaacagcgactcaaccgacacttagcagaagtcctagaacgggtgaattccaaaggttataaggtgtacggagcggggagcagtctgtatggcggcacaatcactatcaatgctcggaagtttgaggaaatgaatgcagagcttgaggagaacaaagagttggctcataaccgtctctgtgagctggagaaacttcggcaagactttgaggaggtcactacacaaaatgaaaagctgaaggtggaattgcggagtgcagtggagcaagtcgttaaggaaactccagaatatcgctgcatgcagtcacagttctccgtcttgtataag

SEQ ID NO: 85599 - DNA, 413 bp, Homo sapiens
aagcttaagctgctttttaagctacatattcctccagcttacactgaagtgaaatctaaggatgcttcaaaaggagatgaactttccaaggaagaattactttatttcagtcagctgcatgtttccaagcctgcaaatgagaaggaagcagaatcagcaaaacacagccctgaaaaaggcaaagggaaaattgatattcaagcatatctaagtcaatggcaagatgagcttttcaaaaaagaagaaaacattaaggatttaccaagaatgaatcagtctcagtttattcagttttcaaagaccctctataacttatttcatgaggaccctgaagaagaatcattatatcaagccattgctgttgtaaccagccttttactcaggatggaagaagttggaaggaaactacatag

SEQ ID NO: 85600 - DNA, 560 bp, Homo sapiens
cgttgctgtcgcaggaattggggatgtgcccctggtgattctattggatgacctgagtgaagcaggctccatcagtgagttggtcaatggggccctcacctgcaagtatcataaatgtccctatattataggtaccaccaatcagcctgtaaaaatgacacccaaccatggcttgcacttgagcttcaggatgttgaccttctccaacaacgtggagccagccaatggcttcctggttcgttacctgaggaggaagctggtagagtcagacagcgacatcaatgccaacaaggaagagctgcttcgggtgctcgactgggtacccaagctgtggtatcatctccacaccttccttgagaagcacagcacctcagacttcctcatcggtactggggtccagcttcccccgggggtcaggaggtggcttcccttttccactgtaccacctggagggatgctcccttctcttcctggagtcttcggcatgtaaaggagctgcaagccttgtggcttcagacttagaaccacttaacgagccttcccaacacagttagcaccac

SEQ ID NO: 85601 - DNA, 456 bp, Homo sapiens
  misc_feature (1)...(456): n = a,t,c or g
ngggantttgaaccctgagaccattgnacannnncgggaattcgcagcctctgatcttgagccttttacccccacagaccagcctatttcccctgaggctattactcaacccagttgcatcaagaggcagagagccgctgggaaccctggttccctcgcagctaccattgaccataagccttgctctgcacccttggaacctaaaatccaggcctcaaggaaccaaagatggggagcagtgagagcagcagaatcccttacagacattgctgagcctgcctctccccaggttcatgagacaccaattgatgcctcccagactcaaaaggtggaaccagcgagcaaatctaggttcaccccggaactccaggctaaggtctctcacagtcgtgagagggctttatctaccatggatgcaacaccacatcatgcacagccccaacgaggggaaggctc

SEQ ID NO: 85602 - DNA, 481 bp, Homo sapiens
  misc_feature (1)...(481): n = a,t,c or g
ntgggttgnnnanaattgaattcactgacgaattcggcacgagccacatgtggtgtacaagcgttcctctctgcgtcacccccacctggacacagcctgtggagtgagagatgagaaaccgtggaaagggcggccatggtggctgcggaccttgaagccaccgcctgccaggcccctggggaatgaaacagagcgtggccagccaggcctgaagcgatcggtcagccgagagcgctacgtggagaccctggtggtggctgacaagatgatggtggcctatcacgggcgccgggatgtggagcagtatgtcctggccatcatgaacattgttgccaaacttttccaggactcgagtctgggaagcaccgttaacatcctcgtaactcgcctcatcctgctcacggaggaccagcccactctggagatcacccaccatgccgggaagtccctggacagcttctgtaagtggcagaaatccatc

SEQ ID NO: 85603 - DNA, 462 bp, Homo sapiens
  misc_feature (1)...(462): n = a,t,c or g
atggccnnnnnaatgaaatcaatcttgcagcacccgccggaatcccgggccgagccagcgaccggatacctttaccattctttgattttttcctttgttgaatgtatagatggagcttagtgataatagaaggtctggaggcttggaagggctggcagaaaaatgtccaaatcttacctacctcaatctgagtggaaacaaaataaaagatctcagtacagtagaagctctggtaagtggaacagttttgtctctggacttgctttttttggttaaattttctgagatttgtttgtgtctattaatttctatttaactcttaaaacttaagaattttttgtatgttgtgatctaggcagctactgcttttgtttcttttagactaaaatattcagatgaatttttaaatcaatgagaaatttattttatcatcaacttcaggagttgactatcttggtttan

SEQ ID NO: 85604 - DNA, 393 bp, Homo sapiens
ggtggggccgagacacgcacatgggtgtttatgaattcagggcacacgccaagcacgtaggggctgcatgcagggcacacgcaggggcactgtgtgcacacagtggaaatcagtgctgcccaccttgccccggggccagcagccactgctcccagcacaccctgccctacctgcagagcgggtaccccctgaggatgatgagtactctgaatactccgagtattctgtggaggagtaccaggaccctgaagctccttgggatagtgatggtgagaatggggggctgcgcccagcggggtctggggaggggcaggcagggctgagccctgctgacctccccctgacctttcaaccctctctgattcccacaaaccctgctgacttgaccccatg

SEQ ID NO: 85605 - DNA, 2138 bp, Homo sapiens
atttagtcagtgacatcctaatccacgggatgaaggctcgaaaccgctcaattcatggagatgtggtagttgtggagctgcttcctaaaaatgaatggaaaggaagaaccgtagccctgtgtgagaatgactgtgacgacaaggcttcgggcgagtccccaagtgagcccatgcctacaggtcgagtggtgggcatacttcagaagaactggcgggattatgtggtgacatttccgtccaaagaagaggtccaatctcagggcaaaaatgctcagaaaatcctggttacaccttgggattacagaattcccaaaattcgaattagcactcagcaagcagaaaccctccaggacttcagggtggtcgtgcgcatcgattcctgggagtcaacatctgtgtatccaaacggacattttgtgcgtgttttaggaagaatcggagatctggaaggggaaattgcaaccatcctggtggaaaacagtatttcagttattcctttctcagaagctcagatgtgtgagatgccagtaaacacaccagaaagtccctggaaggtgagtcctgaagaggaacaaaaacgtaaagacttgaggaaaagccatctcgtattcagcattgaccccaaaggttgtgaagatgtggatgacacactctcagtcagaaccttaaataatggcaacctggaacttggggtccacatcgcagatgtaacacactttgtggcaccaaattcttacattgatattgaagctagaacaagggccaccacttattatctagcagatcgtcgctatgacatgctgccttccgtcctcagtgcagatttgtgttcccttctgggaggcgttgataggtatgctgtaagcatcatgtgggaactggataaagcctcttatgaaattaagaaagtgtggtatggcagaaccattattcgatcagcatacaaactgttctatgaagcagcccaagaactactggatggaaacttaagcgttgttgatgatattccagaattcaaagacttgggtgagaagagcagacaagccaagctggaggagttggtgtgggcaattggaaagctgaccgacatagctcgccatgtcagagctaaacgagacggatgtggtgccctggaactggaaggggtagaggtttgcgtacagctagatgacaaaaagaacattcacgacctcatccccaagcagcccctggaagtccacgagacagtggctgaatgcatgatcctggccaaccactgggtcgccaaaaagatctgggagagcttccctcatcaggccttgctgcgccagcaccctcctccacaccaggagttcttttcagaactccgggaatgtgctaaagccaaaggcttcttcatagatacacggtccaataaaacactggctgattctctggataatgcgaacgacccccacgatcccattgtgaacaggctactgcgctccatggccacgcaggccatgtcgaatgctctgtacttctccaccggatcctgtgcggaggaggagttccatcattacggtcttgcattagataaatatacccactttacttctccaataagaagatattcagatattgtagtacaccgcttgttaatggcagccatttcaaaagataagaaaatggaaattaagggaaatctgttcagcaacaaagatcttgaggaattatgcagacatatcaacaacagaaaccaagcagcacagcattctcagaagcagtctactgagctcttccagtgcatgtacttcaaagacaaagaccctgccaccgaggagcgttgcatatctgacggagttatttattcaattagaacaaatggtgtgcttctatttataccaaggtttgggattaaaggtgctgcttatctaaaaaataaagatggtttagtcatctcatgtggcccagatagctgttctgaatggaaaccaggatcccttcaacgatttcaaaacaaaattacctctactacaacagatggggaatctgttacgttccatttgtttgaccatgtaaccgtaagaatatccatacaggcctcacgttgccattctgatacaatcagacttgaaataattagtaacaaaccatacaagataccacatacagaactt

SEQ ID NO: 85606 - DNA, 433 bp, Homo sapiens
  misc_feature (1)...(433): n = a,t,c or g
ggcctaaataatttcctacactctctacactcataaggcctttctccagtgtggcttcgctgatgctgaatgaggttgccctttcgactaaaagatttcccacattctccacactcgtaagggctttctccagtgtgacctcgctgatggttcctaaggtgtccctttcgactaaaagatttcccacattctccacactcataagggcgttctctagtgtgaactcgatgatgttcagttagggtgcccttttgactaaaacattttccacattcttcacactcataaggtctttcactagtgtgacctcgttgatgttgaatgagattgcccttctgagtaaaacatttcccacattcttcacactcataaggtctttctccagtgtgaactcgttgatgtttaatgagagtaccattttgactaanagatn

SEQ ID NO: 85607 - DNA, 472 bp, Homo sapiens
  misc_feature (1)...(472): n = a,t,c or g
agganantttgtaactgaaaacgtacgacancatacgccagcttggacgaggccagacatgaatcaacagacacactgatggatgaatttagagattggagtgggggagactcgcacctgtggggtccacctggggcaggaggcgcaggaagatgggccgggcatagggtgccagcaccttctgcagctcctggtatatcgcgttggggtccagcaggctgtgggggtctgcgacggccgccatccctgccttaccctccactcctggaggcagaggctcagctgaggacaccccgcctctcatcctccccaccagcaggaacagatacactgtcaagcagtagcccctggtctgtaatctccagtctctcccaacctgggatgacatttatggaagcagccacacattttgtggagctcctgcttggctcattgaagccctaagacaggtgggctttcatgatcccatttt

SEQ ID NO: 85608 - DNA, 200 bp, Homo sapiens
  misc_feature (1)...(200): n = a,t,c or g
aaannnttnntttnnnngnnnctgnctgccgtatgctaacccgctggctttattttttcatgcataggcaccaatcttccagggttcacatatttttgaatacatgcactgcgacacaggaccagagatgtaaagaagggctcaaatggtcggcttttttgttgttgttgccgnatgctatatcttgatcagttcttggg

SEQ ID NO: 85609 - DNA, 754 bp, Homo sapiens
gtgggagggggttttggaacgataactgagggcatgcgcagcttcgcacgaggatttcaaagaaagacaagcgggtcacaagacgatggagaacaaaaagtgtcagcaaagatacaaaaatacaactgcaggttcctttcagtgctaccatgtcaccagttcgcttgcattcctccaaccccaacctttgtgcagatattgaatttcagactccccctagccacctcactgaccctctggaaagttcaacagattatacaaagctgcaagaagaattttgtctaatcgcacagaaagtgcattctcttttgaagtctgcatttaatagcatagctatagagaaggagaagctgaagcagatggtttccgagcaggatcacagtaaaggccacagcacgcagatggcacggctccgacagtcactgtctcaggcactcaaccagaatgctgaactaaggagtcggttgaacagaatacattcagagtctattatttgtgatcaggttgtcagtgtaaatattattcctagccctgatgaggctggtgagcaaatccatgtcagtctccccttatcacagcaagtagccaatgagagccgcctctccatgtcagagtctgtttctgagttctttgatgcccaagaggtgctcctctctgcaagttcgtcagagaatgaggcttcagatgatgagtcttacatcagtgatgtgagtgataatatatctgaagacaacaccagtgttgcagacaatag

SEQ ID NO: 85610 - DNA, 764 bp, Homo sapiens
cgcaggtattctcagaaactgatccagcacaccgcctgtcagctgctgagaacttaccctgctgccacccgcatcgactcttccaacccgaaccccctcatgttctggctccatgggatacagcttgtggcactcaactaccagactgatgatctccctttacatttaaatgctgcaatgtttgaggcaaatggtggttgtggttatgtattgaaacctccagttctgtgggacaagaactgccccatgtatcagaagttttctccactagaaagagatctggacagcatggatcctgcagtctattctttaactattgtctctggtcagaatgtgtgccccagtaatagcatgggaagcccgtgcattgaagtcgacgtcctgggcatgcctctggacagctgccatttccgcacaaagcccatccatcgaaacaccctgaaccccatgtggaacgagcagtttctgttccacgttcacttcgaagatcttgtatttcttcgttttgcagttgtggaaaacaatagttcagcggtaactgctcagagaatcattccactgaaagctttaaaacgaggatatcgacatcttcagctgcgaaaccttcacaatgaagtcttggagatttctagtttattcattaacagcagaaggatggaagaaaattcctctggcaataccatgtcagcctcttcgatgtttaatacagaagaaagaaaatgtttgcagactcacagagtcacggtgcatggcgtcccagggcc

SEQ ID NO: 85611 - DNA, 469 bp, Homo sapiens
  misc_feature (1)...(469): n = a,t,c or g
cttgaaactcgataaccnttgacctgacacgccagcttggggnnttatagacgccagccttctatcaaagccagatttctgcgcttcatccctttggaatggaaccccaagggcagaattggaatgcgaagcgaactgttcggatgggcataccgatcaaaagtggttgatcttgatggaaaaagttcccttctctacagatttgatcaaaaatccctgagcccaataaaagacattatttctttgaaattcaaaaccatgcagagtgatgggattctactccacagggaagggccaaatggagatcacatcacactgcaattaagaagagcaagactctttttacttattaattcaggtgaagctaaactggcttccacttccaccctgggcaatctcaccctgggcagcctgctacatgatcagcattggcattcagtgctcatcccacgcttgggcaaacaagtca

SEQ ID NO: 85612 - DNA, 490 bp, Homo sapiens
ggaccgcagtccagcatttgttattaagtgttaagtgacaaggattagaaccttgactccaagcctaaactgaagagtgtttttccagctactcagctgcttaagctggcccacaagtacagaccagagacaaagcaagagaagaagcagagactgttggcccgggccgagaagaaggctgctggcaaaggggacgtcccaacgaagagaccacctgtccttcgagcaggtgagtaggccccaccttatggtgaacactgggggcgggctgttgcagtgatgtaaaatttcttggcctgaaattactgtgaagagtaaaaccgagctttttaacactgagtcagcagctgagcccagcagcttcttgtgactagagcaggccctgtgagtgctcacaaagtggttgtgtgttctaggagttaacaccgtcaccaccttggtggagaacaagaaagctcagctggtggtgattgcacacgacgtggatccc

SEQ ID NO: 85613 - DNA, 404 bp, Homo sapiens
gaaactcggccagaacagcaatcacacgttctatttttttaaggttctcaaagcacatatattgccactgactaatgttgcacttaacaaatcgggctcatgctttatcacaggaagctatgatcggacgtgcaagctctgggactctgcgtctggagaggagctgaacacgctggagggccacaggaatgtggtttatgccatagcattcaacaatccttacggtgacaaaatcgccactgggtcctttgataaaacttgtaaactctggagtgtggaaacaggaaaatgttaccataccttcaggggtcatacagcagaaatagtgtgtttatcatttaaccctcaaagcacattggtggcgactggaagtatggacacaacagccaaattgtgggacattc

SEQ ID NO: 85614 - DNA, 1035 bp, Homo sapiens
ggaagacagagacaaagactataacccccaatgaatattccacaaatttaactgctctattgacaactgaaaacacacagtacgtgtagttagtgtgagttattttatcaagatcattaacttaccattgtgatcctaaggttccagtttcattgctgaagtatgcaccaaacaacggtggcctgaatccactctttggccctcaacaggtagccatgctgaaccagctatcccagctaaaccagctttctcagatctcccagttacagcgattgttagcgcagcagcaaagggcgcagagtcagagaagcgtgccttctgggaaccggccgcagcaagaccagcagggtcgacctcttagtgtgcagcagcaaatgatgcaacaatctcgtcaacttgatccaaacctgttggtgaagcagcagactccaccatctcagcagcagccactccatcagccagccatgaagtctttccttgacaatgtcatgccccacactacacctgagctgcaaaaagggccatcaccaataaatgctttcagcaacttccctataggcttgaactcaaacttgaatgtaaatatggatatgaacagtattaaagagccacagtcaagactaaggaagtggacgacagtggacagcatttctgtgaacacatctttggatcaaaactccagcaaacatggtgctatttcaagtggtttcaggctggaagagtctccatttgttccctatgactttatgaacagcagtacttcaccagccagtcctccaggttcaataggagatggctggccacgtgccaaatcgcctaacggctctagcagtgttaattggccaccagaatttcgtcctggtgagccatggaaaggttatccaaacattgaccctgaaactgacccttacgtcactcctggcagtgtcataaacaatctttcaattaatactgtgcgggaagttgaccacctcagggacaggaacagtgggtcatcctcatccttgaacaccacgccgagccctatgcagtctc

SEQ ID NO: 85615 - DNA, 411 bp, Homo sapiens
ggcataaggggcaccacggggcacctggggtgtcctattaatgacgacccctccctgacactgaccgtctcatgggtgatggaggacaagccgatctatattggaaacgggacgaagaaggaggacgactccctgaccatctttgcggtggcaaagcgggaccacgtcagtgacacgtgtggagcctgcaccgatctagaccataacctggacaagggctacctcaccgtgctaggtgagcaggccactccaactaaccggttgggtgccctgcccaaaggacgggcaaaccggacccgggacctggagctgacctacctggccgagaggatcgtgcggctgacctggatccccggggatgctaacaaccgtcccatcacagactacgactgccagattgaagaacaccaa

SEQ ID NO: 85616 - DNA, 491 bp, Homo sapiens
  misc_feature (1)...(491): n = a,t,c or g
ggggcaatgttgccctaagnactgacgatcattacacgccaagcttggcacgaggaatcacatgaatgcccataatttggccttggtcttttcatcctgtttgtttcaaacgaagggacaaactagtgaagaagtgaatgtaattgaggacctaattaataattatgtagaaatatttgaggtttcccaggctggagatttgttaattgaagtatatgtagaaaggaaggaacccgactgtagtattataattcggatatctcctgtgatggaagcagaagaattaactaatgatatattagcgataaaaaatattattcctacaaaaggtgatatttgggccacatttgaagtcattgaaaatgaagagctagagcgtcctcttcactacaaggaaaatgtactggagcaggtgcttcggtggagttcattagctgaacctggctctgcttacctggtggtgaagagattcttaaccgctgacacaatta

SEQ ID NO: 85617 - DNA, 480 bp, Homo sapiens
  misc_feature (1)...(480): n = a,t,c or g
agctccccccccttgagaccctcttttgagaccctaggccagagcggnggaattcccttcgtccatgtcatcatcacgctgctggtgatttgcacgtatggcatcgcacccgttggctttgcccagcacgtcaccacccagctggtgctgcggaacataggtgtgtacgagagcgtgaagtacatccagcaggagaacttctgggttggccccaactcgattgacctgatccacctgggggccaagttctcaccctgcatccggaaggacggtcacatcgagcaactggtgctgggcgagcgagacctggaacgggactcacgctgctgtgtccagaatgaccactccggatgcatgcagacccagcggaaggactgctcggagactttggtcacttttgtcaagtggcaagatgacactgggccccccatggacaagtctgatctgggccacaagcggacttcgggggctgtctgccan

SEQ ID NO: 85618 - DNA, 465 bp, Homo sapiens
  misc_feature (1)...(465): n = a,t,c or g
atcgagaccttaggcacngtcgnggaattcgntaagaacactgagaacaaaggtgaaatgtctagaagatgaacgattaagaacagaagatgaattatcaaaatataaggaaattattaatcgccaaaaagctgaaattcagaatttattggacaaggtgaaaactgcagatcagctacaggagcagcttcaaagaggtaagcaagaaattgaaaatttgaaagaagaagtggaaagtcttaattctttgattaatgacctacaaaaagacatcgaaggcagtaggaaaagagaatctgagctgctgctgtttacagaaaggctcactagtaagaatgcacagcttcagtctgaatccaattctttgcagtcacaatttgataaagtttcctgtagtgaaagtcagttacaaagccagtgtgaacaaatgaaacagacaaatattaatttggaaagtaggttgtt

SEQ ID NO: 85619 - DNA, 406 bp, Homo sapiens
gcgcgcaaagcggtgaggaagacctgcggttgcggtaggagagctgtggccaccgctgcgcgccggaggacgcaccgcccccactggtggaggccagcccggcgctcacctccgccacctcctcagggttctgcgccgcctcgcgaaagacttgcttgctgcgggcgaggtatgggtagaagcggtggaacgtgtggatgtccgtgcggaccatcacctcctctgggctgcccatcaccttctccatgaaggcggagtgcactgcgaaggggcggacgccagccaggccccagtcccagccccaaccccagtcccagccccaaccacgtaccggaccccgaccgcgaacagcaccgctgagctgggaagtgaggcggaaagggcgctggggaaaaccagaacattt

SEQ ID NO: 85620 - DNA, 485 bp, Homo sapiens
  misc_feature (1)...(485): n = a,t,c or g
ggagcagggnnnnnnnnaattgaaatcgactgaccttagncagngcggtggaattccgactctggccatggggaacagccactgtgtccctcaggcccccaggaggctccgggcctccttctccagaaagccctcgctgaagggaaacagagaggacagcgcgcggatgtcggccggcctgccgggccccgaggctgctcgaagcggggacgccgccgccaacaagctcttccactacatcccgggcacggacatcctggacctggagaaccagcgagaaaacctggagcagccattcctgagtgtgttcaagaaggggcggcggagggtgcctgtgaggaacctgggaaaagttgtgcattacgccaaggtccagctgcggttccagcacagccaggatgtcagcgactgctacctggagctattccccgcccacctgtacttccaggcccacggctcggaaggactcacatttcaggggctgg

SEQ ID NO: 85621 - DNA, 785 bp, Homo sapiens
tttgaggtctaaagatattactagcttgttcagacatcttcacatgcgtcagaagaaacgaaatggttctcttcccgactgccctccgccagaggatcctgccatagcacagcttctgaagaagttgctctcacagggaatgacagaggaagaggaagacaaacttctggcactgaaagacttcatgatgaaatctaataaagcaaaggccaatatagtggaccagagccatcttcatgatagtagtcagaaaggtgtaattgacttggcagctttaggcataactgggagacaagttgatcttgttaaaaccaaacaagaaccagatgacaaacgggccagaaaacatgtaaaacaagactcaaatgtaaatgaagaatggaaaagcatgtttgggtcactggacccaccaaacatgccacaggccctacctaaagggagtgatcaggaggtgattcagactgggaaacctcctcgttccgagtcctctgctggcatttgtgtccctttgtcaacttcttcacaggttccagaagtgacaactgtccaaaataaaaaaccagtaataccggttttaagtagtacaatcttaccatccacctatcagattcgaattacaacttgtaaaactgaacttcagcaactcatccagcaaaagcgggagcagtgcaatgctgagagaatagctaagcagatgatggaaaatgctgaatgggagagtaaaccaccaccacctggatggcgtcctaaagggctgttagttgcccatcttcatgaacataaaa

SEQ ID NO: 85622 - DNA, 359 bp, Homo sapiens
gactgttagtgccggggccggctttatagacgggaagccccgtacctcccctaagtccgtcaagttcctgtttgggggcctggccgggtaagctcaggccccagggatgggaaaagaggaggaagggaagggcaaaaggaaccgggcccggttcatctctgggtctgttgcagagaactgtgccggcacggggtcagcgcgatctccagcgtattgcgagttccccgatgggctgctagggccccattgcaggacccttatggactgcatgcagggtcgttgcacaacccccgccgggccagctgagtttcccagcgcattgctaagctcggccgggcggcagggggttccaggccatt

SEQ ID NO: 85623 - DNA, 485 bp, Homo sapiens
  misc_feature (1)...(485): n = a,t,c or g
ccgcccccccnnnnnnaattggatgtctctcgcacgaggcaccggatcgataacctcggacgacccacgcgnnncgggacgcgtggggcagaatgcagggaacagtttccaatccaatgttgtaattgaatactttgagtgctcacttacccgttcggtaccgccactctcacaagcctctctgaatattcctggtttacccccagaatatttacaggtacatctgcaggagtctcttggccaggtaaggaagtttttctttatgctatagatgctatttaatcatggatgtttgctttgggcttttaaattattattacattagaagagaggtcaacaaactatggcttactggcccaatgtggcccagagcctttcttttgtaaatagattttactggaacacagccatgcctattcatttaggtagtgtctatgacagcttttgagctgcaatagcagagttagtggttaccacaggggcct

SEQ ID NO: 85624 - DNA, 1294 bp, Homo sapiens
atgagctctattggatgcctgtgggtgtctagaagcagtcagatagatgggctcacggcagagaagtctggcccggagaagcctcatggcacgtggctaatgccagagttgcacccaaaggagcagatcttagaactgctggtactggagcagttcctgagcattctgcctgaggagctgcagatctgggttcagcaacataatccagaaagcggcgaggaatctgtgaccctgttggaggatttagagagggagtttgatgacccagggcagcaggtcccagctagtccacagggaccagcagtgccatggaaggatttaacatgtctcagagcatcccaagagtcaacagacatccacctccagcccttaaagacacagctgaaatcctggaaaccatgcctttcccctaaaagtgattgtgagaacagtgaaacagcaacaaaagagggcatctcagaagaaaaatcacagggactccctcaggaaccttcatttcgaggaattagtgagcatgaaagcaatttagtgtggaagcaaggaagtgctacaggggagaaactaagatctccttcccaagggggcagttttagtcaagtgatcttcacaaacaaatctctaggaaagagagacctttatgatgaggctgaaagatgcttgattctaactacagactctataatgtgtcagaaagttcctccagaagagagaccttatagatgtgatgtatgtgggcacagcttcaagcagcattcctctctaacacaacatcagagaatccatactggagaaaagccctataaatgtaaccagtgtgggaaggcctttagtttgaggtcctatcttattattcatcagagaattcatagtggtgagaaagcatatgaatgtagtgaatgtgggaaagctttcaatcagagctcagccctcattagacatcggaaaatccatactggtgagaaagcttgtaaatgtaatgagtgtggcaaagcattcagtcaaagttcatatctcattatacatcaaagaattcacactggtgagaaaccttatgagtgtaatgaatgtgggaaaacctttagccagagctcaaaactcattagacatcagcgaattcacacaggagagagaccctatgaatgtaatgaatgtggaaaagctttcaggcagagctcagagctgattactcatcagagaatacatagtggagagaaaccctatgaatgtagtgaatgtggaaaagctttcagtttgagctcaaaccttatcagacatcagagaattcatagtgggg

SEQ ID NO: 85625 - DNA, 403 bp, Homo sapiens
acccacgcgtccgcggacgcgtgggcggacgcgtgggcacttaatgggtgtactatgcagttatcgactgtcagtggaacatcccaaaatgcttatggacaagattctccatcttgttacattccactgcggagactacaggatttggcctccatgatcaatgtagagtatttaaatgggtctgctgatggatcagaatcctttcaagaccctgaaaaaagtgattcaagagctcagacgccaattgtttgcacttccttgagtcctggtggtcctacagcacttgctatgaaacaggaaccctcttgtaataactcccctgaactccaggtaaaagtaacaaagactatcaagaatggctttctgcactttgagaattttacttgtgtggacgatgcagatg

SEQ ID NO: 85626 - DNA, 405 bp, Homo sapiens
ggaggcaggaggctcactcgcacgacagcatgatccgcgttggaaccaattaccaggccgtaattccggagtgcaagcctgagagccccgcacgctacagcaacaaggagctgaaggggatgctggtgtggtcacccaaccactgtgtgtcagatgccaagcttgacaagtacattgcgatggccaaggagaagcatggctacaacattgagcaggcgctgggcatgcttctgtggcataagcacgatgtggagaagtcgctggccgacctggccaacttcaccccattccctgacgagtggacagtagaggacaaggtgctgtttgaacaggcctttggcttccatggcaaatgcttccagcggatccagcagatgctgcctgacaagttgattcccagcctgg

SEQ ID NO: 85627 - DNA, 480 bp, Homo sapiens
  misc_feature (1)...(480): n = a,t,c or g
gaagcgccnnnttttgaagccgtttgataatcctgccacgcctgctcgnaccgaaccggacctcccgggtcgacgggaggcaggaggagtgtgctgacaaatgacaactttgcctccatcgtggctgcggaggaggagggccgggccatgtacagcaacatgaagcaattcatccgctacctcatctcctccaatgttggcgaggtcgtctggtgaggccgggcctccctcctcgcagccctctcaatccgctctgtgcccctgagatggggaaaacgcctgttcctcagatgcgctgcagggatggaggggcctgtgccctgccctggctggggctttccagggccccaccttggagtggacagggaacagcacctcttatcattctccagaggccctggtgacctatggatcatggtcaccccagcacccacggaggtgcctgaagagtcgcctgtcaaccctccagccatgaacttg

SEQ ID NO: 85628 - DNA, 389 bp, Homo sapiens
gcgccggggcacagggtctttgacaatgtctatgaagtcgattgtcagctggttcttttccacaggagagaggttgaacacgtcggggttttctccagcatcagttttataaaaggtttcaatgtcgatggagaatttctccacgaaaggacaggtgaacctgtgcggaaaggaaagcactcatcaggacctgtccttggagaggcccagtgtcctggccagggcctgttgacccactgggtaggagtggagctggtgagcgggcatggaaggagggtggagggtagccgagacttgcctgccctgtccacctcttggatcgccactttgtcccaagaacagccaggatgggggcagggaaggatttagggggagcagaagacagtgta

SEQ ID NO: 85629 - DNA, 477 bp, Homo sapiens
gggaccgagaaggaaaagggccagtgtgggattggaaagtcttgtttgtgcaaccgcttcgtgcgcccgagtgctgacgagtttcacttggaccatacctccgtcctcagcaccagtgactttggagggcgagtggtcaataatgaccactttctctactggggagaagttagccgctccctggaggattgtgtggaatgtaagatgcacattgtggagcagactgaatttattgatgatcagacttttcaacctcatcgaagcacggccctgcagccctatatcaagagagctgctgcgaccaagcttgcatcagctgaaaaactcatgtacttttgcactgaccagctggggctggagcaggactttgagcagaaacaaatgccagacggaaagctgctggttgatggttttcttcttggtattgatgttagcaggggcatgaataggaactttgatgaccagctcaagtttgtc

SEQ ID NO: 85630 - DNA, 416 bp, Homo sapiens
ggaggcaggaggataggcctggctgcagcagtgtgccctttgcatcaacgacgagctcgagggcctggggctggacgcgggcagtgaaggcgaccccccgcgtgatgactgctacgactcctccagtctgcccgacgacatctcagtggtcaaggtggaggacagcttcgagggcgagcggccgggtcgccgctccaagaagatctggctggtgcccatcgacttcgacaagttagagatcccccagcctgacttcgaggtgcccggtgccgactgcctgctcagcaaggagcagctacgcagcatctacgagagcagcctgtccatcggcaacttcgcctcgcgcctgctggtgcacctgttccccgagctcttcacgcacgagaacctgcgcaagcagtacaactgcagcggct

SEQ ID NO: 85631 - DNA, 404 bp, Homo sapiens
ggaggcaggaggttggtggtgggtctggggggccagggcggtaagggggggtctgggctggaccgagaccagctggccccaagacaccgccccctgccaggcgctcgaagcccagtgaagagggcaccgtgggtgcctgcgagggcttcaggtgcagcacgtcatgaggggacaggagcccgttagctggagggctgaatggggggtcctggaggctgagggacgagggcactgggaaggggcggctgccgaaggaagccgggtgttggtaagccgacagggcagatgaggacggaaaggtgctggaacccggcagggcacccgagatgaagagctccgtggggcctggcgtgtgcatggctggagatgaggaagaccgcgcgtcagagagaacagcgagccag

SEQ ID NO: 85632 - DNA, 387 bp, Homo sapiens
gcgccggggcatagggctggtaatgcttgcgggtgggcccggggcggcggggagtcatgttcatgtagtcactgtgcaggagcctgctcctcttactcctcacctgcaggaaagagaagtgtcagtatggagggacaatgtcatggaaggagttctaagactgtgggcacaactattcataatattaactgtcaaatgacagagacactaaaacactaaccttttttgagcaccttggacttgggtaatgactaatcacacccaactactgactcttcacattgaacttgaaaaatctcaaagaaagtattttagagaaatgcatccctgttactctcaatgctgtcatctgacctgaattaaaaatgcacactaattaacatatcg

SEQ ID NO: 85633 - DNA, 475 bp, Homo sapiens
aatacaggctgatgacaatgttctggaattagataatggtgatggttgcacaaccttgtggctatactaagaatgactgaattgtacactttaaaatggattttatgatttgtgaattatatattaaaaaataaagaaaaagtaggctagggctcaggccccttcctctggatggcagtggtggcaggggggtggtttggaaagactcccccccacacacacaccaggcctcaccccactccttccatctgggggacagaggcttcggctcaccgagagtgacaagctgcaggtgcagatccaggcgtacctggacaatatttttgatgtgggggcgctgctggaggacacagagaccaagaacgctgtgctggagcacatggaggaacatgtgctggtgctacagctgacagagcggcttcgggacgcggagaacgaatccatggccaagattgcagaactggaagaacagcta

SEQ ID NO: 85634 - DNA, 420 bp, Homo sapiens
ggaggcaggagggcgccagtgctgggctgtgcagggtgggcctgaaaaagggggtggtgcctggcggggatggagggggcccgtcccatcccccaggccggcagccctgcctcaggagagccctcagtgggctgcagaggggcctcccacggtgagagaggacggggagggactggagtgtggttcatgtggtggcctgctggtgcagggctgggctccatgttggcagggcttgcgggggcggtgctgggcttcacagtggcaggacttgcagagggggcctgggctccatggtggcagggctggtgcagggctgagctccacagtggcagggctggggggtctgtgcccacaaggccacatcaggcacaggggaccagcccccaggacagaggtcaaggcctggattttgtggcccaa

SEQ ID NO: 85635 - DNA, 352 bp, Homo sapiens
ggaggcaggaggaggttgccagtgcactagttcacatcctgcagagtacaggcaaggccaaggacttcctttcagacatggccatgtctgaggtagaccggttcatggaacgggagcacctcatattccgcgagaacacgcttgccactaaagccatagaagagtatatgagactgattggtcagaaatacctcaaggatgccattggagaattcatccgtgctctgtatgaatctgaggaaaactgcgaggtagaccctatcaagtgcacagcatccagtttggcagagcaccaggccaacctgcgaatgtgctgtgagttggccctgtgcaaggtggtcaactcccactg

SEQ ID NO: 85636 - DNA, 636 bp, Homo sapiens
atgccaagaccccacgctcaagaccccaacaccaaggccgtgagcagacaccaacaccaagacaccaacacccagaccccaacgccggggcaccaactccaagacgccaacactcagaccccaacgccaagacaccaacactcagactccagcaccgagacaccaacgctgagaccgcaacaccgagacaccaacactgagactccaacaccgagatgccgaaacccagaccccaacaccgaggcaccaactccaagacgccaacacccagaccccaacgccaagacaccaacacgcagaccccaacacccagaccccaatgccgagaccgcaacactgagacgccaacacccagaccccaacgccaaggcaccaactccaagacgccaacacccagaccccaatgccgaggcaccaactccaagatgccaacacccagaccccaacgccaagacaccaatgcccagaccccaacaccaagacaccaatgcccagaccccaatgccaagacaccaacacccagaccccaacgccaagacaccaatgccaaggccattggcagaaaccaacacgaagaccccaacgtgcagaccccaacaccaaggccatcagcgtaccaaggtggacggacactag

SEQ ID NO: 85637 - DNA, 410 bp, Homo sapiens
  misc_feature (1)...(410): n = a,t,c or g
caggtgtgttaaaacagagcaatgagggagcctcagatgactggaaagttgtcgcctctgggggtatctcaggaggtcctggggaactgggaggtggtccaggggccgcactgtgctgctgcttcagctcctcaatctgctgcagagagaagaaggggcgacggcgggaggggggctcctcagggtggcgcctcccccattcctcgaagctgcttgcgtgtcggcaccgtacgtgcaggcgcaggttcttcttgtgccgtgtgctgaagtggcagtactcacaggcgaagggcttggcccctgtgtgcttgacagccacatgggacagcaagaagtcctctcggaaggtgcggtagggacaaaagctgcatttgaagggcttgtcactgacgtgngacaactggtggttc

SEQ ID NO: 85638 - DNA, 416 bp, Homo sapiens
gcgccggggcatcttaggacacattctgtgtgtatgaaaccctacaaatgtgagttttgtggaaggagttacaagcagagaagttcccttgaggagcacaaggagcgctgccgtacatttcttcagagcactgacccaggggacactgcaagtgcggaggcaagacacatcaaagcagagatgggaagtgaaagagctctcgtactggacagattagcaagcaatgtggcaaaacgaaaaagctcaatgcctcagaaattcattggtgagaagcgccactgctttgatgtcaactataattcaagttacatgtatgagaaagagagtgagctcatacagacccgcatgatggaccaagccatcaataacgccatcagctatcttggcgccgaagccctgcgccccttggtccagaa

SEQ ID NO: 85639 - DNA, 405 bp, Homo sapiens
cggagccccagggcctgctggaagcgagatgccagcgtgggtctgcctcgccctcccctggactggggctctgcctcctggaacaggctgcccaccagctggagctggctctggccaagcatctccaccacagcagggtccagctgatcccggtttctgtttaaaaacttgtgaacctggtaggtgacagtccctgcataatgtcgcacggtgaacacgggcaggggcagccggggcttggcatagctggggtggtcaccatggtgatagtggctcttctggaggaaggtgtggtccgtggcctgggacagccatgtctgggcgtccaggatactcaggaggctgtggggctgatctaccaggaggtctaggcaggactccctcggaggctgagggacaggcacc

SEQ ID NO: 85640 - DNA, 801 bp, Homo sapiens
ggaattcccgggtcgacgatttcgtccagccgtaacatatttttagaggatgatttggcctggcaaagtttgattcatccagattcctcaaatactcctctttcaacaagacttgtatctgtgcaagaggatgctgggaaatctcctgctcgaaatagatcagccagcattactaacctgtcactggatagatctggttctcctatggtaccttcatatgagacatctgtcagtccccaggctaaccgaacatatgttaggacagagaccactgaggatgaacgcaaaattcttctggacagtgtgcagttaaaagacctgtggaaaaaaatctgccatcacagcagtggaatggagtttcaggatcaccgctactggttgagaacgcatcccaactgcattgtaggaaaggaattagtcaactggctaatccgaaatgggcatattgccacaagggcacaagctatagcaattggacaagcaatggttgatggacgttggctggattgtgttagtcatcacgaccagcttttcagagatgagtatgcgctgtatagaccactgcaggtacttttcagtgtttactgccaattagaatgtagcaagcttattttatagtctttcttcatcagtgggaataaaaagtagtttattagaagatgatttttctaacattttttcctgctgtttgaggaaagttaaaactttttttacttggtaggcagcagtgatgaaaaagctgccattagaatcaaacattttattgtttactttaaatttgatcagacaataaaaaaaaaa

SEQ ID NO: 85641 - DNA, 419 bp, Homo sapiens
  misc_feature (1)...(419): n = a,t,c or g
ggaggcaggagggttctgccaggggtcatgggtaggagactgtaggggtcgtgagtagggcactgtagggttccgccaggggtcatgggtaggagagtgtaggggtcgtgagtaggggactgtagggttcctccaggggtcatgggtaggagactgtaggggtcgtgagtaggggactgtacagttccgccaggggtcatgggtaggaaagtgtaggggtcgtgagtaggggactgtacggttcctccaggggtcatgggtaagagactgtatgggtcgtgagtaggggactgtagggttccgccacgggtcatgggtaggagagtgtangggtcgtgagtaggggactgtagggttccgccacgggtcatgggtaggaaagtgtaggggtcgtgagtaaggggagaccttggcagagg

SEQ ID NO: 85642 - DNA, 418 bp, Homo sapiens
aaagagttgaaggagaggtccatgtcggaggacaggatcatttttacatggaaacacaaagagtgcttgttattcccaagacagaggacaaagaactggacatttatgtgtccacacaggacccagcccacgtgcagaaaacagtgtcctctactttaaacatccccatcaacaggatcacctgtcatgtaaaacgagtgggtggaggttttggagggaaggtaggaaagccagctgtattcggggctattgcagctgtgggtgctatcaaaactggtcaccccattcgtctcatccttgatcgtgaagattgtgtaccaagacgtggagcctataattgtgaacattcagatctggctgcccaatccattttattctacaacatggggacaacatgttgataactggaggatggccc

SEQ ID NO: 85643 - DNA, 2932 bp, Homo sapiens
atggcccgggtgttcgttcatctcaggacggcatggccgacgtgttcgttcatctcaggacggcatggcccaggtgttcgttcatctcaggacagcatggcccaggacggcacggccgacgtgtttgttcatctcaggacagcatggccgacgtgtttgttcatctcaggacggcatggccgacgtgttcactcatctcaggacagcacggcccaggtgagtctgtttcttatgaagatgacgacattccagccccagcaagcctgctgcatgtgaacgccgcagcaccggcactcacaaatccaactgcacctgttctatgcactgcaccgaataacacagctcagaaagagaaagtccccagtggaatgagacagagacctgcgggtgttcgcatctcctcacgcacacccgaccttacgtgtgctgtttctacccactcgactgttcctggtgttcgcatctcctcgtgcacacccgaccttacgtgtgctgtttctatccactcgactgttcccagtgtttgcatctcctcgtgcacacccgatcttacgtgtgctgtttctacccactcgactgttcccggtgttcgcatctcctcgtgcacacccgatcttacgtgtgctgtttctacccactcgactgttcccggtgttcgcatctcctcacgcacacccgatcttacgtgtgctgtttctatccacgcgactgttcccggtgttcgcatctcctcgtgcacacccgatcttacgtgtgctgtttctatccacgcgactgttcccggtgttcgcatctcctcgtgcacacccgatcttacgtgtgctgtttctacccactcgactgttcccggtgttcgcatctcctcacgcacacccgatcttacgtgtgctgtttctatccactcgactgttcccggtgttcgcatctcctcgtgcacacccgatcttacgtgtgctgtttctatccacgcgactgttcccggtgttcgcatctcctcgtgcacacccgatcttacgtgtgctgtttctacccactcgactgttcccggtgttcgcatctcctcacgcacacccgatcttacgtgtgctgtttctatccacgcgactgttcccggtgttcgcatctcctcacgcacacccgatcttacgtgtgctgtttctatccacgcgactgttcccggtgttcgcatctcctcgtgcacacccgatcttacgtgtgctgtttctatccacgcgactgttcccggtgttcgcatctcctcgtgcacacccgatcttacgtgtgctgtttctatccacgcgactgttcccggtgttcgcatctcctcacgcacacccgatcttacgtgtgctgtttctatccacgcgactgttcccggtgttcgcatctcctcgtgcacacccgatcttacgtgtgctgtttctacccactcgactgttcccggtgttcgcatctcctcacgcacacccgatcttacgtgtgctgtttctatccacgcgactgttcccggtgttcgcatctcctcgtgcacacccgatcttacgtgtgctgtttctacccactcgactgttcccggtgttcgcatctcctcacgcacacccgatcttacgtgtgctgtttctatccacgcgactgttcccggtgttcacatctcctcgtgcacacccgatcttacgtgtgctgtttctacccactcgactgttcccggtgttcgcatctcctcacgcacacccgatcttacgtgtgctgtttctatccactcgactgttcccggtgtttgcatctcctcacgcacacccgatcttacgtgtgctgtttctatccactcgactgttcccagtgttcacatctcctcgtgcacacccgatcttacgtgtgctgtttctatccactcgactgttcccggtgttcgcatctcctcacgcacacccgatcttacgtgtgctgtttctacccactcgactgttcccggtgttcacatctcctcgtgcacaaccgatcttacgtgtgctgtttctatccacgcgactgttcccggtgttcacatctcctcgtgcacacccgatcttacgtgtgctgtttctacccacacgactgttcccggtgttcgcatctcctcacgcacacccgatcttacgtgtgctgtttctatccactcgactgttcccggtgttcgcatctcctcgtgcacacccgatcttacgtgtgctgtttctacccactcgactgttcccggtgttcgcatctcctcacgcacacccgatcttacgtgtgctgtttctacccacttgactgttcccggtgttcgcatctcctcacgcacacccgatcttacgtgtgctgtttctatccacgcgactgttcccggtgttcacatctcctcgtgcacacccgatcttacgtgtgctgtttctatccacgcgactgttcccggtgttcgcatctcctcacgcacacccgatcttacgtgtgctgtttctatccacgcaactgttcccggtgttcacatctcctcgtgcacacccgatcttacgtgtgctgtttctacccactcgactgttcccggtgttcgcatctcctcacgcacacccgatcttacgtgtgctgtttctatccactcgactgttcccggtgttcacatctcctcgtgcacacccgatcttacgtgtgctgtttctacccactcgactgttcccggtgttcacatctcctcgtgcacacccgatcttacgtgtgctgtttctacccactcgactgttcccggtgttcacatctcctcacgcacacccgatcttacgtgtgctgtttctatccacgcgactgttcccagtgttcacatctcctcgtgcacacccgatcttacgtgtgctgtttctatccactcaactgttccaggcctcctgactagtgtttctcagacctccacgggcca

SEQ ID NO: 85644 - DNA, 843 bp, Homo sapiens
gcgccggggcacccatgcggggtaaagtccacctgctgtcagataccatccaaggggtcaccgccacagtgacaggggtgcggtaccagcagtcgtggctctgcatcatctgtaccatgaaggccctacagaagcggcacgtgtgcatcagccgcctggttcgcccacagaactggggggagaattcctgtgaggttcggttcgtcatcctggtgctggccccacccaagatgaaaagcactaagactgcgatggaggtggcgcgcacgtttgccaccatgttctcggatatcgccttccgccagaagctcctggagacccgcacagaggaggaattcaaggaggccttggtgcatcagagacagctgctcaccatgcccccaaagtgcaaggactttgtcccttttgggaagggcatccgggaggacatcgcacgcaggttccccttgtaccccttggacttcactgatggcattattgggaaaaacaaggctgtgggcaaatacatcaccaccaccctgttcctctacttcgcctgcctcctgcccaccatcgctttcgggtctctcaatgacgagaacacagacggggccatcgacgtgcagaagaccatagccgggcagagcatcgggggcctgctctacgcgctcttctctgggcagccattggtgattttgctgaccaccgcgcccctggcgctctacatccaggtgattcgtgtcatctgtgatgactatgacctggacttcaactccttctacgcatggacgggcctgtggaatagtttcttccttgcgctttatgcctttttcaacctcagcctggtcatgagtctcttcaaga

SEQ ID NO: 85645 - DNA, 374 bp, Homo sapiens
  misc_feature (1)...(374): n = a,t,c or g
cgggtctctggaggtctttaagtgcgagatcgcccggtaagagggctaccgaggccactcggggataggggcatctaaggtgagaggtcaggtcattggaggctgcttgggagcaggaaaccttgcgccagggaggcccggcgggccatgagaactgtcacgaggcagcccgtgtgggggtctagccaccttaggggtcggcctgcggaggtcctggggtgaggactggaagtggaggatgccaggagagctggcggtgggtggggggggcggtgagggttccacccgtggcttcctctttgcatccncaggttctacaaactgcatgagcgcaagtgtgagcccatcgtcatgactgtgccaagaaaggagag

SEQ ID NO: 85646 - DNA, 970 bp, Homo sapiens
ttttttttttttgaaacaaacaagaaaaagttttattttgaaaatacagtctttaaagataaaatttggcttccattttccatatctaagtgcatccaacaagatcccaaagcaaacaaaacaacaaaacaaagacccacaacattatgtacagagctctaaaatgagctgtgaatatctacaagaaactagcatatactctttgtgaagggatgtagtagtgtgtggctttctacagttctcagtcccccagaagaagagttaactccctggagctgcaggtgcggctgcagcaagggaagagctggggtcagtgaagggctagggatgcgaccccctgggtagggagacgtggagaggtgtctggggaggggagcagcggcggcacgggacagatcctgggcttctctagaagtcctgccgcggggtgtgagtcaggctgtgccgccgcagatcacagtttcgcctgaacactttgccgcactgctcgcagctgtagggcttgatgtctgtatgggtgagaaggtgagttttcagattacttctctgattaaaggttcttccacatgtgggacatttgtgtggagattcctgcatgtgtaaagttttgtgaactgctagagttctagactgacaaaatcctttcccacactcctgacatttgaagggtttttctttggaatggatgtatctgtgatcccgcaggtgatcttgcctccggaaggccttgtggcagatgtcacacgtgtacggcctctcgtccgtgtgggtcctctcatggatgagcaaattgtaggatttggtaaagtgtctgccgcaaaacttgcagataaactcttttttcgttttggagggcaaccttcctcgagagggctttctgtccggagtcaatttactgaggcccgagatggggctacccagtcctgggctcagcttgctcaggtctcccatcttaggcggaattccaccg

SEQ ID NO: 85647 - DNA, 645 bp, Homo sapiens
tccgaccggccggaatccggtcacccaccgccgtggggtttttcttttttgccaagtatattccacatcccacacaggcaggtgctgtggtgctattgggagacagggttggcccactgagcacggagcccagggatgagagtaggggaaccagggttggaggctgggaaggcagacaaggagctgtcctctgcaaggcatgtgctctgagaggatggagacaggcagatacagcacgccgggtcaccctctgcaaatacagcttcccagatgtgatgatgccctcctactcccggaacccctggtcctgcgtcttcttcatcgtgtacctctccatcgagctgtatttcatcatgaacctgcttctggctgtggtgttcgacaccttcaatgacattgagaaacgcaagttcaagtctttgctactgcacaagcgaaccgctatccagcatgcctaccgcctgctcatcagccagaggaggcctgccggcatctcctacaggcagtttgaaggcctcatgcgcttctacaagccccggatgagtgccagggagcgctatcttaccttcaaggccctgaatcagaacaacacacccctgctcagcctaaaggacttttacgatatctacgaagttgctgctttga

SEQ ID NO: 85648 - DNA, 420 bp, Homo sapiens
aaatattaacctagtgagttataatatgaattttgcaagaaaaaacattgatgagaattgtagatgggggaaaacacctagcggcagttcttgctattctaagcatgaaaaaattcatagtggaatgatacactgtgaagctactcattgtggaaagattcttagccataaacaatctcttattcattatgtgaatgttgaaactggggagaagacctatgtatgtgttgaatgtggaaaatcctttctcaagaagtcacagattattatacatcaaagaattcatactggagagaaaccttatgattgtggtgcatgtggaaaagccttcagtgagaagtcacaccttattgcacatcagagaactcatactggggagaaaccttatgattgttctgaatgtggaaaaggcttttctca

SEQ ID NO: 85649 - DNA, 1799 bp, Homo sapiens
atactgatgacttattagtccagtgcggtggaattcagaccagaccaagatcctgaagtaagtgaagaaatggatgagaggtttagatatgaaagtgattttgatagaagactttcgagagtgtatacaaatgacaggatgcacaggaacaaacgagggaatatgcctcctatggaacatgatggggatgttatagaacagtcaaacataagaatttcatctgctgaaaataaaagtgctccagacaatgaaacatccaaatctgctaatcaagatacctgtagtccttttgcagggatgctctttggaggtgaagatcgagaacttattcagagaaggaaagagaaatacagactagaactggttggaacaaatggctgagcaacagaggaacaagagacgagaaaaagatttagaactcagggttgcagcgtctggagcacaagaccctgagaaatcgtggaatgaattactcacatcattgcagttaagtaaggaggagcctgatagactaaagcagtttagtgtggcaccaagacactttgaagagatgataccacctgaaagacccagaatagctttccagacacctctcccgcctttatctgccccatctgtcccacccatcccatcagttcatcctgttccttctcaaaatgaagatttgcgcagtggactcagccagcgcccttggtgaaagggcgtctcccaggattgcacctctgcctatcacctcccctactaccacctttggctactaactatcgaactccttatgatgatgcatactatttttatggggccaggaatactttcgatcccagtcttgcttattatggttcaggaatgatgggcgtacagcctgcagcttatgttagtgctcctgtcacccaccaactagcacaacctgttgtgaatacggttggacagaatgaactgaagattacaagtgatcaagtgataaattcaggattgatttttgaagataaaccgaaaccttccaaacagtcacttcagtcttaccaagaggctttgcagcagcagattcgggaaagagaagaaagaaggaagaaagaacgtgaagaaaaagaagaatatgaagctaaattagaagctgaaatgagaacatataatccctggggaaaaggtggaggtggtgctcctctcagggatgcaaaaggaaatctgataactgatttgaataggatgcacagacaaaatatagatgcctaccataacccagatgcaagaacatatgaagataaaagggctgttgtatctctagacccaaatttagccacttcaaatgctgagaacctagaagatgctgcaaataaaagctcaggtcatatgcaaacacagagctctccttttgctcggggaaatgtatttggtgagcctccaactgaacttcagattaaacagcaagaattatacaagaattttcttcgtttccagattgaggaaaagaaacaaagagaggaagcagagcgagagagactgagaattgcagaagaaaaagaagaaagacggcttgcagaacagagggcacgaattcagcaggagtatgaagaggaacaggaaaagaaaagagagaaagaggaggagcaaaggctaaaaaatgaagagcatattcggttagctgaagaaagacaaaaagaagcagaaagaaagaagaaagaagaagaagaaaaatataacctgcaacttcagcactactgtgaaagagacaatttgattggggaagaaacaaagcacatgagacagccttctcctatagttcctgctcttcagaacaa

SEQ ID NO: 85650 - DNA, 421 bp, Homo sapiens
gtccgggccgtcgctccgccgccgccgcagatccggctctcaccctcggctcccgaggccccgcggcgcctccttgtgcggactctgcgggaccctccccggcaggcgctgtgccctggagaaggcacagtggctcatgcatggccgcggggacggcggcgcggaaggcagcgccggtgctggaggcccccccgcagcaggagcagctctctcatacaaagctttctgcagaagacacatggaacctgcagcaggagaggatgtacaagatgcaccggggccacgattccatgcacgtggaaatgatcttgatcttcctctgcgttctggtcattgcccagatagtgctggttcagtggagacagaggcatggccgatcctacaatctggtgaccttgttgcagatgtgggtagtcccctt

SEQ ID NO: 85651 - DNA, 542 bp, Homo sapiens
  misc_feature (1)...(542): n = a,t,c or g
tttcgtttccgggttcggcgcggggcggggatgtgaatcccgatggagcggcccgaggaaggcaagcagtcgccgccgccgcagccctggggacggctcctgcgtctgggcgcggaggagggcgagccgcacgtcctcctgaggaagcgggagtggaccatcgggcggagacgaggttgcgacctttccttccccagcaataaactggtctctggagatcactgtagaattgtagtggatgaaaaatcaggtcaggtgacactggaagataccagcaccagtggaacagtgattaacaagctgaaggttgttaagaagcagacatgccctttacagactggggatgtcatctacttggtgtacaggaagaatgaaccggaacacaacgtggcatacctctatgaatctttaagtgaaaagcaaggcatgacacaagaatcctttgatacctcagggtngcaggtgcagggcgaggggccgatccccggggtccctccgtcgtcgcccgccactcaggtgtgctttgaggaaccacagccatt

SEQ ID NO: 85652 - DNA, 395 bp, Homo sapiens
tttcgtcgaggctggaggcggcagtctggggtcctgaggctgctggaggcccagttggacgcctttgtcagtgttctccgggagacccccagcctgctgcagctccgtgatgcccacgggcctcccccagccctcgtcttcagctgccagatgggcgtgggcaggaccaacctgggcatggtcctgggcaccctcatcctgcttcaccgcagtgggaccacctcccagccagaggctgcccccacgcaggccaagcccctgcctatggagcagttccaggtgatccagagctttctccgcatggtgccccagggaaggaggatggtggaagaggtggacagagccatcactgcctgtgccgagttgcatgacctgaaagaagaggtcttggaaaa

SEQ ID NO: 85653 - DNA, 406 bp, Homo sapiens
ctgtagaccggggcaccgaggcgtggcagcgagaccccgccttctcgggtctgcagagggtcgggggcgttgacgtgtccttcgtgaaaggggacagtgtccgcgcttgtgcttccctgggggtgctcagcttccctgagctcgaggtggtgtatgaggagagccgcatggtcagcctcacagccccctacgtgtcgggcttcctggccttccgagaggtgcccttcttgctggagctggtgcagcagctgcgggagaaggagccgggcctcatgccccaggtccttcttgtggatggaaacggggtactccaccaccgaggctttggggtggcctgccaccttggcgtccttacagacctgccgtgtgttggggtggccaagaaacttctgcaggtggatgggct

SEQ ID NO: 85654 - DNA, 411 bp, Homo sapiens
cttcgtaaagatgattatcctatctaagtttcacatttcctggattaaaggagtatttgacaagagagaatgtagcacaatcatacccagctcaaaaaatcctcacagatgtactccagtatgccaagtctgccagaatttaatcaggtgttactgtggccgactgattggagaccatgctgggatagattattcctggaccatctcagctgccaagggtaaagaaagtgaacaatggtctgttgaaaagcacacaacgaaaagcccaacagatacttttggcacgattaatttccaagatggagagcacacccatcatgccaagtatattagaacttcttatgatacaaaactggatcatctgttacatttaatgttgaaagagtggaaaatggaactgcccaagcttgc

SEQ ID NO: 85655 - DNA, 431 bp, Homo sapiens
aaacgtagatgtggtcccaggccctccagatggcgccccgcatgtggtggctgtgacggggaggatggtcacactcacatggaacccccccaggagtctggacatggccatcgacccggactccctgacgtacacagtgcagcaccaggtgctgggctcggaccagtggacggcactggtcacaggcctgcgggagccagggtgggcagccacagggctgcgtaagggggtccagcacatcttccgggtcctcagcaccactgtcaagagcagcagcaagccctcacccccttctgagcctgtgcagctgctggagcacggcccaaccctggaggaggcccctgccatgctggacaaaccaaacatcgtgtatgtggtggagggacagcctgccagcgtcaccgtcacattcaaccatgtggaggcccagg

SEQ ID NO: 85656 - DNA, 414 bp, Homo sapiens
tttcgtacgaaatcgtacaggaagggctcctacaggtgtatcgtcagcgagtggatcgccgagcagggcaactggcaggaaatccaagaaaaggccgtggaagttgccaccgtggtgatccagccgacagttctgcgagcagctgtgcccaagaatgtgtctgtggctgaaggaaaggaactggacctgacctgtaacatcacaacagaccgagccgatgacgtccggcccgaggtgacgtggtccttcagcaggatgcctgacagcaccctacctggctcccgcgtgttggcgcggcttgaccgtgatttcctggtgcacagctcgcctcatgttgctttgagtcatgtggatgcacgctcctaccatttactggttcgggatgttagcaaagaaaactctggctactattac

SEQ ID NO: 85657 - DNA, 545 bp, Homo sapiens
tttcgtgatgatattcgggggatccagctgagtcccggggtgggctcctctgctggcccacccggagatctggaggatgatgaaggcttgaagcacctgcagcaggaggcggagaagctggtggcctccctgcaggacagctccttggaggaggagcagttcacggctgccatgcagacccagggcctgcgccactctgcagccgccactgccctcccgctcagccatggggctgcccggaagtggttctacaaggacccacagggcgagatccaaggccccttcacgacacaggagatggcagagtggttccaggccggctacttttccatgtcactgctggtgaagcggggctgcgatgagggcttccagccgctgggcgaggtgatcaagatgtggggccgcgtgccctttgccccagggccctcacctcccccactgctgggaaacatggaccaggagcggctgaagaagcaacaggagctggccgcggcggccttgtaccagcagctgcagcaccagcagtttctccagctggtcagcag

SEQ ID NO: 85658 - DNA, 401 bp, Homo sapiens
cgtatccatttattgcttctagaaggtgatcatgccatacaatcttttttactccaaccttctgtttttcatttgtggaataagaatgtctcagtgagccacagaatgaagaaaactcacaatcttccaccttggtatattcagtcgagtgtctctgcctattttttcaggtgactaggaaatggtcactgggctcttacttctgtgacgtgggtatcactggctcacaaatgtatttggtaaacagagatatgctcttcgtttatttcctggcagacctcactctacggacagtgccacacatagaaagatgactctgtcacttgcagataggtgttcaaagacacagaagattataatcttgccaatggctggtcgtgatcctgaatgccaacgcacaa

SEQ ID NO: 85659 - DNA, 463 bp, Homo sapiens
  misc_feature (1)...(463): n = a,t,c or g
atgccggaccctatgtgaggggcctcagagatttgaagaatatgagtatttagggtataaggctggtctgtatgaagctattgcagatcactacatgcaggtgcttgtttgtcagcatgaatgtgtgagggaacttgccacccgccctggccgcctctctcccatcgagaattttcttcctctgcactatgattacctacagtttgcctactatcgagttggtgagtatgtgaaagccctggagtgtgccaaagcctatcttctatgccatccagatgatgaggatgtcctagacaatgtggattactatgagagtctgctggatgatagcattgacccggcatccattgaggccagagaggatttaacaatgtttgtgaaacgtcataagctggagtctgagctgataaaatcagctgcagaaggtctggggntttcatacactgaaccgaattattggatc

SEQ ID NO: 85660 - DNA, 1599 bp, Homo sapiens; identical to SEQ ID NO: 79859

SEQ ID NO: 85661 - DNA, 407 bp, Homo sapiens
  misc_feature (1)...(407): n = a,t,c or g
agagaatgcctgtaaagtgctaggcacatagtgttcgataagtgcttgatgttattggaattatgtcttgtctcctctgactagctcaccccaaatttaagtctactctcctcaagctccctacttctcttgactcccactatctcctgcaaagggataggaagtgggccagaaggtaatgggagctccctgacccactggggcacctgttccatcagatcctgcctgctggagaccanacagaggtgggggagaagggtgtcacccttagcggaggacagcgtgcccggattgcccttgctcgtgctgtctaccaggtcagttaaagatggaggttgcagtggcagggaggtggggggaagccacagccttgggaacttggctgagttaggaggataggaatattt

SEQ ID NO: 85662 - DNA, 383 bp, Homo sapiens
gcatcctgcccggcttttgctggggttgggagggggcaggcaggaagcgagggcctgcggggtctctgcgtttccgggggaaacagccggccctgccctgggagggtcacagcccgcccgctgctgaaggcggctctgagctttttcgtcgccacatccctctcccgcccctcagttccctgagtgtggcttctacggcctttacgacaagatcctgcttttcaaacatgaccccacgtcggccaacctcctgcagctggtgcgctcgtccggagacatccaggagggcgacctggtggaggtggtgctgtcggcctcggccacctttgaggacttacagatccggccgcacgccctcacggtgcactcctatcgggcgcctg

SEQ ID NO: 85663 - DNA, 396 bp, Homo sapiens
aagctgcctacacgcttctcttgcacgctgagcttctgcagtggtctgacaagccctgtgtgcctcatttgcttcagagggacagttactatgtttatacccagcaagagcttaaagagaagctgtatcaagaaatcatatcatatttcgacaaaggcaaaatgtgggagaaggccatcaagctgagcaaagagttggctgagacttacgaaagcaaagtatttgactacgagggccttggcaacctcctgaaaaaaagggcctcattttatgagaacatcattaaggcaatgagtcctcagcctgaatactttgctgttggatactatggacagggctttccttctttcctacggaataaaatcttcatctatcggggaaaggagtatgagaggc

SEQ ID NO: 85664 - DNA, 537 bp, Homo sapiens
tttcgtggcggaggaggaggtggaggaggcggcggcggcggcgcgggatgtggagggagtgagttagggggggctgctagtgcatgtgcatcgccgctcttcagccgtcggtgcctccagaactcagagtggctgctcttagatcaacacatgctcaaggtgcattaccccaaattcggagtgtcagaagactgcctctacctgaacatctatgcgcctgcccacgccgatacaggctccaagctccccgtcttggtgtggttcccaggaggtgccttcaagactggctcagcctccatctttgatgggtccgccctggctgcctatgaggacgtgctggttgtggtcgtccagtaccggctaggaatatttggtttcttcaccacaggggatgaacacagcccggggaactggggtcacctggaccagctggctgccctgcactgggtccaggacaacattgccagctttggagggaacccaggctctgtgaccatctttggagggtcagtgggaggagaaagtgtctctgttctt

SEQ ID NO: 85665 - DNA, 442 bp, Homo sapiens
tttcgtgaaatattggatgactaaaaaccagtattgtgatcattcctgtccttgggagacattttgttgcagcctgagtgtcaggaatcgggctttccctgggccagctggcttgctttatcccataggcacagtgctttgtgggcttggccaggtttgcatcctgcactatctgctggaggccccgagcacagccagctgggagtctgctttaagtgatgtgcagcctcccacttctctttcctactatttttaatttggaaaattaatttgctttccaggagaatcactgtttacgtattaagatccttggggattgttattactgcgtctcggggctgcctgaagcaagggctgaccacgcccactgctgtgtggagatgggcatggacatgatcgaggccatctcgttggtcccggaggcgacaggggtgaacgttat

SEQ ID NO: 85666 - DNA, 439 bp, Homo sapiens
tttcgtctctggacacgcaggcaggaatccccgagtagctctaatgggaatgccttcgacacgactgcttaaggggccattctggggcctacatcctggagagggagtcctggctcgctcacttcctccctgttcctccacccgccttctccgcaccctcggccctgagagtggagcttgggcagcaaaagcggggactgggccgcattctgagcaccccaggtcctcctaggaccaaagtagggccaggaggcttccctggccggagcagacctcactgacctccctgcatttggttccccgtggggctctttcaggaggaagaaccagcgtgcccgccagtccccggaggacgtttacttctctcagtcaaaacaactgaagcccctgaagacatacgtggacccccacacatatgaggaccccaaccaggctgtgt

SEQ ID NO: 85667 - DNA, 427 bp, Homo sapiens
  misc_feature (1)...(427): n = a,t,c or g
tttcgtgtgtacatgtgaaggatgcatgaggatggctggtgcccacacccagtggggcctactgctgcacaggcaggacagtgaggccggccacagagctgctggggcagagtgggcatggagggagggttccaggcctcgggcttgggtcctaggtggctgagctctgcacctccctctggaccagggcatccagaggagcatggctgagggtgcactcggggctgaccgtcccagggcctgggctgtccaggacaggcagctgggggctcaggcagggacatggaggacaggtagtggagctgccaccacagagctgagctctgggcatcggggtagggggctacggcctgtcagcgggtgaggagaaattgaggcctgaggatgggtgagtggctgtaccccctctgagtgaggactgtccccn

SEQ ID NO: 85668 - DNA, 428 bp, Homo sapiens
tttcgtcgcggttggtcctgctagctggggcagcggcgctggcgagcggctcccagggcgaccgtgagccggtgtaccgcgactgcgtactgcagtgcgaagagcagaactgctctgggggcgctctgaatcacttccgctcccgccagccaatctacatgagtctagcaggctggacctgtcgggacgactgtaagtatgagtgtatgtgggtcaccgttgggctctacctccaggaaggtcacaaagtgcctcagttccatggcaagtggcccttctcccggttcctgttctttcaagagccggcatcggccgtggcctcgtttctcaatggcctggccagcctggtgatgctctgccgctaccgcaccttcgtgccagcctcctcccccatgtaccacacctgtgtggccttcgcctgggtgtcc

SEQ ID NO: 85669 - DNA, 693 bp, Homo sapiens
tttcgtgcttgggagaaccgtgggcgctgaggcgctgtaggtggctccctcccaccccaacgatttcagagagaaacaagtcggaatctgagaagtgaggctccagataaactgtaaactgctggaagggggcgatggctgtggccctgggttgtgcaatccaggcatccttgaatcaaggctctgtgtttcaagaatatgatactgactgtgaagttttccgtcagcgcttcaggcagttccagtacagagaagcagctgggcctcatgaagcatttaacaaactctgggagctttgctgtcaatggctgaagccaaagatgcgctctaaggaacaaatcctggagctgctagtgttggagcaattcctaactatcctgcccacagagatagagacctgggtgagggagcactgcccagagaatagagaaagagttgtgtcactgatagaagacttacagagagaacttgagataccagagcagcaggttgatatgcatgacatgctcttggaagaactggcaccagtgggaacggcacacataccaccaaccatgcacctagagtcacctgcactccaggtaatgggacctgcccaggaggccccagtagcagaggcatggatcccacaggcagggccaccggagctgaactatggtgctactggagaatgtcagaactttctggaccctg

SEQ ID NO: 85670 - DNA, 433 bp, Homo sapiens
cgatattccctgaaagccaccaatggatctggacaagcgactagtactgctgagcttctcgtgaaagctgagacagcaccacccaacttcgttcaacgactgcagagcatgaccgtgagacaaggaagccaagtgagactccaagtgagagtgactggaatccctacacctgtggtgaagttctaccgggatggagccgaaatccagagctcccttgatttccaaatttcacaagaaggcgacctctacagcttactgattgcagaagcataccctgaggactcagggacctattcagtaaatgccaccaatagcgatggaagagctacttcgactgctgaattactggttcaaggtgaagaagaagtacctgctaaaaagacaaagacaattgtttcgactgctcagatctcagaatcaagacacacccgaa

SEQ ID NO: 85671 - DNA, 435 bp, Homo sapiens
  misc_feature (1)...(435): n = a,t,c or g
gcgtgctggtaggccacacccggtttcagggccagcagctccgtcaaggtccactgcatgaaactgatgaaggggagggcaccaggcgaggtgaacttgcagttcctcacatacgtgatgtacatttgctgcggagagacccgggtcagagccacctgggatcagggccatgcacctccaccgcccactccagggcccctgtgaacacctgggcctttccctcagagctgggcctcgaggaagagccgtagccccttgcacagcccccacccccaagtgcccaccagcctcaggcctgggagaagctggggcagaagctcctgctgcacactgggcccctctgggggctgagggtccccacatgcaggccacccatggcttgtggacgggcagtangactgtaccctgccatggccttaggcccaacaccagtgg

SEQ ID NO: 85672 - DNA, 435 bp, Homo sapiens
ggaattaacggtcgacccacgcgtccggcaggctggaaactctatggagaggatgggaatggtcaggctgcaggggaggcagcccaaggacacagatccaggtctctgtgcttatttctctcctccgttcctaccctgacccttgctgctctgcctctgtctttattcctggctccgtgtgtgtgcgcgcgcgtgcacgcgcacttgcctcctggcttcatccaggtttaccgtcagttacacctattttacgttgagcctgagaatgagagagctgggcgtgagcgtccacttcagacacgtggtccccagcatcatggaggtgcctgcccggctgtgctgcatctttctcctccagcagattgggaggaagtggagcctggctgtgactctcctccaagccatcatctggtgctggcttctcctttttctcct

SEQ ID NO: 85673 - DNA, 220 bp, Homo sapiens
gccagggggcctgaaatttttcccatttccaatgcaacaggggggcccatctggggcagggaaaagcacaattttgcgcctgctgtttcgtttttacgacatcagctttggctgcatccgaatagaggggcaggacatttcacaggtgacccaggcctttttccggtctcacattggagttgggccccaaaacactgtcctttttaatgacaccatcgcc

SEQ ID NO: 85674 - DNA, 431 bp, Homo sapiens
  misc_feature (1)...(431): n = a,t,c or g
tccagcgggggaattctacctttaacactagttatcccatttaacctctgtcacaatcctgttatgaactggagagctgagatctcagagaatgtgcagccacccaagaacaccaccaaggtgaggtgaagggactcactggaagccttggttttcttggtcacgtctgagatcagaccagactcaactcttccctgacatgctagtcctgggggatgcattcagcccacctcttgttgccacctttccccactgtcagagccacatacccatgaatgcaaactcactgcagttgagcagccctattacctcattagggaagcttcaccgcttcagcgctgggaaggcataggcactggtttcaagtctacagacagtatcaggcttaggaaaggaaaggcgtgacagtcacactgtcacattntttgctt

SEQ ID NO: 85675 - DNA, 435 bp, Homo sapiens
aattctggttaattagaaaagaccacaagaaaaacaaagagaaaaaaaagaagaaaagtatagatccagattctattcaaagtgccttattagcatcaggtcttggatcaaaacgacctagtttttcatctacaccagttatctcacctgctcctaacagtacaccagctaacagtaacaccaacagtaacagtagccttataacaagtcaggatgctgtggaaagggctcagcagatgaagaaagacctgcttgataagctagaaaaattagctgaagacctcccccctaataccctggatgaacttatcgatgaacttggtggccctgagaacgttgctgagatgactggccgcaagggacgggttgtgagcaatgatgatggaagcatatcttatgagtcaagatctgaacttgatgtgcctgtggaaataa

SEQ ID NO: 85676 - DNA, 376 bp, Homo sapiens
ggaggcaggagagggggttcaaccgcgccctgaactgcatgaacttgcccccagacaaggtccagctgctgagccagtatgacaacgagaagaagtgggagctcatctgtgatcaggagcggtttcaagtcaagaatccccccgcagcctacatccagaagctgaagagctatgtggatactggtggggtcagccgaaaggtagcagctgattggatgtccaacctggggtttaagaggcgagttcaggagtccacgcaggtgctacgggagctggagacctccctgaggaccaaccacattgggtgggtgcaggagttcctcaatgaagagaaccgtggcctggatgtgctgctcgagtacctggcctttgccca

SEQ ID NO: 85677 - DNA, 1297 bp, Homo sapiens
atggacggtgaggcagtccgcttctgcacagataaccagtgtgtctccctgcacccccaagaggtggactctgtggcaatggctcctgcagcccccaagataccgaggctcgttcaggctaccccggcatttatggctgtgaccttggtcttctctcttgtgactctctttgtagtggatcatcaccactttggcagggaggcagaaatgcgagagcttatccagacatttaaaggccacatggagaattccagtgcctgggtagtagaaatccagatgttgaagtgcagagtggacaatgtcaattcgcagctccaggtgctcggtgatcatctgggaaacaccaatgctgacatccagatggtaaaaggagttctaaaggatgccactacattgagtttgcagacacagatgttaaggagttccctggagggaaccaatgctgagatccagaggctcaaggaagaccttgaaaaggcagatgctttaactttccagacgctgaatttcttaaaaagcagtttagaaaacaccagcattgagctccacgtgctaagcagaggcttagaaaatgcaaactctgaaattcagatgttgaatgccagtttggaaacggcaaatacccaggctcagttagccaatagcagtttaaagaacgctaatgctgagatctatgttttgagaggccatctagatagtgtcaatgacttgaggacccagaaccaggttttaagaaatagtttggaaggagccaatgctgagatccagggactaaaggaaaatttgcagaacacaaatgctttaaactcccagacccaggcctttataaaaagcagttttgacaacactagtgctgagatccagttcttaagaggtcatttggaaagagctggtgatgaaattcacgtgttaaaaagggatttgaaaatggtcacagcccagacccaaaaagcaaatggccgtctggaccagacagatactcagattcaggtattcaagtcagagatggaaaatgtgaataccttaaatgcccagattcaggtcttaaatggtcatatgaaaaatgccagcagagagatacagaccctaaaacaaggaatgaagaatgcttcagccttaacttcccagacccagatgttagacagcaatctgcagaaggccagtgccgagatccagaggttaagaggggatctagagaacaccaaagctctaaccatggaaatccagcaggagcagagtcgcctgaagaccctccatgtggtcattacttcacaggaacagctacaaagaacccaaa

SEQ ID NO: 85678 - DNA, 358 bp, Homo sapiens
cgtgattttgctgatgttgaattagtcctgagcagaaagtaaaagatttcccacattctttacattcataaggtttctcaccagtatgaattctccgatgttgattaaggtatgtacgctgtctaaaggccttcccacagtccggacattcatagggtttctcaccagtgtgaattctgtgatgttgggtgagtcctgagacactgacaaaggctttcccacattcctgacattgataaggtttctcaccagtatggatttgttgatgttgagtaagtcgtaaacgaagtctaaaggccttcccacattccttacaatcataaggtttctcaccagtgtgaatttgctgatgttgaag

SEQ ID NO: 85679 - DNA, 370 bp, Homo sapiens
  misc_feature (1)...(370): n = a,t,c or g
ttgctgatgtggagactaaacggtggcagagcacaaaaagggaaatccaagagatattttcatctcctgcttgtctaactggaagttttttaaggaaaagaagaactacagaaatgatgcctgtttatttggacttaaataaagcaagaaacatcttcaaggagttaacccaaaaggactggattactaacatgataaccacctgcctcaaagataatctgctcaaaagacttccatttcattctccaccccaagaagctttagaaattttcttccttctcccagaatgtcctatgatgcatatttccaacaactgggagagccttgtggttccatttgcaaaggttggttgtaaaatgagtgaccagtn

SEQ ID NO: 85680 - DNA, 500 bp, Homo sapiens
cacgcgtccggctcaacaacgacggcctctcgcccctcatgatggctgccaagacgggcaagattgggatctttcagcacatcatccggcgggaggtgacggatgaggacacacggcacctgtcccgcaagttcaaggactgggcctatgggccagtgtattcctcgctttatgacctctcctccctggacacgtgtggggaagaggcctccgtgctggagatcctggtgtacaacagcaagattgagaaccgccacgagatgctggctgtggagcccatcaatgaactgctgcgggacaagtggcgcaagttcggggccgtctccttctacatcaacgtggtctcctacctgtgtgccatggtcatcttcactctcaccgcctactaccagccgctggagggcacaccgccgtacccttaccgcaccacggtggactacctgcggctggctggcgaggtcattacgctcttcactggggtcctgttcttcttcaccaac

SEQ ID NO: 85681 - DNA, 119 bp, Homo sapiens; identical to SEQ ID NO: 85074

SEQ ID NO: 85682 - DNA, 407 bp, Homo sapiens
ccgtcccgctcaaatgatgggatgatggctcatttgcttacgtgtaagctttgacagcatcacgaggttcaccgggatcaccaatgccatactcattttcagcaaacactcggaagaagtaggattttccctcctccaaattaggtactctgaagcttgttttggagcactcagttgtcactgtagaccaagatttcctctctgcatcacgtttttgtaccacatagtttatgatggggcttccgccatcaataatgggaggctcccaggtaacataagcagagtctttggatatttccttaacagtcacattgacaggcggcccatgagtatctggataaataggaggtaaataagaaatgaatgtgtaaaaaatacataagctattttaaaatatatatgattct

SEQ ID NO: 85683 - DNA, 229 bp, Homo sapiens
atctatgccttcttttttgttgacattaactaccacgaagttgctaaaagactctggggggacatctacttcaaccctaagacgcgaaagctcaccaaaaaggccccaactagcagctcccacagaagtttcgtggagtttatcttggaggatcttataaagaggctccaagataaactcctcgcccaggttgtaggtgacgtggacaccagcctcccacggaccctaa

SEQ ID NO: 85684 - DNA, 1209 bp, Homo sapiens
ccatcactataggctgcgggcacagtttctgtaggccctgcctctgtctttgctgggaagaagcacacactcctgccctgcgtgcagggaactgtcacagcaggaagatttcaaccaatattcttctgaagaatctagtgtccattgccagaaaagccagtctctggcaattcctgagctctaatgaacaaatgtgcggtatccacagggagacaaagatgttctgtgatgtgggcaagagcctgctctgttttctgtgttctaactctcaggaacactggggcacagaaacactggctcactgaaggggcagctaaggaacactgtgtaagtgatgactcagagcactttgaaagctggagggcagcacagttgtttgaatcagtggatgcagaacccatgaatatggagagtcaattgcatttcattatgcccaaagctctcagaactaaaaaggcggcttcagactcctccaaagaacaagtggccaattcgagggaatcctccccgtcaccaaaagaagtaaacgacagtccgagagccgccaccaagtctcctgaatcccagaatctcatcgatgggacaaaaaaaccatccctaaagcaaccagacagtcccagaaacatctcaagtgacaacagcagcaagggaaccccgtcctctcctgcaggatccacaacagcaatccccaaagtccgcataaaaaccattaagacatcttctggggaaatcaagagaacagagaccagggtatttccagaagtggatcttgactctgggaagaaaccttccgagcagatggtgtctgtgatggcctctgtgacatcccttctgtcatctccagcatcagccgctgccctttcctctccccccagggtgcctctccagtctgcagtggtgaccaatgcagttttccctgcagagcccacccctaaacaggtcacaatcaagcctgtggctactgctttcctcccagtgtctgctgtgaagacagcaggatcccaagtcattaatttgaagcttgctaacaacaccacggtgaaagccacggtcatacctgctgcctctgtccagagtgccagcagcatcatcattaaagctgccaatgctatacaggagcaagctgtcatgatgccagcatccagcctggccaatgccaaacttgtgccaaagactgtgcaccttgccaaccttaaccttctggcttag

SEQ ID NO: 85685 - DNA, 433 bp, Homo sapiens
cgtccggacatgtgtgttagtagccagcagttaacacctattttcctgtcataggcactaccaagatatttgacaagccaaggaagcgaaaacgacagaggcatgctgcagccaagatgcagtgtaaaaaagtgaaaaatgatgactcgtcaaaagagattccaggctcagaggtattactcagttcctgatcttttcaccttctaaagagaagctacttttcacgccagaggccacatccctctttcccttgagttttcttaagaatactattctactgaaatggctgatggccataaggaatcttggaggaaaagtagagccttatcctaataataaggcaaggcatgtattgcagctgtcaatatggtctttttaaaagatcatcacatcctatgctgtaggtggccaatcaggtatataagtggttcat

SEQ ID NO: 85686 - DNA, 378 bp, Homo sapiens
tggaagtgggctgccaacaggcagtacctctaatatatttgctgctactggagctacaccaaaaagtgccgtggattcagggtcctcctcctcttcctcctcttctagttttgtgaatggtgctactaccaaaaaccttccagctgtacaaactgttgctccaatgccagaagattcagctgaaaatatgagcatcactgcaaaacttgaaagagcgttagaaaaagttgctcctcttcttcgtgaaatttttgtagactttgccccattcctatctcgtacacttcttggcagtcatggacaagagctattgatagaaggccttgtttgtatgaagtccagcacatctgtggttgagcttgttatgctgctttgctc

SEQ ID NO: 85687 - DNA, 395 bp, Homo sapiens
aagacgcacactgtcagaggaaactggccatgcaggaattcatggagatcaatgagcggctaacagaattgcacacccaaaaacagaaacttgctcgccatgtccgagataaggaagaagaggtggacctggtgatgcaaaaagttgaaagcttaaggcaagaactgcgcagaacagaaagagccaaaaaagagctggaagttcatacagaagctctagctgctgaagcatctaaagacaggaagctacgtgaacagagtgagcactattctaagcaactggaaaatgaattggagggactgaagcaaaaacaaattagttactcaccaggagtatgcagcatagaacatcagcaagagataaccaaactaaagactgatttggaaaagaaaagt

SEQ ID NO: 85688 - DNA, 391 bp, Homo sapiens
tcgcccacgcgttcgcccacgcgtccgcccacgcgtccgcggacgcgtgggtttgaactttgttactatcgaagagtccaaacccgatgatgcagttcatgaacctatcaatgggacaataagcctgccggctgaactggaggagcaaagtataggaagatttgactggggcccggcacctccaacaacattcaagcctaacagtcctgacctggccaagcactacaaatctgcttctccacagcctgcttttcatctcaaaccagacactccagtttccgtgaaaaagcaccacgtgattcaggaactccctttggacaacacctttgttgggggttgtgacaccctttctaaacgctcttccactagttcagatcacttcagtgcctca

SEQ ID NO: 85689 - DNA, 577 bp, Homo sapiens
agaaaatggctgcgaataatttttagattttatttacaactttgagaaataatttcttggaaagctgctgtttgtctttccagtagtttttctgtttagtgtgatcaaggtaaactcatatttgacactcaggtgtagtaatttttatttgggcttgtaagtcatgttcactgaaccaggagtcggcgtcctggcacagccttagctatgactggtagattcagttagcttttgtgttagtttatcataaagtaagcattttggagtcactaatattttaaaatttccttgacaacgtaaaacgtagttggaatatagatgaatgaagtgtttatattaccttataatgttgagaaactgccatcatggagtaaattttctcatatcctgacttcatagggtgtgaccgagtgttatgagtgtcatcctaagccgacccagagaacctttcctggctgtacaattcgtaacacaccttcagaacctatacattgcatcgtttgggcacagtacttgttcaaagtagagtgtatatttcttggcatgcttttccggactgatgatgggaaatgggagc

SEQ ID NO: 85690 - DNA, 408 bp, Homo sapiens
gaagatgaacctctgcactttatttgtgtgtcaactagtgacggaaccagaatagaaagggatgatgcaatgagttccttcggggttactcctgcagtaggcggactatcatctgggacaggtggggaagcctcgacagccctgagttcatcagcccaagtagctttgcaggctctctctcatgcaatggcttcatccgagcaacaggtacaggtgctgcaagagaaacagcagcagcttttgaagcttcagctacagaaagcaaagctggaagccaagttacatcatacaacagctgcagcagctgcagcagcatcagcagtaagtcctgttcacaactctgtgccttccaacccagtggctgcccctggattcttcattcatccatctgatgttattccacccact

SEQ ID NO: 85691 - DNA, 388 bp, Homo sapiens
  misc_feature (1)...(388): n = a,t,c or g
agcgggaccctgaggagccagctggcgcaagctatgggctgggcggcggttgagacagcggcggtattgggaggggtaggtgagggtcgcgaggctgcgtgagcatctgagtgaacgcggtgcttttgggaacgcgggacgggcgacctgtggcgccaggagcgggccgaggcgcggcgcacggatgccgtctggatgggaagttacggtttacagcgaagtccacccagcgtttccgaggtgaaggcgccgcgccaggccggggggcggtgagtccgggacccgcgggtacacagctgggtcgagctgcggctgtcgcaagttttgttgcgagcgacaganggcgaggcggggtggggggttgggagggcatgtgttccggccccgc

SEQ ID NO: 85692 - DNA, 1149 bp, Homo sapiens
agtaaactggttagcagtggttatcatgggtatggtgttagcagatgccaacctatatggttacatcaggtgtaagcaagtgaaagggaactttgctaggttgcagacctgcatctcagaactccgcatgttacagagagaagggtgtttcagatcacaaggtgcttctctgcggctggcagtagaggatgggctccagcaattcaaacaatacagcagacatgtgaccacaagggcagctctgacctatacctccctggagcctggaaaagaggtggtcaaacagttggaggaagggttgaaagatacagacctagccagagtcaggaggtttcaggtcgttgaggtcacaaagggaatcctagagcacgtggactcagcgtctcctgttgaggataccagcaatgatgagagttctattctgggaactgacattgaccttcagactatagacaatgatatcgtcagcatggagattttcttcaaagcctggctacataacagtggaacagaccaagaacaaatccatcttcttctttcttcacagtgtttcagcaacatttccagacccagagataatccaatgtgtctgaaatgtgatctccaagagcgactgctctgcccatccctactcgctggcacagctgacggctccttgagaatggatgaccctaaaggagacttcatcacactctaccagatggcttcccagtcatcggcctctcattacaagctccaagtgatcaaggctttaaaatctagcgggctctgcgagtcattgacatatggactcccgttcatcctcagacctacaagctgttggcagctggactgggatgagctggagacaaatcagcaacatttccatgctttgtgtcacagcctgctgaaaagggaatggctgctgttagccaagggggaaccaccgggcccaggacacagccagagaattcctgccagcaccttctatgtgatcatgccgtcacactccctcacactgctggtaaaggcggtggccacgcgggaactgatgctgcccagcaccttccccctgctacctgaggacccacatgatgatagccttaagaatgtggaggcaagtggagcccagatctcatgggacagatctgaaatctgaggaatgggtgg

SEQ ID NO: 85693 - DNA, 393 bp, Homo sapiens
attcttattcggaaaactgagaagatacagcgcttggtggaagaaggatggcatttgactaccctgttctttctctaatgcctcagagttgcctgtctgcgccgtccattgttgcaatgtaagcaatactgtttgatgcactgccaccctctattgtctgtttagtgtttagaatctccagtggggaagaggaaaagaagcatgactgttagtacttctcaggacccatctttctcaggattaaaccaggtctgaaactgtctcctattccaacctcaatcccaaaatcatgtgcttttcttttttattgatttattttgatgatttttgttttgttttaattctggagaatgtagatcttgctcaagcacctcttacgttggcattattcag

SEQ ID NO: 85694 - DNA, 686 bp, Homo sapiens
gattgttgggattaggactacggcataaagcctatgagagaaaactgggcaaagtggcaccaaccaaagaggtctctgctgccatctggcctttcaggtttggatatgacaatgaagggtggtctagtctagaaagatcagctcacctgctcaatgaaacaggtgcagatttcataacaattttggagagtgatgcttctaagccctatatggggaacaatgacttaaccatgtggctaggggaaaagttgggtttctatacagactttggtccaagcacaaggtatcacacttgggggattatggctttgtcaagatacccaattgtgaaatctgagcatcaccttcttccgtcaccagagggcgagatcgcaccagccatcacattgaccgttaacatttcgggcaagctggtggattttgtcgtgacacactttgggaaccacgagtgggtttctttggcccacctaatattacacaaatgccaagaaatgttattaacaatgtactttgatttctatgaaatcacctttctcattttcttcttttttacctcccaaagtatttctccctgcgttgctggttttaaaaatcagacagaagcatttaagatgcacgcagccgctagtgctggtgtagggacaggccgtgttagtctgcatttactgagctgtacagtcaattcc

SEQ ID NO: 85695 - DNA, 233 bp, Homo sapiens
tcgcgggaagcctttaatcagggtatgataatagctccctgtgtgtttccagccgggggcatctacctcaagcttgagttctactcactcggcttcacctaatgtgacaagttctgctccatcgagtgccagaggtcagtgccagagtgtggggaagactgagggtgcccagagaaccttctagtcctgggaactgtggccagctgccacacgttcaggctcttcgccttcaa

SEQ ID NO: 85696 - DNA, 384 bp, Homo sapiens
gcacccagggcaaccgctggcacgaggcctgggccaccctttcccaccagcctggctcccatgcccagtaccagctgctgttcgagggcctccgggacggataccacggcaccatggcgctggacgatgtggccgtgcggccgggcccctgctgggcccctaattactgctcctttgaggactcagactgcggcttctcccctggaggccaaggtctctggaggcggcaggccaatgcctcgggccatgctgcctggggccccccaacagaccataccactgagacagcccaagggcactacatggtggtggacacaagcccagacgcactaccccggggccagacggccttcctgacctccaaggagcacaggcccctggccc

SEQ ID NO: 85697 - DNA, 1046 bp, Homo sapiens
tcaggattactatagagatcctcgagagcggactttacaacatgggctctattacgcttctcggagtcgaagtccaaatcgctttgatgctcatgacccccgatatgaacctagggctcgcgagcagtttacactgcccagtgtggtacacagggatatctacagggatgatattacccgggaggtacgaggcagaaggccagagcggaattaccagcacagcaggagtcggtcaccacattcatcccagtctagaaatcagtctcctcagagactggctagccaagcatctagacccacaaggtcccctagcggcagcggctctagaagtagatcctccagtagtgattcaatcagcagcagcagtagtaccagcagtgacagcagtgattccagcagtagttcaagtgatgattctccagctcgatcagttcagtctgcagcagtccctgcacccacttcccagttgctttcatctctggaaaaagatgagccccgtaaaagttttggcatcaaggtccagaatcttccagtacgctctacagatacaagccttaaagatggccttttccatgaatttaagaaatttggaaaagtaacttcagtgcagatacatggaacttcagaagagaggtatggtctggtattctttcggcagcaagaggaccaagaaaaagccttgactgcatcaaaaggaaaacttttctttggcatgcagattgaagtaacagcatggataggtccaggtaagacacaagcaagctgagtttgagttactcatcacacacactgtttgtgttgcagtgtatgagagggcagcatatgatcctgaatgaggacactattctggctttatttattgacatatttccattgtcttctgttttaaaagatggttctatttattgttcaacttaataaaaaacattgttttggttagggaggatagatttttctgttgctgtaatggatccttgctgactgttaagagtctgaaaggcagaactgtgtaaacccttattgagtccagccttcccaaagggatg

SEQ ID NO: 85698 - DNA, 233 bp, Homo sapiens
tgttcttcctgtagatttagttttgattattgctgcatcatttgcttgttattgcaccaatatggaaaacacatatggattagaagtagttggtcatattccacaaggaattccctcacctagagctcccccgatgaacatcctctctgcggtgatcactgaagctttcggagtggcacttgtaggctatgtggcctcactggctcttgctcaaggatctgccaaaaaattca

SEQ ID NO: 85699 - DNA, 2075 bp, Homo sapiens
taagctgtagttatggagcagtttctaataatcatatgcatttaagaacaggactatcaactgaatatgaagaaagttcagagcaattaattaagatattatctgaaatagaaaaagaagaatttatgagaagtaaaaccgattgtgccactcctgattttgttcctgagcctagtcctcatgacttgcctatggatgaacatgttttaccagatgatgctgatataaattttggatactgtgaagtggaagaaaaatgtagacagtcttttgaggcttggcaagagaaacagaaggaattagaagataaagagaaacaaactctcaaagctcagagggatagagaagaaaaacaatttcaagaagaagaagaaaagcgacattgctggatgaaacaatttaaagttgaaaagaagaaattagagaacattcagaaggagtatattagaaacttgcatttccaaatggaagaagaaagaacaagatttaaagaccaacaagaaaaagaaaaaaattctttgttaaaacagcagaataatgcagctgttaaaattcaagctaaatataaagcatttgttgcctatcaaaaatatggcccaattattaaagagcaaattgaaagtaagaaaaggaaagcacaagagtggaaggaaaaggaagcaaaaatacgacaaaaggaggaagaaaatcgaaaaagattagaggaggaacaaaggataaaagaagagagaaaaaagcaaaaggaagaggaaaggaaaaggagagaaaaagaatatgaagaaaaaaagaatattgtgaaacaggaaagagagcaactaataagcaaggaaaaaataatattaagagaagatgcaagccaacagctaataataagtagtgcattaaagaagagcggatataataacaaacatttaagtcttgaagatatttcaaatgataagggtgatatagccaaaaatctagtggatgaaaattcaaagaagcaggaagatgttctcctttggctagttgaggaatcaaatatgaaagaaaatgtagatagacagactatattaaaagaatcaatacaagtaaagttaaaagaatctatatcaagccaaacaattctggcagattttaaaatggaagaaaaaaatgaacacctagcaaaaaaacgatgttcagaagaattggtcaagcaagaaagaaaatatgaaaatacagataacaaaactgaattgggaaactctgatctaaaaggaaatctgaaagaacagtttccattgcaagaattaaagtctgatgcacaaaaagaagaaaaaatcatgaaacatgtcataaatgagaatacaggacaaaaaacccagataatattaggacataaccaagaaatcagtgaggtgaaaaccaatgaagagcagaaaataatcaaagataatcagcagaaaaagatacaaaaagtagaaaaagaagagatacaagaacagaatggattattatataaagataaggatactttagttatttcagtgaaacaaagatcactctcactaacatcagaaaattccaaagatgtaagagaaaacgtaatattacaagaaaaagaaatttattcaaaatccaaagaaattgaggagaacccaaaagacaatgcttggaatagtggcattgtgatttttaacacaactgataccatgataaatatagaaggcaaaagaaatgaccaagattatgtgttaggtagacatgctccttgtgagggcttgagtaactataatgcagaaagctccatggtatctaaagaagtcaactctcttaaatctgagattagaaatatttcagaaaaatgccatgaaaatgcacctgaacctgatagcatgacctgctgtgtatcagagtcaacccttctatattctattgaagaaaggagactagcctggataaaatcatttaaaccttggcttgaaattttcaagcaaaatcaacaaaagaaaattgttagaagaaagagacctgtgaaatgcccagccaacatgacacccgctttggataaactggaaattcttcgatgtggcccttgggatactttacagcag

SEQ ID NO: 85700 - DNA, 695 bp, Homo sapiens
attattgttgtgggactgaagggaattttattacagttccgagatttaaaaaaatattggaatgtggataaaatcgattggggaatatgggtcagtacatatgtatttacaatatgctttgctgccaatgtgggactgctgtttggtgttgtttgtaccatagctatagtgataggacgcttcccaagagcaatgactgtaagtataaaaaatatgaaagaaatggaatttaaagtgaagacagaaatggacagtgaaaccctgcagcaggtgaaaattatctcaataaacaacccgcttgttttcctgaatgcaaaaaaattttatactgatttaatgaacatgatccaaaaggaaaatgcctgtaatcagccacttgatgatatcagcaagtgtgaacaaaacacattgcttaattccctatccaatggcaactgcaatgaagaagcttcacagtcctgccctaatgagaagtgttatttaatcctggattgcagtggatttaccttttttgactattctggagtctccatgcttgttgaggtttacatggactgtaaaggcaggagtgtggatgtattgttagcccattgtacagcttccttgataaaagcaatgacgcatgtggatcctagacagcgccttatctatgattgagtgtccgtgtaaataaattcctacttagacttaaagaa

SEQ ID NO: 85701 - DNA, 393 bp, Homo sapiens
ccttaggaattcattgcctttgggatcagcaacatcttctcaggattcttctcttgttttggggccaccactgctctttcccgcacggccgtccaggagagcactggaggaaagacacaggtaggaacaacagccttatgatatccatctcagagaacaagtcgaggaatggcaacagaggaaggctcgcaccgagcttagcaggacaatttgcctttcagacttgtacttcctaatctgattcacctcaggcctattcctcttgttccactccctcacctgaaatctcttaaaaaacaacatgtatggttttctgatacagtgattctcaaatctatttgtcagtgcttacctgtcatgtagctacacttacctgctgtggtcaataacaac

SEQ ID NO: 85702 - DNA, 397 bp, Homo sapiens
gagagaaaccctacacatgtgaagtatgtggcaaagcctttagacagtccgcaaacctttatgtacataggagaattcatactggagagaaaccctacacatgtggagaatgtggcaaaacctttagacagtccgcaaacctttacgtacataggagaattcatactggagagaaaccttacaaatgcgaagactgtggcaaagcctttggacggtacacagccctgaatcaacacaagaaaattcatactggagagaaaccttacaaatgtgaagagtgtggcaaagcctttaatagttcaacaaaccttactgcacataagagaattcacaccagagagaaaccctacacatgtgaagatcgtggcagagcctttggattgtccacaaacctgag

SEQ ID NO: 85703 - DNA, 447 bp, Homo sapiens
cggacgcgtggggaaagttagatttgttggacatgctaaacagagaatacaagaggattatcttagaattttaagatacttcaggtaagaatttttaaaaataaaaaatgatagttttaatatcatgactagagcataacagtggtcatacgaaacccacagcaggtcagtgtacaaaatggtgacatcccaaatgtctgtctccagtggagacctagcaccctatgacttatgagtgaaaattacttagctacttcatattgtattttcattcccagaacgcacatatactttatgtcatctttcctacaattttaagtcatctttttaaatgtccatttttctttttgattgatatttcctccattgatttattaattacacagatgtttgaatgcttaccacaggtcaatccctgtgttaggtgcattaaacgtggtaatgaac

SEQ ID NO: 85704 - DNA, 384 bp, Homo sapiens
aatttgctacgatgtggattgaacggatcacgtatacgactgcatatacctttcctgggatgatcaagtggcctgaagccaaacagatttcaacagaagagagcagccctgtggagaatgccatcgaaaccatggagctgaccaacgagaggatcagcagctgtgttcaacagcatgcctgggaccggaccctctctgtgcaccctctctccatgctggtcagaggcattgcggaccctgccgcaatggggggcttctccaactatgaaaaggttcgcttggtcccaaaatcccctagggattcacagacctgggtgtgtgtgtgcctccctctgtgccatttggcactgacaaattcatttactacagctgctctaagacatg

SEQ ID NO: 85705 - DNA, 422 bp, Homo sapiens
  misc_feature (1)...(422): n = a,t,c or g
gatcgggcaacccgggctgacccacgcgtncggcttatttttatagctttatttttatctttttttaatctggactttttgccaacagttaagactgcacctcggtctccagatgcccgggcaagttatggccattcccaaactgattctgtccctggtccagctgtggcagccagcaaagaaaacctccctgtgctcaataccagaataatctgcccaggtagtacagattctgaaacatcgtgtatttttcagtatttctgtgaaaaggtgtaagtatttatttctattactgtggaaacatgttcttaaagataaatattctttagtagaatgttcttgttatactttcagtcagaatccaggcccttagattcttccctgtgtaacagttgcctagaaagtattaaaacacatgtttn

SEQ ID NO: 85706 - DNA, 421 bp, Homo sapiens
cacccacctgttttgtgactgtgagcaggtcccttcaccgctcagagtctcggttttcccatctgaaaaaagggaacagccgtctccctccccaaaggtgcttgtgaggattaactgacatccgaaaggtttctttcctcccggctggaaacctgaaactgccccttgaggttggccaccgctaatcacccctgcccggtgattgctggggacagagagctggggtctgaggctccaacatgttgtgccttggtcctgcagagaaagagaagagggacaaagccagccaagagggaggggacgtcctgggggcccgccaagactgcaccccctccttgaagagctgtgagtcctgacggggaagggggattggccatgcggtgttggggttgcgcttcacccaggggggtcccactcctgg

SEQ ID NO: 85707 - DNA, 129 bp, Homo sapiens
aaaattttttttttccccaaggccggttattttcttggggggggggggcgcaaaaagccccccccccaaaaaaaggttttttcccaaaaaacccccggggggttttttttagcccccccaaaaaaaaaa

SEQ ID NO: 85708 - DNA, 378 bp, Homo sapiens
ttccatccccagctatttcatttattcatttgactcctcaccagctcctgttccatccccatctatttcaactatttcatctgacgtctcaccagctcctgttccatccttgtctatttcatctgatgtctcaccagctcctgttccatccccagctatttcatctatttcatctatttcatctgacatctcaccagctcctgttccatccccagctatttcatctatttcatctgacatctcaccagctcctgttccattcccatctatttcatctgacatctcaccagctcctgttccatccccagctatttcatctatttcatctatttcatctgacatctcaccagctcctgttccatccccagctatttcatc

SEQ ID NO: 85709 - DNA, 401 bp, Homo sapiens
cccacgcgtccgacctgacacgctatgggttagagatctccatggtcaggatccccaacaggggctcagcccggtacctggcgaggaagtacaaccgcaacgagacctacatacgggagaacttcctggtcctagatgtcttctttgaggccctgacctctgaagccatggagcagcgagcagcctatggcctgtcagccctgctgggagacctcgggggacagatgggcctgttcattggggccagcatcctcacgttgctggagatcctcgactacatctatgaggtgtcctgggatcgactgaagcgggtatggaggcgtcccaagacccccctgcggacctccactgggggcatctccactttggggcttcaggagctgaaggaacagagtccctgc

SEQ ID NO: 85710 - DNA, 398 bp, Homo sapiens
  misc_feature (1)...(398): n = a,t,c or g
tttcgtgggaaagttcgcggccggagcgcggagatgccgggcagcgacacggcgctcaccgtggaccggacctactcggaccccggccggcaccaccgctgcaagagccgggtagaacgtcatgacatgaataccttaagcctgcccctgaacatacgccgaggggggtcagacaccaacctcaactttgatgtcccggatggcatcctggacttccacaaggtcaaactcactgcagacagcctgaagcaaaaaattctaaaggtgacagagcagataaaaattgagcaaacatcgcgcgatgggaatgttgcggagtatctgaaactagtgaacaacgcggacaagcagcaggcgggacgtatcaagcaagtctttgagaagaagaatcagaaatn

SEQ ID NO: 85711 - DNA, 395 bp, Homo sapiens
  misc_feature (1)...(395): n = a,t,c or g
gngnngnagcgtctaggactgaggctcaggggacgccgggggccagcacagggcccggtgtccctcgggccgtgccggtaactgggattggcacccgccggccatggaagagcctgggcccccaggtgggctcagccaagaccaagtggagcggtgcatgggtgccatgcaagaggggatgcagatggtgaagctgcgtggcggctccaagggcctggtccgcttctactacctggacgagcaccgctcctgcatccgctggaggccctcacgcaagaacgagaaggccgagatctccatcgactccatccaggaggtgagtgaggggcggcagtcggaggtccttcagcgctaccctgacgggagcttcgaccccaactgctgctgtagtatcc

SEQ ID NO: 85712 - DNA, 528 bp, Homo sapiens
ttctctcctgtttgttgtgacatggaggctcaagctgggtctactcaagatgtgcagagcagcccacacaaccagttcaccttcagacccctcccaccgccacctccgcctcctcatgcctgcacctgtgccaggaagccaccccctgcagcggactctcttcagaggagatcaatgactacccgcagccagcccagcccagctgctccagctcccccaaccagcacgcaggattcagtccatctgcataacagctgggtcctgaacagcaacataccattggagaccaggcatttcctgttcaaacatggatctggttcctctgcgatcttcagtgcagccagtcagaactaccctctgacatccaataccgtgtactcgccccctcccaggcctcttcctcgaagcaccttttcccgacctgcctttacctttaacaaaccttacaggtgctgcaactggaagtgcacagcattgagcgccactgcaatcacagtgactttggccttgttactagcctatgtgatt

SEQ ID NO: 85713 - DNA, 464 bp, Homo sapiens
gcgggctggcgggctggcggcagtcgctacttgcctagtagcctcagccgctgtgggctcctggggagatggaggggccggggctgggctcgcagtgcaggaatcacagccatggcccccaccctccaggatttggtcgatatggcatctgtgcacatgaaaacaaagaacttgccaatgcaagagaagctcttcctcttatagaggactctagtaactgtgacattgtcaaagctactcaatacggaatttttgaacgatgtaaagagttggtagaagcaggatatgatgtcaggcaaccagataaagaaaatgtgtcgcttcttcattgggctgctattaacaacagactggatcttgtaagggtttatatttcaaaaggtgctgttgtagatcagttgggtggagatttaaattcaactcctcttcactgggccatccgacaaggacatttaccatggtca

SEQ ID NO: 85714 - DNA, 313 bp, Homo sapiens
ttttttttttttcctttttaagggccagggtagaaaaataaaaaacatttattggggaaaattttattcttggaaaaaaaaaccaaacccgggggaaaaaacttggaggggccccccccggtggggacccaacgggctgggttttttgaaaaacccggttttttttgccaggggggagttaaggcctttcccccccccctggggccccctttttcggcccaccctggtaaccgggggggggtttctttacccccccccgggggccccggacccttatttccggattttttggggggggaactcccccgtcccc

SEQ ID NO: 85715 - DNA, 407 bp, Homo sapiens
tttcgtggttgaagagctggacagagagagggtttattatattgaatccatcatcagcatttctgatggcctgaatctggtggccgaaaaagtcgtgatcctggtgaccgatgccaatgatgaggcgcccaggttcatccaggagccttatgttgccctggttcccgaggacatacctgctgggagcatcatctttaaggaccatgcagcggacagggacacaggctctggagggagtgacacctactttctgcagaacctgcactccccatttgccgtggaccgccacagcggtgtgctgcgcctccaggctggggccactctgtactacgagaggttccggactcactatatcaccgtggtcgccaatgatggcggcggggggctttatggggctgatgtggtgc

SEQ ID NO: 85716 - DNA, 439 bp, Homo sapiens
  misc_feature (1)...(439): n = a,t,c or g
gggctccgnattggagttaccgggtcgacgatttcgtggcggctgcaactgcctgccgcgccgagggattttcgtttcggcggaaagcaggttataaaacatggaggctgtctcagtggttcgagccatttttgacttctgccctatcgtatcaaaagaactgccgctctttgtgggagatattattgaggtgctggcagcggtggatgaattttggcttctaggaaagaaggaggatgttacaggacaattccccagcagttttgtggaaattgtgaccattcccagtctaaaagagggagagaggctgtttgtgtgcatttgtgaattcacatcccaagagttggataatcttcccctccatcgaggtgacctggtgattctcgatggcattcccactgcaggctggctgcagggccgaagctgctggggcgcacgg

SEQ ID NO: 85717 - DNA, 474 bp, Homo sapiens
tttcgttgagtctgtagctcgttcaagcaaactgctgggttggtgccagaggcagacagatggctatgcaggggtaaacgtgacagatctcaccatgtcctggaaaagtggcttggccctttgtgcaattatccatagataccgccctgacctgatagattttgattctttggatgagcaaaatgtggagaagaataaccaactggcctttgacattgctgagaaggaattgggcatttctcccatcatgacaggcaaagaaatggcctccgtgggggagcctgataagctgtccatggtgatgtacctgactcagttctacgagatgtttaaggactccctcccctctagcgacaccttggacctaaatgccgaggagaaagcagtcctgatagccagcaccagatcccctatctccttcctaagcaaacttggccagaccatctctcggaagcgttctcccaaggataaaaa

SEQ ID NO: 85718 - DNA, 397 bp, Homo sapiens
  misc_feature (1)...(397): n = a,t,c or g
tttcgtaaannnnnaaatatctcaagtagtgctggctcggagatgctacgcacgaaaaggtccagatatgcagttggggacatgacctcttgcacaggcaccttatggagagcaggagccaagactggtaccaaaaattcattggatatgtaaatgacaagctgatttcgaatcaaggggtgagccacctgtatgactgcattgcaaaactccagggagttcatgaactggacaagagaaggaagtagaagccagtcatctttcagaaggcagtgccattcctcgcctttctcttctagctttgtaggcagggaagagtagagaccactgagcccagttgcaagtactggacaaaagtaggtgttctccacgatgtgatgggccaccatggtgttct

SEQ ID NO: 85719 - DNA, 418 bp, Homo sapiens
  misc_feature (1)...(418): n = a,t,c or g
tttcgtggctgaattgcggccgtatgcgcggctctgtggagtgcacctggggttgggggcaccnnncccccaggcccctgctgctttggactctacttctgtttgcagccccctttggacctttgaattagaaccggccccaggtgcctctggaggtcttccctgaccgacaaggtcgcgaggagagcgcgcgcaacgtactgactgtggcaacccgttgcgctcaggcctgggcccctgccggactggtgcctctgggagtggtaatgttggccaccaagactttctagagccgagtttctacctgatgaacgttcatacccaggagacgcccacgctcacgcagttccactttctcagctggccggcagaagnttttttctgcccttgtcttaccaggctgattttctatgaaagg

SEQ ID NO: 85720 - DNA, 429 bp, Homo sapiens
  misc_feature (1)...(429): n = a,t,c or g
tttcgtctctctcaaattgttctatccaaactttcatttccttaaaaattactctgtcttctctatcatcctcttgcccatcagtgcttgcattgtggatgtcaggataatgtttcagaaactgggctacataggtcataatagatttctcatctggtttatccacatcaacgtcttcaggatctagcagtcttgggatccccagttctgtttcggcgatagtgaaagcatcctccaaattttctcggttggatctgcctttcactgtctccaagtccaccaattccggtcgaatggcatgaataactgaatgaaaggcaaccccgcttctccaactcttcccaaaatcttttacttctattccagtctgcttgccagctgtgtactgaacccactttaataaagccttcttagcatttccttggatcn

SEQ ID NO: 85721 - DNA, 408 bp, Homo sapiens
tttcgtggcagaactggttgagccacattaccggtttgtttggtgttgattgctgcggcccatctggagaggctgctgccaagatgccggctgcagcaggggaggcgcctcagggccgcgcgccttgtggagccggcgggagctgagaacaggaaggaaagagccctgccggcttctgagctgcacgtgctctctacggttaatgtcatccttgggaagcccgtcttgaacacctggaaggttttacaacagcaacggaccaagcagagttcacagctactacattcagggggaaggttttcccaagcactacaattaggagatagcccttctttgtccttctcccaaactaatgtgcagatgagcagcatggtaatcatgtccagccacccaaaaacctatcaacag

SEQ ID NO: 85722 - DNA, 427 bp, Homo sapiens
ccacagctgggtctcgaggtcctgtgccttcgagccggcctgggaggagggggccacatcccagaccgtggccacgtgcggcggggaggctgtgtgcgtaattgattgccagacgggcatcgtgctccacaagtacaaggcacccggcgaggagttcttttctgtggcctggaccgctctgatggtggtcacacaggctggccacaagaagcgctggagtgtgctggcggctgcaggcctacggggcctggtccggctgctgcacgtgcgtgccggcttctgctgcggggtcatccgagcccacaagaaggccatcgccaccctgtgcttcagccccgcccacgagacccatctcttcacggcctcctatgacaagcggatcatcctctgggacatcggggtgcccaaccaggactacgaattccag

SEQ ID NO: 85723 - DNA, 412 bp, Homo sapiens
aaatgatcctgcaattattagcaacttttctgcagcagtggtgcatacgatagtaaatgaaactttagagtcaatgacatcattggaagttacaaaaatggttgatgaacgtacagattatttaactaaatctttaaaggagaaaacccctccattttcccactgtgatcaggcagtgctgcaatgcagtgaagctagtagcaataaggacatgtttgctgaccggttatctaaatctattattaaacattccatagataagagcaaatcagtgatcccaaatatagataaaaatgcagtatacaaggaaagcttgcctgtttctggagaagaatcacagttgacaccagaaaagtctcccaaatttcctgactctcagaatcagttaactcactgctcactttcagctgcg

SEQ ID NO: 85724 - DNA, 414 bp, Homo sapiens
  misc_feature (1)...(414): n = a,t,c or g
cggacgcgtgggccgagagattaactttccaggctctttccaagttgatgcttctgcatccagggaagccaagtttccatagatgattgatgggcaggatttaaatttgaccttgggtgggtccttccctgtgggagcaccgatggtatctggagacatgtgacactcctatggaagcatgtggccctgtcggcgggatctcaagatggcatatgacagtagcccatgtgatgtgctgaaaacatcctcgtaagcctgtggattctgtcttttcctttcccttagagatggaattcctccttatcgtgtgggcagtaagaaacagctccagagagaaatgcatcgcagtgtgaaggccaatggccaagtgtctctacctcatttcccggtgagtacagtctggagtgaggagan

SEQ ID NO: 85725 - DNA, 387 bp, Homo sapiens
acttacagtatgaatacttcaatgctgtgctgataaatgaaagggacaaagacgggaattttttggagctgggaaaggaattcatcttagccccaaatgaccattttaataatttgcctgtgaacatcagtctaagtgacgtccaagtaccaacgaacatgtacaacaaagaccctgcaattgtcaatggggtttattggtctgaatctctaaacaaagtttttgtagataactttgaccgtgacccatctctcatatggcagtactttggaagtgcaaagggcttttttaggcagtatccggggattaaatgggaaccagatgagaatggagtcattgccttcgactgcaggaaccgaaaatggtacatccaggcagcaacttctc

SEQ ID NO: 85726 - DNA, 381 bp, Homo sapiens
tcctgttatgagggtcaattatggcctaagcacggacatcaatgcctttgagggggcggggtcactgccctgttctgattctggcctttgggcatcataccggggcaatcaactcttttgctcacggcttctgccggcatccaaaagcaatcttatatctacctcactgatgtacatcgaggacaaaactctgaccaagtacacaggaaatccctcgaagatgtatgaagtggtctaccaaatcggaactgagactcgctcagacttctatgacatttgctcgggggccactccggtgaatcgaaaacaggagaatattacttttctcaactctgatcctccaatcgaggaattccctcagtattatcaacatatagtgac

SEQ ID NO: 85727 - DNA, 445 bp, Homo sapiens
ggaaattgaccgcaagtggtactatgacagctacacctgctgccccccaccctggttcatgatcacagtcacgctgctggaggttgcctttttcctctacaattgggtgtcactaggtcaatttgtactgcaggtaactcatccacgttacttgaagaactccctggtttaccacccacagctgcgagcacaggtttggcgctacctgacatacatcttcatgcatgcagggatagaacacctgggactcaatgtggtgctgcagctgctggtgggggtgcccctggagatggtgcatggagccacccgaattgggcttgtctacatggccggtgttgtggcagggtccttggcagtgtctgtggctgacatgaccgctccagtcgtgggctcttctggaggggtgtatgctctcgtctctgcccatctggccaacattgtcatg

SEQ ID NO: 85728 - DNA, 586 bp, Homo sapiens
ctgcttttctgtttacagggcggttgtcatggtttgtttggaaacagcacagcacaatcgagaggtctgcacacacccgtgcagccactaaattcttctcccagtctccgggcgcaagtgcctccccagtttatttccccccaggtaagcaattttacgttcctgtgattcaaaatgaaagaccatttcacatcattaccagttgttaactgatttttgtgggcataaaaagaatgatagtaagtagcataaaatatgaaaaagccatcttttcttgaccttttggctaagatcaagtagagtaaaatatgaaatatctagctgccaaagatgaagacttttagaacaaaatctcaaatctcattttttatttcatcatgcataccaacaaagtagatatttttgcatgaaaagcttattattctattccttttagatctcctatttttctaactatattttttgaaactgcatataattaaaactgctttaataagttctgatgtggcaaatggttcaagaggctgggttgccctccaaggattcaccccaaaggttaaaaaggagaattccagcctggcacagt

SEQ ID NO: 85729 - DNA, 377 bp, Homo sapiens
cttacagttacagcttaatacaattattacctattgggatacatttaataagcaggggaaagaaagagaaaacaagttaaaagagtcattggaaaaagcccttaagtataaagagcaagtaaagactctctggccatggatagacaaatgccaaaacaacctggaggaaataaaattttgcttggatcctgctgaaggagagaattctattgccaagttaaagtctctgcagaaggaaatggaccaacactttggtatggtagaattactgaacaacacagccaatagcttgctcagtgtctgtgagatagataaagaagttgttacagatgagaataagtcactgatccagaaggtggacatggtcactgaacaaa

SEQ ID NO: 85730 - DNA, 387 bp, Homo sapiens
  misc_feature (1)...(387): n = a,t,c or g
ctttactgagcccaccagcctgtggccaccgtgttttaaggatgattggaggattgccagccccaaacaagaagtggccctggcaggtgagcctgcagaccagcaacatacaccactgcggaggctccctcatcgacaggcgctgggtgctcactgccgcccactgtgtctttagtttcaggaccaatgccacttgttcttcaggagactgagctaaacattatgcgtcatgagaaatgttgtgagatgctcaagaacaagaatatatccaagagtaaaatggtcacgagggggaccgtctgtggctataatgaccaagggaaggatgcctgtcagggagattctggggggcccctggtctgtgaattanatggcacatgggtccag

SEQ ID NO: 85731 - DNA, 401 bp, Homo sapiens
gttttcactgcggggatggcccaggctgcaatgtggaaataagagctgtgcatttcaatggcttcatgaccccatttgagtcctgctgccaaaaaccaagtgagtgtcagaataacccaccaaatggagctggccattccaaaaaagtacatcagcaagaaaattattgcacatcctgtgttcttaagtccttcttggatgagaacaggttctgctgcctcttcaaaatcacaggatatcctttcccggcctacagtcagcctgacaatataagcaatgctataaatattatagcacatactgagaaatatgatggggcgctcagggtaggaaaacctacaagaatcgatcaggaaggtcagtactgtgaaggcagtggagatgaaacacaggctggcccc

SEQ ID NO: 85732 - DNA, 535 bp, Homo sapiens
acgatccggacgcgggagccatgggagctgcggctgcagaaggccaggcccctgaccccagccctgccccaggcccacccacagctgcagactctcaacagccccctggtgggagttccccctcggaggaaccacccccaagcccaggggaggaggctgggctgcaacggttccaggacacaagtcagtacgtgtgtgcagagctgcaggccctggaacaggagcagaggcagatagatgggcgggcggctgaggtggagatgcagctgaggagcctcatggagtcaggtgccaacaagctgcaggaggaggtgctgatccaggagtggttcaccctggtcaacaagaagaacgctctcatccggaggcaggaccagctgcagctgctgtgagtgctggccccgggccaggagagcagagggactcttagctactttggttagagttcttcactactttcttattcctacagagatctttttgacaaacgattcctcttccatcttactgtttttgtcctaaacaaattgctgtt

SEQ ID NO: 85733 - DNA, 258 bp, Homo sapiens
  misc_feature (1)...(258): n = a,t,c or g
tgtgatgggcgtgcaggtggtgggcagggctttgcacgggccttgcggcaggagtttgcagcctctaccccctaaaaaggaaaccactcctggagaagaggcagctcctagccacctgtccctgtgtctctcatcctgtgctggtggcaggggtgagccaccaacntcggaaggcccagggtgaagtgtgggctgctgaggactgagcgatcacccanccaatgtccacacagccagccgggccgcagctgaatgncc

SEQ ID NO: 85734 - DNA, 1377 bp, Homo sapiens
caaactttgggggctcaaatgcaaggtggttttggatgtggcaaccagttgccaaaaacagatggaggaagtgaaaccaagaaacagcgaagcaaacggactcagaggacgggtgagaaagcagcacctcgctcaaagaaaaggaaaaaggacgaagaggagaaacaagctatgtactctagcactgacacgtttacccacttgaaacaggtgaggcagctctctctgctccctctaatggaaccaatcattggagtgaactttgcgcactttcttccttatggcagtggccaatttaatagtgggaatcgacttctaggaacttttggcagtgctaccctggaaggggtttcggactactattctcagttgatctacaagcagaataatttaagtaatcctccaacaccccctgcctctcttcctcctacaccacctcctatggcttgtcagaagatggccaatggttttgcaacaactgaagaacttgctggaaaagccggagtgttagtgagccatgaagttaccaaaactctaggacctaaaccatttcagctgcccttcagaccccaggacgacttgttggcccgagctcttgctcagggccccaagacagttgatgtgccagcctccctcccaacaccacctcataacaatcaggaagaattaaggatacaggatcactgtggtgatcgagatactcctgacagttttgttccctcatcctctcctgagagtgtggttggggtagaagtgagcaggtatccagatctgtcattggtcaaggaggagcctccagaaccggtgccgtcccccatcattccaattcttcctagcactgctgggaaaagttcagaatcaagaaggaatgacatcaaaactgagccaggcactttatattttgcgtcaccttttggtccttccccaaatggtcccagatcaggtcttatatctgtagcaattactctgcatcctacagctgctgagaacattagcagtgttgtggctgcattttccgaccttcttcacgtccgaatccctaacagctatgaggttagcagtgctccagatgtcccatccatgggtttggtcagtagccacagaatcaacccgggtttggagtatcgacagcatttacttctccgtgggcctccgccaggatctgcaaaccctcccagattagtgagctcttaccggctgaagcagcctaatgtaccatttcctccaacaagcaatggtctttctggatataaggattctagtcatggtattgcagaaagcgcagcactcagaccacagtggtgttgtcattgtaaagtggttattcttggaagtggtgtgcggaaatctttcaaagatctgacccttttgaacaag

SEQ ID NO: 85735 - DNA, 413 bp, Homo sapiens
tttcgtctgcaggagatctcccaggtctgccagctgtgccagcagtccccccggctcttctccaaccatgcagcacagctgcacacattgctggtgaagtaaccctgtgacaacaccccgggagaatccagaatgttctcagtaagtaagtacctaaccagatccagaacattcccagtgaaggaccccctgacagcaccctaatcagaatccggaatgttcccataggtaatcatataaccttcccaggcacgatccggaatgctcccagtgagcatcttgtcccaccccacattggcttgggtctgaaaggggccggccctgatgacaacaccaccttcttccagggcctgtactgtgtctctgtcaactgcatggacaacgcggaagcccagttcaccacggccctgcgg

SEQ ID NO: 85736 - DNA, 387 bp, Homo sapiens
  misc_feature (1)...(387): n = a,t,c or g
nnnnnaaaagacgatttcgtcccgctggagcatgaagtgcctgggcaccccccgggtggggacatggggcagcagatgaacatgatgatacagaggctgggccaggacagcctcacgcctgagcaggtggcctggcgcaagctgcaggaggagtactacgaagagaaacggcggaaagaggaacagattgggctgcatgggagccgtcctctgcaggacatgatgggcatggggggcatgatggtgagggggcccccgcctccttaccacagcaagcctggggatcagtggccacctggaatgggtgcgcagctgcgggggcccatggatgttcaagatcccatgcagctccggggcggacctccctttcctgggccccgtttcccc

SEQ ID NO: 85737 - DNA, 410 bp, Homo sapiens
aggagatctgtggcatccagcagcgtctggccctgcctgtgtggcggccccgggactttgaagaggagctggccgactgcacagccgagctgggtgagacagtcaagctggcctgccgcgtgacgggcacacccaagcctgtcatcagctggtacaaagatgggaaagcagtgcaggtggacccccaccacatcctcattgaagaccctgatggctcgtgtgcactcatcctggacagcctgaccggtgtggactctggccagtacatgtgcttcgcggccagcgccgctggcaactgcagtaccctgggcaagatcctggtgcaagtcccaccacggttcgtgaacaaggtccgggcctcaccctttgtggagggagaggacgcccagttcacctgcaccatcgaaggg

SEQ ID NO: 85738 - DNA, 407 bp, Homo sapiens
  misc_feature (1)...(407): n = a,t,c or g
gggccaatgnnnnaagcctagacacttgtaaacattataaagaacgacagaccaaccttcgaaataaagtcatgacactgttggatgaaaagttctactgtcttcttaatgacattttccatgttcagttccctatttctcgggagatttccaggatgagcaccttgaaaaagcaaaaacaattggaaatattgtttatgaagatcttgaagctgatagtgaaagaggaaaggattatttttatcattgatgaggcccagtttgtggattcgacctcctggagatttatggagaagcttatccggactcttcctatcttcatcattatgtccctgtgtcccttcgttaacattccctgtgcagctgccagggccgtaataaagaacaggaacaccacctacattgtc

SEQ ID NO: 85739 - DNA, 411 bp, Homo sapiens
ggaaagagaatagcttacaaaccttgtactaaaaggaaagcataacacctctcaactcctgactcattcttggcttgacaggtatatctcccactgtgtccattatccacacttctgatttgaagtgtggccacactgtccacaaatgaaatatagacattatcatcttcatcaagaatctgatcatcctttagccaggttatagaaataggaggagaacctgccacggtactctgaaaggtggcagaacttttcaaaacagtagtggtattttctatcttcttaatgaatgatggtggttctgtgattaaataagagagtgtgaaaagaagaaacatattgtaactcctacccataatgataagatttaaaagcgttacaggatttttatttgatagggctgcttcttgc

SEQ ID NO: 85740 - DNA, 445 bp, Homo sapiens
ggcctcgtgccatgaagaagtagaagcctcaagacacacttaagcactttacttaaatatcctagggcctaccatggaggatattaggtccctgcagaacagggaccagtgactacaaatcataaggagacatatttggcttcaatccaatgtgggaccaagagactgccctttgagagaatgagctttctggccgtgagtccttgttgctgaaattattccagcacagaggagtcctgaatgaagactaaaaacctgttgctaagattacactatgttttctgtaggatttatttttgccatacattttaattttttaggatttggaatattccctttatgttctaatacaaaccctcattttcccagggagatgaataagcgtctaacagaggaacaagccaagaaaacctatgatcgagcaattaagctagaacaagaattg

SEQ ID NO: 85741 - DNA, 461 bp, Homo sapiens
  misc_feature (1)...(461): n = a,t,c or g
ctcgagnnngnnnactgcagacttggcacgaggggcatattctgtccaggttctaaccgtatttatcagctgttcaattttaacccttgccatgaaaatagctgggattttggggctcaacagtgggcaaaatataacaccaaacctttccgtggatggttctaccagtggaaaccctatacaaaagtggaagaggaagatcgatgcaaactgtactgcaaggctgagaactttgaatttttttttgcaatgaccggcaaagtgaaaaatggaactccctgctccccaaacaaaaatgatgtttgtattgacggggttagtgaactagtgggatgcgaacatgaactaggctctaaaacagtttcagatgcttgtggcgtttgcaaaggtgataattcaacttgcaagttttatataggcctgtacctcatccatcgtaaagcaaaagattattatccggt

SEQ ID NO: 85742 - DNA, 724 bp, Homo sapiens
ggtggtagggtccggctgaatggtccactgagatggccgtcagtctgtacctgacccgagtctttgtgaaccagggctcatcggcaatgggtggaacggcagagtccatcaggggatgagatttgatgaatgacagagtttcatccgggaaatcgatggaggttttataagcttcggcaaggccgtgttttgcacaacagccaggccttggctttggcactttgtcttcgggaactgctgtccaaacagaatctggagttttctgttccttaaaccgtcctttgaatactttttcaatgtcatccatgctaaatgcacagacagcagaaccagggatgctattgagctgcgtggtaaacaccccgaccacagtggggatgccattgatttgtattatgtctgtaatagactgcagaacatcaaagtagaaaaacgaatctccagggacagaacagttcagccgagcctttagaaatgaagtccagtgtttctccaggacccgctgggaaccacccatgtcgtttttacatatgcgggccacgcgggaatacacagcccccttttccttctccttctcctcctgcttcttcttcttcttcccagcttctttttcctcttcttctcccaatccctccttctcctcttctttttcatcttcatctccatctttctctccctctccttcttcttcacctttctctctccgttccttccttgctgacat

SEQ ID NO: 85743 - DNA, 388 bp, Homo sapiens
gggtcctaatctacttgtcccctgctctcgatgcccaagagtcaatgggctctgtgaacttgtccttgattttcattattgccctgggctccattgcgggcatcctctttgtaactatgatcttcgtggcaatcaagtgcaagcgagacaacaaagagatccggacctacaactgcagtaattgtttaaccatcacttgtctcctcggctgttttataaaaggacaaaacagcaagtgtctgcattgcatctcggtttctcccattagcgaggagcaagacaaaaagacagaggagaaagtgagcctaaggggaaagagaattgctgagtactcctatgggcatcaaaagaaatcaagcaagaagaaaaaaatcagtaagaatgacat

SEQ ID NO: 85744 - DNA, 342 bp, Homo sapiens
gttttctcgaccctcgggctccacgcccctggctacgaacttgtcccattcctcctctgccacctcaacggcctaggccccgccctgcgatggcctggctgaccccgccttccagctaggccctgtccacgcattgtccttcccccctccagctcccccgactccttggggcgcgggcctcggtgtgcagctccggttaattcatcgccgccaacgcagacccgcttggcctgcccttggctctcgctcctaccttcctgtgaccccaccccgatccggtgccgccccacgtgccggccacccacccgggcctccagcctctgttcccttaccccgggtggg

SEQ ID NO: 85745 - DNA, 464 bp, Homo sapiens
cgaggatcgggaagaccacgtccccaagttggagcaaataaacagcacgaggatcctgagcagccagaacttcaccctcaccaagaaggagctgctgagcacagagctgctgctcctggaggccttcagctggaacctctgcctgcccacgcctgcccacttcctggactactacctcttggcctccgtcagccagaaggaccaccactgccacacctggcccaccacctgcccccgcaagaccaaagagtgcctcaaggagtatgcccattacttcctagaggtcaccctgcaagatcacatattctacaaattccagccttctgtggtcgctgcggcctgtgttggggcctccaggatttgcctgcagctttctccctactggaccagagacctgcagaggatctcaagctattccctggagcacctcagcacgtgtattgaaatcctgctggtagtgtatg

SEQ ID NO: 85746 - DNA, 449 bp, Homo sapiens
tcatccctagtccagagtggaggaattccctacctcttcacactggcttatgaaaagatgcatcagttttataaggaggtggactcgtggatatccagtgagctgagttcggcccctgaaggcctcagcaatggttggtttgtcagcaatctggagttctatgacctccaggatagcctctccgatggcaccctcattgccatggggctgtcagttgctgttgcatttagcgtgatgctgctgacaacttggaacatcatcataagcctttatgccatcatttcaattgctggaacgatatttgtcactgttggttctcttgtcctgctgggctgggagctcaatgtgttggaatctgtcaccatttcggttgccgtcggcttgtctgtagactttgccgtccattatggggttgcctaccgcttggctccagatcccgaccgagaaga

SEQ ID NO: 85747 - DNA, 1094 bp, Homo sapiens
taacccagtgtggtggaattctgagggggccgtgcctcccacccttctgcagggatcacaaaatttgtgtggagaccttttaatcttttagtcaaataaatttctgttttaggaaccatgttcagcaatctcggggtatggaaagaaaattgacaagtccattaaaaaaggcctttattggctgctacatgttattgcaagagactttgatgccttaaatgaacgcatccaaaaagagacaacagagcagcgtgctcttgaggaacaagagaaacaagaaagagctgaacgagtgcgaaaattacgagaagaaagaaaacaaaatgaacaggagcaggctgaactcgatggaaccagtggtctggctgagttggacccagaaccaacgaatcctttccagccaatagcatctgtaatcattgagaatgaaggaaaacttgaaagagaaaaaaaaaaccaaaaaatggagaaagacagtgatggctgccacctgaaacataaaatggagcatgagcaaatagagacacaaggccaggttaatcacaatggccaaaaaaataatgaatttggactagtagaaaattataaggaggcattaacacagcagttaaagaatgaagatgagacagaccggccatcattggaatcagctaatggtaaaaagaaaactaagaaactaagaatgaaaaggaaccaccgggtagaaccacttaatatagatgactgtgctcctgagagtccaacgccacccccaccccctcctcctgttggctggggaacccctaaagtcactagacttccaaaacttgaggctcttggtgaaacacatcataatgatttctatagaaagccactgcctcccctggctgtgccacagcggacctaacagtgatgctcatgatgtgatctcataaacaagacgtatggaggagttctcttaatatcagcaaggtgaactgggacattcttctttctcagaagaagaaacatcttgtaaattgatgactggggcaagataaccataataattttagtgagaagattaatactcaaggacctgacttgataattacttatttgtgtttttcatggtt

SEQ ID NO: 85748 - DNA, 1341 bp, Homo sapiens
cccacgcgtccgctttggcttccagttttcaaacctgagagccacaacttggagaatggaaaagaaccattgaagcttgagagaaaagcccccaaaagcagctattcagacatggagactagaccacagagcaaggattcaacttcagtgcaagatttttccaaagcagaatcatgcaaagttgcaataatagacagactgacacggaatagtgtctatgactctaacttggaagcagcccttgaatgtgaaaattggttagagaatcagcaaggaaatcaggagagacatttgagagaaatgttcactcacatgaattcactctctgaggaaacagaccataagcatgatgtatactggaaaagcttcaatcagaaatctgtccttatcactgaagacagagttcccaaaggatcttatgccttccatacacttgaaaaaagcttgaaacaaaaatcaaacttaatgaaaaagcagagaacttataaagagaaaaaacctcataaatgtaatgattgtggtgaactcttcacctaccattcagtgcttattcgacaccagagagtccatactggagagaaaccctatacctgcaatgaatgtgggaaatcttttagccacagagctaatttaactaaacaccagagaactcatactagaattctctttgaatgcagtgaatgcaagaaaaccttcacagaaagctcatcccttgcaacacatcagagaattcacgttggagagagaccttatgaatgcaatgaatgtgggaaaggttttaatcgaagtacacatcttgtgcagcatcagttgattcatactggagtgaagccttatgaatgtaatgaatgtgataaagcttttattcattcatcagcactcattaaacatcaaagaactcatactggagagaaaccttataaatgtcaagaatgtgggaaagcctttagccattgctcatccctaactaagcatcagagagttcatactggagaaaagccatatgaatgcagtgaatgtggaaaaacttttagtcagagcacacatcttgttcaacatcagagaattcacactggagagaaaccctatgagtgtaatgaatgtgggaaaaccttcagccggagctccaattttgctaaacatcaaagaattcatattggaaagaaaccgtacaaatgtagcgagtgtggaaaagccttcattcattcatcagctctcattcaacatcagagaactcataccggagagaaaccctttagatgtaatgagtgtgggaaaagctttaagtgcagttcatctctcatcagacatcaaagagttcacactgaagagcaaccctga

SEQ ID NO: 85749 - DNA, 478 bp, Homo sapiens
ctttctgggtctacccacgcgtccgagcttacacaaaatatatttatgtcaatctggctacttttctagtatgttcagtggttcttggaaagaatccagcatgaatattattgaactggagattcctgaccagaacattgatgtagaagcactgcaggttgcatttggttcactgtatcgagatgatgtcttgataaagcccagtcgagttgttgccattttggcagcagcttgtttgctgcagttggacggtttaatacagcagtgtggtgagacaatgaaggaaacagttaatgtgaaaactgtatgtggctattacacatcagcagggacctatggattagattctgtaaagaaaaagtgccttgaatggcttctaaacaatttgatgactcaccagaatgttgaactttttaaagaactcagtataaatgtcatgaaacagctcattggttcatctaacttatttgtgatgcag

SEQ ID NO: 85750 - DNA, 447 bp, Homo sapiens
ggctgaaaatccgatccatgatgtgatcaacaatagcgtcggctggcatcattttttcgcggataacgccccgttcgccgtgaatacccatgccgatttccatttcctcggcaccgatttcaaaattgtggcgtcgcgtctgaggcaaagaacagggctccaacgcgacacccatcgtataggtgcgccgattggccttgcgtgttaccgcctcgcacgcctcaagcgacatgccccgatcacaggctgcacctgccaccttgaaaatgaagaagttacccgcgacaccgcgacggccatcgcgatcctctatgggggaagaggatatgtcgtctgtcgtcagaacggtgcgcgtcggaatagcaacttcttgcgccatttcggcagccatctcgaagttcatgacgtctccgacataattaccgtacacgaagagcacgccttctc

SEQ ID NO: 85751 - DNA, 374 bp, Homo sapiens
  misc_feature (1)...(374): n = a,t,c or g
gggctttccagggtgaagggcctgggatgggaggggggctaggtgaccctctggagtcccagcccaggcctggtcagccttgctgctccctctgtcctccacctcactccccgtatagcctggctttggcccttcaaagagactgtgaggaaatgtgcccggagctgggtgaccgccctgcagctcatggagcggaaccctgagttcatctttgcctgctcccaggtcagagggacagctgtgagggaggagggaagcacgtggccctccctggagctccacaggccctgaaggcttcccaggcctggggtcagggctgctcctcaccctcagccacacactgagtcccatatgctcagtcctgggtggngccc

SEQ ID NO: 85752 - DNA, 513 bp, Homo sapiens
gaaaaactgtgggcggagaccccgcgtcgacccacgcgtccgagagtaacctttggatggggttgggcccagcctggaccactagccgggccgactggacaggcgatgagcccctgccctaccaacccacattctcagatgactggcaacttccagagccctccagccaagcacccttaggataccaggaccctgtttcccttcggccctccagccccaaacctgcccagccagccctgaaaatgcaagtcttgtacgagtttgaagctaggaacccacgggaactgactgtggtccagggagagaagctggaggttctggaccacagcacgcggcggtggctggtgaagaatgaggcgggacggagcggctacattccaagcaacatcctggagcccctacagccggggacccctgggacccagggccagtcaccctctcgggttccaatgcttcgacttaactcgaggcctggagaggtcacagactggctgcaagcagagaaacttctcc

SEQ ID NO: 85753 - DNA, 625 bp, Homo sapiens
aaattgcttgccttgacttcagcctgcaaaaaacaaaaatgaagcttggtgtacaggtggtcattacagaccctgaaaaactggaccaaattagacagaggtatgttgagagattatttttggccttttaagtgtgagtgtcttggaggactttaacatttttagccaagtcaaactattttacttccagaaaaattagcctggtggtgtttttagagggatttggggttatacaacctatatgaaaatcggcctttttgtggaattttgattgtatgagtctattaatattaaagatgtaaaagacaggaatctaatttcctcaaagcagtacagaactcagcagtatagtattgactgtaacctactgtttgctagatactggaggtgcaggtgatattagtggttggcatgccagaagagctaatggtggaggtagtgtgaccattgctatagatttgactgcctgacagtcacttaaaacaataaattgtttaggctgggcacagtggctcatgcctgtaatcgcaacactttgagaggctgaggtggcaagaatctgaagcccaggaggttgaggctgcagtgagctgtgattgtaccactgcactccaacctgggtgac

SEQ ID NO: 85754 - DNA, 1327 bp, Homo sapiens
ttgtgctttctgacctttgcctcttttattatagagatgagaaagaagagggtatcctgggaagcatactgttacctagttttcagatagctttgcttacctctgaagatcacattaatcgcaaatatgcttttaaggcagcccatccaaacatgcggacctattatttctgcactgatacaggaaaggaaatggagttgtggatgaaagccatgttagatgctgccctagtacagacagaacctgtgaaaagagtggacaagattacatctgaaaatgcaccaactaaagaaaccaataacattcccaaccatagagtgctaattaaaccagagatccaaaacaatcaaaaaaacaaggaaatgagcaaaattgaagaaaaaaaggcattagaagctgaaaaatatggatttcagaaggatggtcaagatagacccttaacaaaaattaatagtgtaaagctgaattctctgccatctgaatatgagagtgggtcagcatgccctgctcagactgtgcactacagaccaatcaacttgagcagttcagagaacaaaatagtcaatgttagcctggcagatcttagaggtggaaatcgccccaatacagggcccttatacacagaggccgatcgagtcatacagagaacaaattcaatgcagcagttggaacagtggattaaaatccagaaggggaggggtcatgaagaagaaaccaggggagtaatttcttaccaaacattaccaagaaatatgccaagtcacagagcccagattatggcccgctaccctgaaggttatagaacactcccaagaaacagcaagacaaggcctgaaagtatctgcagtgtaaccccttccactcatgacaagacattaggacccggagcggaggagaaacggaggtccatgagagatgacacaatgtggcagctctacgaatggcagcagcgtcagttttataacaaacagagcaccctccctcgacacagtactttgagtagtcccaaaaccatggtaaatatttctgaccagacaatgcactctattcccacatcaccttcccacgggtcaatagctgcttatcagggatactcccctcaacgaacttacagatcggaagtgtcttcaccaattcagagaggagatgtgacaatagaccgcagacacagggcccatcaccctaaggtaaaatagctgctgattttgtgttaactcactaccttataaatgctgtgttttctttctagtatactattttaaatgtgagagacaaaagaatggggataaagtaagcaaggcagctcttttttgttttaaaaaaaaaa

SEQ ID NO: 85755 - DNA, 425 bp, Homo sapiens
  misc_feature (1)...(425): n = a,t,c or g
cggaattccngntcgacgatttcgtgagcctgatgcccagatgctggagatcccaaacctcacaccctacactcactacagatttcgaatgaagcaagtgaacattgttgggccgagcccctacagtccgtcttcccgggtcatccagaccctgcaggccccacccgacgtggctccaaccagcgtcacggtccgtactgccagtgagaccagcctgcggcttcgctgggtgcccctgccggattctcagtacaacgggaaccccgagtccgtgggctacaggattaagtactggcgctcagacctccagtcctcagcagtggcccaagtcgtcagtgaccggctggagagagaattcaccatcgaggagctggaggagtggatggaatacgagctgcagatgcaggccttcaacgccgtcgggg

SEQ ID NO: 85756 - DNA, 385 bp, Homo sapiens
tttcgtgctgagtcagggtcagtgataactctgtcagctcccattgctccctcagaaccaaagactaatcttaataaagttccctctgaggtagtccctaatccaaaaggcacccccagccctccatgtatagtcagtactgttccttaccactgtgtgactcccatggcctctattcaatctggagtggcctcccttcctcagacaacacccacaactaccctagccatcgcttcccctcaagtcaaagataccaccatttcctcagttctgatttctccacaaaacccaggaagcctcagcctgaaggggcctgttagtccacctgctgccttatctctttcaactcagtctcttcctgtggtgacctcttctcaaaagactg

SEQ ID NO: 85757 - DNA, 424 bp, Homo sapiens
ccgacgatttcgtgcagtggggagccaggctcagagatgcaaacgaggactaagtcagggggatacctcctgttctagcatcttccaccttattctagggacctggtagacgaagcaaaggactaccacctcatgccagagcgccggccccacctgccagctttcagaacccggccacgctgctgcacatccatcgctggacttatctacgctgtagggggcctcaactcagcaggtaccttgcggctcccctttatagaccctcctcttggactccatggatgaggaagcaccagacaaattagcctggcccttctggtttctctgttttgtactgtcaccacccttgcccctcttgattttatacaattgctctacagttagagcatgtcacatattcatgccattgaatcagaatatcagt

SEQ ID NO: 85758 - DNA, 340 bp, Homo sapiens
tcgttggtcttttaagaggtgtccagtgtcaggtgcagtttggcatgcactgggtccgccaggctccaagcaaggggctggagtgggtggccgtggtatcatctgctggaactaagacctactatgcagactccgtgaagggccgattcaccatctccagagacaataccaagaacacagtgtttctccaaatgggcagcctgagacctgaggactcggctatgtatttctgtgcgaaggagactgtgaatggggatgtgcccccctactgtggccagggaaccctggtcaccgtctcttcagcctccaccaagggcccatcggtcttccccctggcgcc

SEQ ID NO: 85759 - DNA, 422 bp, Homo sapiens
cccacgcgtccgaccgagcacaggccctactcgtgtggcgactgtgggaaagccttcaagcagaagtccaaccttctcagacaccagctggtgcacaccggggagcggccgttctactgcgcggactgcggcaaagccttccggaccaaggagaacctcagccaccaccagagggtccacagcggggagaagccctacacctgtgccgagtgcggcaagtccttccggtggcccaagggcttcagcatccaccggaggctgcacctgacgaagaggttctacgagtgcggccactgtgggaaaggcttccgtcacctggggttcttcacgcggcatcagaggactcacaggcacggggaggtgtaggggcgcccgaagcgtggggtgctgcgcctctgcgggagtactgggtcctgagggag

SEQ ID NO: 85760 - DNA, 455 bp, Homo sapiens
cgagccgcgggcttccagaactgtctcagcaaacagtagctcctctcggccatccgccagctgcagcagctgctgaagggccaggagacacgcttcgccgagggcatccgccacatgaagagccggctggccgcgctgcagaactctgtgggcagggtgggcccagatgcccttccagtttcctgcccggctctgaacacccccgcagacggcagaaagtttggaagcaagtacttagtggatcacgaagtccattttacctgcaaccctgggttccggctggtcgggcccagcagcgtggtgtgtcttcccaatggcacctggacaggggagcagccccactgtagaggtatcagtgaatgctccagccagccttgtcaaaatggtggtacatgtgtagaaggagtcaaccaagccagatgcattttgcctccacgaaggacttggaaccgtgc

SEQ ID NO: 85761 - DNA, 394 bp, Homo sapiens
attgaaaacctcttttaccctgttaccctggattttcttcatcacatattttctaaatgtgggacagcctggaagactatcacctttacgaacaataatcaattgcaagccttgcttcagtatgctgacccagttaacgcacattatgccaaaatggctctggatgggcacaacatatataatgcatgctgcactctgcgcattgacttcttcaagctcaccagccttaaagtgaaaaataataatgacaaaagcagagacttcactcgcttataccctgttactggtgatggccagccatcccttgaaccccctatggctgctggttcttgtgcaccgggtatcattacttcaccatatagcagggctgcaggatgtgccccaaccattgtat

SEQ ID NO: 85762 - DNA, 448 bp, Homo sapiens
agctgcccttcctgggcctggggtctgttcttccccagggcatggtgatggcgagcccggagatgaatcctaccatctgctcggtgtttgaggcacatatagtcttactgtttcatgccaccaccttccgacgaggattccaggtgacagtactcgtgggcaacgtacgtcagacggctgtggtggaaaagatccatgccaaggtgagagggacctggcctttcatttctccagaggtcagaaaagagggaggcctgccccagactggcagagaactccttgatcccacaatgggaataaaaccccacttatggtgggtagcggcctgataggcctctggagggtggagagcctcggctggcatagaatgggacagaaggcactggccaggggagtgaccacttatttgctgcaggacaaactgcggacaggcgataaggcagtggtc

SEQ ID NO: 85763 - DNA, 665 bp, Homo sapiens
gcggccgccgcctccaactgggggctgatcacgaacatcgtgaacagcatcgtaggggtcagtgtcctcaccatgcccttctgcttcaaacagtgcggcatcgtcctgggggcgctgctcttggtcttctgctcatggatgacgcaccagtcgtgcatgttcttggtgaagtcggccagcctgagcaagcggaggacctacgccggcctggcattccacgcctacgggaaggcaggcaagatgctggtggagaccagcatgatcgggctgatgctgggcacctgcatcgccttctacgtcgtgatcggcgacttggggtccaacttctttgcccggctgttcgggtttcaggtgggcggcaccttccgcatgttcctgctgttcgccgtgtcgctgtgcatcgtgctcccgctcagcctgcagcggaacatgatggcctccatccagtccttcagcgccatggccctcctcttctacaccgtgttcatgttcgtgatcgtgctctcctctctcaagcacggcctcttcagtgggcagtggctgcggcgggtcagctacgtccgctgggagggcgtcttccgctgcatccccatcttcggcatgtccttcgcctgccagtcccaggtgctgcccacctacgacagcctggatgagccgtcagtgat

SEQ ID NO: 85764 - DNA, 574 bp, Homo sapiens
gtaacccagtatatacctaacagaaggtggtgaaatacatcttcatacatctactcagtgaaatactagccagcctctgtgagctggagggcagcacctgggaagaggactcctcggatggggctgctcctgagcccatagggctcagtgtagtgatcctgctcggctggccacgaagtgtcagagtaatggtggtggggaccttcaagcctgggagggagctgccaggagatgtggccaccaggcggctctgcagtgtgtgcaaggcactgggtgcagtgctgctggagaccactgaagggactgggctggctgagattgtcatcagctcccccaaccaccaccaagctgttctcagctcgaatcttctcccggaagtcctccatggcttcagggtgacattgaagggaattctgaccaatgacaaagaggactggagtcttcatatccaagaggggatcatctacatcccctctggggccatccacagtaagcagaggaaacccaaggcagacaactgcagtgacatactccattactgacacatgacaggccaccaaagctcctgtgttcc

SEQ ID NO: 85765 - DNA, 417 bp, Homo sapiens
gcgcaaaagcagacaggctgcaatggggcgcaacctgtccgagggaatttgaaggtatagtatgggagggagcgagtcacagagccttttgtaggaacaacctcgatgactgtgtcatagcttatttccccggctgtgccatgtatggcgacccgccctctgaccctgcatcctctcttcccccaggaggagtgtgatttaaagaacgtgtggctgatggggggcctgagagagctcacctctgtgccagggggccccccgatggtgtgcttgctgtgtgccaacaaaggactccacgaggataaatctctggctttcttcacagacccccagctatctgacgggcctcacgggctgattccttgggccctctcagctgggtctcattccttggccctctggcctcatgctatgccc

SEQ ID NO: 85766 - DNA, 417 bp, Homo sapiens
ccagtgtccagggaacatccccgagccaaagctgcccagagccagaggccccatggtgggaggccgaggaggatgaggaggaagagaatagatgttttacaagaccacaggctgagatctctttctgcccccatgatgccccctcctgcctgctgggcccccagaatcggcccctggaaccccaagtcctgcataccctccgtggcctgttcctggagcaccatcctgggagcaccgcccttcacctgctattggtagactgccaggccacaggcctcctgggagtgaccagagatcagcggggcaacatgggagtctcatctggcctggagctgctcactcttccccatggacaccacttgaggttggaactgctggagaggcatcagacactggcgctggccggggcgctggcgg

SEQ ID NO: 85767 - DNA, 417 bp, Homo sapiens
cggacgcgtgggtttgccagatacactattctaaggtaatagagtttttgccttcaacatgataaatatgtcatgccactctctcctggcctgtaaggtttccatggaaaactctgctgccagacattttggaactccattgtaggttatttgttccttttctcttgctgcttttaggatcatttctttatgtttgacctttggaagttttattattaaatgctttgaggtagtcttctttggattaaatctgcttggtgttctataaccttcttgtacttggatattgatatctttctctaggtttgggaagttctctgttatctctttcaacaaactttcttcccctatctctttctctacctcttcttcaaggctaataactcgtagatttgcccctttgagaccattttctag

SEQ ID NO: 85768 - DNA, 619 bp, Homo sapiens
gatgataaaaatgcccaagggataaagaggcatgttaagccaacaagtggaaatgccttcaccatttgtaaatatccatgtggaaaaagtagggagtgtgttgccccaaacatctgcaaatgtaaacctggttacattggttctaactgccaaactgctctttgtgaccctgattgcaaaaaccatggaaaatgtattaagcctaacatttgtcagtgtcttccaggacatggtggagcaacctgtgatgaagaacattgtaacccaccttgtcaacatggtggcacatgcttggctgggaatctctgcacttgtccttatggttttgtaggaccaaggtgtgaaacaatggtttgtaacaggcactgtgaaaatggaggccagtgtcttacaccagatatttgccagtgcaaacctggctggtatggacccacctgtagtacagcttagtgaaggcattctgaattctaatcatagcctctacattcttgatagagcaggagcaccgtcatcttggacaaacaccgccactttaaattccagctccctttctagcttttctaagcttagtgttatttgtaaacttaatgaacatactttcaaagcgattatccagtaa

SEQ ID NO: 85769 - DNA, 377 bp, Homo sapiens
cccccatctgagctagtcctgcctcttcaccctcacccttccccctgagtacctggtgactgtgaacgtgatcttgttggccatggcaagaatcctctccaggttctgggagccgaagggctttcggaacaggattcctggtggcagctcctcgatgatcatggagccggggttactcttgatccacttgtaggggacctgaaccgggtacttgatgcccaaggcttcccctgtgggtgagaggcagggtcctgcccgtcaggagtgagaggcagcgtggggtgtgtgtacatgggattgcgggggtgtgatggaaagacatgcgtgcaggagagtgaatggtacgagaaagctcttatgtagcattgtggaaaggg

SEQ ID NO: 85770 - DNA, 378 bp, Homo sapiens
  misc_feature (1)...(378): n = a,t,c or g
cttagggcctagttaaatataaaatagcctaaccatacttgtatcaatttttccattttcaggttcgtttagcaaacaccaaaactaataaatcatctaccatctatgggacagagtcttacgtggtgtccctgacaacaaagtgagtaaagaggagtagtatcactagagtctggaagtgttaggaaaatgctgtggggaagtctggactgcaagaccatagtatgaaaggcaggagaactggtagcaggaagcacagacaaggttgtgtttgacagagaaaggggctttcttggtgagataaaatagtctcttcctgtatttctctcctttctccttttttagttgnctctggggaaagggattctctctggtcat

SEQ ID NO: 85771 - DNA, 37 bp, Homo sapiens
ttttttttttttgggggccacacaaaaaatatttggt

SEQ ID NO: 85772 - DNA, 914 bp, Homo sapiens
  misc_feature (1)...(914): n = a,t,c or g
tgcagtgactttttctgtggtatttgcatacgtagcagatataacccaagagcatgaaagaagtatggcttatggactggtatgtatgtttattctataccttttgtatctgctgagaaatgccttctttttaagataaatattattataaggagtgcaaacctttgcattacaagatttttgcgtaaaatatattttgtaataaaatcattcattagactacatttaaaatttttttgcggtatgaggctatgtaagttttgattcttttcatttagtagatattcataagtcacatgtcagaattgaaattatagtatattttaccttgtagagttctttttaacagaatcctaaaaataagaattatttagtatgtcaagagttaaaaaaaatcactactcatttaatgtctaatctaaaatacaacaggctaacatcctagctcagggatcagcaaaccttttttgtggctttgtgggccacgtacagtctctgtctcattcttttgtttttgcatgtgtatttatgtttataaactctttaaaaatgtaagaaacagccagatttgagccatagtggtaggtcgccaactcctggacactgttttggtaaactaaattatggcagtataatgtgtcatctatcaaatctaggaattaaaggaaaaaagcctagtaatagaatgactactataggcacaataatagatcactactgaatagccagaaataggacagtgatgcatttcggtaaatgtgagaccaataccctgtgataataaggactgaatattgtggtgggcngaattagttttaaaagggactgatttcngattccaaggacgttatagtgaagatcctaagatttttggggaggaaccccctttgggggaagtttgaaaagggcntata

SEQ ID NO: 85773 - DNA, 433 bp, Homo sapiens
aacttacaagttttgttaagttataattgcacttgtaactatttgtacttaactacaaatagtttccaagaaattaaatatttcagacacttttatgttacagttttaaacattagtagttttttgactacagaaaaagataaaacaaaccatcacttaccaatcttcccagctccaacggaactggaagttacttagatgatgagaaaaccaattaataaacctacgtagagaagggggaggtaggcagagaaaaaggaagaataactgggatttagaacagaaacttatataagccttcaaacagataaaacccgattttacagagttaatgaaaagcatattcccctacatgcagttgtatcttctgccaactctctttatcctttttaggtcaatgacagatataattctagtacctggtttgtgcggg

SEQ ID NO: 85774 - DNA, 388 bp, Homo sapiens
tttagaaattcttaagtctgcaaccttgtatcgtttgatgcaggccttctttgtcctgccaggcaccgcttctgctattttttcccatctttcagggggatttactgggtatgttttcaaagcttgttccaaaagcttctgttcttctgttggccaaggggtgaaatctgtatatggacctgattaagaaaaatttttatttgaaaactggctttgaacatgttctcatacaagtcttgtggcccacaagcattcgctaagtgcccatttcaatctgggatgagtcagtttgaaaataaacttgtcgagatgagagatacatatacccctctgagtgttaataatagaaaaaatttcagatagctcacatcccataaaatacaaactc

SEQ ID NO: 85775 - DNA, 391 bp, Homo sapiens
agcacagttactggacaaccgaggcggctcttggacacagcaggacaccagcagcccttcctagagcttaagatccgagccaatgagcctggagcaggccgggccaggaggaggacccccacctgtgagcctgcgacccccttatgttgcaggcgagaccattacgtaaacttccaggaactgggatggcgggactggatactgctgcccgaggggtaccagctgaattactgcagtgggcagtgccctacccacctggctggcagcccaggcattgctgcctctttccattctgccgtcttcagcctcctcaaagccaacaatccttggcctggcaggacctcctggtgtgtccctactgcccgaaggcccctctctcttctctacctgg

SEQ ID NO: 85776 - DNA, 427 bp, Homo sapiens
  misc_feature (1)...(427): n = a,t,c or g
aatctaaatcctagattaaagaaggattcagtatctttacataagaaattcattgctgattgctacacaagattagaagcagccagttcagcacttggtggccccactctaacacatgctgtgaccagagcaacaaaaatgcttacagcaactgccatgccaactgtagcaacctcagttcagtctccttatagatctactaaacttgtaataattgagagattgctgcttctggcagagcgctatgtgatcactatagaggatttttactctgttccacgaactattctacctcatggtgcctcatttcatggacatcttttaacccttaatgttacctatgagtctaccaaagataccttcactgtcgaggctcacagtaatgaaaccatagggagtgtccggtggaaaatagcccagcagttgn

SEQ ID NO: 85777 - DNA, 739 bp, Homo sapiens
ccaaaacgtaggacaaattgtaactcattggttgcacgggtatttgtaggcatggggaccttgtcacccggacttctctgtcccttgtttatgtcctcttcagtaaatgggaatggagcaataactagtttctagtttacttttgacataagatggtaaatgatatattcccatctttgtgtttggcttttagcctttgaatttaaacttaattcttcaaagagtggaacagttctgttcagttgcaaagcctattagggcctttttgcacagaacatgtgcaaattcttccctttgttggaagctgagatccatgataaattccccctctcccacttacttcacagaaagcttgcaataataaaccaggcatcaacttggatcatctttactctggggttctggcggtagaaggaccaggagctcacgcctaaggctatagctgtgccctccacccactaaaatgttaccattggtacattcattgcctatgcccttagcgctctaaaccacataatgtattccaatttccttgaggggttttttttcaacaatagacatagtgggttaatcttccccccacgcccggggcttttgggttaacctttgggcttgcccgccactccccaggggggaaaattgttttggttcccaaatgggcaccaccccggcgcgctctccaaaacgtgttgtattaaaaaacaacctaaacttttcctcttttttttttccacccccc

SEQ ID NO: 85778 - DNA, 396 bp, Homo sapiens
  misc_feature (1)...(396): n = a,t,c or g
cggcacgaggacattaatcccagcgtagacttcctctttgattgtggcctggtagggcctgaggatgtgtctactgaacaagaccttccccgaaccatgaggaaggtagggctggggctactgtatgtacaaaagaagaatggaggcccaaaggggagatgatgcgagagccaagcccgcgaccatagagcgaccttccctaacctcctttctccaacactagaaggactgagataaagccaaactttgctctccccccatctcacaagggcatcaaagctgttcctggggctctgtgctatggaagcttgctgtgtgcttacatcagcccctgccccggccagcagnaaatatggggctgactagctttcaccttgcctctggccttacctatgc

SEQ ID NO: 85779 - DNA, 54 bp, Homo sapiens
ttttttttttttggcgacagagcctcgctttggcccccgggcgggaggacaggg

SEQ ID NO: 85780 - DNA, 403 bp, Homo sapiens
  misc_feature (1)...(403): n = a,t,c or g
atgagaatcacctgtagtaattgctattgatgaatgaagtaggaaacaaaaggctttgccaggatgaaatcacggccgactaaaggagatactaatattatttgcaagaggttgggttaggatccagtagcggaacaaggaaaagatgacagtgaggagtcaaatacttccttctgtcggnttttattgttttcagatgaaatcatcatggcagcccccctgaggatagcagatgtaacctctggactgattgggggagaagacggccgagtatatgtatataatggcaaagagaccacccttggtgacatgactggcaaatgcaaatcatggataactccatgtccagaagaaaaggtaaatgttctacaaaattctataccttattgggaaaggatcactg

SEQ ID NO: 85781 - DNA, 357 bp, Homo sapiens
acctcgcagaccaaagagccaaacaaactgctttttcctctgaaacatgcattttccaccaactcattgtctttctcccccaactgccattcccatcttcactcccgctgaaaaggagaaattaataaaaataggagccaaagaaaactcagaaggtaaatgggtgttaccagaccaaagagaaatgctaaccaaatctctcatgagggaggttttgtctcagctacatcaagaaacccactggggacctcaggctatgtgtgatgcagttcttaaagtctatggatgtataggaatttatactctagcaaaacaagttacagataattgtctaatatgtaagaaaactaataaacc

SEQ ID NO: 85782 - DNA, 389 bp, Homo sapiens
acgcctcctgctcatctggcaacataaagccagtgctcaaggtgaccctgacgtcccagaatgccttaaagtttgggacaggtttttgtctacaatgaagcagaatgccctgcaaggtgtggtgcccagtgagacagaggatctgaatgtagaacacctgcagatgctcctcctcattttccacaatttcaccgagacaggccggcgggccatattgtcgctttttgtccagatcatccaggagttgagcgtcaacatggatgctcagatgcgcttcgtgccgcttatcttggctcgcctccttctcatctttgattatctgcttcatcagtactccaaagcccctgtgtatctatttgagcaggtacagcataacctgctaagtcctt

SEQ ID NO: 85783 - DNA, 375 bp, Homo sapiens
atcataatcaaataatttgatttctactaactgttgaagaactctgttagccactttgcttattcattacattttggggatcttaagcacacattaattaccctgtctgtttagcatgtcttgctgttcatcttggaattatttgttgtttagggacacttacctagtttccagcagtctgcttttaaccgggtggagagcagtgtgtcatcttctcctcgacaaacaatggactatgatgatgaagaaacagactctgatgaagacattcgagagacatatggctacgacatgaaggtagttacatggacaagctgtgtgggtacatacctgatcattgggtttgtttaaaaaaaaaaaacgctattgaccggg

SEQ ID NO: 85784 - DNA, 342 bp, Homo sapiens
ggttgaatgaaagtcacccactaccggtttgctctggattgggcctcgggccttcccactggcaacctgtccgcggtgaaccgacaggccctgaggtactacaggtgcgtggtcagtgaggggctgaagcttggcatctccgcgatggtcaccctgtattatccgacccacgcccacctaggcctccccgagcctctgttgcatgccgacgggtggctgaacccatcgacggccgaggcctttcaggcctacgctgggctgtgctttcaggagctgggggacctggtgaagctctggatcaccatcaacgagcctaaccggctaagtgacatctacaaccgt

SEQ ID NO: 85785 - DNA, 357 bp, Homo sapiens
aaggatggttgcaaaaactatgctgaggcaaagggtggcttcctgggcatgtttttgtatgaatatgcaagaaggcatcctgattactctggcgtgctgctgctgagacttgccaggacatatgaaaccactctaaagaagtgctgtgccgctgcagatcctcatgaatgctatgccaaagtggtcgatgaatttaaacctcttgtggaagagccttataagttaatcaaacgaaattgcgagctttttgagcagcttggagagaacaaattgcagaatgcgctattaggtcgatacacgcggtatcaaaatgaggtttcttggagctacctattctctttttcttctgtccgccta

SEQ ID NO: 85786 - DNA, 401 bp, Homo sapiens
  misc_feature (1)...(401): n = a,t,c or g
agaaagaaaataaaggaatgcctacttaattttgtgtaaataacaatttttttttctccctcttgtgtttttatagcttcacagttgactgcaggcattcagctttctctggcatcatctggcatgaataaaatgcttccttcagtttcaaccacagctattcaggtttcctgtgctggttgtaaaaaaattctccagaaggggcaaactgcttatcaaaggaaaggatctgctcaacttttctgctccataccatgcatcactgaatacatttcatctgccagttcaccagttccttctaagagaacttgttcaaactgctcaaagtatataattctaaattatgcccccttttatttccctagcttgttcttgatcatagncttagttgtaatttctac

SEQ ID NO: 85787 - DNA, 367 bp, Homo sapiens
ggtaatattgtttacaaagtagcttattagaaatgcttaaaaggaaacttttaggagtcctttgtttactatttatttaacaaatgttgatcaaacatttatgtatcaaatatttaacattaaagggttatttatattttattactgctagaaaaggcctttcagacttgaagtcaaaatggagagttaatagctgacttcttcctctgcaggtgttacaagaggcatttagtcgctgtgtggctgtcttgactcgttctagtaaaccaagtgacatgtcagtacaggtgtgtggatacataagtaaatgctacagtgtggctgctcaatttgaggaatgccgagagaaaatcacggaaatgcctat

SEQ ID NO: 85788 - DNA, 398 bp, Homo sapiens
  misc_feature (1)...(398): n = a,t,c or g
ttagagctggatggggagacggactggaagctgcggcttcccgtggcctgcacgcaaaggctccccacggccgccgtgagtagctttccctgcagaagcccatgcgggcaacctatcttagcagggttctcaaactcagatacctggggggccaggcatgggatggcaacttgtgaagtggggccagtaggggagcgtggggtcctggagagcccctgggcctagttggctttcctgacgtgaccaaagcagaccccgagtgcagggagtgagctctcctgcgggaagctaaaaaccataaggagccttgccaaggggcctcaccaaaattgaaaaggtaagccagagcatgccattcctctgctcanaacctacnaaggtaggccaggctcagcggg

SEQ ID NO: 85789 - DNA, 398 bp, Homo sapiens
  misc_feature (1)...(398): n = a,t,c or g
aagttggtcgtttataagagggaagaaataaattctgagtttgagcaaataagattgtttttacagaatgaacaagagatgattcttaggcagatacaagatgaagagatgaacattttagcaaaactaaatgaaaaccttgtagaactttcagattatgtttccacattaaaacatctactgagggaggtagagggcaagtctgtgcagtcaaacctggaattactgacacaagctaagagtatgcaccacaagtatcaaaacctaaaatgccctgaactcttttcatttagattaacaaaatatgggttcagtcttcctcctcaatattctggcttggacagaattatcaagccatttcaagtagatgtgattctagatctcaacacagcacatcn

SEQ ID NO: 85790 - DNA, 364 bp, Homo sapiens
agctttttgatttaaggacttagcaaagtaaaacttttgtctatatcctggaaaaagctttatcaatgtctaataattatacttcaatacaaaattatatggaagggggggacattttttaaaattggttatcagcagtgatgataatataatttacacttcttgatttttttattcttctaggggctgtttgttttatggccctcctggcacaggtaaaaccttggttgccagagcattagctaatgaatgcagccaaggagacaaaaaagtggctttttttatgcgaaaaggagcagattgtttgagcaagtgggttggtgaatctgaaaggcaacttatgcttctttttgatcaggtaaga

SEQ ID NO: 85791 - DNA, 380 bp, Homo sapiens
aaaactatataacatcctttttggaagaccaggattcagacagtagattagaggttggcgcggatatgcgtaaagttcatcactgttttcatcatttaaaggtaaacttaaatgtttccccaatagaagccattttcagccatgttcaagctgcaaaaaaacttttctagttgaccagttcttggaaggttaggatccagcattgcatgtccagaaaatggtacgatctttgaatcaatagtatgattatcactgagtttcttcagagattgtatcttacttgccaataaataaactcaggccatggacttctaattcttttgtcaggaatctctaccttctacacagaatagttccatattttttaaaaaactattttg

SEQ ID NO: 85792 - DNA, 404 bp, Homo sapiens
taggccaggatggcttcttggaagagtaacatttgggctgggatccaaatgatgagaaggaaccagtaaggcaaagacctgggacagtctgaggaagtggctgtgttttccagtgtcttttcttcatgcaggctggatctcagcaagtggctcacttattggggctactctgcgtggggcttggactctcccccaggttggctcagctcctcaccaccatcccactgcctgttgttggtgagtggatgtatcaacagggctggtattgaactgctactccccagtgtggcctgatcagttctttatgaaggcaccctttccttctaaatagctttcctggatggatgggtggatggatggatggatggatggatatgagcatgtgtcagcctcaatttctcacg

SEQ ID NO: 85793 - DNA, 518 bp, Homo sapiens; identical to SEQ ID NO: 66393

SEQ ID NO: 85794 - DNA, 405 bp, Homo sapiens
ttcgagctcttgactcatgtctcttcccattgccttctaggcaagtagcctgcagtatgaaatgctgctgctgacggattctatctccaaggaggacagctgctgggagctccggttacgctgtgctctcagccttttcctcatggctgtgaacattaagactcctgtggtggttgaaaacattaccctcatgtgcctgaggatcttgcagaagctgataaaaccacctgctcccactagcaagaagaacaaggtactgggccaagcaggggtctaacaaggaagggcagggcggccaccctcctcattccctggcagtgtgccctgcctcctcatggtctccgctttgccttgagcccacctcccctgagaggctccagtgcagcctttgccttagttcagcag

SEQ ID NO: 85795 - DNA, 896 bp, Homo sapiens
ggatgttttagaggtgtatggcacaggcgtggccagcaccaggcatgaaatgggcaccttggataagcacaaggagttggaggaccttgtggctaagttcctgaatgtggaagcagctatggtctttgggatgggattcgcaactaactcaatgaatatcccagcattagttggaaagggatgcctcattttaagggatgaggtaaaccacacatcgcttgtgcttggggcccgactcttaggtgcaaccataggaatcttcaaacacaactacgcacaaagcctagagaagctcctgagagatgctgtcatctatggccagcctcgaacccgcagagcttggaaaaagattctcatcctggtggagggtgtctacagcatggaaggttccatcgtgcatctgccccagatcatagctctaaagaagaaatacaaggcttacctctacatagatgaagctcacagtattggggccgtgggcccaaccggccggggtgtcacggagttctttggactagaccctcatgaagttgatgtgctcatgggcacattcaccaaaagttttggagcttcaggaggttacatagctggaaggaaggcaaggatcttgagtccacctgcatgcctggtgccgaacactggctcccacagcctccacaggctgaccagagacttgcaaatgaatgaagcgatggtagcccttgtaactgataggttgcagggctggaattctggagaagggaactgggacagggcagacaaatttggggacctcgtggattatttacgggttcactcgcatagtgctgtttatgcttcatccatgagcccaccgatagcagagcaaatcatcagatcactaaaacttatcatgggactggatgggaccactcaag

SEQ ID NO: 85796 - DNA, 519 bp, Homo sapiens
caattttttacttgtagtgaatttggttccaaaatcatcttgcttaagccaattatcaaagtgttgccaaaactctttgagtctcgagagaaggctgttcgagatgaagccaaactaattgctgtggagatttacagatggattcgggatgctctgagacccccattacaaaatataaactctgttcaggtgagacaaaaagttttctggttgctttcgcacaaggttaatatgaaaatattttcttcctatcgttgttgatattctgtccttaaaaataattattttacattcttaattttgaaatcagcttttctgagcatagctaactttctcagcaattctcttgggtggcagaacttattatctgtgtgaagtacattctttctggctttttattacaattggttttggagactcttctgatgatgtaaatgtatctgaattaatgaactaatgagagtgtcttaaaaagtgggacttactgttctttcttagtgcttagacatacgtcttcct

SEQ ID NO: 85797 - DNA, 369 bp, Homo sapiens
ggatttgttcttcacgtacgacgaacatggaatttgggaaaaagtggcgacctttccactcatgttgctggagaaggatgagaaccctgggggcatggaggagaccccagggcagaggccagcgtgagtgttgcgctctccctccatgactctggactctactctggctgctggcatgctgctgctgtccttttccttacgtgggacttcctccctgctttcggctgcctttcccatgccttatttggctcctgcttatacttgggttctgaatatggctctggcctttatatttccttcagacttttgcccttctcttctctagggtcacggagactcaccagttggcagaattaaatgagacgaagg

SEQ ID NO: 85798 - DNA, 410 bp, Homo sapiens
caaaaaataacaaacaaccatatcccatagacatttgaggtcactcataactaatcaaactatgactcttaaatctgtgaatgccaaaggatctgctgcaaaatgtcttgagtacatttagatgattaatataaccctctctctgctcaaggacaaggacattcctgtgcaggaagaagttgaacctgccccagttaggaggattctgaaattcagtgctccagaatggccctacatgctggtagggtctgtgggtgcagctgtgaacgggacagtcacacccttgtatgcctttttattcagccagattcttggggtaagtacacagctggactagctttcttcttctcataccttttattttattattttgatacagccgctctttgttttcatgtatttagctcttg

SEQ ID NO: 85799 - DNA, 371 bp, Homo sapiens
ccttcagatataactcaaaactgtcacggcatcagaaaatccacactggagagaaaccatactcatgtgaggaatgtggacaagccttcagtcaaaattcccaccttcttcagcatcagaagctccatggtggacagaggccctatgaatgtactgactgtggtaaaaccttcagttataattcaaaactgattcggcatcagagaatccatactggggagaagccctttaaatgtaaggaatgtgggaaagccttcagttgtagctatgactgcatcatccatgaacgaattcacaatggggagaagccctatgaatgtaaggagtgtgggaagagattgagttctaattcagttctgattcagcatcaa

SEQ ID NO: 85800 - DNA, 392 bp, Homo sapiens
  misc_feature (1)...(392): n = a,t,c or g
aatacatcgtcctttcctgctcagccttcctcaccagctcgcccatctctgccccacctttcccagcacccctccaatccccttcttcctctggcctctgcagaccacccacaatgtggtcgtttcctcccacttcacgaacccgaacctctctgtccctccccttctctctcctatcccaccctggtctcctcctggtcttctccattcagttcacatcatggatgtccccctggtctctatcccttccccacgtctccaaaaaccatccaaccccctggcctggctcagcttaaaatgctttgcattcctcctgggcggcagcagctgcggggagcccagagcatgccgggacatggggcgctctcccctctcctccttccccctgccan

SEQ ID NO: 85801 - DNA, 399 bp, Homo sapiens
aatacatgtgcccccaccagcccaccagctcctcagatacagggctctgagttatactgttctgtattttcagtgcttggccctcagtagacactcagtaaatgcttgtggaacaaacacatgaagacaccctagtcaaggagcaagcttgccggctgcccaccggggatgcccagcccttggctggctccttgcctgatgtgccccgttcagcccacctcattaaagaaagggttgtttcccatcttgatgcgtgtctggtgctgctggcctgcgatggacaccttcaccactggtttgatgttgttgcccatgagctgtcgggcttcaaacaccttcactcgaacctgaaagtgctgaggctttgaggacagagccctgtgcgcagtggagccaggg

SEQ ID NO: 85802 - DNA, 586 bp, Homo sapiens
cctgcgtcctatacagcggtcgcttcgacattcgtgcgtcacgctgttcagggtgtgcgtgacactagagtcgttcctgccgtacacttcccaagagatctgatagccagtaatgatgccatttttctccaggggctcctgccagctgaccttgagagatgtgtccaagatctctgtgaaactcagatgtcccacagctcctggtttgtcttcctgagtccagaccagctgaggtgtgctgggaggcccgtccccaggggtggtgaagcacagaacggaagtgaagtaggcggtaaacttcttcaggttcgttatgtgtccatggtggactccgtggaaatctggggcgatagtgaccacagtgacagcctcgggggcatctgccggccatgccagaagctgagatggaacagggtgaaaaagacagcctgttttcaatggcatttctccacactcatgtctgcagcagaattttattttgtcttttaaaatgtaaagtcataattaagaaagtccataaatcctgcattttataatcacgcttgaaaaaagttgagataaaaatatattttataggtttttgtat

SEQ ID NO: 85803 - DNA, 407 bp, Homo sapiens
tacgtcctgcggaccggattcaacacatcccaggtgcggggccaggtctggggagggcgggccccagggcagttggacagccaaggtatcagccctttccgaccccagaacatctgccccacgggctgactctggcagcacggccctggacctgggccagggtgcagaggccaccccaagaccaggcccacgcttccaggcctgagctgctggagggagtccagacagcagaaaggctgttcctccattcctccagggcaagctgctgcgcaccatcctcttcggggtcaagagggtgactgcgaacaacctggagaccttcatcttcatcctcttcctcctggtgtttgccatcgctgcagctgcctatgtatggattgaaggtaccaaggaccccagcctgtatt

SEQ ID NO: 85804 - DNA, 434 bp, Homo sapiens
aatacatagcctggttgggagattggaaattgccaccatcagtagctactatttgcaactgataagctgttttttcttctctgtctagggccattcttgtagaaataaccccactctgagcattgacctgaaaccgagacctgtccccagcagatatgctatatttgacagtaccattggtacccaagtctgggtcagtggcagacacagtggtgatgtagctacctccaggctcattctccttaatgtgagcaaagtattggaccgggtagaagacagggctgttatcatttatatccagaagactcacatttatgcgagccattgatgactggggaggggagcccagatctgtggccagaaccaacagggagtagaaggcttgctcttctctgtccaaggaggaaatagtactcaacctcccagacacagga

SEQ ID NO: 85805 - DNA, 433 bp, Homo sapiens
aatacagtgcattttgtctttatttgcatgtgagagagaaacctgacagttggtctgaccacttattttgaaatgtagtccgtggattggaagcttttagaagctctgggttttgttttgaagttccggttctttttggctccagcttggcaacagctttgactggccgtttcgcacctgccctttcatgtactctcttcgtgtgtttgacaatataatcatttctaatagcaccatagtcacaatactcacactgataaggaaatatgcctgtgtgtttcaccaaatgcctctgaaactctcctttcgtgtacgaaatgtagctgcagtgagaacaaatgaatttaatctcctcgtgttgaagggtgtgctttttgtactgcagcgggtcctttgtagagaatcgacatttatcacaatagtatttgcctgg

SEQ ID NO: 85806 - DNA, 400 bp, Homo sapiens
  misc_feature (1)...(400): n = a,t,c or g
ttgtgtttttcttctgttctcagagctgagatcaatttgctttctagtttgtggcagcaggaaagtcaccctgcccctgccctgtgtcttggtctggccacaggccttggcccgtgctctttgcaggcccctcccaggcccctttcctcctggggtcccgccccagtctggctttgagaagccatctcctgcttctagaccgcccagccctccagcctctggctccctcctcccactccccagcatcaaccccactcccgccctgtccactcctgccctgtccacaactcccccacggtggctgtcccctgctgtgccgtccagtctgcctgtactatttgtgcagagcctcctatacgcacgcagtgcgcgaggctctgtggaagctactgagaggttn

SEQ ID NO: 85807 - DNA, 398 bp, Homo sapiens
aatacattggggggctctgggtcctgcaccatcttgctcaggatgctgtggatctgggagaacctgggccgctcacctgggtccttctgccagcagtcgagcattagtcggtgcataaggttaggacagttcctggggggtggcagccggaagccatcctccacagccttgatcacgtcttggccagacatgtcccagtaaggccgctccccaaaggccatcacctcccacatgatgatgccgaagctccacacgtcactggcagagctgaagtggccaaactgaagtgtctcgggagcggcccatagcgctgggctccggccactcatagtggtgtagacagcctctgatcggtcccgggggccccgcccgaagccagagatcttgcagacaaggtc

SEQ ID NO: 85808 - DNA, 387 bp, Homo sapiens
  misc_feature (1)...(387): n = a,t,c or g
aatacaggggtggatgagcagtagatccggggcgaggggccccagggccatctcctcttgcataaacaagttctctctgcatcctcatgtctccattcatagtttttggtgtgtgattaaacgcatgtgcaggatccttgttgtacactttgaggagtgatctgtcttgaatgttccttacatcatttaattcataatagacatttctgctttcatctttgatgtaaatggcgacactgggcgattccagcattttcatggtgagctgctgtggaaaggcacttacgaagagagcacggattgtgtctgcacttgtgatttcattcggcatcctgagctgcttggtttcatctccatactggagatagagaacccccagagatcttn

SEQ ID NO: 85809 - DNA, 408 bp, Homo sapiens
aatacacttctgctgtggaaaataagagtccctggaaaatattggagaggtccctgaggttgaagacataatgaaacttaatggccgtgggaagaaatgttgccgtgattttctgatgcaaagccagggccgcggccaccagctggctgcttatcctctggatagccatggagaccgagcggaaggccaggtgctgcgtcaggattgtgttgtagatggtggtgagggcctcctggccggggaagctcacagcaaacacgcagaaatggcgctgaagcctggagtcgatggtgaaggatccggaagtggggttcatgcaggccacgtactgacaattatggatatcttttaacgtcagcttatgtctgtcataccagtgccggtggtccatgtgctgccggatgaggg

SEQ ID NO: 85810 - DNA, 1107 bp, Homo sapiens
tggagtccatgtagtctcacatgtggggtcggcctacagaccagagacgtcttctgcagccacctgctttccagagagatgaatgaaacagtcatcctggctgatgagctgtgtcgccagcccaagcccagcacggtgcaagcttgtaaccgctttaattgccccccagcctggtaccctgcacagtggcagccgtgttccagaacgtgtggcgggggtgttcagaaacgtgaggttctttgcaagcagcgcatggctgatggcagcttcctggagcttcctgagaccttctgttcagcttcaaaacctgcctgccagcaagcatgcaagaaagatgactgtcccagcgagtggcttctctcagactggacagagtgttccacaagctgcggggaaggcacccagactcgaagcgccatttgccgaaagatgctgaaaaccggcctctcaacggttgtcaattccaccctgtgcccgcccctgcctttctcttcctccatcaggccctgtatgctggcaacctgtgcaaggcccgggcggccatccacgaagcacagcccgcacatcgcggccgccaggaaggtctacatccagactcgcaggcagaggaagctgcacttcgtgggggggggcttcgcctacctgctccccaagacggcggtggtgctgcgctgcccggcgcgcagggtccgcaagcccctcatcacctgggagaaggacggccagcacctcatcagctcgacgcacgtcacggtggcccccttcggctatctcaagatccaccgcctcaagccctcggatgcaggcgtctacacctgctcagcgggcccggcccgggagcactttgtgattaagctcatcggaggcaaccgcaagctcgtggcccggcccttgagcccgagaagtgaggaagaggtgcttgcggggaggaagggcggcccgaaggaggccctgcagacccacaaacaccagaacgggatcttctccaacggcagcaaggcggagaagcggggcctggccgccaacccggggagccgctacgacgacctcgtctcccggctgctggagcagggcgctccttgtagttcatcaaaaaaaaagaattag

SEQ ID NO: 85811 - DNA, 531 bp, Homo sapiens
aatacatctttctgtgaacagttaggttagactttgttgaatagcgctggtgacaaatatcacactcaaagggcttctcacctgtgtgaacacgggtgtggctctcatattttcctattcggtcaaatgttttatcacatttaggacactgcaatatttttttgttgctgttctgaatgaccactggagttaacccctcatgaacatttcctacagaatcaccagcctcaggttcttcttctgcatcattatgatccttttcactttgttcttcaatgtcagagtactcatctgacatctcctcctctagctcatcttcttcagcattatattcacttccagggtcctcagaatcatttctatctgacttttccttatcaaaattttcttgattcaaattgtctgacccatcaccactttcctgttcatcatcgctggtgtcatcaaacttaacagggcacttccgattcctttttgatcttcttgcggagaaacttctctccagcatttttaacccatgttttttcccta

SEQ ID NO: 85812 - DNA, 411 bp, Homo sapiens
  misc_feature (1)...(411): n = a,t,c or g
aatacactcgttgtttccaaaactccaaaaataaggtgacccaaattcccatgaatattgcaaagaacactgttgactcattatcaaacaaatgggagaactttgaagccaaacacgtactatttagtctccaataatcacacacttgatcacagagtgggcacatgatcatctgaccaccaatctcagggtcacagatttcagtgctgcttgtgttatgttccattgataataagccataaataaaacaagcaaagccaactacagctgcaaagaatagcatttctgtgtaaaatccaagaaagacaaaatagataccaattttttctccataataattcttaatcaagtctaaaggctgctccttgtagaaataggaaaatcgagcccaattctggtgaagtgtgtatn

SEQ ID NO: 85813 - DNA, 411 bp, Homo sapiens
aatacagggtccggtgtcgaggggagttgatgtcgctcggtgtggacgaccggtcgccttcggcggcagatgcgtcggagatgacagagggctgccgggagtggcaggggctcaccctgaccgctggaaagcagggacagctggtgagtgagggatggagagaacgtcctcgcctgtgctgccttggcggttattccacccaacacccccgttctacagatgggaacactgaggtgtagagaagggaagagacttgcctggttctccaaccccctactccacagctccacacgttcccatagagcagctgctgggaagaacctcccatagcctctggatccaatgaaccctcctctaccagcgtgaacgaggagaagacatggaagttttcaagtcttctcattccaaatt

SEQ ID NO: 85814 - DNA, 443 bp, Homo sapiens
aatacattgcccagaaaatcttatgataaagtgtcttcatggaattgctggaatcagttcggtcaaaacagtgacgatccaaaacttccaacgtgtgcaaaacccgactaatagtcacccctgctgtggattcttggcacttgtcaaatgaccaccgaacttccactgcacggcctctttgttttatctgttgttctacttcataaatccttgcccgaacctgctgattgaaagccgtgttcccacccggcatggggaggctggacggggccacctgcagcagatccaggggtgagcctgggtttgcgctcttattttcatttgtggaataattccacaccaaggcacttgggcaacagagagtgacagtctgcaacatacaactaagtccataaaccaagggaccatgctgtgcacaggaaagaaaatctgagaaggcagct

SEQ ID NO: 85815 - DNA, 678 bp, Homo sapiens
atgaagcctgacaatattttacttgacgaacatgggcacgtgcacatcacagatttcaacattgctgcgatgctgcccagggagacacagattaccaccatggctggcaccaagccttacatggcacctgagatgttcagctccagaaaaggagcaggctattcctttgctgttgactggtggtccctgggagtgacggcatatgaactgctgagaggccggagaccgtatcatattcgctccagtacttccagcaaggaaattgtacacacgtttgagacgactgttgtaacttacccttctgcctggtcacaggaaatggtgtcacttcttaaaaagctactcgaacctaatccagaccaacgattttctcagttatctgatgtccagaacttcccgtatatgaatgatataaactgggatgcagtttttcagaagaggctcattccaggtttcattcctaataaaggcaggctgaattgtgatcctacctttgaacttgaggaaatgattttggagtccaaacctctacataagaaaaaaaagcgtctggcaaagaaggagaaggatatgaggaaatgcgattcttctcagacatgtcttcttcaagagcaccttgactctgtccagaaggagttcataattatcaacagagaaaaagtaaacagggactgtatt

SEQ ID NO: 85816 - DNA, 430 bp, Homo sapiens
  misc_feature (1)...(430): n = a,t,c or g
gtgtccatgtcgatgccgcgacgtagcttgatcctctagagcggnnganaaggttctttcttttatatattttcagctgggcatagagttttttcagctcgtcccgaatgtcctctggatccaagctgtgctcactccaggctgaattgatactgctgttcaggtaggatccagatcggcccatgtctagctcatcctcatatgcttctgtagcaatatcatctcgtgggttattgcttgaatgtgaaaactttggaatcaaaagcaacccaatggtgactgtcacagtcaaatgagtatgtgcaaaatacagcatcaacatccaatcagactgaagtcttgaggcaagaacaaatctaattgtatggaatatagcagagatgatgagctcattgtgaactgcaacagccatatagcggggctcatggat

SEQ ID NO: 85817 - DNA, 577 bp, Homo sapiens
ccacgagtgtggcttcctgctgcctatgaaggaggctcctgagatcctcagtggctccaacaagtcccttgccctccatctgatacaaaacatcctgcacatcccgcctcagtatttgcaccttgtggctaatgaatacttccatgacaagcactccctgactgaaatccgagacagtcttctggacttgcttggagatgtgttctttgtggtccctgcactgatcacagctcgatatcacagagatgctggtgcacctgtctacttctatgagtttcggcaccggcctcagtgctttgaagacacgaagccagcttttgtcaaagccgaccacgctgatgaagtccgctttgtgttcggtggtgccttcctgaagggggacattgttatgttcgaaggagccacggaggaggagaagttactgagccggaagatgatgaaatactgggctacctttgctcgaaccgggaatcctaatgggaacgacctgtctctgtggccagcttataatctgactgagcagtacctccagctggacttgaacatgagcctcggacagagactcaaagaaccgcgg

SEQ ID NO: 85818 - DNA, 387 bp, Homo sapiens
aatacagtgtgccatcaattacttggggaaggtaatgttcctggatacaagattccgtgtaggaggctctcaactgcttcagttccttatttgccatctccatgacagtcatttcagcaaattctcgtggagacgtggtcccagagagcaagttttgttgtaaatgagaatttctggggttcttcaaattggcaactttgcttctgatgcaagttttatattttttgatgttctttgaataaagggtaaaaacatgctcttcaatttctcttgcaaagttttgccacaaatcagctttgggttgatctgtggaagaactagttaaagctgcgtaaagaagctctatgcatttagttctcatgggtgttgtgggatccagcaactcac

SEQ ID NO: 85819 - DNA, 390 bp, Homo sapiens
aatacattgcagggagaaggggtgagaaaaaggctccgatccagcagatggtttgcccgtaaactatccccaggacgttatcaggaatggcaaactcctgctgcccccagcactgaatcagcttgcaagaggaacagtaggtcaccaggagctttctaggaaaatccacgaagagtgtcacagccaagatgatgatgaagtcgaagatcatcagcttgtacatttcctgcccaacttgggtctcccagcacgggtagagtttctggttgtagccgcaaaggtcacatgtgtcatcatcacaggatgtgatcttggagcccagcgtgaacaccaggacacatatggtggccagccgcataaagacacacctaaggattgtcagacggatct

SEQ ID NO: 85820 - DNA, 391 bp, Homo sapiens
aatacatgagtggagttcagtaaatggtggatcaacgaattcaagactatcaagttcccctcgcagggaacgatttttgactactacattgatcctgacacaaaaaagttcctgccctggacagataaagtgccctcctttgagctggatcccgatgtcccactgcaggtaactgtccccaaagcagggccaccgactggtgatttagaggcgggaatcggtgcagtaccctccacacgcctgcacggaatgtccaaacacaaccgattttcaacattaggacctgttcggtagaacatggcctgcacacccacgagaggcagaagtgtctgagaatcacagctccctccccttccctcccctgccccaggcctctttggtccacaccacg

SEQ ID NO: 85821 - DNA, 408 bp, Homo sapiens
  misc_feature (1)...(408): n = a,t,c or g
aatacacgcctgggatatcatcaagggtgatttcatcaagaaatccaatatgtcttcattgacaaagatgagttccacagaaggttggctgttctttacatccagactgatgggttcggcctcttcggtgttggagttgcccgccacgagctgctcgtcctcagcactgaccagctcctgcagcacggcctccacgatgggcatcaccatggcggtggtggaggtgttggacagccacatggacagcaacgtggtacagcacatgaagcagagcagcagcatgcccggtttggccccggccatcaagaccatgcgcagagcaatgcgcttatgcaggttccacttctccacggcagccgccacgcatatgacccccaccagcagtagcgtggtgttcttgaagtactn

SEQ ID NO: 85822 - DNA, 418 bp, Homo sapiens
aatacaccttccgctgggtctggatgcatccggagtggtcattctggacacagcagcctgagtcccgctccaggtctcgctcgcgcagcaccagctgctcgatctgcccgtccttccggatgcagggtgagaacttggcccccaggtggatcaggtcaatcgagctggggccaacccagaagttctcctgctggatgtacttcacgctctcgtacacacctttgttccgcagcaccagctgggtggtgacgtgctgggcaaagcccacgggtgcgatgccatacgtgcaaatcaccagcagcgtgatgatgacatggacgaaggtcagccagtaggtgaagtagggccggtggctgtcgaagctctccagctgccgctgcacagtgctgctgatgctgcggcggtagctgcggttcaa

SEQ ID NO: 85823 - DNA, 476 bp, Homo sapiens
aggtggagccttataccaaccggttaccatggtaacctcccagggtcaggtggtcacccaagcaatcccccagggagccatccagatccagaacacacaggttaacgttgacctcacctccctcctggacaatgaggataagaagtccaagaacaaacgaggagtcttgcccaagcatgccaccaatataatgcgttcttggctcttccagcatctcatgcacccctaccccacggaggatgagaagaggcagatcgcagcccagaccaacctcaccctcctgcaagtaaacaactggttcatcaatgcccggaggcgcatcctgcagcccatgcttgatgccagcaacccagatcctgcccccaaagccaagaagatcaagtctcagcaccggcccacccaaagattctggcccaactccatcgctgcgggggtgctgcagcagcagggcggtgccccagggacaaaccccgatg

SEQ ID NO: 85824 - DNA, 395 bp, Homo sapiens
aatacatgctgccgtctctagaaaacacgggctcctcattccgctgagagagccacgtatctgatgtcatctcatattttttactacaagcacctgtagtggtctcacagactgtgaggatggagatgttctgagctcggtttaaccatcttaccacagtcttggtattgcttacccatttaaccatagtgatatagtattctcttgatttaaagctgtcaggtggcatgagctccaaagtgtgagttggtccatacaggtttacaacatataattttattgttgggttcacttgacctgccttaggatacggatactgctttcctttgggatacaacgctccagtaaaccgagggataaccatggtgggtaccaaagagtcatttatcatcagg

SEQ ID NO: 85825 - DNA, 411 bp, Homo sapiens
aatacagtctctgaattttgtgtaatgcatttctcatttatgacatttgctttgaagcccagaactgcaaacaccaccaatgttgccaggacagaagtgaaaaaattgatgaaggacaccaggacagcatcaaagtggcagttgttgtctctcttgttgtagcttgaaaaggcaatgacaccaccaaatcccagacctaaggcaaagaacacttgagtagcagcttctctccagaccttgggctccagcattatttcaagcttaggggtaaacatgtggcgaatgccatcaattgaaccatttaaaaggaatgctctgatgaggaagcaaataagtaccacatatggaaacagagaactaaaatatatgatttttccagaagactgaatgcctttgatcatagccaagcac

SEQ ID NO: 85826 - DNA, 1256 bp, Homo sapiens
gcactgctcctgcaaaaccccggggagcgccagaccggggatggcggctttgcctccacagcgccgcgctgcggtgctcacggcggctctgctggggctctttgtggtgcccaccctcccctccttgcctggtttgcacctgccggcccccagttccgctgcctgccccccgtgcctgctgacatggtcttcctggtggacgggtcctggagcattggccacagtcacttccagcaggtcaaggacttcctggccagtgtcatcgcaccctttgaaatcgggccggataaggtccaagtaggcctgactcagtacagcggggatgctcagactgagtgggacctgaactccctcagcaccaaggaacaggtgctggcagctgtgcgccgcctccgctacaagggggggaacacgttcacaggccttgccctgacccacgtgctggggcagaacctgcagccggcggctggcctccgtccagaggcagccaaggtggtgattctggtgacggacggcaagtcccaggacgatgtgcacactgctgcccgtgtcctcaaggacctgggcgtgaacgtcttcgctgtgggtgagcaccatgcggctcccccggccctggagtctcaccgccggggtcgcagcagggagcttgcattgggcacctggtccctgagccccagcttccacatctgcggcacggagctgcacgcagagccaggcaccgcctggcactcagaggcgatggcacaggcgggctgctcctttccaatcgcctggtgtttggtgccctccgtggaaccaccccaaccctccccctgtggcgtgaacttccctggtgtgaagaacgccgatgaggctgagctgaggctcctggcgtccccgccgagggacatcaccgtccacagcgtgctggacttcctgcagctcggcgcgctggctggcctgctcagccgtctcatctgccagaggctccagggtgggagcccgcggcagggcccagcagcagcggctccagccctggacaccctccctgcccccaccagcctggtcctgagccaggtgacctcctccagcatccgcctgtcctggactccagccccccggcaccccctcaagtatctgatcgtttggcgagcctctagaggtggcacccccagggaggtgagggggccggtatacagggctccccgagccggtcctcagccgtagtgagatctgataagccaaagggagggcaggaataaaggcccacgtgtatt

SEQ ID NO: 85827 - DNA, 513 bp, Homo sapiens
tttgtgcttcccgccacagcacctgcacatcactccgcagtggtagcaggcccgaaggggcaggtaacagcacatacagggggccaggaaagacaaggcaataagagccatccaccggaggcaaaacttctcgtcgctagtatcgcacgagcaagggtctgtatagtctccctcggggtccgacatacagtgatagagcatgctgtccgcgcaccacatgcagctcacccggcggatgcaagttctcacggagtcgggcgcgtcctggcagtggccccggcggttctcctcgtggttgaacatgtccctgcagtacacgcaccgcgagcgctctccgtcctccttccgccgccgcgacttgccccgggagggctgcgtcttgatcacgctgcccccgcggccttttgggggtcctcgcctaaggccaaagtttgaaggaagttccacgtaggggtagttgtagtcatgcttggggacctcgcccttggcgaagcgcacgtaagaggagtccgc

SEQ ID NO: 85828 - DNA, 403 bp, Homo sapiens
aatacagtgcgtctaactggcattgtgtgtgttgattgtgcctggttttctgtgctactccttagttcatttaatgattctgagtaggaactctcgattgaagagagctcttgaagcagatcctcattatcactgttggttactttagcattcttttgtaggccattggcaatagctactcggtaactgaatgttggtgagagggaaaactctttactggcctcgtcttcctcagtggataagttgtgagtggatgaacactttgcaatcttctttacagtgcttttaaaagtgtaagaaaatttgggggatttggtctggccagcagtggggaagtcttgatcctttttctgctgacgatactctttgtttttggttgtatttcccaatttctttgtaaacc

SEQ ID NO: 85829 - DNA, 1271 bp, Homo sapiens
atgacaacaacattaattggtcttttgaagactgcccgactcctccgtcttgtgcgcgtggccaggaaactggatcgatattcagaatatggcgctgctgttctaatgctcttaatgtgcatctttgccctgattgctcactggctggcttgcatttggtatgcgattgggaatgtagaaaggccttacctgactgacaaaatcggatggttggattccttaggacagcaaattgggaaacgttacaatgacagtgactcaagttctggaccatccattaaagacaaatacgtcacagcactttattttaccttcagcagtttaaccagtgtaggattcgggaatgtgtctcctaacacgaattcggagaaaatcttttcaatttgtgtcatgttgattggctcactaatgtatgcaagcatttttgggaatgtatctgcaattatccaaagactatactcgggaactgccaggtaccacatgcagatgctgcgagtaaaagagttcattcgctttcaccaaatccccaaccctctgaggcaacgtcttgaagaatatttccagcacgcatggacttacaccaatggcattgacatgaacatggtcacaaatggtacatgttcatcttgcacaagtgatgatggtcacttcatcctggtctccaaccatcatcaaggaggacttatttacagttggaatgatgctgcttctatgcaaaggccttttaatcatatcaagtcaagcctcctgggatccacatcagattcaaacctcaacaaatacagcaccattaacaagattccacagctcactctgaatttttcagaggtcaaaactgagaaaaagaattcatcacctccttcttcagataaaaccattattgcacccaaggttaaagatcgaacacacaatgtgactgagaaagtgacccaggttctctctttaggagcagatgtcctacctgaatacaaactgcaggcaccacgcatcaacaagtttacgatattgcactacagccctttcaaggcagtctgggactggcttatcctgctgttggtcatatacactgctatatttactccctactctgcagccttcctcctcaatgacagagaagaacagaaaagacgagaatgtggctattcttgtagccctttgaatgtggtagacttgattgtggatattatgtttatcatagatattttaataaacttcagaacaacatatgtaaatcagaatgaagaagtggtaagtgatcccgccagtgtatt

SEQ ID NO: 85830 - DNA, 741 bp, Homo sapiens
aatacaggtgggaggatggagtttccagcttctcccctcctcaatcccaaagcgaggagcccttctctgagcttctgagatgcaagggaggggagggaacaggagccgggcagagaattgcaggctgggggcttacttagggcagagacctgtggttgcagagacgggggaagggggctagtctctggagcagggatgcgacaggtgaaagccgggaccaggggctctgataatggtgggtacaagggtgctgacagctggccactggtcaaggggttctggggagtggccaggccaggcactcaccgccaccacttggccttttctggggtcaatgatgcgcaaggtcttgtccttgcaggtggtggctagcaggctaccgttgctgttccagcacacactgtggatgacgtctgggtgcatatcatccaggctcagcagcacctccccggtgcccacattccagatgatgatcacattgtcaccacctgcactgagcaggacattcctggcagtagggtgccaggagaggatgcccacacgcttggagtggccctcaagtgtgatgataggttccgtaatgttgcgcatgggggtatagtctggaatctgccacaccatgatggtggtgtcgtctgaggcactggcgataacgttgtcattgtgtggacaccagtcaatatccagcacaggggcagtgtgcccagtgaccagtgggtagttcttatccactcgccctgt

SEQ ID NO: 85831 - DNA, 566 bp, Homo sapiens; identical to SEQ ID NO: 66992

SEQ ID NO: 85832 - DNA, 417 bp, Homo sapiens
  misc_feature (1)...(417): n = a,t,c or g
aatacagagtggggggaagaggtctgtaaagacgacctgctcattccacaggggctcatagctgctcttctgcactgaagtcttgcccttctggccagcaaagaagacttgcacgtaggggtccacgaggtccttgttttcaccgatgaaagccttctttacattggccatgaggcttgtgttcatacggggcagcccctctgctcggtaaattttcacatagaaccgggcccactggcgttcggggggcaccccctcggggagcagcaagttcccctcaatgtcatcttcgtcggtctcattggccttgtggggcgtcttgatgttgtcccctttgcccaccacggcaacgtcacacttcacgtagcccttcagccccgaggagatgtcatcggggtcagacaggatggcccactn

SEQ ID NO: 85833 - DNA, 402 bp, Homo sapiens
aatacatgctgcatgagttcttcttctccccgctatgcacctgctccatgtggttcatgagggaggtctcctctacgaagagctcgtggcagtagacacactggagggccgctcggtcctcatttggggagcattcggggtggcactctgcaatgtgtttttggaggtcttccgggaagtcaaagccttcctcacactgactgcacttctgagtgtccttcatcttccagtcctccatcctggaaccggactgagagccgtccttgttcctctcatgaacctgcatgtgtccgtgtaaggaactagaggacagaaacccacggcgacaaatggcacatctatatggcttgttggacgtgtgagtctttaagtggatcttcaagtgatcacttctggaaaacg

SEQ ID NO: 85834 - DNA, 562 bp, Homo sapiens
aatacagtgcctggagatagaggggtcttattatcttaaccacaaaatgattcttgagtgaggaaccctaggtttctcccaaatgccagactgcctacatttaaatcagtccacagtatcagtctagctccacccaaggaaacaaatagacgagggataacactaaagcacactcgatgcactgaatggagctggaatcaaaggatgaaaatattatttgcccttctaggacaaggtttactttcaaccaggaaagaaaaaaagcaaggtaatgttacctgtccttagatatgggagctacaagtggtgcataccagttaactgccacctcacagtgggcatcaaggtatatcaaaacctgtccaagtttagccttctgagcaccaatacttcgtgcttgaattaaaccttcccttctttcatttcgaaataccttcactaggccattccacagcttaatatattcatccagtttttcttttaagtgttctttattactgaaatcgtcaattaacacaatttctgctaaatatttccttggagtccttttaattacactgtg

SEQ ID NO: 85835 - DNA, 384 bp, Homo sapiens
aatacatgtgggtcaagggtgtgtattttgttttggaagatgctattcctcatgagactgttgtggagggaggcagagcttccacctcgctggagacgcggcttagccggtagagttggttcatccttgtccctggctgcagatggctttgcttgggcttctggtgctgtcaccttgacgaccttattgcggtttatcatttgcttcacccatttttctacttggacgttgaatttcatgaaaaccacatagcaaaaataagctgttaagagaagcaagctttcccaccacatgatgacattatccaggaaaaatatgatcagcatgatcaagtcaacaatgtagaaagacacatctcgaaagagcggccaccatgtcaggttt

SEQ ID NO: 85836 - DNA, 720 bp, Homo sapiens
  misc_feature (1)...(720): n = a,t,c or g
gtcttgtgatttaacttctttcctatttatattttgtgatctttcactttgtctttctagttttttgtcactttgagagtctactcgactgtgtgacctttctccaggggtctctttctcccaagaagagttaatgcgttcacctttatagtcagaatctgagttacttttaaacttcgaacttttgctttcagtctttggttcacctttaccatatttctcaggatgtccttgtagcctttgactagcctccaatatccttggttcaccatcaccacagccagtacttaagtcttttcgtactctttcagttcctctgttaaactggctatgtctaatatcctttcttcctcttctactatcctcatttgagctaccctcgccaacctgataatgagaatgtgaccaaacaccattagtgcagtgtttctcaacagatgtaggtaaatgtgaagtactccttttatcagaatgtggttttccttccttttccagatttggcagtgaagtgctatgatgtacatctttagaaacatcacttttagctctgtgatcagtctttgaacaatcatccaaatgtggagatctagatttaagatcttttgttttaactgtatcaaatgtcctttgcagtttatgattatttcgaanatgtggaaactcagacaatctgtgtctgtatttctttaaactttttcatcagctctttcatttgtagtt

SEQ ID NO: 85837 - DNA, 403 bp, Homo sapiens
  misc_feature (1)...(403): n = a,t,c or g
aatacattggtggactgtgggtcggggtggaccctgagcgagggcccctggacgggggctggtggggcgggacacttactgctttccttctgtggccggcttaagaacatacttgtcaaaatacattctcaccaggcgctcccgttcctcctgccctggcaggtcgaagtggaccatctcattgatgcggtcattgatggcccagtcgaactgctctggttggttgctggccaggaccagcatgaacctgcggggcggggatgaggatgaggatgctggggctgccggccgagctgcaccaaggggaacggngcctcctcagcccccacagggagaacctaaagtggcgggaaacacgaggacacgggcacagccctggtcggccacctgccccactgcaccc

SEQ ID NO: 85838 - DNA, 419 bp, Homo sapiens
aacccacgcgtccgttcctttctttccaaaaaaggaaaagctgagctcaactttgaagatttttatagattcatggataatctccaaacagaagttctagaaatagaattcctttcctactcaaatggaatgaataccatcagtgaagaagattttgctcatattcttttacgatatacaaatgtggaaaatacatcagtatttttagaaaatgtgcgttacagtatacctgaagaaaagggcatcacatttgatgaattcaggtcatttttccagtttttaaacaacctagaagactttgcaatagccctgaatatgtataactttgcaagtcgttctatagggcaagatgaatttaaacgtgccgtctatgtagctactggactcaaattttcaccacatttagtgaacactgtctt

SEQ ID NO: 85839 - DNA, 601 bp, Homo sapiens
cggacgcgtgggcaacaagtttattcagctcattctaaatggtcccttatataagggccaaaagtacttaacttttaaaagttagcaatataatctcttcttgcttataaggtcaagtcttttgtgatagccttactagcaataatagaaaattgaaaaaaagcattttagttcccgtgtttaaaaatatttcttataagtgttggtattgcaaatgaattattaccaaatgttaataatctattatgtcttgttttttaaagtgaatgaatttttagcttttgagggtcccatcttgttggatatgagaattaaacatctaatcaaaacaaatcagttaagtcaagcaactgctctagcaaagctgtgttctgaccatccagagattggcataaaaggtagttttaagcaaacttaccttgtctgtctttgtacatcatcaccaaatggaaagttaatcgaagaggtgagtatgttttctttcattagtaattattttttaagttgagaaattaattgttaattagaatgtctttgatgatccttttctctgatatagctaacagatcactggcatatcttacattttgggaagggtccg

SEQ ID NO: 85840 - DNA, 1222 bp, Homo sapiens
accatttatttaaaagatcttcctcctcccactaaattgcagtaggactttagtaataaatcagaggacagtatatgtgggggcctgtctcttcctctctattctgttccatgggctatcttgtttttgggtttttttcttttattttttttttttgtgatgaagtcttgctcttgtcaaccaggctggagtgcaatggcacaatctcgggttcactgcaacctctgcctcccgggttcaagccattcccctgtctcagcctcccgagtagctgggactacaggtgcccgcaacaaggcccggctaatttttttggatttttagtagagacggggtttcgctgtgttagccaggatggtctcgatctcctgacctcgtgatccgcctgccttggcctcccaaagtgctgggattacaggcctgagccactgcgcccagcctggtggatactttcttaatcatctcattaaaaaaagcataggaagactaagacatgtttttgaggttattaggaaaatcaggcttaatattttctatttcacaagatcatatatctaaagtaaccaagtaaactatctgattatgaggatctcaaatacaagattatgaaatatttctcatactaaaaatacttatatgagtaatgacttaatgccaaatcctaacccacaagggaaacccaactgttatttataattttaaaaggtatcaactgttttcacttacttcttcttcactgctattatcctccttttctttttcatcatcttcctcctcctcttcttcctctgcttcactgctagagctatcttctttcaattcagtcttccagttagcaggaatagttctacttttgtgaaattcaagtgcctgttcaaaggcttgctttaaaacagcatcaggctttggtgcagtgtcactagtaatttcatggacatcttttcttggaactgaagtaaattttccatctttgaaagatcgaacaagaatattgtccttttttacagcaatctcatcactacaatcaggacaaaccaccaatgcaggaaaccacagtgctttctttttatccaaactaatgtaatctacacatacaactttgcctagtagctcatcaatctgtttcctatcatcctcatcttcatcactggaggatgatgaagactcttcctctggtatatgattagatcttcttcctctatttgttttctttcctatgaca

SEQ ID NO: 85841 - DNA, 384 bp, Homo sapiens
  misc_feature (1)...(384): n = a,t,c or g
tctgagtgcagcaatacctgtggcttgtgcatgcaccaccgccaggttgtgtgccgccaggtgtacgccaaccgcagcctgacggcgcaaccctaccgctgccagcacctggagaaacctgagaccaccagcacctggcaacttgagatctgcatcgtgtgtcagatccggaccgactggacctcgtgctcggtgccctgcggcgtgggacagaggacccgtgatgtgaagtgtgtgagcaacattggggatgtggttgacgatgaggaatgcaacatgaagctccggccgaatgacattgagaactgcgacatgggaccctgtgccaagagctggttcctcaccgagtggagcgaaaggtgctcagcggagtntggggccgga

SEQ ID NO: 85842 - DNA, 554 bp, Homo sapiens
ccgcgtccggaattttctaaagaaatcagttctgttttggtggaagtcatatcaccccctgaaagctattatcctgacttgacaaacctaaaggagacatttggagactccaaagaaagagtaagatggagaacaaagcaaaacctagattactgttttctaatgatgtatgctcaagaaaagggcatatattacattcagcttgaagatgatattattgtcaaacaaaattattttaataccataaaaaattttgcacttcaactttcttctgaggaatggatgattctagagttttcccagctgggcttcattggtaaaatgtttcaagcgccggatcttactctgattgtagaattcatattcatgttttacaaggagaaacccattgattggctcctggaccatattctctgggtgaaagtctgcaaccctgaaaaagatgcagtaagttaattcctcaccagagtggagggagtttcacttctgtatttcgtgaaagtgacttttagagattttgcaaataaatagttaaataggtaggtgatataaac

SEQ ID NO: 85843 - DNA, 433 bp, Homo sapiens
  misc_feature (1)...(433): n = a,t,c or g
nnnactacttgaggtctgccagcatccaaactctcgaatgagagaatggggagcagaagctttaacttctcttattaaagcaggattaacatttaaccatgatcctccactctcacaaaaccagaggctgcagttgcttttattgaacccgttaaaggagatgtccaatattaatcatccagatattcgactcaagcagttagaatgcgtgttgcagattctgcagagtcagggagacagtcttgggcctggatggccattagtgcttggagtcatgggagcaatcagaaatgatcaaggagaatccttgatacgaactgcattccagtgtcttcagttggttgtgacagattttctaccaacaatgccttgtacttgcctgcaaatagttgtagatgttgcaggtagctttggcctccataaccaagaactt

SEQ ID NO: 85844 - DNA, 390 bp, Homo sapiens
tttttttccaagatgacaacatcaggatttggttgtttctgtgactgtggtgatactgaagcctggaaagagggtccttactgtcaaaaacatgaacttaacacctctgaaattgaggaagaagaggtaaaaacattttcacaaagttgtttttaacccaagtttgaaatattttgagaaatagtcattagatgatgtgagaaatggataagcaaatagtacttccactattgacagcgactagtttactttgaaagttctttgcattttgtggatgctgtacggttgctaatagtacacagttgaaatttgggaaatttcatttaattctgattttttatttggctggggttttgttttaagcatacttgaagtttatttgagtactaa

SEQ ID NO: 85845 - DNA, 407 bp, Homo sapiens
cacaggcgccctgctcacgtgcacctgcgtgacagtctgtatctgccatgtatctctccccatgcccggcccagagggcgttcagcgactactcagccagtgctgatacctcaaggggccacaacataggaggcttgaacagcaagggcggcttcagcaccaagagccttaattcctttggggggtgcctggaaggctctcgtgggagtacctgggggtcagggggtaggctgggggtgcggtttggggagtggagtggtgggtctgggttctccctgtgccctccggggggcatccaagaagtgaccatcaaccagaatctgctgaccccactgaagattgagatcgatccccatttccaggtggtgcggacgcacgagaaccaagagatcaaaaccctcaacaag

SEQ ID NO: 85846 - DNA, 808 bp, Homo sapiens
  misc_feature (1)...(808): n = a,t,c or g
tttttttttttttctccccaattttaagctttattctacatttgtataaacggtaaaattacagctcaactttggaagcacagatcataatataaaaataaagcaaagatcccagaaatatttaacaggcaacaaatctttcacatcatcttactatagcaactaaacatataataacttagaatcatccattaattataagtaaagaataaattcttttacaaagcataactattaatattgacgatcataagagcaaatattttaagtaaagcaccatgaatactttacagaaaggagcgagttgcagacacagtcattcttggatttctttcaacagcaggctttcttcccttttgtcctgaactgagagttgaatatttcctctctttcctctctgaccctctagtctctgaagcatcttttgtactagaggtatgtggagagacttcctggaaatttggatttgtaaattgtgctgttgtatcttctaggcactgcagtgatccagatatagagctgttgctcttgcttgtataagtgtgacatgttgattcaaaaaaggaagtaaaaggaagagagttgattacatttggctactgacattaataataataaccaataattgtgcttgtaatataaacatctgaaagttttagttctaagaatgggtgtccccataagaaaattatgtaaaaataattaatgtctattgtaattacttttctttaaccaaagaaaaagtataatttaaagatggctgtttaaggatcaaaatcagcaattggtaaaagtcgnacgcgtggcg

SEQ ID NO: 85847 - DNA, 406 bp, Homo sapiens
  misc_feature (1)...(406): n = a,t,c or g
cggacgcgtgggtgctgagcgagtcccagctgtcggatggcaagaagttcaagtgtgttgcgagccacatagttgggccagagtcgggcgccagctgcatggtgcacatcaggggtccctcccttctctctgagcccatgaagacttgcttcactgggggcaatgtgacgcttacatgccaggtgtctggggcctacccccctgccaagatcctgtggctgaggaaccttacccagcccgaggtgatcatccagcctagcagccgccatctcattacccaggatggccagaactccaccctcactatccacaactgctcccaggacctggatgagggctactacatctgccgagctgacagccctgtaggggtgagggagatggaaatctggctgagtgtgaaaan

SEQ ID NO: 85848 - DNA, 1628 bp, Homo sapiens
ttcttgcttatgtgtcattatgcccataaagttgggggacatatttcccaatttgtccagtgttttcattttgaaacattaaaactggtttattgtactattgaaattttattagcatactttcttgtactttcataattaagaaattagggtaatattaagaatttaaacactaaaaccctgatgaaagttatttttctccattaataatatttttatttgtatttcaattagaagtgatctattgtttatattattttctaagaatctaagagtgtgttttttaaacatataacaatagaatccagtaagcattttaattaaggactgcatattatcacttaacctatttagcagattgtagaggcaaaatgcttgcatgcctattttttaaggattctatctttgtaagctatattttaacttttattgattgaaatatagatttttggtcatataatgactgcctacctccaattacagaaaaaataaaaaattgctaacaagacatcttctcttataacctaggccaagttaagccgattatgtgaacaagataaagtggtgcatgctctggaagagaaacttcagcaactccacaaggagaaatacacgcttgagcaagctttgctatcagccagccaagagatagaaatgcatgcagataacccagcagccattcagacagtggtgttacaaagggatgatttacaaaatggactgcttagtacgtgtcgagaactttctcgagccactgccgaattggaacgagcatggagagaatatgataagttagaatacgatgtaactgttaccaggaaccagatgcaagagcagctggatcaccttggtgaagttcagacggaatcagcaggaattcagcgtgcacagattcagaaagaactttggcgaattcaggatgtcatggaagggctgagtaaacataagcagcaaagaggtactacagaaataggtatgataggatcaaagcctttctcaacagttaagtacaaaaatgagggtccagattatagactctacaagagtgaaccagagttaacaacagtggcagaagttgatgaatctaatggagaagaaaaatcagaacctgtttcagagatagaaacttcagttgttaaaggttcccactttcctgttggagtagtccctccaagagcaaaatcaccaacacccgaatcttcgacaatagcttcctatgtaaccttgaggaaaactaagaagatgatggatctaagaacggaaagaccaagaagtgcagtggaacagctctgtttggctgaaagtactcgaccaaggatgactgtggaagagcaaatggaaagaataagaagacatcaacaagcgtgcctgagggagaagaaaaaagggttaaatgttatcggtgcttcagaccagtcacccttacaaagcccttcaaatttaagggataatccatttaggactactcagactcgaaggagggatgataaggaactggacactgccattagagaaaatgatgtaaagccagaccatgaaactcctgcaacagaaattgttcaactaaaagaaaccgaaccccaaaatgtggacttcagcaaagaggtagcgagattattttatgaaag

SEQ ID NO: 85849 - DNA, 410 bp, Homo sapiens
gacccatcacctacagcattctcagtgggaatgagaaagggacattctccatccagcctagtacaggtgccatcacagttcgctcagcagaggggctagacttcgaggtgagtccacggctgcgactggtgctgcaggcagagagtggaggagcctttgccttcactgtgctgaccctgaccctgcaagatgccaacgacaatgctccccgtttcctgcggccccattatgtggccttccttcctgagtcccggcccttggaggggcccctgctgcaggtgcggggtgtgatggaaagattgggcgggggagcagggctagtcagacttgtctgtggccagaccagtcccagcagcctcctaccctcaccaggtggaggcggatgacctggatcaaggctctggaggaca

SEQ ID NO: 85850 - DNA, 387 bp, Homo sapiens
  misc_feature (1)...(387): n = a,t,c or g
agaaagacacctgtgcaatctgtgtcattttagggaggagggggactgaggataaaagcgtgttatcaagatacatgtgtgtgtattgtttttcctgctctggactgtaataggatttccgggatgcagtagctcatgcttccaggcaacttgggaaaccagtgattgaggaccggattctaaatcagatcctatactacttgcctcagctgtatgagctcaaccgggatctcttgaaggaactggaggaaagaatgttgcactggactgaacaacaaagaattgctgatatctttgtaaagaagggaccatatctaaaaatgtattccacatacatcaaagaatttgataagaatatagccttgctggatgaacagtgcaagaaan

SEQ ID NO: 85851 - DNA, 398 bp, Homo sapiens
aataaataaaaaagacgtctgtttctgctcatgggcacatgggcatgtgggcagggcaaggattgcctcacagcacgtgccacatggcttgctttttgggaagtcctccctgggcctgacctgtctctcgcctgctgtagtacaggtcccctttgccctctccccatgcacccttatggtctggcattccgcagaggcacccaccagctctacagcacatcccacgatcgctccgtgaaggtgtggaatgtggcaaagaactcctacatggagaccctgtgagtgtggatgggagagggcgcgtggatggtgtgagagagggtgtgggagtgtgtgcccgagaattcatgcaggacccctatccccactattctgctctgcccggccctctagctacg

SEQ ID NO: 85852 - DNA, 389 bp, Homo sapiens
ttcctgctgggccaaaaactctcaagaaaaaggttcccgctgtgccagaaaccctcaagaaaaagcgaaggaatttcgcagagttgaaggtgaagcgcctgaggaagaagtttgccctgaagacacttcgaaaggcaaggaggaagctcatctatgagaaggcaaagcactatcacaaggagtacaggcagatgtaccgcactgagattcggatggccaggatggcaaggaaagctggcaacttctatgtgcccgcagaaccaaagctggcctttgtcatcagaattcgaggtatcaatggagtaagcccaaaggttcgtaaggttctgcagctccttcgtcttcgacagatcttcaatggcacctttgttaagctcaacaaggcttca

SEQ ID NO: 85853 - DNA, 502 bp, Homo sapiens
aaagagaagctggtgaccacagtgcaaaatatgcagcagggagcagcccaatcccaagaggaactttgtcaacttcaggcaaagcttttaattgacagtgatgacgattctcagtgtcagatgaaccacagagatctgatccaaaaatatgaagggagtgaaactcaactcaaaaacctggggcaggagttagcacacacgcagcacagcatcaggcagctctgtgacggcaaagacagtctcttcccacagctggatattttaccccagctccccagagaagcactttcttcacacaccgcagaatctcttcatgcaagtgagtctgctctatcaagtgagtcttctaaattgctccagcaagagatcgagaagctgagaaaatcactgcaggaaaaagatgcgaccattagatccctccaaggagacaatcaaagactgtatgattccattgctgccatctcagaacgagaaagaaaagaacacgagcaaatgcattcat

SEQ ID NO: 85854 - DNA, 645 bp, Homo sapiens
aaacgactcaactaaagaagtttcttgttttatcaggaaagagagcaaagcaccttgctgaggaatatggtgaacgtgctataaataaagttaaaagtgttagagatgaagtgtttcatactgatcaagatgatccttcatcaagtgatgatgaaggaatgccatacacaagaccagttaaattcaaagcagcacacggtttcaaaggaccttatgattttgatcagatcaaagtggtgcaagatcttagtggtgaacatatgggagctgtttggaccatgaaattttctcactgtggccgattacttgcctcagctggacaagacaatgtagtgagaatatgggctttaaaaaatgcttttgactatttcaacaatatgcgaatgaaatacaatactgaaggacgtgtgtccccatcaccctctcaggaaagtgtaagttcatcaaaatcggatacagatacaggggtatgcttattgttttatggttactctgttttcaggtatgatttaatttgtttaccataaagtatttttgtgtatcagaaattacagttgcatgaagtcacttaatataaaattaagatgtatcgttagaaccaagagtttcttcaattagaagaaattagcaaatgacaattttcgc

SEQ ID NO: 85855 - DNA, 394 bp, Homo sapiens
atcaaaacagtactcaggcatctgagggaagaccagcatactgtgcttgcttacttatatgagattagaacaagtttccaggagtttctaaagcgtccggatcacaagcaagattttgtagctcaatggcaggctgatttcaactcccttcctgatgacctgtgggatgatgaggaaacaaaggctgaactacatcaacgagtgaatgtaaggaaatagtgacctattgggacagggttagctggctttcatatcttgtcctgcaaaaccccaactcatttgctccttacttttgtgaagtatgaggatgagaaagaaaatggtttgaactattaaccaggtaactttcaagagcagtggcttttccgcactttgagtttagaatgagaatacc

SEQ ID NO: 85856 - DNA, 408 bp, Homo sapiens
atttaggcttgttaataatccttctaggttttttttcattttcttaaaaggagggaactcagggagacatacacaccttatagagggtttcatcccagatagatgttcggaaacaagaacattccagtgggcgagacaaacgcctcaaatcttcttctcgctttttaaaaatctaaattaaaaagcccaacatactgatcagcatataatagttcccatctttcaagctaagatgtagttattttatcatattttaaccaggagcttttgttcctttctaagaggaattttaagtatgtctatttcacaaactaggatggcagaaactgtttctggtccggtctaaaagcacaatagttagaattcttcaggcctatcctgcttatgctgaatactcactacgagcac

SEQ ID NO: 85857 - DNA, 418 bp, Homo sapiens
cggacgcgtgggtaaagaatgatattatttttaatcaaactgagagaaaacagaaaatatcagaaaatctcaaacatttggctagtgtacgtgtcgtacaaaaaaacctcgtctttgttgtaggtttatctcagcgcctagcagacccagaggtaagtcctcttgttttctttgtcatcttgatattttttgtttccttgtcttacttggaaataatatttgaccctgctcaattgtgtgattcctctgaacacattatatcttgaaggagaaaataagaaattacttttgaataattgctaagaaaccaatgaccagtcgtgatcttaggcaagcgtcttaatctttcttggcttcaatttcttcagttctaaaactaaggagttgaactagatttctaacgtgctgacaatctgtg

SEQ ID NO: 85858 - DNA, 944 bp, Homo sapiens
tcactcggcgccatgcacccgccggtgctggatgaggtggaagctcaggcggaaggcgcggccgcactcggtgcagcggaacggcttctcgcccgtgtggagtcgctggtgccggaagaagcccgacagcgcccggaacgcgcgcccgcagtggccgcactggtggggcttctccccggtgtggatgcggcggtgctcgcggaggaaggagctgcggctgaaggcgcggccgcagtcctggcaggcgaagggccgctcccccgtgtgcacgcgctggtgctggaggaggttggagctctggctgaaggcctggccgcactcccggcactcgtacgggttctccccgtggtgggtccgccggtgccggaccacgttcgagctgtgcaggaagcgcttcccgcactcgccgcacgcgtacagcctctccccggtgtgggtgcggcggtgcttggcggcgtccgacctctggccgaaggccttgccgcagtcggcgcacgcgtagggcttctcgcccgtgtgcacgcgctggtgccggaggaggttgaagctctggccgaaggccttgccgcactcggcgcacgcgtagggcctctccccgctgtgcgcccgctggtgccggaccacgtgcgagctgtggatgaaggccttcccgcagtcgctgcactcgtacggtttctcccccgagtggatgctccggtgctttgccgcgtccgaggagcacttgaagctgcggccacaggcgccgcacgggaaaggccgccccttccaactgcccccgccctctgccccggggcctgcgttcggagggacgtctgactcgaggccactctgtcctccagttttctcagaagtgaccgggcctcgagggggaacctccgggcctctctctggcttccaaatgccagccccaggtcatgcccacagagacgcctgcagcagcgcat

SEQ ID NO: 85859 - DNA, 398 bp, Homo sapiens
ccaggaccccagagcagcataaaagccatcactgtagccccgaagggagcggttactcatccgagcccgcaggcacaccgctgtcagagccgccgagcaacacgccacagtccacgcatgcggagccgcaggaggccgactacctgagcggctccgaggacccactggagcgcagcttcctctactgcaaccaggcccgtggcagccctgccagggtcaacagcaactcgaaggccaagcccgagtccgtgtccacctgttctgtgacctctcctgacgacatgtccaccaaatctgacgactccttccagagcctacacggcagtctgccgctcgacagcttctccaagttcgtggcgggtgagcgggactgtccgcggctgctgctcagcgccctg

SEQ ID NO: 85860 - DNA, 394 bp, Homo sapiens
aagaggaaagagcagagaggcctgggatgcactgaagggaggggaggctgctttggagctcaggggagtggaaggaaggccgatggcggcggcaaggcacaccactgcactctgctttcctgaggcggccatctgacctctgacttaaaaacacagtggattcatgccaggcccctgtggcagtcctggcccatggctggaggtaggaaatacctgacctttgctctctaggcgacaagtgacctgggcggctgatcagcttcagaatctaatgaactctcccccatgtaaggctttttttgtaggccctggaaacagattgggagagccgatccccattttcaaggcccatgaacacatttttggaatggtccttatgaacgactggagtggt

SEQ ID NO: 85861 - DNA, 434 bp, Homo sapiens
tcggaatgtccgggtcgacccacgcgttctgtcctgcggacgcagggccctgcagccctctttgatgaccacaaacttgtcctccatacctccagctatgatgccaaacgggcacaggtcttccacatctgcggtgagtttgtgccactgccccttgccatctgtgccctgttgccagggtgcctaccaaggaaccttctgttcctgccttgggccatgggcaggtcctgcttacactccgggagatgccctggtgggtggggggtcgcagtaagaacagtcagaagtgggggctttggaactgatgaactggtgcccccaacacaacacctggcctgaggtcattttatttgatgaatgacctttttcaatacattttaagcatgtgtagaaattcttatcaaaaatttcatacatacacaaaaagcagtgct

SEQ ID NO: 85862 - DNA, 416 bp, Homo sapiens
  misc_feature (1)...(416): n = a,t,c or g
cggaattcccgggtcgagtggacgcgagccggtgcgtcccggcttccaggatttcccttctcgggagagcgccgggtgggcgcggagccggggacacggggacctccgcgtccccggcggaggtgcgcaagcgtcgggagccgctccgggggaactttggagcagggtgtctggacccggggaagcgaagatccgcgtgcgtccgtcctgaggccgcgcggcacccctgctgaggaggaggtcccgttcgctgtccagagcccaggggcgaccgccgcttggggaccgggggaccgttcagcgaggggcgcgcttgtagctggccaggccctgtgccctgacgcgttgtgctggccctacgcccggcggaggggctggggacggggactgggtgcctccgtgcctccgcggatggn

SEQ ID NO: 85863 - DNA, 5560 bp, Homo sapiens
gtgactgtgctggacaatggggaaccctcactgaagtccacctccagggtggtggtaggcatcttggacgtcaatgacaatccacctatattctcccacaagctcttcaatgtccgccttccagagaggctgagccctgtgtcccctgggcctgtgtacaggctggtggcttcagacctggatgagggtcttaatggcagagtcacctacagtatcgaggacagcgatgaggaggccttcagtatcgacctggtcacaggtgtggtttcatccagcagcacttttacagctggagagtacaacatcctaacgatcaaggcaacagacagtgggcagccaccactctcagccagtgtccggctacacattgagtggatcccttggccccggccgtcctccatccctctggcctttgatgagacctactacagctttacggtcatggagacggaccctgtgaaccacatggtgggggtcatcagcgtagagggcagacccggactcttctggttcaacatctcaggtggggataaggacatggactttgacattgagaagaccacaggcagcatcgtcattgccaggcctcttgataccaggagaaggtcgaactataacttgactgttgaggtgacagatgggtcccgcaccattgccacacaggtccacatcttcatgattgccaacattaaccaccatcggccccagtttctggaaactcgttatgaagtcagagttccccaggacaccgtgccaggggtagagctcctgcgagtccaggccatagatcaagacaagggcaaaagcctcatctataccatacatggcagccaagacccaggaagtgccagcctcttccagctggacccaagcagtggtgtcctggtaacggtgggaaaattggacctcggctcggggccctcccagcacacactgacagtcatggtccgagaccaggaaatacctatcaagaggaacttcgtgtgggtgaccattcatgtggaggatggaaacctccacccaccccgcttcactcagctccattatgaggcaagtgttcctgacaccatagcccccggcacagagctgctgcaggtccgagccatggatgctgaccggggagtcaatgctgaggtccactactccctcctgaaagggaacagcgaaggtttcttcaacatcaatgccctgctaggcatcattactctagctcaaaagcttgatcaggcaaatcatgccccacatactctgacagtgaaggcagaagatcaaggctccccacaatggcatgacctggctacagtgatcattcatgtctatccctcagataggagtgcccccatcttttcaaaatctgagtactttgtagagatccctgaatcaatccctgttggttccccaatcctccttgtctctgctatgagcccctctgaagttacctatgagttaagagagggaaataaggatggagtcttctctatgaactcatattctggccttatttccacccagaagaaattggaccatgagaaaatctcgtcttaccagctgaaaatccgaggcagcaatatggcaggtgcatttactgatgtcatggtggtggttgacataattgatgaaaatgacaatgctcctatgttcttaaagtcaacttttgtgggccaaattagtgaagcagctccactgtatagcatgatcatggataaaaacaacaacccctttgtgattcatgcctctgacagtgacaaagaagctaattccttgttggtctataaaattttggagccggaggccttgaagtttttcaaaattgatcccagcatgggaaccctaaccattgtatcagagatggattatgagagcatgccctctttccaattctgtgtctatgtccatgaccaaggaagccctgtattatttgcacccagacctgcccaagtcatcattcatgtcagagatgtgaatgattcccctcccagattctcagaacagatatatgaggtagcaatagtcgggcctatccatccaggcatggagcttctcatggtgcgggccagcgatgaagactcagaagtcaattatagcatcaaaactggcaatgctgatgaagctgttaccatccatcctgtcactggtagcatatctgtgctgaatcctgctttcctgggactctctcggaagctcaccatcagggcttctgatggcttgtatcaagacactgcgctggtaaaaatttctttgacccaagtgcttgacaaaagcttgcagtttgatcaggatgtctactgggcagctgtgaaggagaacttgcaggacagaaaggcactggtgattcttggtgcccagggcaatcatttgaatgacaccctttcctactttctcttgaatggcacagatatgtttcatatggtccagtcagcaggtgtgttgcagacaagaggtgtggcgtttgaccgggagcagcaggacactcatgagttggcagtggaagtgagggacaatcggacacctcagcgggtggctcagggtttggtcagagtctctattgaggatgtcaatgacaatccccccaaatttaagcatctgccctattacacaatcatccaagatggcacagagccaggggatgtcctctttcaggtatctgccactgatgaggacttggggacaaatggggctgttacatatgaatttgcagaagattacacatatttccgaattgacccctatcttggggacatatcactcaagaaaccctttgattatcaagctttaaataaatatcacctcaaagtcattgctcgggatggaggaacgccatccctccagagtgaggaagaggtacttgtcactgtgagaaataaatccaacccactgtttcagagtccttattacaaagtcagagtacctgaaaatatcaccctctataccccaattctccacacccaggcccggagtccagagggactccggctcatctacaacattgtggaggaagaacccttgatgctgttcaccactgacttcaagactggtgtcctaacagtaacagggcctttggactatgagtccaagaccaaacatgtgttcacagtcagagccacggatacagctctggggtcattttctgaagccacagtggaagtcctagtggaggatgtcaatgataaccctcccactttttcccaattggtctataccacttccatctcagaaggcttgcctgctcagacccctgtgatccaactgttggcttctgaccaggactcagggcggaaccgtgacgtctcttatcagattgtggaggatggctcagatgtttccaagttcttccagatcaatgggagcacaggggagatgtccacagttcaagaactggattatgaagcccaacaacactttcatgtgaaagtcagggccatggataaaggagatcccccactcactggtgaaacccttgtggttgtcaatgtgtctgatatcaatgacaaccccccagagttcagacaacctcaatatgaagccaatgtcagtgaactggcaacctgtggacacctggttcttaaagtccaggctattgaccctgacagcagagacacctcccgcctggagtacctgattctttctggcaatcaggacaggcacttcttcattaacagctcatcgggaataatttctatgttcaacctttgcaaaaagcacctggactcttcttacaatttgagggtaggtgcttctgatggagtcttccgagcaactgtgcctgtgtacatcaacactacaaatgccaacaagtacagcccagagttccagcagcacctttatgaggcagaattagcagagaatgcaatggttggaaccaaggtgattgatttgctagccatagacaaagatagtggtccctatggcactatagattatactatcatcaataaactagcaagtgagaagttctccataaaccccaatggccagattgccactctgcagaaactggatcgggaaaattcaacagagagagtcattgctattaaggtcatggctcgggatggaggaggaagagtagccttctgcacggtgaagatcatcctcacagatgaaaatgacaaccccccacagttcaaagcatctgagtacacagtatccattcaatccaatgtcagtaaagactctccggttatccaggtgttggcctatgatgcagatgaaggtcagaacgcagatgtcacctactcagtgaacccagaggacctagttaaagatgtcattgaaattaacccagtcactggtgtggtcaaggtgaaagacagcctggtgggattggaaaatcagacccttgacttcttcatcaaagcccaagatggaggccctcctcactggaactctctggtgccagtacgacttcaggtggttcctaaaaaagtatccttaccgaaattttctgaacctttgtatactttctctgcacctgaagaccttccagaggggtctgaaattgggattgttaaagcagtggcagctcaagatccagtcatctacagtctagtgcggggcactacacctgagagcaacaaggatggtgtcttctccctagacccagacacaggggtcataaaggtgaggaagcccatggaccacgaatccaccaaattgtaccagattgatgtgatggcacattgccttcagaacactgatgtggtgtccttggtctctgtcaacatccaagtgggagacgtcaatgacaataggcctgtatttgaggctgatccatataaggctgtcctcactgagaatatgccagtggggacctcagtcattcaagtgactgccattgacaaggacactgggagagatggccaggtgagctacaggctgtctgcagaccctggtagcaatgtccatgagctctttgccattgacagtgagagtggttggatcaccacactccaggaacttgactgtgagacctgccagacttatcattttcatgtggtggcctatgaccacggacagaccatccagctatcctctcaggccctggttcaggtctccattacagatgagaatgacaatgctccccgatttgcttctgaagagtacagaggatctgtggttgagaacagtgagcctggcgaactggtggcgactctaaagaccctggatgctgacatttctgagcagaacaggcaggtcacctgctacatcacagagggagaccccctgggccagtttggcatcagccaagttggagatgagtggaggatttcctcaaggaagaccctggaccgcgagcatacagccaagtacttgctcagagtcacagcatctgatggcaagttccaggcttcggtcactgtggagatctttgtcctggacgtcaatgataacagcccacagtgttcacagcttctctatactggcaaggttcatgaagatgtatttccaggacacttcattttgaaggtttctgccacagacttggacactgataccaatgctcagatcacatattctctgcatggccctggggcgcatgaattcaagctggatcctcatacag

SEQ ID NO: 85864 - DNA, 437 bp, Homo sapiens
  misc_feature (1)...(437): n = a,t,c or g
gagtaccttctgaccgnnccgaaggccgntagaagatcttactatagaaccaccactctaagtttgattcttaagtttactatccataacccgcgagagaccgagagagatttccgatgtgtctttgcctcaattaaaccattcggaaaacagaataaatataccatattgtaaaggtcttgttaagattgatcgtggcgactcggtaaataaagctcctagagtaatgcctggccctcatcatcatgttgatcattactatcactgtgtttctgaaatgtcactgaaacatgtcttttataggtggaacataaataatgatacctgggtcataactgagcaactaaaacctttaacagtgaatttggatttccaaaaaaacaacaaaactgtcttcaaggcttcaagctttgctgtctatgtgggcatgttaacag

SEQ ID NO: 85865 - DNA, 417 bp, Homo sapiens
ctggatttggcaggggttctggattctgtggtagttctagattcagcagtggtgctactggaggcttctacagctatggtggtggtatgggaggtggtgttggcgatggggggcttttctctggaggggaaaagcaaaccatgcagaacctcaatgaccgcttggccaattacctagacaaggtcagagccctggaggaggctaacactgatctggagaacaaaatcaaggagtggtatgacaaatatgggcctgggtctggagacggtggatcgggaagagattatagcaaatactattcaataattgaagatctcagaaaccagatcattgctgccactgttgaaaatgctgggatcattttgcacattgacaatgccagattggctgctgatgacttcagactgaagtatgaga

SEQ ID NO: 85866 - DNA, 404 bp, Homo sapiens
gatttcactaccctggctgccatgatgaggaccctgttctccttatttggtgatgtgagatctgatgttcatcgtttctccgtgactctctttggagccgccataaagtctgtaaaaaacccagataagaagagtatagagaaccaagtcctggacagcttggtcccactacttctgtattctcaggatgaaaatgatgcagtagctgaggagagcaggcaagtcctaactatatgtgcccagttcctgaagtggaagctgccccgagaagtgtactccaaagatccctggcacatcaaacctactgaagcaggaacaatctgcagattctttgaaaaaaagtgcaaggggaaaattaacatcctagaacaaacactgatgtactccaagaacccaaaacttcc

SEQ ID NO: 85867 - DNA, 440 bp, Homo sapiens
  misc_feature (1)...(440): n = a,t,c or g
acctcagatcaaatggtgtttcctcagagcagccttctcatcatcagaaaagcctgcatccccattccagtctctcagagctccacagaacttcatgtccttccttcttatcacaggttgcacatttgcacttatttgtttaatttttggatgaatgtgtatctttctcaggagactggaagcttctcaaggacagggaccaagaccttctgccctgaatcatgatcgttgcaaaccaagcctgcgctggctggtgctgagcaaagactcacagcccggaagacaaaggcagggacccacagcaccgagcctatgcccgtggccaactgaatccctgtggaccggccccgcctgtctgccttcctcacatccctccacatcacagggaggccctaagtcggctcacagggacgaaatcgtcggnngggaattccggagcg

SEQ ID NO: 85868 - DNA, 413 bp, Homo sapiens
tttcgtccggagagcacagctcccggacccaaatccttaggcatttggaggagaaggacctgaaacccatcttcgaacagtttggtctgatctttgaccttacgggggggagggacaagtacaccctgctgcacaagggatgtgccttcctgacatactgtggccgggattcaaccctgaaggcccagagcgccctgcacgaacagaagacacttccagggttcctataatactccccaccctgggtaagaaaatcaacctgcacgattaatttccaagtcctctcaccagacaagaacatggagagtggaactaagaatttctccatttccactgaagactgaacaaagggagatactgcaggggtcggggagaggttagagctctggaggacttccgtgcacaggatgaag

SEQ ID NO: 85869 - DNA, 566 bp, Homo sapiens
taatggtgccatccgacagcagagcactgcagtacacttcatacatatttgtaggaaaatgcttttgtaattgtttgaactagagtcttgactagaatttagtatgagtgacaatgtggagccatctatgattaatccatattcctgatgttctgtccatgcttttttaaagcttctagtacttttaggaaactcatgcagcaatttcttgcgatattctatcaataattcatgtaatcgatcttctttcctttcactttcttcaatggtttttgtggttagttctaagagctcagtgttggtctggaaaaggcggcaggcatagcatgtggatttagctgtctccatcttgtccccagtgagcacccagactttcaggcctgctgcatgcagagcttcaatggtctctgcagcttgatcttgtagcttgtcttcaactgcagtggctccaattaaattcatgtttgtctcaatatcatcgaaaactttttccattttttcttctctgtcttgtaaggccatttttgcctctatgagctgtctgttaattctttcataatacgaaa

SEQ ID NO: 85870 - DNA, 427 bp, Homo sapiens
tttcgtagttttgtgacagagcagaactgggactcgctggaagtatttgatggtgcagataacactgtaaccatgctggggagtttctcaggaacaaccgtgcctgcccttctgaacagcacctccaaccagctctaccttcatttctactcagatatcagcgtatctgcagctggcttccacttggagtacaaaacggtgggcctgagcagttgtccggaacctgctgtgcccagtaacggggtgaagactggcgagcgctacttggtgaatgatgtggtgtctttccagtgtgagccgggatatgccctccagggccacgcccacatctcctgcatgcccggaacagtgcggcgatggaactaccctcctccactctgtattgcacagtgtgggggaacagtggaggagatggaggggtgatcct

SEQ ID NO: 85871 - DNA, 440 bp, Homo sapiens
tttcgtcgccgccggcggcggagggagcgtgactgcgctgcgcagggcgctaggaggcattgtcgccacctggccgagtgcaagctggtctcctttcccattggcatctacaaggtcctgcggaatgtctctggccagatccacctcatcaccctggctaacaacgagcttaagtccctcaccagcaagttcatgaccacattcagtcagctccgagagctccacctggaggggaacttcctacaccgcctccccagcgaggtcagtgccctgcagcacctcaaggccattgacctgtcccggaaccagttccaggacttccctgagcagcttaccgccctgccggcgctggagaccatcaacctggaggagaacgagatcgtagatgtgcccgtggagaagctggccgccatgccagccttgcgcagcatcaacctccg

SEQ ID NO: 85872 - DNA, 457 bp, Homo sapiens
  misc_feature (1)...(457): n = a,t,c or g
gcacgaccggtccggnnnnccggggtcgacgatttcgtcagtttaagatctgggcagctgctaattcccataaggcaggggggaggaatgggagatggagctgcttggctaagttggggacctagggcccctgggagggtggctggatgccaaggagagttgaatatggttgggggagctggctgtggccctttgtctttcaggcccatcgggagcggtgcaggcaaggagctcctgggaggtggggcagctggtgctgcggggaaaggcttggtccctttcccaggatcctgtgaatggtttttggcagcccggctcaagaacgtgagggcttgggagagagctcccaggggagggagcctccgtggagtggagggagccctgtgtgggcattgtggcgaggggtcccagggctgagaatgtagaatgggcaccccaagagatccaggaaggaggg

SEQ ID NO: 85873 - DNA, 439 bp, Homo sapiens
  misc_feature (1)...(439): n = a,t,c or g
tttcgtgtttgatctgaaactgcgagtccctgggtttgcagcgcttctgattcatggagccagctctgttcctggcccagagactgtcaggctgagacagaaaagaaaaaaaaaggctcctgatcacagctcaggcagaaaagaagagctagtgacaactcacacagtagacaaattggagacaaagaagccagtaggccgtgtgctctgcgggctctcaggggagctgctccattctcttctccttccccgaaggaaaacagagaagcgggctctgggcagccacagaaaagctggctttccggagcaccctgtggcaccggaaccactcagtaacagctgccagatttccaaggagggcagagagcaggtactaagcgaaatcggagccggagactgcctanctcagccgggactggatgccctcgggtggcctgtg

SEQ ID NO: 85874 - DNA, 431 bp, Homo sapiens
  misc_feature (1)...(431): n = a,t,c or g
tttcgtgctggatcaacttcggcacagatgttgcctacctgtgggactttggggatggcaccgtcagcctggggagcagctccagcagccatgtctacagtagggaaggagaatttacagtggaggtccttgccttcaataatgtcagtgcctccactctaagacagcaacttttcatcgtgtgcgagccctgccagccacccctggtgaagaacatggggcctgggaaagtccagatatggaggtctcagcctgtgaggctgggagtgacgtttgaagctgcagtcttctgtgatatttcccaaggtctttcttacacctggaacttgatggactctgaagggctccctgtctccctccctgctggtgtggacactcacagacagaccctcatcctcccgagccacaccttggagtatgggaactacacn

SEQ ID NO: 85875 - DNA, 428 bp, Homo sapiens
tttcgtccggctgatcgctgccgctccgccaatacaatagagccagccactaccagcagcctggccctcttcctccttctccagagagaccaatccagccgaactcggggtttgccaaagggataaacagcacttccagggggagaaaaaaaatcatgttatcagcaagcaaaaaacatttggaaaggggtggacttgcatcatctccctacttgggacaccccaagaagagcttgtgccagtgctggggcgcctgcccacatgcccttgcccttttgaggactgtgggttgccttgtttgctacagactgttgggatccccatctagggcaccaagacctcctaaagtttgtgatcgcagtgccatgctgtaaaacactgagtgggaccctctacttaagctgtgacgactaggaaccgtgcagagg

SEQ ID NO: 85876 - DNA, 421 bp, Homo sapiens
ctgtgatgttccgcatagcccggatgctgggtgggcctcttacgtttattcgcgcctgatattcagcactgcccaccaagttccgcgctgtgcaccggtacacgcccccgtcgcggatctgggggcctgtgacgttcatgtggctgatggtggtgccgtccgacatggtgtactggttggtgcggtggctgccatcccgcacgatgggctcatcgtcgagggcccaggtgaccgtggggggcggggcgcccttggccgcacacatcagtgagaactgctccccggggttgaccaccttctcgctgaaggacgagacgatgcggggcgtgccatcctcaagtgcaatgatggcaaagtcctgggcggtctgggccttgcgggtagcgaagcactggtaggccccggaatggctcttttgggg

SEQ ID NO: 85877 - DNA, 401 bp, Homo sapiens
tttcgtggctgcggggagggatcatggactcttgtttgccgtctgcaggggcccacgcaagtaagcctgctgtcaatggaggaggacattgatacccgcaaaatcaacaacagtttcctgcactatcagcaccccccaccaccccttccgaggtagctactccttcgatgaccatatcaccgactccgaagccctgagccgcagcagtcacgtgtttacctcccacccccggatgctgaagcgccagccggcaatcgaattacctttgggaggggaatacagttctgacgtgccacgccccctctccactcaactatcctcctctctcttaggttacttctccaccctcatgactggagccgccttcaccaataatattgcctcttcaacaatcattctct

SEQ ID NO: 85878 - DNA, 438 bp, Homo sapiens
tttcgtcagctttgcaggtgccccagggtgggggcaggtagatgagctgctgggagagccggggagctgggggagtgcggggacttctccccaaatcagcttgatggactcctctgacaagatgcagatctctggagttctgctcccctctccctctgcagcctccaaaggtctcagagtttacagagcattcttgttcattcgatcactcatgcttctgactagccagattaccacccaggtccttgctcacctgtccttcccattactgattgcccaccactccatctggacccctcaataccccaccccaggaccagcctcccatggccctctcacccgctgctcctggcaggccacaaaggtctggaagcctggggccacgccaaagcccagctggtcgatgaaaggagggtcatcctgactatggatctgccc

SEQ ID NO: 85879 - DNA, 995 bp, Homo sapiens
ctgcagaaccgagaggattcttctgaaggcatcagaaagaagctggtggaagctgaggagctcgaagagaaacatcgggaggcccaagtctcagcccagcacctagaagtgcacctgaaacagaaagagcagcactatgaggaaaagattaaagtgttggacaatcagataaagaaagacctggctgacaaggagacactggagaacatgatgcagagacacgaggaggaggcccatgagaagggcaaaattctcagcgaacagaaggcgatgatcaatgctatggattccaagatcagatccctggaacagaggattgtggaactgtctgaagccaataaacttgcagcaaatagcagtctttttacccaaaggaacatgaaggcccaagaagagatgatttctgaactcaggcaacagaaattttacctggagacacaggctgggaagttggaggcccagaaccgaaaactggaggagcagctggagaagatcagccaccaagaccacagtgacaagaatcggctgctggaactggagacaagattgcgggaggtcagtctagagcacgaggagcagaaactggagctcaagcgccagctcacagagctacagctctccctgcaggagcgcgagtcacagttgacagccctgcaggctgcacgggcggccctggagagccagcttcgccaggcgaagacagagctggaagagaccacagcagaagctgaagaggagatccaggcactcacggtaggtctggggagcaacatcttcaggttgctaaaggcctcagctaggatgagtgtggaactggcactgagtatactggctcacccttagaaattccaggagggaaaacatgatccacaaagatattcagtggccaggaaattggcttacataggctgctgcttcattggaactagtagatgagcttggttggttatattcaaacttttcttagtatcttgaatagctcctcctttacttat

SEQ ID NO: 85880 - DNA, 405 bp, Homo sapiens
  misc_feature (1)...(405): n = a,t,c or g
tttcgtcggcggtcctggtgcggaccctccggtcgcagtcatgtgggacccgcgggcagctaggatggacctgacagcttacgctgagctgctgaaagaatccggcaaccaggttcttaagaatgggaacttctctttggccatcagaaagtacgatgaagccatccagattctcctgcagttataccagtggggggttcccccgagggacttggctgtgctgctgtgcaacaaatcaaatgcatttttcagccttgggaagtggaatgaggcatttgttgctgccaaggaatgtctccaatgggatccaacctacgtgaagggatactaccgagctggttattccttgctgaggttgcaccagccttacgaagccgctcgcatgttttttgagggtctgcgacn

SEQ ID NO: 85881 - DNA, 399 bp, Homo sapiens
tttcgtggaaagtgcaagctccaggcccccgggctgtttctcgggagacgggcgtttctggctagtgtctgaagggtctcggcgtggctgggattttaacccttcattttctttcttggacccacgttacagcgtcggcggagatgagaacatcggcaccgttaccaccctggcgaacatcctccgggaattcaacccttccctgaagggcttctctgttggcactgggaaagaaaccagtcctaatgccttcttaaaccaggctgtggcaggaggccgagctgaggatctacctgtccaggccaggaggctggtggacctgatgaagaatgacacgaggatacactttcaggaagactggaagataataaccctgtttataggcggcaatgacctctg

SEQ ID NO: 85882 - DNA, 440 bp, Homo sapiens
cccgggtcgacccacgcgtccgtgttcctgcggtgacactgtataaacacgatgaccctgccttgactttagttgctggtcttacatcaaataagcccacagacaaactccgtgccctgcctctgtggttatctttacaatacttgggacttgatgggtttgtggagaggatcaagcatgcctgtcaactgagtcaacggttgcaggaaagtttgaagaaagtgaattacatcaaaatcttggtggaagatgagctcagctccccagtggtggtgttcagatttttccaggaattaccaggctcagatccggtgtttaaagccgtcccagtgcccaacatgacaccttcaggagtcggccgggagaggcactcgtgtgacgcgctgaatcgctggctgggagaacagctgaagcagctggtgcctgcaagcggcctcaca

SEQ ID NO: 85883 - DNA, 442 bp, Homo sapiens
tttcatcaagaacaaaccctgcggcacactaggcctggtcccggtgggcggaatgtgtgagcgcgagagaagctgcagcgtcaatgaggacattggcctggccacagcgttcaccattgcccacgagatcgggcacacattcggcatgaaccatgacggcgtgggaaacagctgtggggcccgtggtcaggacccagccaagctcatggctgcccacattaccatgaagaccaacccattcgtgtggtcatcctgcagccgtgactacatcaccagctttctagactcgggcctggggctctgcctgaacaaccggccccccagacaggactttgtgtacccgacagtggcaccgggccaagcctacgatgcagatgagcaatgccgctttcagcatggagtcaaatcgcgtcagtgtaaatacggggtagagagagaaaaa

SEQ ID NO: 85884 - DNA, 654 bp, Homo sapiens
tgtcgtgaggacctgtggaagtatttttcagggaggtttttagcggaagcaggctggggggggaggcagcatggacagccagggaccccaccgctcagctgttccagggagcagggtccccagctgctgagcagctccaggacatcctgggggaggaagatgaggctcccaaccccaccctctttacagagatggatactctgcagcatgacggagaccagatggagtggaaggagtcagccaggtggataaagtttgaagaaaaggtagaggaaggcggcgaacgctggagcaagccccacgtgtccacactatccctgcacagcctcttcgagctccgtacctgcctgcagacggggacggtgctgctggatttggacagtggctccttaccacagatcatagatgatgtcattgagaagcagattgaggatggtctcctgcggccagagctccgggagagggtcagttacgtcctcctgaggaggcaccgccaccaaaccaagaagcccatccaccgctccttagctgacattgggaagtcagtctccaccacaaatcgcagtcctgcccggagccctggtgctggcccgagtctacaccactccacggaagacctgcggatgcggcagagtgcaaattacggacgtctgt

SEQ ID NO: 85885 - DNA, 406 bp, Homo sapiens
tttcgtcggggagcagccccgcgcgggaggaggaggactaggagcccggagacccccgggagggggaggaagaggaggaggaagacgagccggaccccgaggccccggaaaacggctccctgccccgattcgtgccgcgcttcaacttcagcctgaaggacctgacccgcttcgtggatttcaacatcaaagggcgcgacgtgatcgtgttcctccacatccagaagacggggggcaccgctttcggccggcacctggtgaagaacatccggctggagcagccttgtagctgcaaagcgggtcagaagaagtgcacctgccaccggcctggcaagaaggagacgtggctcttctcccgcttctccaccggctggagctgcgggctgcacgccgactggacggagca

SEQ ID NO: 85886 - DNA, 624 bp, Homo sapiens
aattcccgggtcgacgatttcgtaaagattcactctggttatgaagctcctcggatcccagtgaataaaagaatcttcaccaccacacacaccccagggtgtgtttttcttgaagtagatgaaaaagcagtgcctttgctgggttacctacctcaggacctgattggaacatcgatcctaagctacctgcaccctgaagatcgttctctgatggttgccatacaccaaaaagttttgaagtatgcagggcatcctccctttgaacattctcccattcgattttgtactcaaaacggagactacatcatactggattccagttggtccagctttgtgaatccctggagccggaagatttctttcatcattggtcggcataaagttcgaacgagcccactaaatgaggatgtttttgctaccaaaattaaaaagatgaacgataatgacaaagacataacagaattacaagaacaaatttacaaacttctcttacagccagttcacgtgagcgtgtccagcggctacgggagcctggggagcagcgggtcgcaggagcagcttgtcagcatcgcctcctccagtgaggccagtgggcaccgtgtggaggagacgaaggcggagcag

SEQ ID NO: 85887 - DNA, 1462 bp, Homo sapiens
atgaaagccatgccctggaactggacctgccttctctcccacctcctcatggtgggcatgggctcctccactttgctcacccggcagccagccccgctgtcccagaagcagcggtcatttgtcacattccgaggagagcccgccgagggtttcaatcacctggtggtggatgagaggacaggacacatttacttgggggccgtcaatcggatttacaagctctccagcgacctgaaggtcttggtgacgcatgagacagggccggacgaggacaaccccaagtgttacccaccccgcatcgtccagacctgcaatgagcccctgaccaccaccaacaatgtcaacaagatgctcctcatagactacaaggagaacaggctgattgcctgtgggagcctgtaccaaggcatctgcaagctgctgaggctggaggacctcttcaagctgggggagccttatcataagaaggagcactatctgtcaggtgtcaacgagagcggctcggtctttggagtgatcgtctcctacagcaacctggatgacaagctgttcattgccacggcagtggatgggaagcccgagtattttcccaccatctccagccggaaactgaccaagaactctgaggcggatggcatgttcgcgtacgtcttccatgatgagttcgtggcctcgatgattaagatcccttcggacaccttcaccatcatccctgactttgatatctactatgtctatggttttagcagtggcaactttgtctactttttgaccctccaacctgagatggtgtctccaccaggctccaccaccaaggagcaggtgtatacatccaagctcgtgaggctttgcaaggaggacacagccttcaactcctatgtagaggtgcccattggctgtgagcgcagtggggtggagtaccgcctgctgcaggctgcctacctgtccaaagcgggggccgtgcttggcaggacccttggagtccatccagatgatgacctgctcttcaccgtcttctccaagggccagaagcggaaaatgaaatccctggatgagtcggccctgtgcatcttcatcttgaagcagataaatgaccgcattaaggagcggctgcagtcttgttaccggggcgagggcacgctggacctggcctggctcaaggtgaaggacatcccctgcagcagtgcgatccgggtggatggacccaggggcaacgccctccagtatgagacggtgcaggtggtggaccccggcccagtcctccgggatatggccttctccaaggaccacgagcaactctacatcatgtcagagaggcagtcacaggagctctgccctccccaagagctcgatgacatcttctcctgttgtcagactccccgttctcccgacttcagccatactgggacccactgtgccctggatgaggctgccatggcttgggaatggtctcattcccaag

SEQ ID NO: 85888 - DNA, 1097 bp, Homo sapiens
agtgtgggagccaggcaaggcgaagcccgagatcgaatcaggcgtttctttcccaaaggggaccttgaggtcctgcaggcccaggtggagaggattatgacccggaaggagctcctgacagtctattcttctgaggatgggtctgaggaattcgagaccatagttttgaaggcccttgtgaaggcctgtgggagctcggaggcctcagcctacctggatgagctgcgtttggctgtggcttggaaccgcgtggacattgcccagagtgaactctttcggggggacatccaatggcggtccttccatctcgaagcttccctcatggacgccctgctgaatgaccggcctgagttcgtgcgcttgctcatttcccacggcctcagcctgggccacttcctgaccccgatgcgcctggcccaactctacagcgcggcgccctccaactcgctcatccgcaaccttttggaccaggcgtcccacagcgcaggcaccaaagccccagccctaaaagggggagctgcggagctccggccccctgacgtggggcatgtgctgaggatgctgctggggaagatgtgcgcgccgaggtacccctccgggggcgcctgggaccctcacccaggccagggcttcggggagagcatgtatctgctctcggacaaggccacctcgccgctctcgctggatgctggcctcgggcaggccccctggagcgacctgcttctttgggcactgttgctgaacagggcacagatggccatgtacttctgggagatgggttccaatgcagtttcctcagctcttggggcctgtttgctgctccgggtgatggcacgcctggagcctgacgctgaggaggcagcacggaggaaagacctggcgttcaagtttgaggggatgggcgttgacctctttggcgagtgctatcgcagcagtgaggtgagggctgcccgcctcctcctccgtcgctgcccgctctggggggatgccacttgcctccagctggccatgcaagctgacgcccgtgccttctttgcccaggatggggtacagtctctgccgacacagaagtggtggggagatatggccagacgaaa

SEQ ID NO: 85889 - DNA, 427 bp, Homo sapiens
tttcgtcagagacacaaagagaaggacaaagacagagtggccgaggaagaaatagagagaaagaatgagaacgacagaaaaagaaaggaaaaggaagaaaacaagaaaagagagcgaaggagatggaaacgaacagtcagatggagatggaggagggaaagaaaaggctctcagaaagacagacggaagtggaaggacgtcctggtctggaaggagctgcccagagataaatacagcagcgagaggcccagaaagatcgagggctcccaggatcccctgggagggggtgaggtgcgtcacctgtgtgcccctgagaccctacctcccaccgccctgcccagatctgttctgcagcattcaccgttctctgcatccagctctgcttatctgctgttaccttggacaccagagcagctataggtatctg

SEQ ID NO: 85890 - DNA, 449 bp, Homo sapiens
attcccgcgtcgaggtcacgcgaccccaatgcatatgagctgatacagaaaattcacaccctgcagaagcgtctcatcagcaagactgaagaggtggttgaaaaagagctgctcctccaggaaaaggagaaactctacatggaactaaagcacgtcttggcccgccagcctggacctgaggctgcggaacagctgaagctgtaccgacgcacgctgcatgacaagaagcagcagctgaaacatgaaaattacgttctttagcccatgataacctaatcaaaatcattttcacagcagtgaagaagaaagagttcagaagcagatgaacactaagaaggctaagatctcccttttatgcaaatatttaaaacaacaagcaagaggaaaaataaatccagcctattgcatgcctgttaaaacaatacccttccttttctctttttggggtt

SEQ ID NO: 85891 - DNA, 447 bp, Homo sapiens
gtcgacccacgcgtccgatgagccagtccaccagggaggagcctggcttttgtcagcacttgtcaggcgatgggtgatggaccagcgtccttggggtgtgtggccaatgacctcactgaccttggccctctgggcagcctcagggctctacccaagggcagactgaaggccacacctgctgcatagagccgtggctgcacacccacacatggccatctcaggctagcctgttgcccagcaggcagctctgacctcaatacagggcggtcaagcacacagctgagccctgcatcaccatgtcccagcttgactgcccagcccggccctgggggacaggctcaccgaggaaggtctttttataggtgcttccctgctccatgttggggcttgaacggattccggtgttgctatcgtgcatcttggccacaatgcgactacatggaaggg

SEQ ID NO: 85892 - DNA, 433 bp, Homo sapiens
  misc_feature (1)...(433): n = a,t,c or g
gcgctcgaatgagcggcnnnnnncacgcgtccggtcgcaatacgctcgaagaggctggttcctgaccattattgtcactactaccctgaaaatgtgaaaccaaaaccaaaactgaaggaatgcagcatggatccctgcccatcaagtgatggatttaaagagataatgccctatgaccactttcaacctcttactcgctgggaacataatccttggactgcatgttccgtgtcctgtggaggagggattcagagacggagctttgtgtgtgtagaggaatccatgcatggagagatattgcaggtggaagaatggaagtgcatgtacgcacccaaacccaaggttatgcaaacttgtaatctgtttgattgccccaagtggattgccatggagtggtctcagtgcacagtgacttgtggccgagggttacggg

SEQ ID NO: 85893 - DNA, 452 bp, Homo sapiens
ccgtaatttccgggtcgagatgcaattgatgaaattaatagcgacctggcatcagtcatgaaaaatgaattccccaggtgccttcctaccaatgagaacctgcacgactacttcatgagtcgggtccgacagaaccttcatattgtgctctgcttctcgccagtgggggagaaatttcgaaacagagctttgaagttccctgccctaatttcaggatgcacaattgactggttcagccgatggcccaaagatgctttagttgctgtgtctgaacacttcctcacttcctatgatattgactgcagtttggaaatcaagaaggaggtggtccaatgcatgggctccttccaggatggggtggctgagaagtgtgttgattattttcagagattccgacgttctacccacgtgacgcccaaatcatacctctcctttattcagggctataagtg

SEQ ID NO: 85894 - DNA, 348 bp, Homo sapiens
aaatttactttgctgaaatggacccagacttggaaaagcaggaggaaagtgtacaaatgtcaatattcactccactggaatggtacttatttggagaagatccagatatttgcttagagaaattgaagcacagtggagcatttcagctttgtgggagggttttcaaaagtggagagacaacctattcttgcagggattgtgcaattgatccaacatgtgtactctgtatggactgcttccaggacagtgttcataaaaatcatcgttacaagatgcatacttctactggaggagggttctgtgactgtggagacacagaggcatggaaaactggcccttttgtgtaaa

SEQ ID NO: 85895 - DNA, 638 bp, Homo sapiens
atggtcatcacttttgtaggcctgaagttgttttactgctttagcagctgtgtggcaagctttctagcagacaatggtgctgttcgtgatcgcatggtccctcctccaccaccaccccaccatctctatgcgaaggctaacacctcatcttccatcttcctgcactggaggaggcctgcattcaccgctgcacaaatcattaactacaccatccgctgtaatcctgttggcctgcagaatgcttctttggttctgtaccttcaaacatcagaaactcacatgttggttcaaggtctagaaccaaacaccaaatacgaatttgccgttcgattacatgtggatcagctttccagtccttggagccctgtagtctaccattctactcttccagaagcaccagcaggcccaccagttggagtaaaagtgacattaatagaggatgacactgccctggtttcttggaaaccccctgatggcccagaaacagttgtgacccgctatactatcttatatgcatctaggaaggcctggattgcaggagagtggcaggtcttacaccgggaagttgtgtactcaaggagctcacactctcttcaggccaagcttgaaccagaaaacatgaaaaccagttgggtctg

SEQ ID NO: 85896 - DNA, 430 bp, Homo sapiens
gtctggaaacaaaagtcttcattaatctggcgtcttggccccacatacctctttgaagaagccatttcaatggaaactctggaagttattaacaaacttggcccaagatattgtggtaacttccaagctgtgcatgtccaaggggaggacctggacagtgaagccacgccctttgttgcagaagaaagagtttcttttggacttcacatagccagctcctctatcaccagtgtagcggacatcagaaatgcttacaatgaggtggacagccgcctgatcgccaaagagatgaacatttcatcccgtgacaatgccatgcccgtgttcttgctgaggaattgtgctggccacctgtcagggtctctgcggaccattggagctgttgctgtgggtcaattaggggtgagggtattccactccagccctgctg

SEQ ID NO: 85897 - DNA, 1331 bp, Homo sapiens
ttttttttttttggcataagatcacactttagttcagagacacatttgaataaatacttgaaatggatccacccctgcaggtggcagcctgagaacatggcgctgcagggggaccagggcagcgtctggttcaggtggacgaacagcggtgccatcacgtggtgcttgcccatgggcccgaagagccgtgtgcagggcttggagtcgtcgtggggcatgctgaggacgtgccctagttcatgggccagggtgtgggccgcctggagcccctcatcctcgatcacggagcagcttttgttggggtcacaaatggtcccgatgtctgccacacccagggtgtcacacagcccctcctgcccacagaagttctgtctggtgagcaggatggccgtgtcgtagtgctctgggtggcggtcgctgggctggttgaaacgccgctgccagttgcagaagttacgcagtgtaagccccccattgtcggacacctctgggccccatttttcatcttctacgatcagcacttttaccaccatcaggttgatggaattcttgatgctggggtgcttgtagattcgggctgccacagacattaacgtcaggatgtggttctgcaggtcggccccgtagaaggcagccatggacgcatcggccaccagcagcgtctccacgaagcgcgcctcagacacaaaccgcttggtcctactcgtggcccccaggggcggtggcggctcgctagcgccttctgcctcctcttcttggctctcctcctcgctgtcctcctggtggtctcctctctcctgcctctgaccctctcccgtctccacctcccactcgggtcctcgcgggagggggcgggctccggcgggaccccagcgctgcaggcggtgcggctgagccagggagccccccgcgccctgcggctggatggtgaactcctcgccgtccagcaggaaggagccgctcagcccgcggcacaggctgaccgccgccagcgactcgggctccccattcacggtgccggaaaaaaaacagccgcgcagcccccgctcgcccccggtcgcccggccggagcccccgaggcgctcgatcttgaactcgggcgccaggaagctgtcgtcgggcgccaggcgcaacacgaagcccttgccgaaggcggacaggtggagcgcgagctcgcccgcgctgccgggcaaccgcgtgggcaccaccagctccgaggcctgccccccggctgcgggccgggccggggcgccgcgggccagcggcagcagcagcagcagcagcagcagcaggaacggaagccaccggggggcggcgggggcggggaacat

SEQ ID NO: 85898 - DNA, 414 bp, Homo sapiens
cccacgcgtccgggccatcatcggttcataggtacagaagaagtattccaggcactggaagataaccaggtagctctgtctaccatgaaggcatcacgctttgtcaaggcctttgagaaggatgtggaccactgggaacgctgcctctccctcattttggaggttattgagatgattctcacagtgcagcgtcagtggatgtacttagaggtcaggactcagcgcctgagctcttcctgcttcctgctcttactccttctttttcttaagacctagattttgccctgttatcagcctcattctcctacctttaaagtcactcttcatctaggacccagctgtctgattcttagttattacctctcaccttagattccctccgtaacaagtttttgttcttctcagatttttctg

SEQ ID NO: 85899 - DNA, 584 bp, Homo sapiens; identical to SEQ ID NO: 79838
  misc_feature (1)...(584): n = a,t,c or g

SEQ ID NO: 85900 - DNA, 403 bp, Homo sapiens
gtatacttgggagccggccccggcctgtttttttccaatgagggggccaaagagggtgagaaggccaatatccccaaacttatgctgccccgagggggcttcagccaaagagagatggtcactggggaaaggtcccccagccccgaggaggaggaggaggaggaggaagagggctttggggaaagggcctcttgtcgccggggccttttccgggtccgattgacacgtgtaggcctggcggccccttctaaagcctctcgggggcaggagggcgatgcagcccccaagtcccccgtcagagagaagtcacccaagttccgcttccccagggtgtccctaagccccaaggcccggagtgggagtggggaccaggaagagggtggattgcgggtgcggctgccca

SEQ ID NO: 85901 - DNA, 411 bp, Homo sapiens
  misc_feature (1)...(411): n = a,t,c or g
ccaccaagttcatggtggggaccgagcagggcatcgtcatctcctgcaaccgcaaggccaagacgtcagctgaaaagattgtgtgcaccttcccgggccatcatggccccatctacgccctccagagaaaccccttctacccgaagaacttcctgacggttggcgactggacagcccgcatttggtctgaagacagccgggaatcgtccatcatgtggaccaagtaccacatggcttacctcactgatgctgcctggagccccgtgaggccgaccgttttctttaccaccaggatggacggaaccctggatatctgggacttcatgttcgagcagtgcgatcccaccctcagcttgaaggtcacgcgcatgtccctccttgtgcatccaggtcctcagggagccaggtccn

SEQ ID NO: 85902 - DNA, 575 bp, Homo sapiens
tgtagtcctacgcagagtggtggaattcaaggaatcttatatgtggaagattagtttgtacctaccctactcgaaagcctttccatcaagaaaatggtgatgtgatttatgctttcgtacgagattctgtatgcataactgtagactacaaattgcctcgaacagttccagatccactggctgtcaaaaatggctctcagtgtgatattgggagggtttgtgtaaatcgtgaatgtgtagaatcaaggataattaaggcttcagcacatgtttgttcacaacagtgttctggacatggagtgtgtgattccagaaacaagtgccattgttcgccaggctataagcctccaaactgccaaatacgttccaaaggattttccatatttcctgaggaagatatgggttcaatcatggaaagagcatctgggaagactgaaaacacctggcttctaggtttcctcattgctcttcctattctcattgtaacaaccgcaatagttttggcaaggaaacagttgaaaaagtggttcgccaaggaagaggaattcccaagtagcgaatccaaatcacaggac

SEQ ID NO: 85903 - DNA, 408 bp, Homo sapiens
aaatctccacctcaatgttgacatccattctttcactgcagctaaaaacgtggttgctgcggccatggatgctcggatatttcatgaacggacccaaacagacaaggctttttttaatcgttgggggccatcagtaaagggagggagaaggttttttgacatccaaatccgaaggttaaaaaaattaggcattgaaaaaactgaccttacccctctgacagaggaaaagataaacaaatttgcagaattggacattgatccaaaaaccataacttggcaaaaagggtgggataccaatgataaattcctgaggaaaataacgatgggacaggctccaacggaaaaggtgcacacacggacggcccagtttgatatttttgtggccagggaaattatggcttgcctggc

SEQ ID NO: 85904 - DNA, 824 bp, Homo sapiens
cccgggtcgagctcagataccatccaggtgcccctggatgtggaagggcccctcacctgtcgccaggctttcactggctgcttctgtaggtcctccaccaaggcgacagcctcctcaccgcttcccgggtgctgctcacgcacccagccctggatctcccctggcagcactgtcaggaactgctccagcaccagcagctccaggatctgctccttggtacgcagctcgggccgcagccagcggcagcagagctcccagagctggctgaaggcctcatgaggcccatgcacatccccgtagcagaattgccggaagcgctggcggcaggcttcggaatccctgccatcctcatgctgggcagattcctgttcccaggaggaatcttccactttcacaatcagaagcccttctccctccccaggggcctggtcctgggcctccaagggggctgccattcccctggcctgaggctcagggttggtcggcttcaacctgggccccagaacctgtactttcagtctcccagagggatcccctgtggtagctgggctggcatctggatgtgtactccagggtcgctcagcaggacacggcaggcgggaaggcgagccagccggagccccgcgctgtccaccgcagcctcgcccccgaaacacacaacgcccactacggcccaggagatcccacttccgccgcgagctcccggcgccggaagtcctcgcggggctcgctgggaaactacgtacgcaagcattccccagctcccagaaagccgttcgtccactgagcccgccttctccatgaccgatggccaatgaacagga

SEQ ID NO: 85905 - DNA, 404 bp, Homo sapiens
  misc_feature (1)...(404): n = a,t,c or g
tgcagagttccttggggacattatggccactcctgtccagatgagagggagccggctgcctgtgacagcgtcgcaaaatgccgccagggctttccctccctcctcctttctctcttcctcgtccctctctggttggtggtttcctgcaggctcccgtccctgctggtgctggccacaatgtccccactcccagggtttcggcgtcccagccccctgcgcccaccgcgcctgcccgccagaatccctgtgcccttggtgcgtgtggcctgccgagcctcgagcccctgttctcctcagccctctttcctcccgcgtccccaggaggtgcctctggaagccacggagtcccatcggcaccaagaccgactgccctttggggtgaggtagtaggttgtatagtttgn

SEQ ID NO: 85906 - DNA, 569 bp, Homo sapiens
aaatcttgaacgagcgccttgctaactacctgcaaaaggtgcgaatgctagaacgagagaatgctgaactggaatctaaaatccaggaagaaagtaacaaagagctccctgttctatgtcctgattacctgtcttactacactaccattgaggagctccagcagaagatcttgtgtaccaaggccgagaattccagactggtctcgcaaattgacaacaccaaactgactgcagatgacttgagagccaaatacgaagctgaggtgtctctacgccagctggtagagtcagatgccaatggcctcaagcagatcctgaatgtgctgaccctgggcaaggccgacctagaggcacaagtccagtctctgaaagaggagctcctttgcctcaagaacaaccacaaagaggaaatcaattctttacagtgtcagcttggggagagacttgacattgaagtgactgctgccccttctgctgacctaaaccaggttctacaagaaatgagatgtcaatatgagcccatcatggagacaaaccgcaaagatgtggaacagtggttcaacacgcag

SEQ ID NO: 85907 - DNA, 477 bp, Homo sapiens
ctcctgggaggcgacctgcgctaccatctgcagcagaatgtgcatttcacagaggggactgtgaaactctacatctgtgagctggcactggccctggagtatcttcagaggtaccacatcatccacagagacatcaagccagacaatatcctgctggatgaacacggacatgttcacattacagacttcaacatagcgacggtagtgaaaggagcagaaagggcttcctccatggctggcaccaagccctacatggctccagaagtattccaggtgtacatggacagaggccccggatactcgtaccctgtcgactggtggtccctgggcatcacagcctatgagctgctgcggggctggaggccgtacgaaatccactcggtcacgcccatcgatgaaatcctcaacatgttcaaggtggagcgtgtccactactcctccacgtggtgcaaggggatggtggccctgctgaggaag

SEQ ID NO: 85908 - DNA, 417 bp, Homo sapiens
atcagtggaagtgaaagccgaaaagaggataccacccccttttcaacacaatcccgagtacgtgcaacaggccagcaaaaacatcgccaaggatttgattagtcctagagcttacagaggatacccaccgatggagcaaatgttttcattttctcagccatctgtgaatgaggatgctgtggtgaatgcccagttcgcaagccaaggggccagggcgggcttcctgagaagggccgactccctggtgagcgccacagaaatggccatgtttagaagggtcaatgagcctcatgagctgcccccaactgataggtacggcagacccccatataggggagggctggatcgccaaagcagcgttacagtgactgagtcccagttcctgaaaagggatggcaggtatgaaggtggacaccc

SEQ ID NO: 85909 - DNA, 547 bp, Homo sapiens
tgctgaccatcactgacttcatcctggtgctgtatcgctactacaggtcccccctggtccagatctatgagattgaacaacataagattgagacctggagggagatctacctgcaaggctgcttcaagcctctggtctccatctctcctaatgatagcctgtttgaagctgtctacaccctcatcaagaaccggatccatcgcctgcctgttcttgacccggtgtcaggcaacgtactccacatcctcacacacaaacgcctgctcaagttcctgcacatctttggttccctgctgccccggccctccttcctctaccgcactatccaagatttgggcatcggcacattccgagacttggctgtggtgctggagacagcacccatcctgactgcactggacatctttgtggaccggcgtgtgtctgcactggctgtggtcaacgaatgtggtacccacccccaagatgagaggctcgggctgggctggggcctgggagaacctggaagtgaggagcgcctcttcccagccgccatcacatctaggaa

SEQ ID NO: 85910 - DNA, 872 bp, Homo sapiens
cccacgcgtccgctccctcctcacgctcctgtggatccagtggaagacctgctgacagccgcctgctccagcattttccctggtgctggcaccaaccaggagctggccctgcactgtctgcacgaatccagaggagacatcctggaaacgctgaataagctgctgctgaagaagcccctgcggccccacaaccatccgctggcaacttatcactacacaggctctgaccagtggaagatggccgagaggaagctgttcaacaaaggcattgccatctacaagaaggatttcttcctggtgcagaagctgatccagaccaagaccgtggcccagtgcgtggagttctactacacctacaagaagcaggtgaaaatcggccgcaatgggactctaacctttggggatgtggatacgagcgatgagaagtcggcccaggaaagagtttgaagtggatattaagacttccccaaaagttcccaagggtgcctcttcccagaagagagtccccaagtgaagagaggctggagcccaagagggaggtgaaggagcccaggaaggagggggaggaggaggtgccagagatccaagagaaggaggagcaggaagaggggcgagagcgcagcagggcgggcagcggcagtcaaagccacgcagacactacaggccaatgagtcggccagtgacatcctcatcctccggagccacgagtccaacgcccctgggtctgccggtggccaggcctcggagaagccaagggaagggacagggaagtcacgaagggcactacctttttcagagaagaagaaaaaaacagagacattcagtaagacccagaatcaggagaacactttcccctgtaaaaaatgtggcag

SEQ ID NO: 85911 - DNA, 396 bp, Homo sapiens
cggttgttcgtgagtttttactgactcgaggatcatcatgcctagggttcataacataaaaaagtctcttacacctcacatttcttgtgtgacaaatgaatctgataatctgctggattttttgcctgacagactaagagcaaagctacttccattccagaaagatggcatcatttttgccctcaaaagaaatggcaggtgtatggtggctgatgaaatgggtctaggaaagacaatccaggcaattggaattacttacttctataaagaggaatggcctctgttaatagtggtcccttcgtctctgaggtacccttggacagaagaaattgaaaaatggatcccagagctaagtccagaagaaatcaatgttattcagaataaaactgatgttag

SEQ ID NO: 85912 - DNA, 588 bp, Homo sapiens
  misc_feature (1)...(588): n = a,t,c or g
ccggtccggaattcccgggctcggccaagctcgtgttcctcgacctcagctacaacaacttgacccagctgggcgccggcgccttccgctcggccgggaggctggtgaagcttagcctggctaacaacaacctggtgggcgtgcacgaggacgccttcgagaccctggagtcgctgcaggtgctggagctcaacgacaacaacctgcgcagcctcagcgtggccgccctggccgcgctgcccgcgctgcgctccctgcgtctggacgggaacccctggctgtgcgactgtgacttcgcccacctcttctcctggatccaggagaacgcatccaaactgcccaaaggccttgatgaaatccagtgctccctgcccatggagagcaggaggatatccctgcgtgcgtgtcggaggccagcttcacgagtgtaggttcacctgtcatcacagacctctgcatcatcattttctctggtgtggccgtgtcattgcggcatcatctcagcttctcctgccactgtggtcagtgctccagaggtgncacccaacaaagatgcggaggatgaagacgaggacgaggatgactgag

SEQ ID NO: 85913 - DNA, 396 bp, Homo sapiens
aaggagaaccgaagcgactcaagaaggcatctgtcactgagcccctggaacagagcgagagtatcgtagtgggcagcacccaccgacaggtgtaacctctgcggatgacagcaacagctactgcaggatactggggaagagtgccacattgtgcgagaggggaacccccatcaagtgtggcccgcccatccgactgacacatgtcaacactggccgaaacctccatagtcaccacttcacttcacctctttctggaaaccaggtgaggtggctttcgatggattgttgctgctctgcattactcagtgggtgcttgtttgatctcttgggtcttaaatgattcttttctaggagtagatgttctcttttgtgcagacctggggaaatggtctattt

SEQ ID NO: 85914 - DNA, 408 bp, Homo sapiens
cttgtgtcgcatctgtcagatagccgggggttccccaagcaaccccctcctggagccttgcggctgtgtgggaagcctgcagtttgttcatcaagagtgcctgaaaaagtggctgaaagtgaaaataacatcaggagcagatcttggtgccgtgaagacctgtgagatgtgtaagcaaggcctgctggttgacctgggtgactttaacatgattgagttctaccagaagcaccagcaatctcaggcacaaaacgagctgatgaattcaggcttgtacctggtgctgctgcttcacctctatgagcagaggtttgcagaactcatgaggctcaaccacaaccaggtggaaagagagagggaagaagttgcaaggagcaagctgggaaccagagcaaaaagcagcaggag

SEQ ID NO: 85915 - DNA, 343 bp, Homo sapiens
accggcccggatttccggggtcgacccacccgtccggaaggccacaaaggggggggagaactgcagttttgaggataacaaaaattggcagttcctttggggattaaatggcaacttcaatttcttcaaggagccctggggtgggaggaataaccatgccaaggggttccggacaacctgggccagaagttccagccaaaacaaccggacgtttcaaaataacaggaattttttgcggttgcaaagggacagccaaaaaaagggccagtttgcccggttaataagcccccttgtcaacctgccccaaagcccggggggcttggagttccagtaccaggccacg

SEQ ID NO: 85916 - DNA, 433 bp, Homo sapiens
aaccgccctgcaggaccagctgttttatatagattgggaggggaaccacctcctgcaggcgaaggccgacctgaaaaaggacctgaactgcccaagggaggccaaggaggaaaggaaaaaccaaaaggaggttttgaaaaaggaaattcaaacccttaccaccaggctccaaaaattgcagaaattgaaaaaggaaaaaaaggaggatggcccggaggttcctcataaggaccagggaccattcagttgagtctcccgtcaggggcggggaaactttggccgggacggttctgaccgtttccttgtccaaagttttttttgaccagccactgaaaatcccactcccctttatcatcaccatggatttctataactcatgtcgggggaatcgaagtccgggttttggattaattgactgccagcaaattgactt

SEQ ID NO: 85917 - DNA, 245 bp, Homo sapiens
aagagctatgctcaagtgcctgagagaagggcagccccctccctcatacaactggacacggctggatgggcctttgcccagtggggtacgagtggatggggacactttgggctttcccccactgaccactgagcacagcggcatttacgtccgccatgacaccaatgagttctcctcaagggattctcacgacactgtggatgttcttgacccccctgaagactctgggaagcaggtggacctat

SEQ ID NO: 85918 - DNA, 362 bp, Homo sapiens
cgggggactgcttcacctgctgcacccaggagcaaaactgctgtgaagagtgctgctgtcagccgggctgctgtggctgctgcggctcctgctgtggctgtgggggctctggctgcgggggctctggctgcgggggcagctgctgcggatcgtcttgctgtggatctggctgcggaggctgtggaggctgcggaggctgcgggggtggctgctgtggatccagttgctgtgggtccagttgctgcggctccgggtgctgtgggcctgtgtgctgccagcccacacctatatgcgacacaaaatgaagacctttccctccaccactgatgcagtcccaccgaaagcctccatctgctccaggg

SEQ ID NO: 85919 - DNA, 423 bp, Homo sapiens
agccctctctccacttcggagcactcctctggcgttggcaccgttgaggaatgggcctgggcggggaggtgaagagaagccaggaatgttttatgttttcctaatggagagggggcctcgggagcccctgagctaggaggacacggaaaaggggattggggtcctgagattgggtctgttgggcccaggacgcgttttctggatgggtctaggatgctcccctgtcgcgggacccccgcggtccggccctgcctgctgggggttcgaagaggtggagtgcagggtggaggtgttatttacccgagtcctggggacagtccccgggactctccgccaggcgcccagaccggcaggtcccgcaggcggcgcgcggtgtgtttgcactttccaaagttcttgaaccatctcaagaactccttctgc

SEQ ID NO: 85920 - DNA, 395 bp, Homo sapiens
gcagacaaactgatttatatggggttcatcacggggccaaccaggcgggaagtgaggcagggaagtttggccagggagtcgacaatgctgcagggcaggctggaaatgaggctgggaggtttggccagggagtccaccatgctgcagggcacgccggaaatgaggctgggaggtttggccagggagtccaccatgctgcagggcaggccgtaaatgaggctgggagatttggccaaggggcccaccatggtctcagtgagggctggaaggagacagagaattttggccaggggatccaccatgctgccggtcaggttgggaaggaggcagagaagtttggccagggggcccaccatgctgcggggcatgccggatatgatgcagagagatttggt

SEQ ID NO: 85921 - DNA, 935 bp, Homo sapiens
gcagtaaggccgcagctctaaggccgaatcttaatggcaaagctcatacagtgtggaccaatgccatgaaactgtcagaaaaatcagtggccgaggggattcctggggcagttccccctgcggagatttatgtggaggaggacttggcccagcaggacaaggatgaaataattctgctgctgggaaaagaggtcagccgtctctcagattatgaaattgaatccaaatacaaagacgtcataatagcaaacctgcagaatgaagtggctgagctgagtcagaaggtgtcagagaccaccacctccaggcagaatgagaaggagatctcgcagaagtgtcaggttctggatgaagacatcgatgccaaacagaaagagatccagagcttgaaaagccagatcagtgccctacagaaaggctacagcaaggtgctgtgccagaccctgtcagagcggaactcagaaatcacatccctgaagaatgagggcgagaacttaaagagagacaacgctatcacatcagggatggtgtcatctttgcaaaaagacatattagcaaaggatgagcaagttcaacaactaaaggaagaggtcagtcacctaaaaagtcagaacaaggacaaggaccaccagctggaagcccttggctctagatgctcggtgctaaaggaagagttaaaacaggaagatgctcacagggagctcagggaagcccaggagaaagagttaaaactctgcaaaaccgttgaagagaagcttcaggaggattccagaaggaaattgcttcagctgcaagaaatggggaacagagagagcgtcattaaaatcaatttggagagggcagtaggtcagctggagcacttcagaagtcaagtcatcaaggccacctatggacgggcgaagccgttccgggacaagcccgtcaccgaccaacag

SEQ ID NO: 85922 - DNA, 400 bp, Homo sapiens
  misc_feature (1)...(400): n = a,t,c or g
ggaaaccagtttacactcttacatatggaaagttgtggagcagaagtttaaagttggcctacacacttcttaataaactggggaccaaaaatgaacctgtgttaaaacctggagacagggtaattggtgtgattttggttttagggaggtggtgtttattgttttctaatatgctaatattctaatattctggagttttcatatacaacaggaaaatttatgtaactcttatttttggaaaaataaaaatggtttggttccaacgcaggttagcccaatgccagatgacaattctcacattcctgggttgaaggaaattcgcatgtcctttcctgtagctgccaatcagtaatctctttaggtgctaataaaaagaaagagaaaccttagtctttccaan

SEQ ID NO: 85923 - DNA, 408 bp, Homo sapiens
  misc_feature (1)...(408): n = a,t,c or g
actttttctgattaccatgagggatttgcacctgtcttgataatgaaccatacaccatgggacatcctcacatacaaacagagtgggtcaccagaagaaatggtcttgctgacaacacaggctcgactttttgcctgggcagatcctactggtaccagaaaacttacatggacatatgcagcaaatgttggggaacatgatctgttaaaggaccagaagaagcatttcgaaatgtatgcctggcatcctcaactaagttataaagacatgacaactatgaaataagagaaagcaaggtgaaataaaagataaagacagcaaaatgaagtgatggatgtggacagtttccatatgatgcaaacatccagatacactgcgtatcatttctggatgggcgccagagagttn

SEQ ID NO: 85924 - DNA, 606 bp, Homo sapiens
gacggggtgcacttcggatcatcgacagcaaaaattacgcagggcaaaaggacgtgcaggcgctctggaccaacgaccacgcactggcctggcacctgagcgatgacttccgagaggaccctgtggcctgggcacgaactcagtgccaggcctgggaggagctggaggatcagctgcccaacttcctggaggagctgccggactgcccctgcaccctgacccaggcccgggctgactccggccgcttcttcacggactacggctgtgacatggagcagggcagcgtgtgcacctaccaccccggggccgtgcactgtgtgcgttctgtgcaggccagcctccggtacggctcaggtcagcagtgctgctacacagcggacgggacgcagcttctgacagctgactccagcggcggcagcactcccgaccgcggccatgactggggcgcacccccgttccgcacgccaccccgagtgcccagcatgtcccactggctctacgatgtcctcagcttctattactgctgcctctgggcacccgactgcccccgctacatgcaacggcggccctccaatgactgccgcaactaccggcccccaagactgg

SEQ ID NO: 85925 - DNA, 379 bp, Homo sapiens
cctgtgtgcatggcacagctggtgaaccttcaacttgtgaagctgtgtttcttcgtggtcccgtgggcatgaactcatgtgcgcttgcacaaggctgtgtgtgtctgtcccccaggcactggttcctgtgccccatgcacagatgtgcactccattgcatttgtccaaggctgccttaacctccatgtcctctaggtgctggcccctttgccctctctggacccaggggactcactctgtacccaagacccccactgtcctcttgtgggtcccaggtctccactcaccagtgtcatcggagacgctgggcctctggctgcccgatggagagcgtaaaacgtcatcgctgtacataaggaagctgtcgtaatcctccccg

SEQ ID NO: 85926 - DNA, 568 bp, Homo sapiens
cccacgcgtccgcacctccaccacctcctcctcctcctccttcatcctctctgtcaggacagcagaccgagcaacagaacaaagaatctgagaaaaagcaaactaagccaaacaaggtgaaaaaaatcaaagaggaggaattagaggccaccaaacccgaaaaacaccccaaaaaagaggaaaaaatctcatctgctctttcagtgttgggcaaagttgtaggtgaaacacatgtcgatcctattcagttgcaggcattacagaatgcaattgctggtgacccagcttcctttataggcggacagttcttgccatactttatccctgggtttgcttcttattttacacctcagctccctggaacagtgcaggggggatacttcccacctgtctgtggcatggagagcctctttccttatggccctacaatgccccagacactggcaggtctgtccccaggtgcactgttgcagcagtaccaacagtatcagcagaacctgcaggagtccctgcaaaagcagcaaaagcaacagcaagaacagcagcagaaaccagttcaggcaaagac

SEQ ID NO: 85927 - DNA, 401 bp, Homo sapiens
attcccgggtggaggctcccgcgcctacccgcgccggccaaggccgggagccagagcctaggggagccgtcgtctccgccccggcactgtcggggggcgggcccaagagtgctggccaggccttgcaagtgcgagtgtccgcgagctgcaggggaggcaggacgcgtcacactcgcgggggcgttccgagtccctggggcgcgccggcggggagggagagaaggagtctgagcacccgctgggcgcggcactgggcagaggcgcgcgtgttgccggtgtactgaagctgcccgcgaccggcgggagcggcgtttctcgcttcctcggggtccggtactcgaagcgcacggcagtctgacctcggctgggaagcgttaagccccagcagagggctgtgaggg

SEQ ID NO: 85928 - DNA, 377 bp, Homo sapiens
agaggaccctgaatggagacaaactcctcccccagtctctgccacatctggtactttgcgactgcgacgagggagtcgatttacctggagaagggagtgcctggctgttatggaaagttacttcaatgagaatcaatacccagatgaagcaaagagggaagaaattgcaaacgcttgcaatgcagttatacagaagccaggcaaaaagctgtcagaactggaaagagttatcggtgactgtcgttttgtttctgcaacatttcgcctcttcaaacactctaagacaggaccaaccaagagatgcctagttatttacaatggaggaattacaggacatgaaaaagaactaatgtttgatgccaattttacatttaagg

SEQ ID NO: 85929 - DNA, 388 bp, Homo sapiens
agctcccggagtcagggactatgtctccctcgtcagactgggaactccaggagggagggtccgtgtctcctccatcagactgggagctcccagagtcagggaccatgtttcctccatcagactgggagctcccagagtcagggaccatgtctcctccatcagactgggagctcccagagtcagggtctatgtctcctccatcagaccgggagctcccagagtcagggaccatgtctccttcatcagactgggagctcccagagtcagggaccatgtctccttcatcagactgggagctcccagagtcagggaccatgtctcctccatcagaccgggagctcccagagtcagggtctatgtctcctccatcagaccgggagctcccagg

SEQ ID NO: 85930 - DNA, 429 bp, Homo sapiens
gaccgctctggaattcccgggtcgagccactgctggagcccaagttccacctggtgccgcctgtcagcgtgcctcgctaccagaggttcccactgggcgaggggcagtccctcctgctcgctgatgccctacacacccacagccccctcttcctggagggcagctcccgggacagcccgccacttctggatgcccctgcctcgccccctcaggcctcgaggttccagcgcccaggacggaggatgagcgaggggagctcccacagcgagagctcggagtcctcggacagcatggcacccgtgggtgcctcccgcatcacagccaagtggtggggaagcaagaggatcgactatgccctgtactgccctgatgtcctcacggccttccccaccgtggccctgccccacctcttccacgccagttactggg

SEQ ID NO: 85931 - DNA, 388 bp, Homo sapiens
ggcagcgggcgacgcgcccttgcgcagcctggagcaagccaaccgcacccgctttcccttcttctccgacgtcaagggcgaccaccggctggtgctggccgcggtggaaacaaccgtgctggtgctcatctttgcagtgtcgctgctgggcaacgtgtgcgccctggtgctggtggcgcgccgacgacgccgcggcgcgactgcctgcctggtactcaacctcttctgcgcggacctgctcttcatcagcgctatccctctggtgctggccgtgcgctggactgaggcctggctgctgggccccgttgcctgccacctgctcttctacgtgatgaccctgagcggcagcgtcaccatcctcacgctggccgcggtcagcctggagcgc

SEQ ID NO: 85932 - DNA, 400 bp, Homo sapiens
caaggaggctgaggccccaggacctgtgcccctttggtgccctgagtccgcctgcgtccaggcaccgctgcaggactggggtgaagagaccgaggacggcgcggtgtacagtgtctccctgcggcggcagcgcagtcagcgcaggagcccggcggagggccccgggggcagccaggctcccagccccattgccaataccttcctccactatcgaaccagcaaggtgagggtgctgagggcagcgcgcctggagcggctggtgggagagttggtgtttggagaccgtgagcaggaccccagcttcatgcccgccttcctggccacctaccggacctttgtacccactgcctgcctgctgggctttctgctagccaccaatgccaccgcccccaccttccgg

SEQ ID NO: 85933 - DNA, 514 bp, Homo sapiens
tttttctatttcagcacaatctcacttctctccttccaacaaccccgtgaggcatgtggcagcgtccccattttgcagaggaggaaactgaggatcagagctgggggagctctgagccgcgaagtaggggacgctggcctctttctcgaagcagacatgggggtgttcccagggatgctctcacctgcaggcctgtgtttgtagtgaggatggggggttggtcattgacaggcaggacagtgacagtgaaggccacaggatggctctggcgatccatctcggaggcattagccatcaggacaaaactgtctgtcagtgtctcgctcccgtcatgcacgtagcggatcagctgctcttccacctaggggcaggcccagggctggcagtcaggccccagcagcacccttcatgccctgcctttgggtgcaggaggagactgactcttttagggcttcattttccattggtagaaaatggggaccataagttctggctccgaggagttgtgaggaag

SEQ ID NO: 85934 - DNA, 486 bp, Homo sapiens
aacagggaggcctaagatgagttcaggccatggaagatctccagtgaggggatcttggaagatgtgaaaagcatcctggagggggaggtagccctgcagcttagcggtccagtttccctcactggtcttacttggtatggcatagaggtgctcacacagcagcccccagtatcctcccacttccctaaaggcttaaacacaccaagatgtgtatcagtttcttaaagagcacaatagcacattactgaacaaccaaaattgcagagaagtggcctcatttcctggaagtgtttcatggacggggaggtggtgaggtgaggaaatcctcatgaccaaagaaacatgaggcctgaggactggcggttgtgctcaaccacatggagaccacgtcgtgccctacaagagcaatctggtggtgtggtgctgtggaagagagaccgccatggcgacaaaacttgtgcatgtatttagaatcagaggctcctc

SEQ ID NO: 85935 - DNA, 496 bp, Homo sapiens
tttgaattattggggcgatcgaatgtgccaggaactggtgtaagtgctgtaacgataagagaccatttaattatcacaacgacctatgacgaagactccatcatcatccccattctacgcataacgaaacaaatacagaaaaggaacaactattaagagatggagctaggttatgaacctgggccatctgctttcagagttggcgttcttaaccactttagtatgtctataaattagctttagtctcatttaggaaaggaattgccatgagagaagagagtcagcggcactcatgctgatgttatttcaatgatatgggctgttgcaggtatttcttggagatgagctatttacagcaagggtgtttgcctctcattgctgcagtttcctgagaaaagagcctgagttcaatgatgagctcccatcccgcatcctgtgtggcactctgtccatcaagcccagagcgaaggagttcacggaaacctcaactgtggtt

SEQ ID NO: 85936 - DNA, 479 bp, Homo sapiens
ccctggagactgggaaccccagcaggatgaaataggggagggtgggctaattctggaaagagactacttgtccttcttttctgcgtaactttggcagtcatcagcattctctgagcctcccccgttaccatgaactgaggagaaagaggatgctccctgccacagcccagctggcggagggctctggtagggtctggaaagagctcttgagtctctttaggtgtagagggcctctgacaccccctccctccctcctccttcttgggtttctgtggcttgagcaggccccagctggagccaccgtccctcccaggagccgccgggtttgctccaaggtcaggtgtgtgacccgctcgtggagcccctgtaaggttgagaggcggatctgggtaagtgctggctcggccctccctgcctccatactggccaccaggatgagcctcctaaaccaggcccaggccatcccttccctgtgacag

SEQ ID NO: 85937 - DNA, 533 bp, Homo sapiens
aagcagcacacttttattggtgttttggacatttatggttttgaaacctttgatgtgaacagctttgaacaattttgcatcaattacgctaatgaaaaactgcaacaacagtttaacatgcatgtcttcaaactggaacaagaagaatacatgaaggaagatataccttggacgctgatagatttttatgacaatcaaccagttattgacctgattgaagcaaaaatgggaattctggagttactggatgaagaatgtttgttaccacatggaactgatgaaaactggcttcaaaagctgtataataattttgtcaacaggaaccctttgtttgaaaagcctagaatgtcaaacacatcctttgtcatccagcactttgctgataagtttcatctctgtgccaacttttttcaagaaaatccaactcctccttctccttttggttcaatgattacagttaaatctgcaaagcaagtcatcaagccaaacagcaagcatttccggaccacagttgggagcaaggtactgagaag

SEQ ID NO: 85938 - DNA, 408 bp, Homo sapiens
cttaaatccaatggcaaatatacaattacatctcgtcgtggacgtcagaacctcacggtcaaggatgtaaccaaggaggaccagggagaatacagctttgtcatcgacgggaaaaagacaacctgtaaattaaagatgaaaccccgccccattgctatcctacaaggacttagtgaccaaaaagtctgtgagggtgacattgttcagcttgaagttaaagtctccttggaaagtgtggaaggcgtctggatgaaagacggccaagaagtgcagcccagtgacagggttcacattgtgatagacaaacaatctcatatgctgctcattgaagacatgactaaggaagatgctggaaattactctttcaccattccagcccttgggcctctcaccagtgggcgtgtctct

SEQ ID NO: 85939 - DNA, 714 bp, Homo sapiens
tttttttttaaatgttgcccaggctggtctcaaactcctagccttaagcaatcgtcctgcctcagcctcccaaaatacagggattacaggtgtgagccactcacaccctgcctgtattttaactgcatctcattatgttataaatttgagaactaaatgaggatatgttgccttgcatgtctgttagtttgtactaaggatctgattaggaagtggccactgagctaagaagaaaatggtgcaaagaaggaaagaggccatttctggatccaatattcatcttttactaaattttcactagagagttgtcccctgtcccaaatgagatttgggatgtgaaggccagtagcctaacaggtaacaattcctggggaagactcctgagaagagtctcatgttacaaactcatgagggtccctcttctttcttgtaggcatccaggctggagaagcagaacagcacacctgagagtgactacgacaacactcccaacgacatggagccagatggcatggggtacatgcacaggacgagcgtgccaggggaggggctccccagggccagagacctggcaggcctgggccagcagaagcagttcaccacacacaccccttttctctattttcagactcataaaggcttaaaggattcaagcatacgctcggaggttacatgtcttggcatctcacaatgttggcgaaagggctttttctt

SEQ ID NO: 85940 - DNA, 684 bp, Homo sapiens
aaaaaagttggtgtatcatcctccatcctccaaggtctctggatctcttatagcacagaaggtctttccatggcactggcgtctttacgaaatctctacactccaaatataaaggtcagccgactgctgattttgggaggtgccaatattaattaccggacagaggttttaaataatgctccaattctatgtgttcagtcccatcttggttacacagaaatggtagccctgctgctggagttcggggccaacgtggatgcctcttctgaaagtggcctgactcccctgggatatgctgcagcagcagggtacctgagcattgtggtgctgctgtgcaagaaacgggccaaggtggatcatttggataagaacgggcagtgtgctttggttcatgctgcactccgaggtcatctggaggttgtcaagtttttgattcagtgtgactggacgatggccggccagcagcaaggagtatttaagaagagccatgccatccaacaggccctcattgctgcagccagcatgggttatactgagaatgtgttgccgtggaatactacacagccgtaagaagaacaaaatcatgtcctttgcagcaacatagatgcaactgaaggccagtatcctaagtgaattaacacaggaacagaaaaccaaataccacatgttctcattgataagtgg

SEQ ID NO: 85941 - DNA, 405 bp, Homo sapiens
atcgcctgcaccttttgtggccaggatgagtggtccccggagcgaagcacacgctgcttccgccgcaggtctcggttcctggcatggggcgagccggctgtgctgctgctgctcctgctgctgagcctggcgctgggccttgtgctggctgctttggggctgttcgttcaccatcgggacagcccactggttcaggcctcgggggggcccctggcctgctttggcctggtgtgcctgggcctggtctgcctcagcgtcctcctgttccctggccagcccagccctgcccgatgcctggcccagcagcccttgtcccacctcccgctcacgggctgcctgagcacactcttcctgcaggcggccgagatcttcgtggagtcagaactgcctctgagctgggcagaa

SEQ ID NO: 85942 - DNA, 422 bp, Homo sapiens
  misc_feature (1)...(422): n = a,t,c or g
gagatagatgaggtggggacaaagagtgaataactgagacccagaaagcaatgagggtgaagagaaacaagtaaaagactgaatccgggcaagggttttgttgaattatcttagctggtaaaatttaagcttttatttagtgtaaatgtcgacaatgttaggctgtaaggggttggtaaagggatctttctttgaacttgagatggaaagtgacagaagcagcataggtgaggacaggtgggaactgtctacagagcacaaaagggaacactgcttgcctcaggtgctatctcttagcttcctgcctttttgccctgttctccacctgcagccttattacctgatggcttctttcccttggaattctggaggcgcttgttcaaaagagtcatgaaatgaaggatcggcatccatttcatctn

SEQ ID NO: 85943 - DNA, 421 bp, Homo sapiens
tcaaagtgctgctggaggtctccggcgaactggccgacgtgccctacgagatccagttttccgagttccccgccgccgccccgctgggtgaagcactgaatgccggtgccgtggatatcggcgccttgggcgatgcaccctatgtcttcgccctcggtgccggtgcgccgctgaaggtggtgagcatcatccacgccgaggggcgctacaccacggccatgctcacgctgaaggattcgccgctgaacactgccgctgatctcaagggcaagcgtatcgtcaccacccgcggctccatcggccacttcctggcgatcaaggcgctgcgcagtgtcggcctgagcacccaggacgtgcaattcatctacctgctacccagcgagtcgcgcctgctgctgggacacggcagcgccgacgcctg

SEQ ID NO: 85944 - DNA, 342 bp, Homo sapiens
ctttggtgtaatgagtctgatgaggatgtgctttggtgtactgaggagtctgatgacgatgtactttggtgcattgaggtgtctgatgaagatgcgctttggtgcattgaagagtctgatgaggatgtgctttggtgtattgaggagtctgatgaggatgtgctttggtgtattgagtctgatgaggatgtgctttggtgtattgagtctgatgaggatgtgctttggtgtattgacgaggatgcgctttggtgtattgaggtgtctgatgaggatgtgctttggtgtacacgtacagcatgtagactttgagattggcttctttcatattcactgaaggct

SEQ ID NO: 85945 - DNA, 618 bp, Homo sapiens
ggggagtggggttgtgagactgcaatatcttgaaagcgttttcaggaatcagatgttgacccaggcttgttccttgtgctcagcgaaactggtcatccggtgggtagacatcactcagctcgagaagaatgccaccctgcttctgcctgatgtgatcaaagtgagcacacggtccagtgagcatttcttctctgtattcctcaacatcaacgagaccttcaagttaatggagcagcttgccaacatagccatgaggcaactcttagacaatgagggatttgaacaagatcgatccctgcccaaactcaaaaggaaatctcctaaaaaagtgtctgctctaaaacggtgggtgatagagaccttgtatcttccagactttagaaatgagaaactcactcattcatttattcagtgtaaccttctctgacgatcttcaagggttctgaacactcttctgtgtatagatacaaaactaaaaaagactagctgaggtgctaccagttcagaaagtgagacagacatgacctgctccaacacaagggagcaggcacttttttgggcctgtgaacacccagggtgggggtggcccacctgggggagtggtagccctcagcccct

SEQ ID NO: 85946 - DNA, 426 bp, Homo sapiens
  misc_feature (1)...(426): n = a,t,c or g
cctcttacagccacacctgtagcagctgagcctgcaacaggggcccctgcagccggacgcgtgggcggacgcgtgggtacgtctgcacctccactgcgctgccctgcacggcgttctcatggcggatgggactgcccgccaccaggggcgtcccagtcagtccctgaaggctctgcggggcaagcagaaggcagtaggtgctcgagttaggtctggccttttctgccacctttgagactggagctccaggccttgagtgatttagggtctgcattgctttgcggggaggcgcacactcgatcgcatcggaagagccctctttctccactggggatctgcggnggccgcaaacttgccacgataggtcagcctcggtgctggaagccaaccgcccggtgaggaaaggcaagacctgcactcccacct

SEQ ID NO: 85947 - DNA, 18 bp, Homo sapiens
ttttttttttttggggaa

SEQ ID NO: 85948 - DNA, 416 bp, Homo sapiens
cttgcacctttacatcagagttcttttggttctgtccaacttttaggtcaaacaggtcctagtgctttgtcagaccctacagtgaagaccatttctgtagatcattcttccacaggggcctcttatccttctcagagatctgtaattcctccccttccttccagaaatgaggtagttcctgctactgtggctgcctttccagtggtggctccatctgttgacaaaggtccctctaccatctctagcataacctgcagcccttctggctccttaaatgtagctacctcttcttcattatctcctacaacctctctcattctcaaaagctctcctaatgccacttatcattatcctttagtggcccaaatgcccgtttcttctgttggaaccaccccacttgtggtgactaacccctg

SEQ ID NO: 85949 - DNA, 420 bp, Homo sapiens
cacaggatacattgttgaacgcagagaactaccagatggccggtggctgaagtgcaattatactaatatacaagaaacatactttgaagtaactgaacttactgaagatcagcgttatgaattccgggtttttgcaaggaatgctgctgactcagttagtgagccatctgaatccactgggcctattatagttaaagatgatgttgagcctccaagagttatgatggatgtcaagttccgagacgttattgttgtcaaagctggagaggtccttaagataaatgcagacattgcagggcgacctctgccagtaatttcctgggccaaggatggtatagaaattgaagaaagagcaagaacagaaatcatctcaacagacaatcatactttgttaacagttaaagactgtataagacgaga

SEQ ID NO: 85950 - DNA, 415 bp, Homo sapiens
  misc_feature (1)...(415): n = a,t,c or g
ttttcctcttctgatctgcatcatttcactgtcatttgccatggacagttacggaacaagcaacaattgctggctgtcgttggcgagtggcgccatctgggcctttgtagcccctgccctgtttgtcatcgtggtcaacattggcatcctcatcgctgtgaccagagtcatctcacagatcagcgccgacaactacaagatccatggagaccccagtgccttcaagttgacggccaaggcagtggccgtgctgctgcccatcctgggtacctcgtgggtctttggcgtgcttgctgtcaacggttgtgctgtggttttccagtacatgtttgccacgctcaactccctgcagggactgttcatattcctctttcattgtctcctgaattcagaggtgagaagccgccttcagcan

SEQ ID NO: 85951 - DNA, 436 bp, Homo sapiens
  misc_feature (1)...(436): n = a,t,c or g
ccacccgtccggcagagaagatacaataccttgtgctgttttttgttatgtcccatccttcacaggcttatgacaagttaagcttgagtgatcacttactaatagcagtactaaatctcttgagaagggaagtttcagagcatgggcgtcatttacagcagtatttcaacctgtttgtaatgtatgccaatttaagtaagaatttaagtttttcagaattctgttttgatgtatcatattaaattgtgaagccatttatgtcaagtgatgaaatataatctgatctgaagtagaaacaatttcccataaaacctgttgtgaattttatctgaacatggcactttcaccttttactttgtttatgcatgtgtctttgcggcagacacaggtcagaatctgngctctgattctttttttttccttaaccccccaacgg

SEQ ID NO: 85952 - DNA, 449 bp, Homo sapiens
gccctggtagccttggacaagcactggcacttttgctgttttaagtgcaagagctgtgggaagctcgggaatgccgagtacatcagcaaggatgggctgccctactgcgaagctgactatcacgccaagttcggcatccgctgtgacagctgtgagaaatacatcacggggcgcgtgctggaggccggagagaagcactaccacccttcctgcgcgctatgtgtcaggtgcggccagatgtttgcagaaggcgaagagatgtatcttcaaggttcctccatctggcatccggcgtgtcgacaagcagccagaactgaagacagaaacaaggaaaccagaacttccccaggctgctcccagcccgctggagaagtcgcccagcacagcgatcctgtgcaacacgtgtgggaatgtgtgcaagggcgaagtgctgcgggtgcaggacaagt

SEQ ID NO: 85953 - DNA, 461 bp, Homo sapiens
  misc_feature (1)...(461): n = a,t,c or g
cccacgcgtgcggngtcctatcatgaagtgaccacagttaaaattgaagaggtatttcatggagatgtgcgaggaacatggtggctttttgaaacaaagccattagactctattaataaatcagaaactgtgtatgttattaaatctgtcacacaagaagacattcagaagggagatgttagttctgtcagatacagatttgaaactcagccactggatcagatttctgaagaatcacataatattatgcccagtattgaccatatacaaggtggcaatgtaaagacaagtagacaattctttgagtctgaaaattttgataagaataactatatacgaacagtaagtgtcaatgaaatacaaaagggcaatgttaaaacatctacttggctatttgaaacccacactatggatgaactgagaggagaagggttagaatatgaaaatatcaagacagtcac

SEQ ID NO: 85954 - DNA, 423 bp, Homo sapiens
cccacgcgtccgagtttccagagccatcagagggtccatacaggagagaaaccatttcgatgcaacgtgtgtcggaaaggcttcagtcagagttcatactttcaagcacatcagagagtccacactggagaaaaaccatacaaatgtgaagtgtgtgggaagcgcttcaattggagcttgaatcttcacaatcatcagagagtccacaccggagagaaaccctacaaatgtgaagagtgtggtaagggtttcagtcaggcttcaaatcttcaagcccatcagagcgtccacactggggaaaaaccattcaagtgtgatgcatgtcagaagcgattcagtcaggcctcacaccttcaagcccatcagagagtccacaccggagagaaaccatataaatgtgacacttgtggtaaggccttcagc

SEQ ID NO: 85955 - DNA, 430 bp, Homo sapiens
agatcacctggcagaaaggacaagatctcattgacaataatggccactaccaagttattgtcacaagatccttcacatcacttgttttccccaatggggtagagagaaaagatgctggtttctatgtggtctgtgctaaaaacagatttggaattgatcagaagacagttgaactggatgtggctgatgttcctgacccacccagaggagtcaaagttagtgatgtctcacgagattctgtcaacttaacatggactgagccagcctctgatggtggcagcaaaatcaccaactacattgttgaaaaatgtgcaactactgcagaaagatggctccgtgtaggacaggcccgagaaacacgttataccgtgatcaacttatttggaaaaacaagttaccagttccgggtaatagctgaaaataaatttgg

SEQ ID NO: 85956 - DNA, 1434 bp, Homo sapiens
  misc_feature (1)...(1434): n = a,t,c or g
aagagactacttttgtaatgcatgatactaaaggagaaatattatattgtactgtactttagatgactattatcaacaattcatgaaaatgtattttataatctaattttagaataagctaaaatatacacatcttttattgtggtcataaatataatgtgtcttggaagcatgggacaaagtacttagtacattatgggttagttaacagtctctcaataaatagtgacaaaaataattttttataaacttttgcaaaattttaacaatgttttgtgtgtgtttattcaatttaggcttcttagtgttgaagaaaagaagaaaatagggcatctttgtaaattgctgattgaccaaggtcgaatccagtatttgcagcagaagggattcagtcctgctttgcagtactatacagaccctctggtgtctttgggaaaatgttttgttaactgcttttaccaaatgcattctttcatcaccaggaaacaactgcttaatggaaaagaaatttgagcatcatctggtcttccacccaaaaaaattttttaaatatatttttaatatccaaaaaattatattacttttaaatagcaaataaatatggaacttttaaaaaatgctgtggccctcattaaaactttgggtaatagcttttcctttttaacttcaagaaatccaaacatttagagaattcaccaaagtaatccctctttaggaaggggcatcttgaattatattatccatccgtatttatggagattggtaaagtagttgaaccgttgacttggtgatctgctccttctcccgtgacttcttgtatgtatgtgtgcataaactgaaggccaaataattaccccgttcctcttccttcatctgtgcccttcactggggangaagtgatactttcaatttcagtgggttgtctctgaagttgacaaacctcagatttgccatttcttccatgcatactggaatatcttgcagtttattgttgctgagaacaagagtacccagatttttcatattgctgattgtttgaggcaagcatgttatttcatttcgttgcagccataacgtatgtagattttgcattctttctatagtatcaggaagttgttcaagtttgttgcttcccatgtccagccactcaagggcaggcatgttcaacacagcaagagggattgtagtaaaatcgttcatactcagatcaaggtgagtaagttttagcagattgctgagctcttgtggaagatcacatatatctctgttaacagccagttctagtttctccaagctggcacaattacttagttccttggggacagtcttgattttgttgtagctgagaatcagttcctgaagtctagtaagcagtccaatccctggtggtatctctgaaattgtgtttcgagataaatctaacacaatgaggtt

SEQ ID NO: 85957 - DNA, 417 bp, Homo sapiens
atgacacctcccaaattagagtagaagctatggggatgatttcagaagctaaactcactgtgcttgagggagacccatattttacaggaaaacttcaagattatactggtgtagagaaagatgaagttattctacagtgtgaaattagcaaagcagatgcaccagtgaaatggtttaaggatgggaaggaaataaagccatccaaaaatgctgttattaaggcagatggcaagaaacgcatgctaatcctaaagaaagccttgaaatcagatattggacagtacacctgtgactgtgggacagataagacctcaggaaaacttgacattgaggatcgggaaattaaactggtgcgacccctgcacagtgtggaggtgatggagactgagacagcacgctttgaaaccgaaatctctg

SEQ ID NO: 85958 - DNA, 519 bp, Homo sapiens
tagctcccaagaagagcctgagagcaaggccaaggcgccgcagcaggaggaggggcccaagggtgtcgatgagcagagcgacagtagtgaggagagtgaggaggagaagccgcctgaggaggacaaggaggaggaggaggagaagaaggcacccaccccgcaggagaagaagcgcaggaaagacagcagcgaggagtcggacagctcagaggagagcgacattgacagcgaggcctcctcagccctcttcatggcgaagaagaagacggctccagtagctcccaagaagagcctgagagcaaggcccaggcgcctgatgaggaggaggggcccaagggtgtcgatgagcagagcgacagtagtgaggagagtgaggaggagaagacgcctcctcctggcttggactccctcacactgaccaagggcctgtgctgcccactgggtaactactacagttctcccttccacttccctaagtctctcttcagctgtgacttatccaccacatagcccagttag

SEQ ID NO: 85959 - DNA, 405 bp, Homo sapiens
  misc_feature (1)...(405): n = a,t,c or g
gaaagacacgtggggtgttgtctcttccgtaagctttaagacaaagctgaaaatcccacatctgcagaagggctgtgaatatgttttccgagttagagcagagaataagataggtgttggtcctccccttgactccacacctactgttgctaagcataaatttagtcctccgtctcctcctgggaaaccagtggttactgacattactgaaaatgcagcaacagtgtcttggaccctgccaaaatctgatggtggcagtccaataactggctactatatggaacgtcgagaagtaactggcaaatgggtgagggtcaacaaaacacctatcgctgacctgaagttcagagtgactggactctatgaaggaaatacatatgagtttagagtttttgctgaaaatcn

SEQ ID NO: 85960 - DNA, 447 bp, Homo sapiens
  misc_feature (1)...(447): n = a,t,c or g
ccggcccggggncccgggtcgacccacgcgtccgcaagtgtctgtcatgtttcttatgagattgacctttgcctttattatatcttacatattttcttttttgaaattggttttttcatatcaacatttgggtgactctacataataaaatgttaaagcacacagctttcattatatgtattttttggccatagaactggaaaactaaatgacatttcctaggcagggaggttctctatatactggtgccatataactgcgggcatgaaattatttcaaactcccctcctaattcttcatctttataggaaggggcatttacctgaagctgatatttcaaaatttagtgattctcaacatattatttttcctattggggggcccttttggtttttctggagttcataagccgtaattttttaaaaattcactggcaaaattggggag

SEQ ID NO: 85961 - DNA, 508 bp, Homo sapiens
  misc_feature (1)...(508): n = a,t,c or g
tgaatgtaagaaatgtcagaagaaatttagtagtggttatcaacttattctacatcacagggttcatgtcattgagagaccctatgaatgcaaagagtgtgggaagaactttcgtagtggctatcaacttactctacatcaaagatttcatactggtgagaaaccctatgaatgtacagaatgtgggaagaactttagaagtggctatcagctgactgtgcatcagagatttcatactggtgagaaaacctatgaatgtacgcagtgtgggaaggcctttatatatgcctcacacattgctcaacatgagagaattcacactggtgggaagccgtatgaatgtcaggagtgtgggagggcctttagtcaaggtggacatcttagaattcatcagagagttcatactggcgaaaaaccatataaatgtaaggagtgtgggaagacttttagtacgcgctcanatcttgttgaacatgggcgagttcatactgatgagaagccatacatg

SEQ ID NO: 85962 - DNA, 388 bp, Homo sapiens
  misc_feature (1)...(388): n = a,t,c or g
aattgagtcacactggagcaaaacgctataagtgtaagcagtgtggcaaaggcttcaatttgcccagttccattcgatatcatgaaatgactcacactggagagaaaccctatgaatgtaagcaatgtgggagagctttcagatctgcctcacacctacgaacacatgaaaggactcacattggggagaaaccctatgaatgtaaacagtgtggtaaagtctatcgttactggagtggccttcgaatacatggactaactcatattggaaaaaagccttatgaatttaatgaccgtgggaaatcattctatagttccaatttctttctaaatcataaaagggtccacactagagtgaagacatatgaatgcaaggaatgtgggaaagn

SEQ ID NO: 85963 - DNA, 408 bp, Homo sapiens
tacttaccttccgggatgacccccgcgtccggacaagtataaaattaccttaaaatatccacactattttccttttatgaagaaatgttgtatccctgaaaccagaagaaggatggaaatggcttttaatacaaggtgcaaagaggaaaacaccataattttgcagcagctactcccactgcgaaccaaggtggccaaactactcggttatagcacacatgctgacttcgtccttgaaatgaacactgcaaagagcacaagccgcgtaacagcctttctagatgatttaagccagaagttaaaacccttgggtgaagcagaacgagagtttattttgaatttgaagaaaaaggaatgcaaagacaggggttttgaatatgatgggaaaatcaatgcctgggatctata

SEQ ID NO: 85964 - DNA, 584 bp, Homo sapiens
cttctcacctggattgcaggctcactaagaagagagcctcgcttcctgttggcatccaggctggaggctggaatctgtagggtaactttgtattctgttcttttatccagctcctcagcaatgtaattagcttctctcaccaatagattggccttaacaatttgttccctcagcctcatcaggctgttattcaacgttgcttctctctcctcagcccactgtcttaagcgttgctgagcgctgggcgagtggaaagaaaacctgtccatgctccggcagttctgcttctcaggagacagccttctccggagctgctccaattcgtgctcatacataagcctctggcgctccagtgcagatcgtttttcttcttcatgctgttgttctaggctgtttaatatggactgcatcggatcattgctgcccagggccttcatggtgacctccatctgtgcgtattcgtaattaaagttaacttcactggacacctcgctggaggagtctccgtctacatccagctgctcagaactattctcgttcttcatggagggatcctggtcctcatcctctcgttctgctttctt

SEQ ID NO: 85965 - DNA, 229 bp, Homo sapiens
  misc_feature (1)...(229): n = a,t,c or g
acgctgatttattctgccactagaacaggttttagggtcctgcaaaaggctagctcggcactacactagggaatttgctcctgttctgtcactcgacatggtctttcttggtattaaaggccaccatttgctcctgcaactgccttctgctcaaagacaaccagattggctccgtgaccgagtcttttcaggcgtgcaagctggcccaggccaatggttgcggcgtctn

SEQ ID NO: 85966 - DNA, 424 bp, Homo sapiens
  misc_feature (1)...(424): n = a,t,c or g
tcgacccacgcgtccggttatttctgattttttttgctagtataaataatgctgacaaacatcgttttgataaatctgtgtatgcatccctgggttttttttagaattaatttttagaactagaataactaggtcaaagacaagtacatgtgtatttttaatgcttttggtaggtttttctaggccttataataacacttatcagaataaaataattgtgtatttacctgtttttatctcacttgtctataagttctttcagaacaaggacttgctcgtgtttgtatttatagcatttgggatagtgcctagcatattacaaatgtcaataaatgttgaataaatgaatggaaagaaatattggtaaggtggttcacggcaattgaagtttagccataagctaatatagatcctatgtaaagcn

SEQ ID NO: 85967 - DNA, 424 bp, Homo sapiens
cgacctcaacactcttcaggaacacattttatgtttttatggatttgcaaaccctgcatctggagataggaatgcattcttttgtccccattgctatatgggggttctcactgactcttccctggaagagcatattatacaggttcattgtgacctcagtggctcccgatttgggtctccagtgcttgggactcccaaagaaccagtagtagaagtctattcttgttcctattgtacaaattcgccaatattcaacagcgttcttaaactgaacaagcatatcaaagagaatcataaaaacattcccttggccctgaattatatccacaatgggaagaaatccagggccttaagccccctatctcctgtggccatagagcagacatctcttaagatgatgcaggcagtaggaggtgcacctgca

SEQ ID NO: 85968 - DNA, 489 bp, Homo sapiens
gagctacagagccagcaggcctgcacccacaccaaggagacagaacagctgcgcagccagctgcagaccctcaagcagcagcaccagcaggctgtggagcagatagctaaggcagaggagacacacagcagcctgagccaggagctgcaggccaggctgcagaccgtcactagagagaaagaggagttgctgcagctgtccattgaaaggggcaaagtgcttcagaacaaacaggcagagatctgccagcttgaggaaaagttggagatagcaaatgaagacaggaagcatgcgctggagcggtttgagcaagaggcagtggctgtggacagcaacttgagagtcagggagcttcagcgcaaagtagatgggatccagaaggcctacgatgaactcaggctgcagtctgaagccttcaaaaagcacagcttggatcttttaagcaaggagagagaactcaatggcaaactccgccatctctctccatag

SEQ ID NO: 85969 - DNA, 454 bp, Homo sapiens
gagcgggcacggcagcagcagtggcaccaagtccagcaaaaagaaaaaccagaacatcggctacaagctgggccaccggcgcgccctgttcgaaaagcgcaagcggctcagcgactacgcgctcatcttcggcatgttcggcatcgtggtcatggtcatcgagaccgagctgtcgtggggcgcctacgacaaggcgtcgctgtattccttagctctgaaatgccttatcagtctctccacgatcatcctgctcggtctgatcatcgtgtaccacgccagggaaatacagttgttcatggtggacaatggagcagatgactggagaatagccatgacttatgagcgtattttcttcatctgcttggaaatactggtgtgtgctattcatcccatacctgggaattatacattcacatggacggcccggcttgccttctcctatgccccatccaca

SEQ ID NO: 85970 - DNA, 632 bp, Homo sapiens
ctcctcgcagttaagatgttattaggtacgggggcttgctggaagaaggtacctaagtgcctctggagcccaggccttggagtgcagctgtggcgtggcctgtcctccctctaatcccactgcttttgtttccttgaataggtctcagtccggcacaggaaaaacagccaccttcagtatctcagtcctccagtgtttggatattcaggtaatttgccattcttaaaacaaactgttatgtaattctaggaaatacttgctttttcttctgtaactacagtgttcaaaaagtacaatttaaaattttctagtatggattgactcaacaaatttttacacagagtcttagttgtacactaatatatgcactaatattctgtcatgattttctatttaactagaggaagctcttgtctgcagacgaggatgctgacacattaagttattgttggatttgcaatttaaatgacaatatttgctaacctgtaagagatgagaagtatgattaatatgagagagtatttctcatatagatctgagtgtgaattactacaatccactttgataatactgcggattctctattttctgataaattatttcaccagggtcgtgaaactcaagctttgatg

SEQ ID NO: 85971 - DNA, 119 bp, Homo sapiens; identical to SEQ ID NO: 85074

SEQ ID NO: 85972 - DNA, 522 bp, Homo sapiens
ttttttcaattttaataatctactttatttaacccaatatatccaaaatagtaccatttcaacaaataattgataccgtgttatcagagctgagatatttcaccttcttctttcctacggagccgctgagacgcagcgtgtattgcacacctgtctgcactagccttttccaaggctcagtagccgtccttggctaatgaattagacgtcacacacctagatcttcccctaaaactgaaatcatttctctctgcagagaccctgggggttcctggcccgtagagaggtgtccaagctgcagatgatgttcaggccttgggacaggtggctcaagcggtggggcccgtcctcttgactgtggaggttctgcgagctccgcatcctctcgtcctggctggggctcaggctggaggccaggtgcgggtcagctgacatccatgtggagtcgctcatatcaaaatcctcgctgctcacagaagtctcatcctgggctggaagcgaggcggagatgggcggtcggga

SEQ ID NO: 85973 - DNA, 391 bp, Homo sapiens
tcaccagaagaagtggtcttgctgccaatacaggctcgactttttgcctgcgcggatactactggcaccaaaagccttacatggacatatgcagcatatgttggggaacatgatctgctcaaggatggatgtggacagtttccatatgatgcaaacatccagatacactgggtatcatttctggatgggcgccaaagagttttgcttttcaccgatgatgttgccttggtttccaaagcactgcacgcagaagaaatggaacaggctgattatgaaataaccttgtctctccacagtcttgggctttcactggttaacaatgaaagcaagcaggaaggttcctatattgcgataaccagttctggtgttggttgggaggagaaaccaaatc

SEQ ID NO: 85974 - DNA, 670 bp, Homo sapiens
aaggagaaaagagtgacagtacaattgcctacagaatccatacagaagaaccaggaagataagctcaagatggttcccaggaagcaaagagaatttagcggatctgacagagggaaacttccaggaagtgaagaaaaaaatcagggaccatcaatgattggtcgaaaagaagagagattaataactgaaagaaaacacgaacatctgaagaataaatcagcaccaaaggtcgtcaagcaaaaggttatcgatgcacatcttgattcacagactcagaattttcagcaaacacaaatacagaccgctgaaagtaaagctgaacataaaaaattgccccagccatataatagtctgcaggaagaaaaatgtctcgaagtcaagggcatacaagagaaacaagtcttctctaatactaaagattcaaagcaagagattacacagaacaaatctttcttttcctctgtgaaagaatcccagcgggatgatggaaaaggtgccttaaatatagtggaattcttgagaaaacgtgaagaactgcatcagattttgtcgacagtgaaacagccttgatcatatcctttcattcgtggtctcttacacttcagatacatcttagttactttcccattattcatgaactgtattatcagccttattatgtagaatctcg

SEQ ID NO: 85975 - DNA, 559 bp, Homo sapiens
aatacatgggccgtgatgtgcatatagcagtgagggagggttcatgaaccaggtggatccttatcctgtgcgttcgggtgggcgccacactcgatgaggtgctccaggcagtcggggtgccgggtgcgcactgccacgtgcaggggggtgctcccgatcttgtcccgggcattgacccgggctccctggttaagcagctgtttgaggatgaccagatgtcctccgcggcaggcccagaacacaggtgtcctgtccagcaagtctcgcgcgtccactgtggcacctgccaccagcagcttgttcaccagctggctgtgacccttcagacaggcccagtgcaaggcggtgcggtggagcttgtcatgggcattggggtcccctccgtctgtcaagtacttgtcaatcaggtactcctggttctcagcagctgccttcaggaacatctccaggcccacaggctccacctgggcctgggactgcggcttaaccaggggctcaggtttcctgggggggactctgtgtctcagtcgctttttccgtctttgaaccaagttttcca

SEQ ID NO: 85976 - DNA, 524 bp, Homo sapiens
ggagcggaagtgtatgcaaggaaaatatgcaggagctatggaatctgaaccctgtgtctgcactgaggctgattttgattgcgactatggttatgagcgacacagcaatggccagtgcctgccggcattttggttcaatccatcctctctgtcaaaggattgcagcttgggacagagttacctcaatagtactgggtacaggaaggtggtttccaataattgcactgatggcgtaagggaacagtacactgccaaaccgcagaagtgcccagggaaagccccgcgggggctgcggatagtcacggctgatggaaagctgacagcggaacaaggacacaacgtcactctcatggtgcaattagaagagggtgatgttcagcggacactcatccaagtggactttggcgatggtatcgcggtgtcttacgtcaatctcagctccatggaagatgggatcamacacgtctatcagaacgtsggcatttyccgtgtsaccgtgcaggtggacaacagtctgggttctg

SEQ ID NO: 85977 - DNA, 356 bp, Homo sapiens
agtgtgctgacactactgctcactgaactcccactagtgctctccctttcagaagtcacttctatcggattttgctttacagtctccaccactttatttatcagcacaccttctgtagcaggtacagcattttctttttcatagaactcagggcaagtccatctaccttttttaaagggctcagaactagaatctaacttcacaactctgaacctcgaagtgttaactgttggttgttgctgctgacttgaaaccgatcccccagtcatccctgcagctgcattaggaacactgctaacagcagcagaggaagaaatagtaccattgcccatgccactcaagatattcacattaac

SEQ ID NO: 85978 - DNA, 222 bp, Homo sapiens
acggggtttgggacccacccgggccacatgggttaaccccccttttttcttaaaaaaccaaaaattacccgggcagggggcgcgccccccttattcccacttctttagaaaattaagccagaaaaaggccttaacccggccaggcgaggggtccaataaaccaggccccccccaggccctcccccctgggggaaaaaaaagaaaccccctttaaaaaaaaaa

SEQ ID NO: 85979 - DNA, 435 bp, Homo sapiens
acaacccagatgacttactcaatgccttgaatgagggtatcaatcgtgctgatgtcatcatcacatcagggggtgtatccatgggggaaaaggtatgaaagatagggctcgggaaaatgtatctgctgtaatgttcttgcatatgggcgattaactgtggtctggtaggcatctgatattcataacgaggctcccacaaagctgaaaatccatggggcttcagaaattactggtctctttaaaagggatacaatgtgggtaggtcagggagcttaccctcaggagcaacctggagaatcccacaacttacagaatggtttttgctattcctgtggaaacttctgacctgtttctcactctattttactacattaggacatcctttatgcatgatatttaccaccagggtaaaactctaagatccttccttctact

SEQ ID NO: 85980 - DNA, 395 bp, Homo sapiens
ccggacgcgtgggttcagagcagcatgggacttgaacttttgtatgttcatgactctttattgccccatgacaccctagcaggtctaatgtgggaccccgtcagcttaccgtatggaatacttccaatctgagtcatgacaaccgacggaaatacatctttagtgatgaggaaggacaaaaccagctgggcatccggatccaccaggacatccccctccctccaaggagaagagagctccctgccttgcggaccaccaatgggaaagcagactccctaaatgtatctcggaactcagtgatgcaggaactctcagagctcgagaagcagattcaggtgatccgtcaggagctgcagctggctgtgagcaggaaaacggagctggaggagtatcac

SEQ ID NO: 85981 - DNA, 430 bp, Homo sapiens
  misc_feature (1)...(430): n = a,t,c or g
agacgnncnnatttcggtcgacccacgcgtccgatttgatagacaaatatcgaaaacaccaggggctggtatttattctgtcctataacagcaaaaacaaaggatgcattcaggacatagattaaacttaaattggcaataggatgacctgatggtaattgccgaaatgggattctaactctgtagtggagctaagtgaaactatgaatttaaatatgctgttttaattattccagagcattccccatatgggccctcaccattgggttggccttcatctgaaacaagagcttttctctctcctccaactttggtggagggtccactcagactctcacctttgcttccagggggaggaggaagaggtatattgtttaaacatctttattactctaaacttcttccttactttatattttcatctcaactt

SEQ ID NO: 85982 - DNA, 398 bp, Homo sapiens
cttacgcaaagaagagaaaattgcaatcatgagggagaagcacacagctttgatgaagcccatcgtatttgctttggagcatgtgaggagtatcacagcggctcctgcagaaacacctcatgaaaaatggtttcaggataactatggtgatgccattgaaaatgccctaaaaaaactgaagactccattgaaccctgcaaagcctgggagcagctggattccatttaaagagataatgctaagtttgcaacagagagcacagaaacgtgcaagttacatcttgcgtcttgaagaaatcagtccatggttggctgccatgactaacactgaaattgctcttcctggggaagtctcagccagagacactgtcacaatccatagtgtgggcggaaccatca

SEQ ID NO: 85983 - DNA, 403 bp, Homo sapiens
attttctagagaagtggaaaataactgcaaaacaccataacaacccaatatatttttatttaaatggactctttttttccataacaaccctcctgacagcctccaccacaagcctttgagtgggtttcccaaagtgcctttcatgggacagcagtccttgtgagtaacatctgaataatgtcaacctacctgtattttacagcaatactgtgcagcaggcaacaggtcttttatttcaaaacgggtgtctgtcccatgataaatgagttctaaggaatcttcatcttctccccattccaacctgtactctgagatgtcagcaccacaactatcaagactctggaaaggcagaaatggaagtatttaataatgccactgagaagagaatcctactgtgcttgta

SEQ ID NO: 85984 - DNA, 402 bp, Homo sapiens
agagaagtaggttccaggaaacaaaaaggtcagaggtgtaccctgtgaagacaacagcaggtgtgaaagccaagaaactgcagcgctcagttcactcaagaaacaaaggggttcaatatggatggactgcagatctccagatggaagcggggcatggccaggccagcatcctatggctctactttgagacgggtacctgggtgtatcctgtgtttgccaaactcagtcttttgggtctagcagctttattctctttaagggagatattcatcgcccgtaatggggtagttggtgagacgctcacccattgtaagagggttatctggcccaggcatggttttaaaagtactaagagatcccccgagtatcttgaggcgcagagttcgcaggtgggagaaaaag

SEQ ID NO: 85985 - DNA, 376 bp, Homo sapiens
agaccacagaccagagcttgcaggctggaggccttttttatgtcatgatgacgccccaggatgtgctgcagacaggaacacagaggacgatcgccccccggacacacccttactctccgtatgtgcaggggacacctggagggcctggtgttgaaatggaaggaagaggggtttctggagtaaaagctgggcagttagcatgaagtgggcacatgggggaaaggtttttttctttgcctggttctgctgctctagggcacataaaggatcatgtcttttgtttttgcagatggatttaccttgcaaagataattttcaaatctaatacttagcagatgcttgggcaaacagctctgcgataatacatgcccccttt

SEQ ID NO: 85986 - DNA, 394 bp, Homo sapiens
ctcattcaaatatcccacgggcatttttaccaggttttttctacttccaaattccataatcaaggctggttttggtaccaaaggtttctttttagaagataagaaaacgaagatagcttctaccaaaatctgcaacaataagatactctggttgatatgtagcgaatttatgtccttatgggctggatccaacaagaaaaatatgaatcagagtcgaatggatgtgtatatgtcacatgctcccactggttcatcagtacacaacattctgcatataaaacagctttaccactctgatgaattcagagcttatgactggggaaatgacgctgataatatgaaacattacaatcagagtcatccccctatatatgacctgactgccatgaaagtg

SEQ ID NO: 85987 - DNA, 419 bp, Homo sapiens
cccgggtcgacccacgcgtccgcccacgcgtacgcccacgcgttcgctttgttgttattgtcactatatgtgatgtctgatagtttctgaattagtactatgaataactgttcatactgatgattgcagttttacttctgtagcattccttttctactgttcagtaaaattcattcaaactggtaaagacatggaaggtttgcagggtagaaaaaattactttggacaaagaaattaattgtgggactaaaaaccaaggggatggcttttggtttctgtctctggtataggggataattctatttaaagaaaaagccaaggaagcattgggtaaagccaaagatgcaaataatggtaacctactattaaggaacaaagaagtgacttgggaagtactagaaggagaggtggaaaaagag

SEQ ID NO: 85988 - DNA, 751 bp, Homo sapiens
gcgaccgccgtccccagtcacaggccagcagtcagtgcggcgggaagatgtccgcgcactgatgcaggaatgagctccaccacctggttctggaacaccatggtcatgggcatgctggtctcttccacctcgggccgcagcagcgtgggcccgaacacaatggccacgctctgcaccgacatgcggttctgctcgccgtgctcgatcacccggcagaggtgctggaagagcatccgcagagtgtcgtggttgggagcgggcagcgagcgcaccaagtcacgcacacagcggctgcgccgggcctggtcctgcaacttgatggccgcaatgaactggcggaagtgcgagaaggggaagaggggctcgggcagctcccgaaagaagagcttcagggctccggtgataacgtggacgtcctcccagcgcccgtcatccaggtcaaggcgctcatcgtggtccaccttatagcgtagcttctggatggtggccaggtttccactgatgcggtacagcccgtcgatgtccagcccgcgggcctcgacggcgcggatgcactgctgcacgaagcgtggcacccggctcctctcgcgctcacacagcgcggccagcgcgcagccgaacacctggtctttgatgtagcccttctcccgcagcgactgcagtgtgggccgcctctggaggaacttgcggagcttgtgccggaccttgctcaagtcgctctccaggcccacggggcccagggcgggcgcgg

SEQ ID NO: 85989 - DNA, 393 bp, Homo sapiens
aacagaaagaccactgggacaagatgaaattgaagagctgcgggaagcatttcttgagttcgataaggaccgagatgggttcatctcttgtaaggatctggggaatctcatgaggacgatgggttacatgcccagggagatggaactgattgagctcggccagcaaatccgcatgaacctgggtggccgtgtagactttgatgactttgtggagctgatgacccccaaattgcttgcagaaacagctgggatgatcggtgtccaggagatgcgggatgccttcaaggagtttgacacgaatggagatggggagatcaccctggcggagctacagcaggccatgcagagactcctgggggagcggctcaccccccgggagatctctgaggttgt

SEQ ID NO: 85990 - DNA, 395 bp, Homo sapiens
tcaaatactaagagaatgattttaagaaaggttctcagtatataggcaattcaggtatcaaaatgtgtcgtgtgtttgagcgtctgtgtgtataactgtatataatcattccccaacccatacccttaattccctcctttctatagagataatggctaaatataaaataaaaattctaaaattgtgaatacaatcatggccaagggcacctagcctcaaataatcaccccacataataaaacacagctttgtcagaatgcctaatttaagaataataatattttagagaagaataacccatacctcaaactgtgttacagcagcatagcgcacctctccagaaggggtagtatatttacttctatagaaacctttcattttgtcattcagctctc

SEQ ID NO: 85991 - DNA, 393 bp, Homo sapiens
  misc_feature (1)...(393): n = a,t,c or g
cccacgcgtccgaaattctctgagttcagggagatggtttttttattcaggtaagatttcttatgtattttggcagacattttgtatttagcgtatttaaggctgtcagtttacaaaaattaactaggaaggaatattacatgcattgagtttagttcttattcacaggaatatataaagtcataatatgcatatttcattttttagggctctcttgctacttgccagttatctgagccattattgtggttcattttgagagtattggatactagtgatgccttgaaagcatttcatgatatgggtaagataatatttcaataactatcatttaagtgtagttatgtgatagtatgttacattttcatttttgtagccttttgtggaagttan

SEQ ID NO: 85992 - DNA, 694 bp, Homo sapiens
gcctcccatggggggtttgggtgggacagcaggcaggtaggctgggaggtctctccatggtgctggtgacagagcctgggtgggcatctcgcccacagactggtcccccaaggtggtggagctgtgtaagaagtaccagcagcagaccgtggtagccattgacctggctggagatgagaccatcccaggaagcagcctcttgcctggacatgtccaggcctaccaggtgggtcctgtgagaaggaatggagaggctggccctgggtgagcttgtctcccacccatagttgggagaaatcacaagaaccagggaccatggtgtctcctgagttctgaagtgtgtctttgttgggtcttaaggcttggaactggaatccccctgggccaggcgtggtggttcatgcctgtgatcccagcactttgggaggcgaggcaggaggattgcttgagcctaggagtttgagaccagccagggcaacatagtgagatccatctctgcaaatacaaaaaaaagtagtcaggcatggtggtgcatgcctgtagtcccagctacttgggaggctgaggtgggagaattgcttgagtccaggaagtcaaagctgcagtgagctgtgataatgcgactgcactccagcctgggtgacagagggagaccctgtctcaaaaaaaaaaaaaaggaagaaagaagaaagag

SEQ ID NO: 85993 - DNA, 729 bp, Homo sapiens
caagaggcggggcatcctggaggtgagggccactgtccccgcgctcaccatccgtcctctgttcagggaatgtgtgcccggcaaccatgctgggctgacactgtccagtgctgaggaacaagccagccatggtcacaccctcccccctctccctcttcctctctctgcccacagaccccaggcctctcgccacagcccaggcagtgtggagcctgtcaccaaatggaggcaccctttggctgcaggctgtcgtccacattcttctgcacttcctctatgtccccatccgatagtacggcccctctggacagctcatgttcacgtccccatgtcctgccccgacagtcccagggtgccaagagctggtgtcaccgcttccattttacagatgggaacactgacgctccaggtcagacagattggagactccattctaactggaagggactccaggggccagtcggtcttatcccatggagacccagggctggaggagtgacttgcccaagatcacacagcaagttaggagccagctctctgatctcagtcacagatgttctttctgttgccctgggggcctcactgagccacacttgcccccacaggtgctcccctgtggggtacaactgtgctcagctaggcagcacaaatacaatgtcaaccagctcagcatcaataccactgtccactgcccctccctcacgaaggccaggttgacatcccaccgtt

SEQ ID NO: 85994 - DNA, 418 bp, Homo sapiens
  misc_feature (1)...(418): n = a,t,c or g
gcgacccgcgccgaattnagactgagncacgcgtccgagatcaagatggccttcgtgctgtggctgttttcttcctacaccaagggcgccagcctgcttttcggtgagtttgtccacccgtccctgtcccgccatgagaaggtaccccagggggaagcgggaagggaggcttaagggtgggtatgagggaaagagccctggacctgggatttaggatgctggggacaccggggatctatcccagtcctgctgctattgaggggcaggaccttgaccgggcccagcctacctcatcttctgggataatcaggtgggggtacacatgaatgacctttgaggatggaaattggtttgagggtattggtggcgggagtcggagcatggacactcatggaggtgtgagcgggtggctgccctt

SEQ ID NO: 85995 - DNA, 435 bp, Homo sapiens
ttcccggctcgacccacgcgtccgcaccgacctgcgggccaaggtgtctcacctggccatcagcaccttgggagacctcttccaggccttgaagaagaatatggaccaggaggccgaggagatcgcccgctgcttgctgcagaagatggcggacaccaacgagttcatccagagagcagccggccagtctctgagggctatggtggagaatgtgacccttgcccgctccctggtggtcctcacctcggcgggtgtctaccaccggaaccccttgatccggaaatacgcggctgagcacctctcagctgtgctggagcagatcggcgctgagaagcttctctcgggcaccagagacagcacagacatgttggtgcacaacctggtgaggctggcacaggactccaaccaggacaccagattttatggccggaagag

SEQ ID NO: 85996 - DNA, 412 bp, Homo sapiens
  misc_feature (1)...(412): n = a,t,c or g
tggtcctacaggaaaggctggataatttccaaaggaaatgcatacagttagccagcagcacagaaggaaaagtcgacaaactcctaatgagaaacctcttcattagttatctccacacaccaaaacacaaacaacatgaagtgttacaggcaatgggaagcatcctgggtatcacaggggaggaaatggagccgctgtttcaggaagagcatggcactgctaccaggtggatgactgggtggcttgaaggaggatcaaaaagtgtccctaaaacaccactggggctgaatcagcaacctgcccttaatggttctttttcagaactttttgttaaatttcttaaaacagaatctctttcatctactcttccaacaagncttcctcctcataattctccaggaaagatcaaact

SEQ ID NO: 85997 - DNA, 442 bp, Homo sapiens
  misc_feature (1)...(442): n = a,t,c or g
tccggaattccncggtcgacgggaggcaggaggcggcatcactgggtgccttcctaagaaaatccactcccctaggcctcctgagacctctgctctacccgactccctgtctggggagagtgagtctcctctccaaagccccaccaaggaccgaaggagaagtacgtcacctggcacttgccgtgcacgcagagatcagtctcgtagggcccgcagggtgtaccgtccaggaccctgtcggccaccagcagtggggactccttcccgaggggcgagcagtagagttcacatggcttatcgtcaaccaccacggctgtcagcaggcctttcttcttggggctcagccggtcgtgtgcctggcactgctggtcccggaagctgggcagacccttggggcagggcaggttctcgcagaccgcatgttctacactggcacccgggc

SEQ ID NO: 85998 - DNA, 409 bp, Homo sapiens
tttgacagcgtccggaccgatataaccgggaccatgcctcactcaatccagctgtacagccctggcttctgtaacacgttgcggcctgtggacgataaggagcagaggaaggagaacccctcacccctcttctccatcaagaagacgaagcagctgcggagcgaggtctacgacccatccgaccccaccggctccgactccagcgcccctggcagcagccccgagaggtctggccccggcctcctgccctctgagatcacacgaaccatctccatcaacagcccgaaggcccagacggtgcaggctgtgcgctgcgtcacctcctacacggtggagagcatctttggtacagagcccgaaccccctctcggaccgtcctccgccatgtccaagctccggggtgcagtgg

SEQ ID NO: 85999 - DNA, 462 bp, Homo sapiens
ttggaattccctgggcgacgggagaagccggtccctgagacatgtggcgcttggaaggaacttcaacgtccggtgcaaggagaccctggacgacgtcctgcaccggattgtccagctcatgcaggacgacgattgtcctcttcagtctctgtcggtggctgagtctcggctgaagctgggtgccagcgtcctactccgggccctagccaccaatcctaacctgaccgcgctggatatcagcggcaacgccatgggggacgcgggcgccaagttgctggccaaggcgctgcgggtcaactcgaggctccggtctgtggtctgggaccggaaccacacatctgctttgggtctgctggacgtggcgcaggcgctggagcagaaccacagcctgaaggccatgcctctgccactgaacgacgtggcccaggcgcagcgcagccgcccggaactgacagcacgtgc

SEQ ID NO: 86000 - DNA, 457 bp, Homo sapiens
  misc_feature (1)...(457): n = a,t,c or g
cggaattcccggtcgacnnnnncccgagaatggaggagaatgttctggccataagagccaccatgcaaatgcaagtcgggtgaggtgggggcaggggcatccaaggaagcaggagccaaggcttccttcttcagggcctctgactctcatccacttctgtatccctctagtcttctctgctttttgacgctagttccagagcttcaggtgggagaaggtggatactcctgggcataggggttgtctggcccatcctgttcctgcccccactcacccctcccaaccatcatttccagggcccagctggagacagccctgaagtggaggaactatgaggtgaagctgcggctgctgctgcacctggaggaactgcagatggagcatgatatccggcactatgacctggagtcggtgcccatgacctgggaccctgtggaccagaaccccaggctggtcc

SEQ ID NO: 86001 - DNA, 441 bp, Homo sapiens
  misc_feature (1)...(441): n = a,t,c or g
ggaggcaggaggcggngaggtcgggtgccgttgggaaggaaccgagtcgggaagaggcgtgggagcgaggggcaccgaggacgctggcccggactgcgggggcagctcgcgggagaccgatgggcggcttggaagcctgcaggattgcagatgaggattgagttcggaatggagtggagaatgatgtaggatggaggaaagtgaaggaaggggagggggaacagaggaaaatgtgggaggagtggttgggaatttgtgagtagcaggcaggaagggatgcggaaggctgggtaggggctgcagaggattggaatgagcgggaaggttagcaggaatcagagggaagtgggccgagagctgaagggttcggcaggagtgttcattaaaaggaactggtgacttgacatgtcccttcgctccggntcctgatgtctcccatat

SEQ ID NO: 86002 - DNA, 478 bp, Homo sapiens
tgatcgtttcggtaccggtccggattcccggtcgacaatggcctgtggcagaggcggatgctcagggaggctggggggcagcatggccctcccatgcccgtggctgcgtccccgtccacttgcctgcccacctggccaccctacctcacagtgttcccggtacaggacctggaaggctttgatgtccccgggcccgacgccctcaggcagcaccttgccctggaggtcgagctctgtgaagtcagggaggctccgagaggcatctagggggccggggggaaccgtgaggcccttcatcccccttgcctgcccaccctggggtcctactgacctgtccgtttcccatcagactggggtcccccatgtgccggtgagacaacgctaggtggggtgagcgcctggcccgggcccaggacgggcccaggagtgagggcccacactcctctggcagagaggacaggagggtcttgtgccagcc

SEQ ID NO: 86003 - DNA, 516 bp, Homo sapiens
tttcgtcctgggtgaagttctaagagtccttgagcatcctggattctggtagtgagtggtgttttgggggtgctaggatcctggggacaattgggagctccccaagatgttgggtgcctccggaataacctgaagacaaggttggaggatgggtgtggcaggttttggtggtcatggccccagcccctatctggctgtgctgggctgcaggacaggttgtgcggcgtctctgtgcttctactgaggactgtgaagtggaccccagcaaatgtccagcctcggagctgccagagcaccaggccagacttcggaacagctgcgaggaggtcttcgaaaccattatccattcctacgagtgagaatcagggccccagcagcttagcccacccctgcttaccatgctagccccgacctccagtttagggtggccagataaaatacaggagacactcagttaaatttgatgcaataattgggaccatgcttatactaaaaaattactcatttgaaccaggg

SEQ ID NO: 86004 - DNA, 447 bp, Homo sapiens
  misc_feature (1)...(447): n = a,t,c or g
ttgcctcgttccggnnnaattcccggtcgacgatttcgaccactaacccgccctgcagcgtctcagccacaggcctaacaagttggctcccgcctccgctggccatcgcattggaaggctacccctggctctcccaccgccccagtaagattggtcactgtgaggaagccaaatcggatccgagagtctttttctaaaggccagtactggccacactttctcctgccgccttcctcaaagctgaagacacacagagcaaggcgcttctgttttactccccaatggtaactccaaaccatagatggttagctccctgctcatctttccacatccctgctattcagtatagtccgtggaccaatcacaccagcatcgtatgggagagtgtaagaaacatgaatctgcatgtcaacgagatccccaggtgagtcgtaagtaggtttggga

SEQ ID NO: 86005 - DNA, 792 bp, Homo sapiens
gcggccgccgcggggtcggccgcggacttggcctttgccttggctgcgtccccggaggcgctgtcccggcgcctcgctgccttcctggcctccagggcccggtccctggacggcggcgctgcagcgggcggcgcggggccggagtcctggtgagggccccctctgtggccgagggcgccctcgctgccctggcacacgagcttgtgcttcttccagtcctggcgctggcgctccttgcagcagaaggagctgcggctgcagcgcagcaggcttctccatcttcccgcacagctcgcagtactgccggtctcgctcgctcgagctcggctcgccgggcctcgcagctgtcattggccatggcgaccgcagctgagcaggaggggtgcggccggacggcctcgcccgaggctccagcctctgtcttccaggttctttctgcaagtcttccaccagggccactgcctcctctccactctccggatgctgctgtctgacccagatctggatctcctggagaaggacagtcgggaactgttctaggaccagcaactccaggatctgctcttttgtacacttctctggccttagccactgacaacagagcttctggagctggaggagggcctctcggggtcgtgatgcttcttggtaacggaaatgccaaaagctctggcaggatgtctctggtccagggtaattcccttgaagggaaatttcctgctcccagtgggaatcttcttccagtttaactatttggagatcttgtactgaaggagtctggatttgttggtc

SEQ ID NO: 86006 - DNA, 448 bp, Homo sapiens
cgcggaattctcgggtcgacgatttcgtgtgactgtgagcaggtcccttcaccgctcagagtctcggttttcccatctgaaaaatgggaacagccgtctgggtccccaaagagaaagagaagagggacaaagccagccaagagggaggggacgtcctgggggcccgccaagactgcaccccctccttgaagagcttggtcgccactgggaacctgctggacttagaggagacagctaaggccccgctgtccacggtcagcgccaacaccaccaacatggacgaggtgccgcggccacaagccttgagtggcagcagtgttgtctgggtgagtggttgtgtggccagcagatcggtgatcctcagcctgacctctgggtgagcctggggctgctccagggaccaggccctgggacccgagacttgtgggcctctgggaggaccaaaccc

SEQ ID NO: 86007 - DNA, 856 bp, Homo sapiens
tttcgtggaaagagagatgagaagagaagcagtgtggccaccactgtccctggagcccccaactccctgttgagcccagtgcctgctgtcccagactgggacagggcagctccctctgggtcctgggacagccacacccagggcgcctcctctttccgcagcctgcagagcaattccatcagtgacgcaggagtggcagcactgatgggggccctctgcaccaaccagaccctcctcagcctcagccttcgagaaaactccatcagtcccgagggagcccaggccatcgctcatgccctctgcgccaacagcaccctgaagaacctggacctgacagccaacctcctccacgaccagggtgcccgggccatcgcagtggcagtgagagaaaaccgcaccctcacctcccttcacctgcagtggaacttcatccaggccggcgctgcccaggccctgggacaagcactacagctcaacaggagcctcaccagcttagatttacaggagaacgccatcggggatgacggagcgtgtgcggtggcccgtgcactgaaggtcaacacagccctcactgctctctatctccaggtggcctcaattggtgcttcaggcgcccaggtgctaggggaagccttggctgtgaacagaaccttggagattctcgacttaagaggaaatgccattggggtggctggagccaaagccctggcaaatgctctgaaggtaaactcaagtctccggagactcaatcttcaagagaattctctggggatggacggggcgatatgtattgccacagcatcgtctggaaaccacaggttccagcatatcaatctccagggaaaccacattggaa

SEQ ID NO: 86008 - DNA, 649 bp, Homo sapiens
tttcgtgctttacccgtttgccatctcactgatcgagagcgttcgtacctatgaacggacctgcgagaaggtggaggagcggaacaccatttcccttttggtggctggcttgaaaaaggaagtgcaggccctgatcgcagaaggcattgcgttggtgtgggagtcctacaaacttgacccatatgtacagcgcttagcagagactgtcttcaacttccaagaaaaggtggatgatctgctgatcattgaagaaaaaatagacctagaagtccgttccttggaaacttgtatgtatgaccataagacattctcggaaatcttgaacagagtccagaaagcagtggatgacttaaatctgcactcctattccaatttgcccatctgggtcaacaagcttgacatggagattgaaagaatattgggcgtccgtctgcaagctggcctgagagcttggacgcaggttcttcttggacaagctgaagataaagcagaagttgacatggacacagatgctccacaagttagtcacaagcctggtggagagccaaagatcaaaaatgtcgttcatgagctaagaataaccaatcaggtaatctacttgaatccaccaattgaagagtgcagatacaagctgtatcaggagtcgacc

SEQ ID NO: 86009 - DNA, 472 bp, Homo sapiens
  misc_feature (1)...(472): n = a,t,c or g
tttcgtatgatttgagaagacagtgacgacacaaatatctgtaaaataaaaagatatctctcttattgcaacagtaaaagcttttgatcactaacatttcttgtgacaagaattatcattgatacagttaatacatatatacacacaaatacatactaataggtagtatggaggcagagtttttaagtagctgtcaaaagcctgtcgccacttcagatttggcttaagcttgtgaactttaaacaagtcatctaaaagaggaagtaaaactgggtagttgtaaggcatcacaaagaggtttacacaagttaaagttgtactggcttttaaataaccaaatggatatccaagttcattgtactttccactgctagtaacaaatacctgccagcaggtatggggagactttcgttccaagatatactgagttaagggcgaaggttcaagttcatatttgtcanaaggaagtttg

SEQ ID NO: 86010 - DNA, 463 bp, Homo sapiens
tttcgtacaaacaaaaatgggctttgaaattgagtaatgaaatgtggttaacagttaactgatgtgatgtcattaacactttggggaatggggtgggggtggagatattctagacatgcttagttgaattgagtgagtttcattcctgactggcataagccatttaccctaatcatccttccacactgtacctcaacctgttaactataaaaggcctcaaaatgagaggggggacacaatgcttctcaatttcataggttttgccttttttggagtagggaaaattacagttccttattcctattccccttgcatttttttttcattattaaaatgaagttgtcattgtcttttaaatatgaaactgcttttcccacgaaggacaattggttggaaagactgttctatagctgccagagactggataagcgtgaccagtcaacaattccacgcaatctcctgg

SEQ ID NO: 86011 - DNA, 489 bp, Homo sapiens
ggaattcccgggtcgacgatttcgtagcgaggatacggaggaaggcgaggtgtctgatgaggacagtgctgatgagattgacgatgactgcaagctcctcaatggggatgcatccaccaatcgaaagcgtgtagaaaacactgctaagaggaaactggattccctcatcaaagagtcgaagattcgggactgtgaggaccccaacaacttctccgtctccacactgtccccatctggaaagctcggacgcaagagcaaggctgaagaggacgtggagtctggggaggatgccggggccagcagacgcaatggccgcctcgtcgtgggaagcttctccaggcgcaagaagaagggcagcaagctgaagaaggcggccagcgtggaggagggagatgagggtcaggactccccgggaggccagagccgaggggcgacccggcagaagaagaccatgaagctgtcccgggccctctctgacctggtgaagaa

SEQ ID NO: 86012 - DNA, 462 bp, Homo sapiens
ggccgacgattttggtgatcttggagcgcacatgccatatcatgtcttacttggctgatgtcacgaatgccctgagccagagtaatggtcaaggcccaagtcatctctcagtggatggggaagagcgggccattgaagtacactcagactgggtggaggagttggcggtggaagaggaagattcccaggctgaggattcagatgaagattctctttgcaataaactctgcacttttacgatcacacagaaagaattcatgaaccatcattggtaccactgtcacacctgtaaaatggtggatggcgtgggtgtctgcacagtgtgtgctaaggtgtgccacaaggatcatgagatttcctatgccaagtatggatccttcttctgtgactgtggagccaaggaagatggcagctgtttggctctggtgaagagaactcctagcagtggcatgagctctaccg

SEQ ID NO: 86013 - DNA, 461 bp, Homo sapiens
cctcggaattctcgggtcgacgacagggagcgcatggagcttttggaagaagccaagaagatggagatggccaagtttcgctacatcctgcctgtgtatggcatctgccgcgaacctgtcggcctggtcatggagtacatggagacgggctccctggaaaagctgctggcttcggagccattgccatgggatctccggttccgaatcatccacgagacggcggtgggcatgaacttcctgcactgcatggccccgccactcctgcacctggacctcaagcccgcgaacatcctgctggatgcccactaccacgtcaaggtggggggccgcacggtgcccgagagagctgggcagggagggcctgtgtcttggggagcagggtatcaaggggtcaagccctgaggtcaggacaagggcagaagaggaggtggttcttcttggaggaaagagcttgaaaccga

SEQ ID NO: 86014 - DNA, 463 bp, Homo sapiens
  misc_feature (1)...(463): n = a,t,c or g
tatcggaaccgccccggaattatcgggtcgacgattctgtggccgcttcgccattcgtgccgactgcctgattctctcagttttcttttcagaggcaggntccaccttgattcttgggggaatagaagccatggtgggcgtggtgactggtgctgactcctcgctgctctcaaccctctcccggttcttccgcccaactggtgggggctgcagcttgatggagaactgagttgactcctcaggatgcatttggcactgcagtggtggaaccatgagccctgggtaacggggaaaagtccgaggactcagatggtagttgaacacagaacaagcttgagaatgaaggtagtgtttcatttcctcagggttgaaggagaagcagctgctgctggtgaaagggctcaagcctggtgatgggctataagagaagatggtgggagtcagggagagggctggtgaaact

SEQ ID NO: 86015 - DNA, 449 bp, Homo sapiens
  misc_feature (1)...(449): n = a,t,c or g
aaaaacactaccaagaacgttattggatattttggcagatggcaccattttgaaagttggagtgggatgctcagaagatgccagcaagcttctgcaggattatggcctcgttgttagggggtgcctggacctccgatacctagccatgcggcagagaaacaatttgctctgtaatgggcttagcctgaagtccctcgctgagactgttttgaactttccccttgacaagtcccttctacttcgttgcagcaactgggatgctgagactctcacagaggaccaggtaatttatgctgccagggatgcccagatttcagtggctctctttcttcatcttcttggataccctttctctaggaattcacctggagaaaaaaaacgatgaccacagtagctggagaaaagtctggaaaaatccagggtgggtctnnnnnaatccgggaggtcct

SEQ ID NO: 86016 - DNA, 580 bp, Homo sapiens
ctaattcccggctcgacgatttcgtcgagaggaaaatttatctgcagtgaatgtcgcacaggaatccatacctgttttgaatgtaagcagagaggggaagatgttaaaaggtgccttctacccttgtgtggaaagttttaccatgaagagtgtgtccagaagtacccacccactgttatgcagaacaagggcttccggtgctccctccacatctgtataacctgtcatgctgctaatccagccaatgtttctgcatctaaaggtcggttgatgcgctgtgtccgctgccctgtggcataccacgccaatgacttttgcctggctgctgggtcaaagatccttgcatctaatagtatcatctgccctaatcactttacccctaggcggggctgccgaaatcatgagcatgttaatgttagctggtgctttgtgtgctcagaagatatcactaaagaagccgaacacggtggtgcatgcctgtagtcccagctattcaggtggccaaggtgggaggattgcttgagcccaggaattcaagaccagcctgggcaatatagcgagactgacctcataaacaaaa

SEQ ID NO: 86017 - DNA, 502 bp, Homo sapiens
attcccgtgtcgacgatttcgtcaggctccagaagaaagacagcagctcatggcagaaggggacatacatgcccacagggaacagcaggcatcccaggaccagatggacttgaaggctccctgggacttaagggccctcagggcccaagaggagaggctggtgtgaaaggagaaaaaggaggtgtgggaagtaaaggtccccaggggcctccaggacccggaggagaggcagggaatcaaggccgtttgggaagccaaggaaataaaggagaacctggagatctgggagaaaaaggagctgttggctttcctggtcctcgtggcttgcagggcaatgatggcagtccaggttatggtagtgtcggacgcaagggagcaaagggacaagaaggattccctggagaaagtggacctaagggtgagattggggaccctggtggtccaggagagactgggctgaagggagctagaggcaaaatgatatctgctgggcttccaggag

SEQ ID NO: 86018 - DNA, 499 bp, Homo sapiens
  misc_feature (1)...(499): n = a,t,c or g
tccgtcgtgccggnccggaattcccgnacgacgatttcgtcagggcggngtttttccggggatcgtttattttatgtccatatacttttattgccaatgctccttcggaaagatgctcgataaagtcttcggtgatgttaacagaaaactcattgcaatgatcaaagacaaccatgcagtgcggctccttgctgacggaagaggaggaggtgtccacttcaggagcgacaatcaccggctcctgttgatcccagaagctgtatttgcagaacacaaagtgggacagatgctgtggcaacccagtagcttgcaggattttaaccatgcacaccagtttgttctcctgggtctccttctcaaaggagacctctgccacctcatcgcctcctgcgatcctctccccaacatcaccactgagtcgcatcacctccacgtgcagccgacctgccacctctcctttctggttgatgatgggaacagcgtattgtaacttcacatc

SEQ ID NO: 86019 - DNA, 482 bp, Homo sapiens
  misc_feature (1)...(482): n = a,t,c or g
gaattcccgcgtcgacgaaaannaagagagtcaggatgaagatataacacttcagataactgagagtgaagactacgaataagatgacatggttgatgttatctggcgtcagttgatatcaagctgcccatggctttcagaacttgatgaaagtgcaactgaaggagttattaaagtgtggaggaaagttgtagatagaatattcagcctgtacaaactctcttgcagtgcatactttactttccttaaactcaacgctggtcaaattcctttagatgaggatgaccctaggctgcatttaagtcacagagtggaacagagcactgatgacatgattgtgatggccacattgcgcctgctgcggttgctcgtgaagcatgctggtgagcttcggcagtatctggagcacggcttggagacaacacccactgcaccatggagaggaattattccgcaacttttctcacgcttaaaccaccctg

SEQ ID NO: 86020 - DNA, 448 bp, Homo sapiens
tttcgtattggaacggtctctcctcagagtgggtcttcttatgattcttgtaaacatttctgtgggcaaatccctttccacaaagtttgcatttgtaaggtttgtcttcgctgtgtattactttgtgagcacccacttgatcaagcctcttgaaagacttattacaaatctcgcaattatagggtcgtttttctgagtgggtgatcatatgacgttttagctgattagctgaaataaatttcttcatacattcttgacaatcaaatatctcatgaatctttctatgttcctgtaggcttgatgctgaagaacactttttattgcacactgaacatataagctttttcttaggatctcctacaaaactcaaacatcagcaagattttgtaatacatgctccctagtagagattcggggtcattccatgcattacaattatataacagcg

SEQ ID NO: 86021 - DNA, 434 bp, Homo sapiens
tttcgtaatcacttccaaaggtctatgtaccgagatactgagactacagtgactgtattctacatattatgccatgagaagcactatttaccttgaacatataagtgctgtggtaatatgacattccttccatggcaggcattcttagctattaaactaagctggccgacccttcactgactcatatctttcgaattgctccagagtcaccacatactatggacatgtcaattgtattacaacatgaaaagccagtgagtgttaatgaagtaccagactaccatgaggatattcacacataccttagggaaatggaggtaaaggttctctgaatccagtttgtataatgtatttgctaaatgtggctaaatgaaattgagaggataatgcttaaatttttaaactaatgaattattctaatgctacagctaagg

SEQ ID NO: 86022 - DNA, 447 bp, Homo sapiens
gcgcaagtcccggatctgaccgattcgaccatattattcatactcgggccttgatagggactgctcatggcttccactggcgaaagcatggttacctgacgtgatgatcttggtctgcgatagagtgtctgaagatggtataaaccgacaacaagctcaagaatggtgcatcaaacatggctttgaattggtagaacttagtccagaggagttgcctgaggaggatggtaagtgtttatgtgttaggagaaaatatggcacttacatatgagagattattttaattcatggaagaagaatcacagcaaaattcaagaaacttttttgcccagctgtttcaaggatttaagcaaaatccattgatgtaatcttataatcttacacttagtggaataactcattttttttgttttaccacctggtttagaacttttgaaaatgtgtgtt

SEQ ID NO: 86023 - DNA, 418 bp, Homo sapiens
tttcgtgtggatctcatacatcgtgtcggcgccatatgacacggtgcccaggtgcagccgcttaaatatcatttcattctgggtgaggggtcctgttttgtctgtcaataaatacaccacgcgcccaagttcctctgggatagtgctggtccgaacgaccgtgccagggatgttctcatctttcatcatcatccatccatacaccgctttgcccatgtccaagttcacacgcaaacttatggtaatgatgtaagaaaagaggggaaggaaccgaaaaagattgcggtaccatgggcccacaaatccttgtatggttaccataacaatggaatgagcaactaaagccataaatagcgctttcgtcagccgattgagttcaaggtccaacaaaccaaccttattttttggattggatgtg

SEQ ID NO: 86024 - DNA, 493 bp, Homo sapiens
attccctgctcgacgatttcgtagtgaacctggataggggtttggacaacaagcacagggaatgagggatctgaggctggaggatggggagaggggagagactagagaacccagggctgagatgtgatgggttagagtacagtgagggaggtaactgaggagcagtagttgatctttacctctttcacctccctagacagcagaggatgtgctgactgtagcctatgagcatggtgtaaacctgtttgacaccgccgaagtgtacgcagcaggaaagtaaggactggggtgaaagagctaagctccatttggaaggctgagaggacctcagggattatcttctcgttttccctctaaagaaccctgggacttctgagaacgtgaagttccaaccttttggcggagggacccgaaagcactgtaggagctacagtcccaacattagtccctctctggcttagaagtcaatgggcgtactgtgcagctacattaa

SEQ ID NO: 86025 - DNA, 416 bp, Homo sapiens
  misc_feature (1)...(416): n = a,t,c or g
gcatttcccgggtcgacgatttcgtggatggggaagggacggtggcttcctgggagcttcgggtagaaggacggctcctggaggattcagccttgtccaaatatgatgccactaaacaaaagaggaagttctcttccttttttaagtccttggtgattgaactggacaaagacctgtatgggccagacaaccatctggtagaagtgagtagctctgccttctaggctttgactctgattggaggatgatggacttgggagccgtattttaatgtctaaggagatggggaggtataaagtagtcactctaggtgtacacagtaccgctccaggtgtacagtttgcacattgacctctangtggcactagcatgtttagttaggaccaagggctcttgtaacctaaactgggcccatt

SEQ ID NO: 86026 - DNA, 407 bp, Homo sapiens
cccgggtcgaccatttcgtgtagagactggttccatggaagtgccaggcacacatcctggggactcctgctacaccccgacccctcagatctgtgctggaagctgcactcagattagtgaagcctcctggactgctgtctggtactgggcatcctctggtggtgctgtgcaggctggcagcagggccaggccttcccacccaggcttctgcttcctcttctgtggaacagggtggatggagggtggctggaaggatttgagtcaggagtagagctcaggctggggctactatgcccacagagtcctaccaacaggttgatgcagagactgtggtgggcctggcccgggacctggaaccactgaagcggacagaggaagagccacttgaaaagccactggatgaggcc

SEQ ID NO: 86027 - DNA, 449 bp, Homo sapiens
  misc_feature (1)...(449): n = a,t,c or g
tttcgttgcaactcggatgctgacacaacaggacctataacctgtctcactgtttaagcggccaggaggcagcataggaaggcatgtttatttcagggtagggaaccattgagccttgttatgcgcggggaaatgtttgcaagactgtcccctgtgagtgaaacgtttggaagactgtgccctgtgagtgaaacgtttggaagactgtgccctgtgagtgaaacgtttggaatactgtgccctgtgagtgaaacgtttggaatactgtcccctgtgagtgaaacgtttggaatactgtcccctgtgagtgaaacgtttggaatactggcccctgtgagtgaaacgtttgcaagactgtgccctgtgagtgaaacgtttgcaagactgcgccctgtgagtgaaatgtttgcaagactgtgccctgtgagtgaaacgtttggaagactggn

SEQ ID NO: 86028 - DNA, 437 bp, Homo sapiens
tttcgtgaaaaatggaatagtgtagctgactgcctgccctgtgttttcctggtggattttgaatttgggtgtgctacatcatacattcttccagaacttcaggatgggctatcttttcatgtctctattgccaaaaatgacaccatctatattttaggaggacattcacttgccaataatatccggcctgccaacctgtacagaataagggttgatcttcccctgggtagcccagctgtgaattgcacagtcttgccaggaggaatctctgtctccagtgcaatcctgactcaaactaacaatgatgaatttgttattgttggtggctatcagcttgaaaatcaaaaaagaatgatctgcaacatcatctctttagaggacaacaagatagaaattcgtgagatggagaccccagattggaccccagacattaagca

SEQ ID NO: 86029 - DNA, 434 bp, Homo sapiens
ggtcgacgatttcgtgatgaaagtcttttttagggaaggatgttaagtacagttcactagatgggatcctagtttggagtctgatctctgggtgggcctgcagggaagctgacagtggcacaaatcaaggcaggttaccagtctcttaagaagattgaggattgtattcgggctggccagcatggacgagctctcatggaagcatgcaatgaattctacaccaggattccgcatgactttgggtaaggcctgtgctgttacttcactttgttcttctacctatacatatcccctgtatccatcagcagcagctataatcttttaaatcttttattcctaagaaaatggtcgtcttgaataggtacagaaacaaaatgatatataggtagcctatttaatcagcttacaaatatgggatgcaatctcccggcttg

SEQ ID NO: 86030 - DNA, 427 bp, Homo sapiens
tttcgtggcagaggtgaggcgagaatgggccaagtacatggaagtccatgagaaggcctccttcaccaacagtgagctgcaccgtgccatgaacctgcacgtcggcaacctgcgcctgctcagcgggccgcttgaccaggtccgggctgccctgcccacaccggccctctccccaaaggacaaggccgtgctgcaaaacctaaagcgcatcctggctaaggtgcaggagatgcgggaccagcgcgtgtccctggagcagcagctgcgtgagcttatccagaaagatgacatcactggctcgctggtcaccacagaccactcacagatgaagaagctgttcgaggagcagctgaaaaagtatgaccagctgaaggtgtacctggagcagaacctggccgcccaggaccgtgtactctgtgcactgaca

SEQ ID NO: 86031 - DNA, 455 bp, Homo sapiens
  misc_feature (1)...(455): n = a,t,c or g
tactcggcccggaactcccgggtcgacgatttcgtcagcggtgagggactggcgcgagcaggctgatgtgtttatccggttttctgggtgggcggtcaaagcgcacgcggaagggcgaaaggcggcggagctaggacatttgctacaagatcctattgcacccaccaactccacctgccaacattatgtctgcaaaacttgtaaaggcaagaaaatgatgatgaaaccttcctgtagctggtgcaaagactatgagcagtttgaggaaaacaagcagttaagcatcctagtgaactgctacaaaaaactatgcgagtatataacacagactacactggcacgggatataatagaagcagctgactgttcttctgatattttggctttgcttaatgatggatcattgttttgtgaggagacagaaaaaccctcagattcatcctttactttgtgtn

SEQ ID NO: 86032 - DNA, 406 bp, Homo sapiens
tttcgtaccaagaacatgaagatgatggtgaagatgaagatgatgaagatgatgatgatgatgacgatgatgatgatgatgatgatgatgaagatgatgaagatgaagaagatggagaagaagagaatcagaagcgatattatcttagacagagaaaagctactgtttactatcaggctccattggaaaaacctcgtcaccagagaaagcccaacatattttatagtggcccagcttctcctgcaagaccaagataccgattatcttccgcaggaccaagaagtccttactgtaaacgaatgaacaggcgaaggcatgcaatccacagtagtgactcgacttcatcttcctcctctgaagatgaacagcactttgagaggcggaggaaaaggagtcgtaatagggg

SEQ ID NO: 86033 - DNA, 13 bp, Homo sapiens
ttttttttttttc

SEQ ID NO: 86034 - DNA, 433 bp, Homo sapiens
atgaactggagaatgtcgaccagtaaagtgacagttctgggttatggtctcttaaccgcagatgcaaagactttgatagatgcactgaataatcagaacttcaaagtagttatagtggatgaatcacactacatgaaatccagaaatgcaactcgcagcaggattttattgccaatagtacagaaagccagacgagccattcttcttacaggaacaccagctttaggaaggcctgaagagctttttatgcagattgaagctctctttccacaaaaatttggaagatggaccgactatgcaaaaagatactgtaatgcacacatcaggatggaggacaagataagcatcttaagctgaatatgaacaaagaagcatgttgtcctacctacttctggtagctgtcttctgaccatgatattttggtaaaagacct

SEQ ID NO: 86035 - DNA, 405 bp, Homo sapiens
  misc_feature (1)...(405): n = a,t,c or g
tttcnaaagatgttcttctctctctacacaggagccagttttgtttttcgcagccacattaagaatgccctgctcagccagaatccggagaagtttgtgtaccctgtcccatgtaagtagctcttaggcaccttggaggggaggtgacaggctggtaccactcgccatctgaaataccatagaggtattttattattttttaaattattttattttaaatgattattaaaactaaacaaaatatggaaagataaaaatttgtgcccacaattcctccacctaacagaataactgttttcttattgttattcgcgctgtttgtctacataacagaagctatagtaaacattttgatactgccttaaaaattactaagtattaaagtttatacatataactttgtca

SEQ ID NO: 86036 - DNA, 360 bp, Homo sapiens
tttcgtggaggaggtggaaggagatggagccctgtccctgcttcagaaaggggagcagctgttggaagaaaatggggacgtcctcttaagcctgcagagagctcatgaacaggcagtgaaggaaaatgtgaaaatggctactgaaatttctagattgcaacagaggctacaaaagttagagccagggttagtaatgtcttcttgtttggatgagccagctactgagttttttggaaatactgcggaacaaacagagcagtttttacagcaaaaccgaacgaagcaagtagaaggtgtgaccaggcggcatgtcctaagtgacctggaagatgatgaggtccgggacctgggaagtacagg

SEQ ID NO: 86037 - DNA, 429 bp, Homo sapiens
tcttccggaaatcccgggttacgatttcgtcaaaagagtgatgacaggacacttgtggaccgaatcttggagccgcaggatgtcgtccggttcggagtcttcctctacacgttgggctgcgtctgtgccgcttgcctctactacctgtcccctctgaaactggagcacttggctcttatctactttggaggcctgtctggctcctttctctacacaggaggaattggattcaagtacgtggctctgggagacctcatcatcctcatcacttttggcccgctggctgtgatgttcgcctacgccatccagtcctcatctagccactgaagcagagtgcccacatcaggagcagccagtgctcaagctcccagaaactgcctagtgacctgccttctagacctgcctcctgagaatggggctggccacctt

SEQ ID NO: 86038 - DNA, 469 bp, Homo sapiens
  misc_feature (1)...(469): n = a,t,c or g
tttcgtcaacttgggtattttgacctgtatagaatgttctggcatccatagggaaatgggggctcatatttctcgcattcagtctttggaactagacaaattaggaacttctgaactcttgccggccaagaatgtaggaaacaatagttttaatgatattatggaagcaaatttacccagcccctcaccaaaacccaccccttcaagtgatatgactgtacgaaaagaatatatcactgcaaagtatgtagatcataggttttcaaggaagacctgttcaacttcatcagctaaactaaatgaattgcttgaggccatcaaatccagggatttacttgcactaattcaagtctatgcagaaggggtagagctaatggaaccactgctggaacctgggcaggagcttgnggagacagcccttcaccttgccgtccgaactgcagatcagacatctctccatttggttgag

SEQ ID NO: 86039 - DNA, 406 bp, Homo sapiens
cccgggtcgacgatttcgtgagaaggaggaggaggaactagcatatgactggagtggcaacaattccaatatctcagccaagagaaattacttctctgtgagtctagcacagtagcaggcctgtcatacttatttaacagcagcagaaggagacagggcctagtctgctgaaagcttgggtggctggagttgcactctgctagatagaaataggggccctactcaatgcatccatgcatgtgagaagtgtaaatggagagagggacagtagaaccctagagttaatttatctagaatgcatttagaaaggcagtgtcttgggtgaatagagcagcaacctgtaaattgagtcatttcagaagcaatacagcattgtggttaagattataggctttggagtgcctaa

SEQ ID NO: 86040 - DNA, 454 bp, Homo sapiens
tttcgtggcaagcggcgggccagcgacggcgcgaatgtcggactctcagtttttctgtgtggcggaggaacgcagcggccactgcgccgtggtggacggaaacttcctctacgtgtgggggggctacgtgtctattgaagacaatgaagtatatttgcctaatgatgaaatttggacctatgatattgatagtgggttgtggagaatgcacctcatggaaggagaactcccagcctccatgtcaggaagctgtggtgcttgcattaatggaaagctgtacatttttggaggatatgatgacaaaggatacagcaatcgactttattttgttaatttacgaacaagagatgaaacctacatttgggagaaaatcaccgactttgaagggcaaccacctacaccacgtgataaactttcctgctgggtatataaagacagactaatatattttggt

SEQ ID NO: 86041 - DNA, 415 bp, Homo sapiens
ttcccgggtcgacgatttcgtgacgagcgctacccacttccgccccctccgcctgccattggaactagctgagccgaactagttgcggccaccgagcagccggctctcggcacctcctcctccgcctccctgtctcctgttccattcgcctttcctcttctttcctggcccacgccgctccgaggcctcgcgaccgccgagcctgcagcctgccccgcggccaacatgagcttcttgtttggtagtcgctcttctaaaacttttaaaccaaagaagaacattccagagggttctcaccagtatgagctcttaaaacacgcagaagccacacttggcagtggcaaccttcggatggctgtcatgcttcctgaaggggaagatctcaatgaatgggttgcagttaacactgtggatt

SEQ ID NO: 86042 - DNA, 374 bp, Homo sapiens
tttcgtttcctggagaagaccctgaggacgaactctgacttctggtgggcctccaatatgcagggcacgatgaggtacgtccctggttccagacacagctcctgactcacttctttctccttgagaaacctatcaggctggctcagaggagtgtttctctggaagaactcagggggcagtctcctctggtcatcatggtacctatagaggtagaagccaatggcgaggagaggcttccgcttgcggcacctgtgcctgggcttctggagcagggacaccagcacgctgcagggcctcagggatctcctgccctcctcgggcctccagacagacagcaggaactgcgggttcttccaaaatgtgtcctgcagcag

SEQ ID NO: 86043 - DNA, 397 bp, Homo sapiens
ggaacagttctagtgcgtggccaaacctcacctcccaagagaagtctccttcagaagacaaatttgatctggtggatgcttatgggacagagcctccatacacctactcagggaagaggtcctccaagtgtcgcgagtgtaggaagatgttccagagtgcttcggcgctcgaggcacaccagaagacccattctcggaagaccccatatgcctgcagcgagtgtgggaaagccttcagccggagcactcacctcgcccagcaccaggttgtccacacaggggcgaagccccatgagtgtaaggaatgtgggaaggccttcagccgagtcacccacctgactcagcaccaaaggattcatactggagagaaaccctacaaatgtggggaatgtggtag

SEQ ID NO: 86044 - DNA, 401 bp, Homo sapiens
tttcgtcttctctgcccccaaattctggggatattttagtccttccctattctctatcttgggccttcccctccaccccacctcccccagtgctgcctgccaacccctcttctgccagactctgccctggcccaatcagcgtccttctcccaggcaccagtgactttcttcaatgccacacccacgggccggatcctaaaccgcttctcctctgatgtggcctgtgcggatgacagcctgcccttcatcctcaacatcctcctggccaacgcggcaggcctgctggggctcctggccgtgctgggctctggcctgccctggctgctgctcctgctgccgcctttgagcatcatgtactatcacgtgcagcgccactacagggcctcctcacgggagctgcg

SEQ ID NO: 86045 - DNA, 385 bp, Homo sapiens
tttcgtgtggacaacagcgaggagtggaaggatgtgttcatcatctccagcgagcgctccttcaagctggacagcctcaagtgtggcacgtggtacaaggtgaagctggcagccaagaacagcgtgggctctgggcgcatcagcgagatcatcgaggccaagacccacgggcgggagccctccttcagcaaagaccaacacctcttcacccacatcaactccacgcatgctcggcttaacctgcagggctggaacaatgggggctgccctatcacagccatcgttctggagtaccggcccaaggggacctgggcctggcagggcctccgggccaacagctccggggaggtgtttctgacggaactgcgagaggccacgtggtacg

SEQ ID NO: 86046 - DNA, 371 bp, Homo sapiens
tttcgttagtggtaaaggtgtagaaactggctgtgatattattaatgcatcatggactgacagctggacaaggattctcggtctttgtggtgaaggaaaagggatgttttgcataaaatgtgaaatgtgcttttcaatgggaagaggatgtggtccagacacagaaagtttgtagataaacataagaaatttcctaaaagcttcaaaaaaaggccagtgtgagagtaaacaaatgcatttgtttgtattgatggatttggagaccatttttctctccacaggcgtcaacaagcccaggtgcataagctgtttctctgatagaagttcccgagagtaaggttcataaaactgaatggcagctccatataccg

SEQ ID NO: 86047 - DNA, 378 bp, Homo sapiens
tttcgtcagggccagctgtacaaggtctttctccacggctcccagggccaggtttaccactcccagcaagtggggcctccaggctcagccatcagcccagacctgctgctggacagcagtggcagtcacctctatgtcctgactgcccaccaggtggaccggatacctgtggcagcctgcccccagttccctgactgtgccagctgcctccaggcccaggacccgctgtgtggctggtgtgtcctccagggcaggtgtacccggaagggccagtgcgggcgggcaggccagctgaaccagtggctgtggagttatgaggaggacagccactgcctgcacatccagagcctgctgccgggccaccacccccgccaggag

SEQ ID NO: 86048 - DNA, 376 bp, Homo sapiens
tttcgtgtcaacgtcctgagcatccttgtgcggctgcagcgcatctgcaaccaccctgggctcgtcgagccccggcacccaggctcttcctacgtggcggggccactggagtatccgtccgcatctctaatcctgaaggcactggagagagatttctggaaggaagcagatctttctatgtttgatctcatcggcttagaaaataaaatcactcgtcacgaggcagagttgctgtctaagaaaaagataccgcggaaactcatggaggaaatctccacttcagcagccccagcagcccgaccagcagcagcaaagctgaaggccagcaggttgtttcagcctgtgcagtatggccagaagcccgagggtcgcaccg

SEQ ID NO: 86049 - DNA, 385 bp, Homo sapiens
tttcgttacatgcccaacaacagacaacagctactgaggaaaaggcacataggaaatgacatcgtcaccatcgtcttccaggagcctggggcacttccttttactccaaaaagcatccggtctcactttcagcatgtctttgtcatagtcaaagtgcataatccatgtaccgaaaatgtgtgttatagtgttggagtttccagatcaaaagatgtgccaccatttggcccaccgattcccaaaggtgtaacttttccaaagtcagccgtgttccgggacttccttttagccaaagtaatcaatgcagaaaatgcggcccataaatcagaaaagtttcgagcaatggccactcgaacgaggcaggagtacttgaaagatctggcgg

SEQ ID NO: 86050 - DNA, 1410 bp, Homo sapiens
  misc_feature (1)...(1410): n = a,t,c or g
atgtgggcagtgtttaaactcatgagcctgtacaagatccccaaggggatgagagtagatccagaagagaagcaggccacgagctgcaccttggaggatccaacatttagaggtcgagagtatgaggaggaatcagcaagaagacagagaaggggaggccagagaaaaacatattccactggaatgcacttctctttggttcctggacctcacggtcagactcccatcccctgtggctcaggcaaactctgctgcatcttcgtgctgagttctctggatcctctcctctgccttctggggcactggcaggaggagagaagggagaaaccagtcttaagggctgaacataaaagtgttattctgacttgcactcatgtgattaaaggattccagtatttagagtatgaaccgattttgctgaatggggcttcagtaacgaccaccatggacagcgacttcccctcccagctctcccaagaagcattttcactagccagcggcggcgaccgcagtaacagcggcagtggcggctgctgccactgctctgccgctgccgagccggtcacctgggcacccgcggagccgcgccgctgctaccgccccggcggcctcccggagtgcgcggagggggcggcggaggagcgagatatccatagtaaccgaggatgcgaggggcgcccagcagcagcgagtgcctgggagccaggaggaggcccccgcgcgccggcaacccccagtgctaggcgccctgcagcccccgcgcgccgcgcctgggcccgcatcgctctcgcagtgagggtccgcccgagcggtaagccctccccggcggccaagccgacacctcccccccgcctcgccgcccaccccgggcagcagccgcggaacaatggagagcgcagccagcagccctggagacggcgttcgggggaggacgcgccgccgccgccgccgctgccgccagggcaggcgcgcgccgcgtggagccgggcggaaagatgcacagaggcaacggctaggggagcggaggttcaagccacatgtctgcgtcctcgggggccagagcccgccagccctcgcggatcccggctcgcggccagcccgagcggctcgggttttaaaaatcaatttgattggccacaggaaacgtattttggcatctctgggagacaggctgcacgacgatcccccacagaagccccctcggtccatcaccctcagggaacccagtggtaatcacactcctcctcagttgtctccatcacttagccaaagcacttacaccactggtggctccctagacgttcctcacattatcatgcagggcgatgcaaggaggagaagaaatgaaaactactttgatgatattccccgatcaaaactggagaggcagatggctcangtaaggtgtta

SEQ ID NO: 86051 - DNA, 470 bp, Homo sapiens
  misc_feature (1)...(470): n = a,t,c or g
tgcgggtttcggttggaggactcgttggggaggtggcctgcgcttgtagagactgcatccccgagacgatggcggagggagataatcgcagcaccaacctgctggctgcagagactgcaagtctggaagaacagctgcaaggatggggagaagtgatgctgatggctgataaagtcctccgatgggaaagagcctggtttccacctgccatcatgggtgtggtttctttggtgtttctgattatctactatctagatccatctgttctgtccggcgtttcctgttttgttatgtttttgtgcttggctgactaccttgttcccattctagcgcctagaatttttggctccaataaatggaccactgaacaacagcaaagattccatgaaatttgcagcaatctagtaaaaactcgacgcagagctgtgggttggtggaaacgcctcttcacactaaaggaagaanaactt

SEQ ID NO: 86052 - DNA, 424 bp, Homo sapiens
  misc_feature (1)...(424): n = a,t,c or g
ccccccccaaagttcccccaagaaacctcagggggcaaccctgggcaaatttttttcaggccctggctgcaaaaatgcgggggtcctttcgccctttccgggttgccaaaaggaaccaaaaggctttccggattttgtttcccttccnnnnnnnnnnnnnnnccaaaaaacagaaagacagacagacaaatattgaaagagtcctgttttcaagtctggcatccctgacctctatcctgcagtgactttggtacattccttcacccagtaagtatttgccagggcctccatgtgccaggcgttacagctgggcacctggcctcttctgggcacgggctctcatcttcgttcaggtgctgagtcacctgaaccaccaagttgcctgatgtcactgtgtgcgcatgtatgtgagcaggtgacgaaa

SEQ ID NO: 86053 - DNA, 770 bp, Homo sapiens
tttcgtggaagttgtggggtctgtctgcgcggagggtctgtctgcgcggagggtctgtctgggagagggcatgagacaaacggactataccaggagtctagggagtgactgggtggggaggcttcttgccctggcgagggtcgctggggactgcttggtcctgataacgcgcgtgggcccctcagcgacccctgctcagcctcaccgctgcttccccaggtctccctcctggaggagctcctgtccccgctcctcaccccgctgtttctgcttttctggttccgccctcgtgccctggagattatcgacttttttcatcacttcactgtggatgtggctggggttggggacatctgttcctttgcccttatggatgtgaagcgccacggacaccctcagtggctctcggcgggacagactgaggcctcgctgtctcagcgtgcggaggacggcaagactgagctttctttgatgcggttctccctggcgcatccactctggcgccccccagggcacagctctaagtttcttgggcacctctggggccgagtacaacaagatgcagctgcctggggtgccacctcggctcgcggcccctccaccccgggggtgctcagcaactgcacctcgcccctgcctgaggccttcctggccaacctcttcgtgcaccctctcctgcctccgagagatctgagcccgacagccccctgtccagctgcggccacagccagcctccttgcctccatttcccgaattgcccaggaccccag

SEQ ID NO: 86054 - DNA, 677 bp, Homo sapiens
gacatattccagtgtgctggaattcgacaggaaaagttcagctgctaaaaggctatggaacttgagtaagaggtagagatttggaagctgaagggggacgtgatttggaatgtgtgtatatcagcactttcacattctagacttagggatttttcttctgacttccagaagaaaattaagaatagcacatgtttcacagctccactgccaaggtcttctaaggctacaggccaggaattacagcagttgaccacaagtggaaaagagtctaagaccacacatccttaggagctccagaagaagatctaggtccacaacagacctcaggcccaagccttagctctggctgtgcactcctgggctccccgagacagaagagcttgttgctagttaaatgctcatattgcctgggcagtaacccagagaaatggaactcgaatgttagaatggggaaaggccctgctggggggcttatggaatattctcaatttgtacttgagagaagggcatattagtaacacctccgggcatataccctcagcagctggctggctggcttctctcgcatacatacatcagcatatgcacacacacaacttacgcctgcagtaggcagttccagaccaacgacggcttggcaggcattgcaccgacctccttccaatcaatcgaaagcc

SEQ ID NO: 86055 - DNA, 384 bp, Homo sapiens
acccatatagacttggagctcttctccaaggtgaggctctacgagtgcttgggctccgtgtggtcgcagagggaccggccgggggctgcaggcgcctcccccactgtgcgcgccaccgtggcccagttcaacaccgtgaccggctgtgtgctgggttccgtgctcggagcaccgggcttggccgccccgcagagggcgcagcggctggagaagtggatccgcatcgcccagcgctgtcgagaactgcggaacttctcctccttgcgcgccatcctgtccgccctgcaatctaaccccatctaccggctcaagcgcagctggggggcagtgagccgggaaccgctatctactttcaggaaactttcgcagattttctccgatgaa

SEQ ID NO: 86056 - DNA, 453 bp, Homo sapiens
gtcgacccacgcgtccgccacccgcgacaacccagtcccctgaaagcactatggatacctcactgaagaaggagaagtcagccatcctggatctttatattcctcctccgcctgctgttccctactctccccggtatgttgctgtccattgtcatggtatgcttgtctcctgttggtgtcatttgtaaatggtggagtgaaaagaggatcttgagagaggaagttgctgagccacagtgtgacagggctgaatcttgaactgccgttaaaagtattatcagccttattttataggagtgtaaggacatatctgggttctgtggggcttgaaactatacagattggtggggaggggccttttgacaaaaaaatattggcgggcttggccatagtggggacactaacacctggtaatccaacactctgggagagtgaggtcttttaatcacttga

SEQ ID NO: 86057 - DNA, 427 bp, Homo sapiens
agggagaaagaggaggaggtggaagaggaagaagataaggtggttaaggagacagaaaaggaggctgagcaggaaaaggaagaagacagcctgggagcggggacccacccggatgctgccatcccctccggggagcggacatgtggctctgagggctcccgctccgtcctggacctggttaactacttcctgtcccccgagaagctgacagcagaaaaccgctactactgcgagtcgtgtgcctccctgcaggatgccgagaaggtggtggagctgagccaagggccgtgctacctcatcctcacactgctgcgcttctctttcgacctgcgcaccatgcggcgccgcaagatcctggatgacgtctccatccccctgctgctccgcctgccactggctggtggccgtggccaggcctatgacctct

SEQ ID NO: 86058 - DNA, 392 bp, Homo sapiens
catatttccatggacaagaaggggtgaactttgaatttcaaagattcattactgaacaggtaagagtgatgatttttgtattcctaggagaatcagacaaaatactaacagctttgttgtttttgttttagacagactactctgatagtttatattttgtcttttattggaatggttatctttactttcacattggaccttagatatattatcatcgtgtttgttactggaggggtgcttgggtaagtatcagatgtgttaaggaggaatgatagcatgctgttataattctgaagtattattactctggtctttaattttttcagttcatccaaagtttcttcaatattttaaacttcaaaggattcattctatgcatataaacatgtaag

SEQ ID NO: 86059 - DNA, 402 bp, Homo sapiens
ctctggcttcctcacagcatggaatactgaacaatctttctctccttttcagtatttgcaaaacatgtattcggacaatggatcatcactgcccgcgggcgaacaattgtgtaggagaacagaatcacagatttttttgtgctcttcactgcaagtcaaaacatttttgcattgaatttacattgaatacgaacttctttaactgcttcttgcctggagcagagaaatctactatcgacgcgccattttctctccagccttttctccaggattcaaagtataatactgcgctgtcattgtcagaaagtatctcccaataagtaacatgctggctcgtattatcttaagagctcacgtgtatttaattctctcccatatgccctcaatcgctattgtttattt

SEQ ID NO: 86060 - DNA, 431 bp, Homo sapiens
  misc_feature (1)...(431): n = a,t,c or g
nnnaagatttattccggctcattgctttctactgcatcagcagggatgttctaccatttaccttgaagttgccttatgccatttcaacagccaagtcggaggctcagcttgaagaactggcccagatgggactaaatttctggagctccccagctgacagcaaacccccgaaccttccacctccccataggcctctttcctccgacggtgtctgtcctgcctccctgcgtcagctctgccttataaatggagtgcattctatcaaaaccaggacgccttcagagctggagtgcagccagaccaacggggccctgtgctttattaatccccttttcttgaaagtgcacagccaggacctcagtggaggcctgaaacggccgagcacaaggactcccaacgcgaatggcacggagcggactcggtcccccccc

SEQ ID NO: 86061 - DNA, 390 bp, Homo sapiens
aagggagatgctgtgcggcctgtttcaccaggtttagcacagtaagctgggaaaacccaagggaaaaagcctttgggatgtcgatgagtgtggaaggtagggtgtcattggagctatcactattcagcaaaagaagggaactgtgaaggtggaggatatagcatttccttctttaacaaaagcaggcttggtgtgggaacagtgggctctataatgtaatgaaaactattttcagatactattgaaattaaaatgtattattgcagtgtatggcttaatgtaatggtaactttatttcttaccaggctcatattggcaacttattaacatcaaaattcttcaggtataaggattttgatactttattatatacctgtgcagcagagtttg

SEQ ID NO: 86062 - DNA, 414 bp, Homo sapiens
agctcagctcaagaggtgaggaaattgtccgcctgcagatcctgacacccagggcaggactccgcctggtggccccagacgtggaaggcatgaggtcttccccaggcaacaaagacaaggaggccccctgctccagagagctccagagggacttggctggtgaggaggctttcagggcccccaacacagatgctgcaaggtcaagtgcacagttgagtgatggcaatgtgggatccggagccacgggctcccggcctgaaggcttggctgcagtagacatcggctccgagagaggaagctccagtgccacttcagtctctgctgtccctgctgataggaagagcaacagcacagcagcccaggaggatgcaaaggcagacccaaaggggctaggtcgagaaccatcgttctcag

SEQ ID NO: 86063 - DNA, 786 bp, Homo sapiens
gcggccgcatcgggagcccggcggaaacatggcggcgcccggaggccggggccgcagcctctccggcctgctccccgcgcagacctcgctagagtacgccctgctcgacgccgttacccagcaggagaaggacagcctggtctaccagtatctgcagaaggtggacggctgggagcaggacttgtcagtacccggagtttccggaaggattagaatggctgaacacagaagaacctatttctgtctacaaggatctatgtggaaaaatagtcgtccttgatttcttcacctactgctgcataaactgtattcacctattgcctgatctccatgcattagaacacacatactctgataaagatggtcttcttattattggtgttcactcggctaagtttccaaatgaaaaagtcctggataacattaagagtgctgttcttcgatacaacatcacccaccctatggttaatgatgcagatgccagcctttggcaagaactagaagtttcctgctggccaactctagtcatacttggacctcgtggaaacatgttgttttctttgattggagagggacacaaagataaattatttttatatacttcaattgctttaaagtattacaaagacagggggcagatcagagataataaaattggaataaaactctataaagattctttgccaccttcaccattgctatttcctggcaaagtaacagtagaccaagttactgatagattggtaatagcagacactgggacatcgtgataatgaagcctcgtgg

SEQ ID NO: 86064 - DNA, 405 bp, Homo sapiens
aggagctgaggcagggcctgagtgaactcccagccatccacgaccttcatcaaggcatcctggaggagctggaggaaaggctgtcaaattgggagagccagcagaaggtagctgacgtcttcctggcccgggagcaggggtttgatcaccacgccactcacatcctgcagttcgacaggtacctaggtctgctcagtgagaattgcctccactctccccggctggcagctgctgtccgtgaatttgagcagagtgtacaaggaggcagccagactgcgaagcatcggctgctgcgggtggttcaacgcctcttccagtaccaagtgctcctcacagactatttaaacaacctttgtccggactccgccgagtacgacaacacacagggtgcactgagcctcatct

SEQ ID NO: 86065 - DNA, 438 bp, Homo sapiens
ttcgctcgcgtgctgactcgttccgtcgacgtttatgtgggggggagtgtctatccacagcacatatggctgtatcttggagcccattggccgacacttcacagggctgggtgtggctgaagaagtgtgggttgctccttggtatggaataaggcacgttgcacatgtctgtgtccacatccagccgtagcactgagcctgtgaaatcacttaacccatccatttcttccatatcatccagtgttcagactccaatggaaaaaacagatcatcagccagaattctacagataataaaggggaaagattatgaaagtgagccatcacttttagaattcaagccattcagtaatggtcctttggttggtggatttgtataccggggcttgcagtcagaaagattgtatggcagctacgtgtttggagatcgtaatgcgaa

SEQ ID NO: 86066 - DNA, 433 bp, Homo sapiens
agttctgatgatcgtagtctgtttcgacggctgaaacttaattacgcaatttttgatgagggccatatgctgaagaatatgggctccattcgctaccagcaccttatgacaattaatgcaaataaccgtttgctgctcacaggcacacctgtacagaacaatctgttagaactcatgtcgctgttgaattttgttatgccacacatgtttagtagtagcaccagtgaaatacgaagaatgttttcctctaagacaaaatcagcagatgagcaaagcatatatgaaaaggagagaatagcacatgcaaaacaaattataaagccatttattctcagaagagtaaaagaagaggttctcaagcagttaccccccaagaaagatcgaattgagttgtgtgcaatgtcggagaagcaggagcaactctatttgggtc

SEQ ID NO: 86067 - DNA, 606 bp, Homo sapiens
  misc_feature (1)...(606): n = a,t,c or g
ggccggcatcgctggtcaacgctcccgcgtgcgacctgatcttcgtggacgcccgtcgcgacctggcgagcgccaagtcgctctgcaagatcctcacgaccaccggcatcacggttccgctgctgctcgtgctcaccgaaggcgggctcacggcggtgagcgccgagtggggcgtcaacgacgtcgtcctcgacagtgcgggccctgcggaggtcgacgcgcgcatccgactggcgatcggccgacagggccaggagcactcgcagacgaagatccaggcctccggcgtcacgatcgacgaagccagctactcggccaaggcgcacgggaggacgctggacctcaccttcaaggagttcgagctgctccggttcttcgcgacgcacccgtcccgggtgttcacgcgcgaacagctcctgagcgaggtgtggggctacgactactttcgtggaacgcgcacggtcgacgtgcatgtgcggcgactgcgcgcaaagctcggcgacctcnagtccctgatcgggacgggtgcgcacgtgggctaccgcttcaacgtctanaagacgaggacgaacggcttccttcgtcgggtcatccctgatggcacgg

SEQ ID NO: 86068 - DNA, 412 bp, Homo sapiens
ctgactacgccaagcttggcacgaggctattcctttcacatccactgaaggatttggcaaatttttctttgtcactggaacactttctcctgttaacatgctttcgtttacaatgcaggtaccattaataagcacagcatcacaaggcattattgtcccatttaatggaatgaccatgacatctcctggcacaaggtcggtagaaaagatttcttctatttcttcatttactctacaaactgaaactcttacggtactatgagttgccaccatgtcatgcaacataacatattgctttctaatggaatatagtgagcttacgattgatactatggacataaccacaatagctagagcatagtaatagtattcatcagtgctccacagtataacactgaacagctggaaaatg

SEQ ID NO: 86069 - DNA, 447 bp, Homo sapiens
catgatcacgcccagcttggcacgaggggcggcttcgataccgccacagatggcgatatcggcgtcgccgtaagcgatctgacgccatgcgtgggcaatgccctcgttaccggaggcacaggccgagacgggggtgatgacaccaccgcgcgccttgcgctccaggccgatgacggcggcaggaccgttgggcatgaacatttgaacggtaaggggggaaacggctttcgtgccccgggcgcgcatctcgtcgtaggcttcgaccaacttctcgccgccgcccaggccggtgcccaccgacaccgtgagtcgctccagatcgacatcttcgggggcaccggcgtcttcccagacctgacggcccaggatcgcggccaggcgctgaacataggacagacggcgaagctcgatcttcgtcatgtccttgtcgaagtcgcggaccttgag

SEQ ID NO: 86070 - DNA, 450 bp, Homo sapiens
  misc_feature (1)...(450): n = a,t,c or g
gaccatcacgccaagctgggcacgagggttcggcgggccgccggtgtcgacgctgtcgaatgcggggcaggggcgttcggacggtttcgagctggagctgaaggcgcagcccgtcaacagcctgtacctgttcgcgaacctcgggatgctgaacacgcgctacacggagttccgctacgtgccgacggcggtgggcaactcgttcgcgcgttcgccgcatacgacgctgaacgcgggcttcgactatcgcgtaccggtgtcgttcggcacgctgacggccggtggcgaggtgaactaccgcagccgcgagtacttcagcgcgacgcggcagacgatgccgcaactgtggcaaggcggctatacggtgctgaacgcgcatgtgtcgtacacgacgccgaaccagaagtacatcgtgacgggctacgtgacgaacctgacgaacaaggtctn

SEQ ID NO: 86071 - DNA, 428 bp, Homo sapiens
gtggaattccagagatcatattctaagaacatgtttcgattttgttttacattgccagttttgttatcttggcacattatcccatagactcctaggagtgactgccttggtcagaaaggtggtgtgggctaaatggaaaccaagtttccctgacagggcacccactgtcaccccctgcctagtttatggtcaggcctaacaaatataaagccagtattcacatagtttggattatcatttattgcaggtgaccaaaaatcctttcacactgggcgacagttccaatcctggacagacggagagactacaggagtttagccagaagatggaccaggtaagaggtcactggccagtcagtacttagaatcctggggctccagtgaacaggaggctgcatgctcatgtcttgccactttttgaacatctaa

SEQ ID NO: 86072 - DNA, 432 bp, Homo sapiens
  misc_feature (1)...(432): n = a,t,c or g
gtgcaattcgccgttnacgctggtnttggatacctttattttactgggcatccaggacaacattttggtcttgattctggccacaccccccttcatggcgggggggaagttgtatagcactatggggcgcttcctcagagaccgaaagaacccggcgtgccgggagatggctgtggtactgctggccaacctggctcagggggacagcctggcagctcgtgccattgcagtgcagaaaggcagtatcggccacctcctgggcttcctagaggacagccttgccgccacacagatccagcagagccaggccagcctcctccacatgcacaacccaccctttgagccaactagtgtggacatgatgcggcgggcttgccgcgcgctgcttgccttggccaaggtggacgacaaccactcagagtttactctgtt

SEQ ID NO: 86073 - DNA, 595 bp, Homo sapiens
cgggaattcaattatttaaaattggtttttggtataccataggtaaaaaatggatgagccttacttaatctgtgtaactttatttggttacaatcaacttataaaactagaagtaaatttttctcagaaaaaaatgtgtatttgttgcttccagttctgtaaccttgagctgattggtcaatgataatagttccttactttgacatagcaacttcaaaatattcacttatttggtcattagaataagcccgagaggcagaatgattgcatcagtatgtgattgtgactttctggtagttctttctgtaattctggatttattttcctagcttcttcatgactggttacctccctttgggttttgaatttgctgttgaaatcacttaccctgaatctgaaggtacttcatctggtcttcttaatgcttctgcacaggtaaacctctgatttctctaaacctgagatgattattataccagatattctagtgagtaatgagtttgaccatggttttatttgttgttgttgttgttgttttgttttttggagacagagtcttgctcagcctgggtgacagagcgagactctgtttcag

SEQ ID NO: 86074 - DNA, 473 bp, Homo sapiens
gtggaattccccggctcgagcagcgctaccaggccttccgcgaggcgcccggccgcctcagcgagccggaccagttcgtcctgcagatgctgtcagttcccgaatacaagacacgcctgcgcagcctccacttccaggccaccctccaggagaagacagaggagatccgaggcagccttgaatgcttgcgccaggcctccctggagctcaaaaacagtcggaagctcgccaagatcctggagtttgtgttggccatgggcaactatctcaacgatggacagcccaaaaccaacaagactacgggcttcaagatcaactttctgacagagctgaactccaccaagacagtggatgggaagtccaccttcctgcacatccttgccaaatcgctgagccagcacttccctgaactcctgggctttgctcaggacctgcccaccgtgcccctggctgccaaagtgaaccaacgggcc

SEQ ID NO: 86075 - DNA, 442 bp, Homo sapiens
tcgtggaattctcttctcagcaccaaggatgaagagattaccaagacatttgaggtcaacatcctaggacatttttggatcacaaaagcacttcttccatcgatgatggagagaaatcatggccacatcgtcacagtggcttcagtgtgcggccacgaagggattccttacctcatcccatattgttccagcaaatttgccgctgttggctttcacagaggtctgacatcagaacttcaggccttgggaaaaactggtatcaaaacctcatgtctctgcccagtttttgtgaatactgggttcaccaaaaatccaagcacaagattatggcctgtattggagacagatgaagtcgtaagaagtctgatagatggaatacttaccaataagaaaatgatttttgttccatcgtatatcaatatctttctgagactacagaagt

SEQ ID NO: 86076 - DNA, 461 bp, Homo sapiens
  misc_feature (1)...(461): n = a,t,c or g
cgtggccgaattcggaacgattgatttaaattcctgcagaaacaacctgcagcctgctaagcattttcattgtttcacagatgggtccagtaatggtaaagcttcttattctggatcaaaaggtaaagttttccagacgccctatatttcagctcaaaaagtggagcttgtagctgtaattgaggtattgactgcttttgatatgcctattaatgtgatttctgattcttcatacatggttcattccacacagttaattgaaaatgctcagttacgatttcatacagatgaacaactgataataaaaacaaaaaaggggggaaacagggattacgggacagcccagacacaattgaatcttgcattattaactttccatttttcgagccttcccaaaggccagatgttaccagcagctgaacagcatctacagaaaccagctgcaaagacacaagcagaan

SEQ ID NO: 86077 - DNA, 492 bp, Homo sapiens
aaaatcaaagcaaagaatctcacaaactatgatctctgcagcatttttcttggaacctctacgctcttggtttgggttggagtcatcagatacctgggttatttccaggcatataatgtgctgattttaacaatgcaggcctcactgccaaaagttcttcggttttgtgcttgtgctggtatgatttatctgggttacacattctgtggctggattgtcttaggaccataccatgacaagtttgaaaatctgaacacagttgctgagtgtctgttttctctggtcaacggtgatgacatgtttgcaacctttgcccaaatccagcagaagagcatcttggtgtggctgttcagtcgtctgtatttatattccttcatcagcctttttatatatatgattctcagtctttttattgcacttattacagattcttatgacaccattaagaaattccaacagaatgggtttcctgaaacggatttgcaggaattc

SEQ ID NO: 86078 - DNA, 454 bp, Homo sapiens
tacactactccagagcgttggaattcttacagaagtctatgctgtcgacaaagacacaggcatgaatgctgtcatagcttacagcatcatagggagaagaggtcctaggcctgagtccttcaggattgaccctaaaactggcaacattactttggaagaggcattgctgcagacagattatgggctccatcgcttactggtgaaagtgagtgatcatggttatcccgagcctctccactccacagtcatggtgaacctatttgtcaatgacactgtcagtaatgagagttacattgagagtcttttaagaaaagaaccagagattaatatagaggagaaagaaccactaatctcaatagaaccgactcataggaaggtagaatctgtgtcttgtatgcccaccttagtagctctgtctgtaataagcttgggtccatcacactggtcacaggga

SEQ ID NO: 86079 - DNA, 428 bp, Homo sapiens
gaccagcaactccaatgaaatagacatcgtgcatcatgtagacactgaggccaatatagctacggaggtttgcctcactattctggacctgttatccctcttcacacagactcatcagagacaactccaacaatgtgactgtcaaaattcattgatgaaaagggtctttgatacctacatgctctttttccaagtcaatcagtcagccacagcgctgaagcatgtgtttgcctccttgagactgtttgtatgcaagtttccttcagcgttctttcaagggcctgctgacctctgtggatcattctgttacgaagtcctaaaatgctgtaaccacaggtcacggtcaactcagacagaagcctcagcccttctgtaccttttcatgaggaagaattttgaatttaacaagcagaagtcaattgtccggt

SEQ ID NO: 86080 - DNA, 445 bp, Homo sapiens
ccagtgtggtggaattcactaaacggagcttcagaagtgacattttctgtgcatgtaaaagatggtggctcatttccaaagacagattctacaacagtgactgttagattcgtgaataaggccgatttccctaaagtcagagccaaagaacaaacgttcatgtttcctgaaaaccaaccagtcagctctcttgtcaccaccatcacaggatcctctttaagaggagaacctatgtcatattatatcgcaagtgggaatcttggcaatactttccagattgatcagttaacagggcaggtgtctattagtcaacctctggattttgaaaagatacaaaaatatgttgtatggatagaggccagagacggtggtgtccctcctttctcctcttacgagaaacttgatataacagtattagatgtcaatgataatgccccaattttta

SEQ ID NO: 86081 - DNA, 433 bp, Homo sapiens
cttggctttcatgcctgggaaggatgagaccaaagcctgacccgaaagccagcgatcgccaagatgagttaaatgaataagcaaaggaagccacttctttctctgctctccactcaggccttgccagccatttaaatagtaccactgtggctgttctctgaacccatttcatttgccttcctttgggttattgttttccccttttagacaaagatttgcagctcccttcgggattcaattgcaacttcgatttcctcgaggagccctgtggttggatgtatgaccatgccaagtggctccggaccacctgggccagcagctccagcccaaacgaccggacgtttccaggtaagccagctgtgagtgaagatatgaaagagttaaggccagcttgttccacatacttcaaccccagattcccttacaagcttca

SEQ ID NO: 86082 - DNA, 456 bp, Homo sapiens
gcgtggtggaattcaatcaagctagtgagtgatgtaacagctgattcaaaggtattagaagccttgaaattaaagggtttatgcaccactggtcctacccctgtgcagtcctccaactgcggcagcccggctctgccctgactccactgaaactaccttgtcaaagtcccggaggacttccaggagccgaggtgacgtacatgaacatgaccgcttacaacaagggccggctgcagtcctccttctggatcgtggacaaacagcacgtgtatatcggcagtgccggtttggactggcaatccctgggacagatgaaagaactcggtgtcatcttctacaactgcagctgcctggtcctagatttacaaaggatatttgctctatatagttcattaaaattcaaaagcagagtgcctcaaacctggtccaaaagactctatggagtctatgacaatg

SEQ ID NO: 86083 - DNA, 467 bp, Homo sapiens
ctagtccagtgtggtggaaaacggcatctccagcccgggcatctccggctctggcatcactttccaggtcctcatccggcaggtcatcatccgccaggtcagcctcggtgacaacctccccaaccagagtgtaccttgttagagcaacaccagtgggggctgtacccatccgatcatctcctgccaggtcagcaccagcaaccagggccaccagggagagcccagtccagttctggcagggccacacagggatcaggtacaaggagcagagggagagctgtcccaagcacgctgttcgctgtgacggggtggtggactgcaagctgaagagtgacgagctgggctgcgtgaggattgactgggacaagtctctgcttaaaatctactctgggtcctcccatcagtggcttcccatctgtagcagcaactggaatgactcctactcagagaagacctgccagcagctg

SEQ ID NO: 86084 - DNA, 453 bp, Homo sapiens
gtcgtggaattcggtcgtggagactcttcacaggctgctgtgtgaatcccaggaaaatctttcccagaggccacagctgccgtttcttctacgtcctcggccagatcactctgagctcattggtggctccagtgatgtggctttctgtggctctgctcaatggaactttctatgaatgtgccatgagcgggacgagaagttcaggactcctggaactgatttgcaagggtaagcccaaagagtgctgggaagaacttcacaaagtatcttgtggcaaaactagcatgctacctaccgtcaatgaagaactgaaactctcccttcaggcccagtctcagattctaggatggtgcctgatttgttcagcgtctttcttctctctgctcaccacatgttatgctcgctgccgatctaaagttagctaccttcagctgagtttttggaagacatatg

SEQ ID NO: 86085 - DNA, 505 bp, Homo sapiens
gaccactattccagagtggcggaattcctacgatcatgcaaccgtacttcacgtccaacggcctggtcaccaaggcgctagagcacgccttccagctggagcacatcatggacctagcacgcctgcgctgcctgggctcgctcttctccatgctgcaccaggcctgccgcaacgtggcgcagtataacgccaaccatcccgacttccccatgcagatcgagcagctggagcgctacattcaggtcagggggcatcaggggcttcacagagctcaccactgcgccagaccacaggtctgaggacctctgaaatgctgcacctgtggggatgtgcgctctctcctaggcgaggcagagccttcgttgaggggctaggaaaggtgcattgggtgtctgtgatgcaagaagactgggaaccactgtctttaggttaactttgctgtaagtgtctttcttttgttgttgaaattttataaaaatcaaagtttaattccctttttaatagc

SEQ ID NO: 86086 - DNA, 490 bp, Homo sapiens
gagacgatgaggatgtactctcagaaaaaaattgccaaataaatgtcggtaagagaattgccctggtggaaaatattcctgaaggccttaactattcagaaaatgcaccatttcacttatcacttttccaaggctggatgaatttactcaacatggccaaaaagtctgttgacatagtgtcttcccattgggatctcaaccacactcatccatcagcatgtcagggtcaacgtctttttgaaaagttgctccagctgacttcgcaaaatattgaaatcaagctagtgagtgatgtaacagctgattcaaaggtattagaagccttgaaattaaaggagaagaaccacttcgcgtcagaatagacactggatctctacttttcacttgcctgccaaatgaaaatccttttcacgctatatatttaaaaaataatatagtcaggtcctggagtctatgaaacattgcctgattcatgagtttaaagacaatt

SEQ ID NO: 86087 - DNA, 461 bp, Homo sapiens
  misc_feature (1)...(461): n = a,t,c or g
gacagggcggnggaannnncgagaagcagatgacaggctcaggccttaccagggatgcacttgccacatttttgattgactacataaaaaacctttaaaaattggagccctttgggcctcaggtatccaaagagcacattttttggaaactcaacactcaggaaggtcgcatagagccagtttatgcagatgtcatccatactgtagggccaatagccaggggccatattaatggttcccacaaggaagaccttgcaaattgctataaatcatctctgaagctcgtgaaagaaaataacatccgatcagttgcatttccctgcatctcaacaggcatttatggctttcccaacgagcctgctgcagtcattgccctcaacaccattaaggaatggcttgccaagaatcaccatgaggtggatcggatcattttctgtgtcttcttagaagttgacttcaaa

SEQ ID NO: 86088 - DNA, 412 bp, Homo sapiens
gggcccccaaatgctgtgtaagaagatctacttcatctgggtgacacggtcccagtgtcagtttgagtggctggctgacatcatgcaagaggtggaggagaacgaccaccaggacctggtgtctgtgcacatttatgtcacccagctggctgagaagttcgacctcaggaccaccatgctatacatctgcgagcggcacttccagaaagtgctgaaccggagtctgttcacgggcctgcgctccatcacccactttggccgtccccccttcgagcccttcttcaactccctgcaggaggtccacccacaggtgcgcaagatcggggtgttcagctgcggccctccaggaatgaccaagaatgtagagaaggcctgtcagctcgtcaacaggcaggaccgagcccacttcatg

SEQ ID NO: 86089 - DNA, 2147 bp, Homo sapiens
cgttgctgtcggcaataattaaggagcctatagatctcaagaccattgcccagaggatacagaatggaagctacaaaagtattcatgcaatggccaaagatatagatctcctcgcaaaaaatgccaaaacttataatgagcctggctctcaagtattcaaggatgcaaattcaattaaaaaaatattttatatgaaaaaggctgaaattgaacatcatgaaatggctaagtcaagtcttcgaatgaggactccatccaacttggctgcagccagactgacaggtccttcacacagtaaaggcagccttggtgaagagagaaatcccactagcaagtattaccgtaataaaagagcagtacaaggaggtcgtttatcagcaattacaatggcacttcaatatggctcagaaagtgaagaagatgctgctttagctgctgcacgctatgaagagggagagtcagaagcagaaagcatcacttcctttatggatgtttcaaatcctttttatcagctttatgacacagttaggagttgtcggaataaccaagggcagctaatagctgaacctttttaccatttgccttcaaagaaaaaataccctgattattaccagcaaattaaaatgcccatatcactacaacagatccgaacaaaactgaagaatcaagaatatgaaactttagatcatttggagtgtgatctgaatttaatgtttgaaaatgccaaacgctataatgtgcccaattcagccatctacaagcgagttctaaaattgcagcaagttatgcaggcaaagaagaaagagcttgccaggagagacgatatcgaggacggagacagcatgatctcttcagccacctctgatactggtagtgccaaaagaaaaagtaaaaagaacataagaaagcagcgaatgaaaatcttattcaatgttgttcttgaagctcgagagccaggttcaggcagaagactttgtgacctatttatggttaaaccatccaaaaaggactatcctgattattataaaatcatcttggagccaatggacttgaaaataattgagcataacatccgcaatgacaaatatgctggtgaagagggaatgatagaagacatgaagctgatgttccggaatgccaggcactataatgaggagggctcccaggtttataatgatgcacatatcctggagaagttactcaaggagaaaaggaaagagctgggcccactgcctgatgttgatgacatggtttctcccaaactcaagctgagtaggaagagtggcatttctcctaaaaaatcaaaatacatgactccaatgcagcagaaactaaatgaggtctatgaagctgtaaagaactatactgataagaggggtcgccgcctcagtgccatatttctgaggcttccctctagatctgagttgcctgactactatctgactattaaaaagcccatggacatggaaaaaattcgaagtcacatgatggccaacaagtaccaagatattgactctatggttgaggactttgtcatgatgtttaataatgcctgtacgtacaatgagccggagtctttgatctacaaagatgctcttgttctacacaaagtcctgcttgaaacacgcagagacctggagggagatgaggactctcatgtcccaaatgtgactttgctgattcaagagcttatccacaatctttttgtgtcagtcatgagtcatcaggatgatgagggaagatgctacagcgattctttagcagaaattcctgctgtggatcccaactttcctaacaaaccaccccttacatttgacataattaggaagaatgttgaaaataatcgctaccgtcggcttgatttatttcaagagcatatgtttgaagtattggaacgagcaagaaggatgaatcggacagattcagaaatatatgaagatgcagtagaacttcagcagttttttattaaaattcgtgatgaactctgcaaaaatggagagattcttctttcaccggcactcagctataccacaaaacatttgcataatgatgtggagaaagagagaaaggaaaaattgccaaaagaaatagaggaagataaactaaaacgagaagaagaaaaaagagaagctgaaaagagtgaagaa

SEQ ID NO: 86090 - DNA, 454 bp, Homo sapiens
tggatttgacgcggaatttcctacttgtccctgatttcagatttgtacatatatagcactgaattttttacagaaagttgagtgctttagagaaacttagggggcctgttaaggtctcatttgtttcttattattttctgtaccttcatgaatagaattctagcctcatattttttctttggagtcaaagaattgttttgtaaaagcatagatctattcttggaatagtctattaaaaatcactttcgacttcatttaaattgtttgactcagtctctcactgggcattttctaggagcccactaaatgaggatgtttttgctaccaaaattaaaaagatgaacgataatgacaaagacataacagaattacaagaacaaatttacaaacttctcttacagccagttcacgtgagcgtgtccagcggctacgggagcctggggagcagcgggtc

SEQ ID NO: 86091 - DNA, 454 bp, Homo sapiens
  misc_feature (1)...(454): n = a,t,c or g
tgcgtcggaatttgcggccactgtcttgataactgaagagaaagcctgcgtagtcatcatcagtcactgtgttcacatggtttgtgccttcaaagtccacaccattgaaggccgtgtatcctggggtgggggtgggataaaggtcaggggcagcaaagctactggcggcccatcatggggtaaagttgggaagggatgcctgctatgtatgtggccagcttgtgccactgccttctctctcgccactttgcccattctccctgtctgtttcctcccctaccctctgcccctataggattcctccatttggaagtgattgaactgcatatcccttacataccaactgccaagccagggtcactgttcatggtctgaacgaattccatgccctggngttgtataagaaagaaaaaagctgtgatgcaggtgtgctatcccttccagggccccccgg

SEQ ID NO: 86092 - DNA, 468 bp, Homo sapiens
gtccagtgtggtggaattccgccagcgcccccggagtccactgtgcgccctgcgcccccgacgcgccccggggaaagttcctactcgtcaatttcacacgtaatttacaataaccaccaggattcctccgcgtcgcctaggaaacgaccgggcgaagcgactgccgcctcctccgagatcaaagccctgcagcagacccggaggctcctggcgaacgccagggagcggacgcgggtgcacaccatcagcgcagccttcgaggcgctcaggaagcaggtgccgtgctactcatatgggcagaagctgtccaaactggccatcctgaggatcgcctgtaactacatcctgtccctggcgcggctggctgaccttgactacagtgccgaccacagcaacctcagcttctccgagtgtgtgcagcgctgcacccgcaccctgcaggccgagggacgtgccaagaagcgcaag

SEQ ID NO: 86093 - DNA, 453 bp, Homo sapiens
actcggtgcaattcgtgattgatgcaaatgtgcctgtgtggttacatgcacacacatttgcaaataataacttacatctattaatttaaaacacaggagagtaaatagagatggaatttcaatcttaaaagagattcgaacctatggaaattgagcagaaatgctttctaatggctgttattttgtttttcagacactcatccttgattctccttcattgcctttttcatggggctcttattaaaggcttctgacacttaaatgagctctctttagaaaaacagaaatagaaattaaatagatggctttgtttcttttacagctggtcttttgggatcctgctctatgagatggtgactctaggagcaccaccgtatcctgaagttcctcctaccagcatcctagagcatctccaaagaaggaaaatcatgaagagacccagtagctgctcac

SEQ ID NO: 86094 - DNA, 423 bp, Homo sapiens
gcggtggaattcagagaatctgcccccctgggttctatggccacggctgcgcccagccatgccccctctgcgtgcacagcagcaggccctgccaccacatcagcggcatctgtgagtgcctcccaggattctctggagctctctgcaaccaagtgtgtgctggaggatactttgggcaggactgtgcccagctctgctcctgtgccaacaacgggacctgcagccctatcgatggctcctgccagtgctttcctggatggattggcaaggactgctcacaggcttgcccacccgggttctggggccccgcctgcttccacgcatgcagctgccacaacggggcgagctgcagcgccgaggacggggcctgccactgcacccctggctggactggactcttctgcacacagcgctgcccagcag

SEQ ID NO: 86095 - DNA, 526 bp, Homo sapiens
gcggccgcgggctcctcgcgttgaccttctgcctgttggccgcgcgcggggagctgctgttgccccaggagacgactgtggagctgagctgtggagtggggccactgcaagtgatcctgggcccagagcaggctgcagtgctaaactgtagcctgggggctgctgccgctggaccccccaccagggtgacctggagcaaggatggggacaccctgctggagcacgaccacttacacctgctgcccaatggttccctgtggctgtcccagccactagcacccaatggcagtgacgagtcagtccctgaggctgtgggggtcattgaaggcaactattcgtgcctagcccacggccccctcggagtgctggccagccagactgctgtcgtcaagcttgccacactcgcagacttctctctgcacccggagtctcagacggtggaggagaacgggacagctcgctttgagtgccacattgaagggctgccagctcccatcattacttgggagaaggaccaggtgacatt

SEQ ID NO: 86096 - DNA, 412 bp, Homo sapiens
cactactttgtaacatcaacaacaaaacccatatgtattgggaactgcaagtgtaatcactcagctggtattggttctctagctataccaaatgggtttggtaccagtccactaactccctctgctaggatatcagcactaaacatcgggggggatctcttacggaaaggaggggtaagtttcaattatttatcactaggtgtttccactgacaaggaattgaaatatttcttactttgaagtgagggacgaaagattggatactttcctgtggaaaaggctgtcatgaagctcatatgcataagcatccattgactttcctagttccgatgacactccctgatgtgtgtgcagaagaacgttgaccttctactttgaggctcaaagggggctttttttatgctccggaatt

SEQ ID NO: 86097 - DNA, 393 bp, Homo sapiens
tgcctcttcccataagatgacggggaaaacatcaaaaacattgagattcattttgtgtggtatacagattttttaaaaattaacttgtgcccagtttctaaatcatctaatgtaaagatacatgcatttcaggaaattatgaaagtaaacgtcaaagaaaaccaactaagaaacttcttgaatccaatgatttagaccctggatttatgcccaagaagggggaccttggcctttctaaaaaggtatgttatttttgtaagttctaaaagaaataaactcaggaaatgagaaattttaaaaatgacattttgagtagcagttataacattgatgtacatacatatagaaattagtgtgtgtgtcagcagtcatacatgatctgagatttcctat

SEQ ID NO: 86098 - DNA, 433 bp, Homo sapiens
  misc_feature (1)...(433): n = a,t,c or g
tcaggagcaattcctgtcccagcgacgagtgggcacgagaggcagatgtgcggccccgggcacacttatggtttcagctctctgtgcctgagtaccgcagccgcgtctatcaaatgatcctggagtgtggaggcagcagcggcacctcgagagagaagggcccggagggtgtctccccaagccaggcacacctgcacaaacccagagccgaccctcagctgccttctaggacacctgtgcagggtcccagacccaggccccagagcaggccaggccatgaccctgccgagcacgagtccccccgtgcagccaagaacgttcccaggcagaactccgctcccctgctccaaactgctctcctagggaatggggaaaggccccctggggcgaaggaagcgccccccttgacactctcgctggtgaaaccaagcgn

SEQ ID NO: 86099 - DNA, 442 bp, Homo sapiens
gcactaggccagtgcggtggaattccagccccagagcaggtgcccgggagctgggggagttccatgccttcattgtctcggacctgcgggagctccagggtcaggcgggccagtgcgtcctgctgctgcggatccagaacccctggggccggcggtgctggcaggggctctggagagaggggggtgaagggtggagccaggtaaatgcaacggtagcatctgagctcctgtcccagctccaggaaggggagttctgggtggaggaggaggagttcctcagggagtttgacgagctcaccgttggctacccggtcacggaggccggtctcctgcagagcctctacacagagaggctgctctgccatacgcgggcgctgcctggggcctgggtcaagggccagtcagcaggaggctgccggaacaacagcggctttcccagcaa

SEQ ID NO: 86100 - DNA, 444 bp, Homo sapiens
tctagtccagcgtggtggaattcggcctgcatgcagttcatcaacatcgtggtgcactcggtggaggacatgaactttcgggtccacctgcagtatgagtttaccaagctggggctagaggagttcctgcagaagtcaaggcacacagagagcgagaagctgcaggtgcagattcaggcatatctggacaacgtgtttgatgtcgggggtttgttggaggatgctgagaccaagaatgtagccctggagaaggtggaggagttggaggagcatgtgtcccatctcacagagaagcttctggacctagagaatgaaaacatgatgcgggtggcagaactagagaagcagctgctacagcgggagaaggaactagagagcatcaaggagacatatgagaacacaagccaccaggtgcacaccctgcggaggctcattaaagagaag

SEQ ID NO: 86101 - DNA, 170 bp, Homo sapiens
  misc_feature (1)...(170): n = a,t,c or g
agcgnctttggaggaaatcccgttcaccccataataatggcacatgttttgggacggatctcaatcgaaatttcaatgcatcttggtgtaattcaagttggacagaaggcagcaaatgcattgaaagcaaagtatggaaccaattatagagttggaacgagtgccgatat

SEQ ID NO: 86102 - DNA, 424 bp, Homo sapiens
ttagtccagtgcggtggaattccagcagcaaaatacacatccttctcaagtgcacatggattattctctggggtagatttcatgctaggccatagaacaagtctcagtaaatttaaaagaattgaaattatactacatatgttctctgaccatgttggaataaaatcagaaatcagtaacaaattttgttaatttctgtattaatgaagaaatatacaagtaaagaggttggactaataataattcttttaaaacttcccacagggaaaagcccaggaccagattgtaagccagatggtaaggaattaacaccaatatttcatagagtctcctaaaaaatagaagagaagaaaatactcctcaattgagaagagtgtcctcaactttatgaggtcactcttaataccctgataccaaaaccaga

SEQ ID NO: 86103 - DNA, 421 bp, Homo sapiens
ggaattcctcttctcagggtcctggtacagatgtgcaagatgaaggcctttggagaactgtgccccaacaccgccccattgccccagctggtgactgaggccctgcagactggcaccactgaatggttccacctgaagcagcagcaccatcaacccatggtgcagggcatcccggaggcaggcaaggccttgctgggcctggtacaggatgtcattggcgacctgcaccagtgccagcgcacatgggacaagatcttccacaataccctcaagatccacctcttctccatggctttccgggagctgcagtggctggtgagtccctcccccgtctctagggcatgccctccgacagagctgtgggccccgccctccacacctttcctttgcaggtggccaagcgggtgcaggaccacacgac

SEQ ID NO: 86104 - DNA, 399 bp, Homo sapiens
gtgtggtgtaattcgtcctccttttttagcagtgagtaagtcaaggccttggcggttttggaggacaaccgcagctaaagagtcaacctgggcctgaaggattaataaagtttgtgatatgtctgcgatgctagcagagaagttattagagaagctacggaaggttgtgagaagattagcagcctggtgaattttctgtctagcctgctggaggactggaagatagttgcccagagggctggtgtctggaacaaggttggggccaagcaagaaagcacatccatataaaagttcaaaagggctgtaccctgtagcatctcaaggacagacgctaattctgagaagggcaggaagtaaaaggactggccaggccttctttaagtggaaggttgagcttgg

SEQ ID NO: 86105 - DNA, 386 bp, Homo sapiens
gtccctgtggtggaattcgcactgtgctccttgctggggcctggggctgccagcacctactccccacagacacttttggggtgttggggtatgttgctgcaaggcctaccgccggggcttccgcagctgctcagacacaggatagtgagtctgactcagacctcctgcttggggttgacccggtgtcccctcccaggccctcaggaaagcagagagcttgaagaaatgtctctctgtcatggaagccaaagtgaaggctcagactgctccaaacaaggatgtgcagagggagatcgctgaccttggagaggtaggggcggcttccctccctccgtcctcagggcctggtgcatgaaacatgccccgtcttcaggaaatcatctgtg

SEQ ID NO: 86106 - DNA, 119 bp, Homo sapiens; identical to SEQ ID NO: 85074

SEQ ID NO: 86107 - DNA, 416 bp, Homo sapiens
  misc_feature (1)...(416): n = a,t,c or g
gttttcggaccatcgnggaagaattccggaatcctgacctctgcctgccggtctgtgggatcaagtgttttatacccctgtcagcgccatccctgagcctggggacaggagatgtgtccactcacagcttattctttgtcccgcccttggggacagtattccctgccgggatcctccagccccccttcttcagcaaggagcagccacaggccttgaactttggaggcattgggatggtgatcgggcacgagatcacgcacggctttgacgacaatggccggaacttcgacaagaatggcaacatgatggattggtggagtaacttctccacccagcacttccgggagcagtcagagtgcatgatctaccagtacggcaactactcctgggacctggcagacgaacagaacgtgaac

SEQ ID NO: 86108 - DNA, 443 bp, Homo sapiens
gtccagtgtggtggaattccaggaactaaattcaccacattttaaattcacattttttaaaaacagtttatggttaaactgggcaggaggcatattttgtgggtaacatacttctgactgggtacaggatcagagaggagagcccggtgcagctggagcgtgcacagtacctgtcgttcttgatgggaactccacttgcagctccaggactccagttcctattattcggctgccatgaacctaacagaaggaacttcagctctgtgccgagctgcacttggatcccggctacaggggcccttgatctggaccctgtgcttcagagggcaccattctggccctctgccagccaggcccaccccacatggccaaagggacattcacctacatcccacaccttcttctagaccatgctctctgcacctggaactgtagcagttccc

SEQ ID NO: 86109 - DNA, 436 bp, Homo sapiens
tccggcgggtggaattcgcctgtggttgcctcctctccacgcccccgaagtggcctgtggttccctcctctgcatgccccggatgtggcctgtggttccggagaggccgggcctgaccttcccccctcctcctcctctccatgcccccgatgtggcctgtggttccgcagagtccgggcctaaccttcccccctcctcctcctctccatgcccccgatgtggcctgtggctcctgcgagttgctgatgactccgcattgaagctctctgagttctttgattttaagttgggtttatggaattttttcaaatgctggaaggtgtgtggttcttcctgccctccctccccttttggaaatatgaaagcaaatgcttagaagaattccttttgaaaagctgtgtcgtgttccctgtgaaactgagcacgtgtgtgttgg

SEQ ID NO: 86110 - DNA, 1087 bp, Homo sapiens
gaattcacggagaaaaactacaatagcttcgtgctgcagaacctgaacagacagaggaaacgcaaagagtactgggacatggccctgagtgtggacaaccacgtcttctttgcacatcgcaatgtgctggctgctgtctccccactggtgaggagcctcatctccagcaatgacatgaagaccgctgatgagcttttcatcaccattgacaccagttacctgagcccggtcacagtggaccagcttctggactacttctatagcggcaaggtggtgatctccgagcaaaatgtggaggagctgcttcgtggggctcagtatttcaacacaccacgccttcgagttcactgtaacgacttccttattaagtccatctgccgtgccaactgcttgcgctacctcttcttggctgagctgtttgagctcaaagaggtatcagacgtagcttactctggcattcgggacaacttccactactgggccagtcctgagggctccatgcacttcatgcgctgtccacctgttatctttggccgcctgctccgtgatgaaaaccttcacgtgctcaatgaagaccaggcgctcagcgcactcatcaattgggtgtacttccggaaggaggatcgggagaagtatttcaagaagttcttcaattacatcaatctcaatgctgtctccaataagacgctggtgtttgccagcaacaagctggtgggcatggagaacacctcatcccatacaaccctgattgagagtgtcctgatggaccgcaagcaggagcggccatgcagcctgctggtctaccagcggaaaggggccctgcttgattccgtggtcatcctcggtggccagaaggcccacggccagttcaatgatggagtgtttgcttatatcatccaggagaacctgtggatgaagctttcagacatgccctatcgggcagcagcacttagtgccacctctgctggtcgctacatctacatctctggtggcaccactgagcagatttcagggctgaagacagcctggcggtatgacatggatgacaactcctggaccaagttgcctgacctgcccatcgggcttg

SEQ ID NO: 86111 - DNA, 421 bp, Homo sapiens
  misc_feature (1)...(421): n = a,t,c or g
gtggtggaattcatcgcaggtatatttagggcatgtagggaactccatgagtattgagtgtgtgtgtgtgttcaagggcatggcagtttggatgaatgttttgtggagctatgtgcttgtatttttcagtgagtggttattagggttatatattctgggaatgtagtatatgtgtctctgatagagagatggggttctgtgtttatacaggagagtgagagaattgaatttatatgtattagaggtatgtgatatggttattggttagtacttggcaatgtgagagacactcccctcgtttacaaagcagtgcccagctggtttgtgcgagtggagaatatggtggaccggttcctaaggaacagtgacctgtgctaccggtgagcagtaagatgtgtntctttcgaatgtcctttgtcag

SEQ ID NO: 86112 - DNA, 440 bp, Homo sapiens
tagcgtggtgcaattccctgtgagcactccttcaggggctatcctcatccaggcggagccgccggcaggacgtccggcacggaaaccccatcaggcagtgccgtgggttcaactccaatggtgagtatgctgggcctcactgtggggtgctgctcacactgcagaagtccacgcagcccacgaagctgctcacagggcccccactgtaagggtgctctgatggctaatggagggtgggggctaatggagatgggatgtccctagttgccccatcaacacagagcactacattggtgagtgggtgcccctcggtgcttgccccgaagcagtcagcaggctgcccggaggtgatgctgcttttgctcaacccctctcactctaaagccaacaagaatgccgtggagtctgtgcagtatggcgtggccggcagcgcagccttc

SEQ ID NO: 86113 - DNA, 447 bp, Homo sapiens
ctagtccagcgtggtggaattccgacaactaagatcagttgatgtggatgcagcaggactatttcttatactgattcttcaccaacaccatgtcaacaagtacaacatatataatcttgtacgatgcatgcagcttcgcctttgattctgcccctaccttctttgagggattatgtggtcacgtatcttttcttagatgcattttcaaggtgatcttataagagaggatctcttctgggagactgctgagctctctgagctgtgctgtctgatccagcagcctctgggcacatgtggccagtgcccaccacgaactggcctagtgcccagagctgctgccagcatcaccagacagcgggcttcagagactcagtacaaaaggagaacgcgaaagagtgcatgagaacttttatgtcaatcgtatgtgatgaaacgataatattttgg

SEQ ID NO: 86114 - DNA, 414 bp, Homo sapiens
cgtggtgggaacgtgaatgtgagaaaaccttcttttgtcaatctgccctcaatgtgcatcttttaagtcatacaggagagaagccctatgaatgcagtcaatgtggaaaatttttatgtacgaaatcagccctcattgcacatcagataactcatagaggaaagaagtcttatgaatgtaatgaatgtgggaaatttttctgccataagtcaacactcactatacatcagagaacacacacaggagagaaacatggtgtgtttaataaatgtggtagaatctccattgtgaagtcaaactgcagtcagtgtaagagaatgaacacaaaggagaatctttatgagtgtagtgaacatgggcatgccgtcagcaaaaactcacacctcattgtacatcagagaactatatgggaga

SEQ ID NO: 86115 - DNA, 441 bp, Homo sapiens
agcgtggtcgaattcgctgaagtcatctggccaagggagaaggaagcccggaaagtgtgaccaagaaaaacccgcacccagctttgcatgtctgaaagagctgtatgacctccgccagtaagagcctgcctttctgtggagttacagcagggactgtctcatgtcattggcacattctgatttccagtagattgaaagtaccattttaagaaaagtcacttagctattaagctaccattggtttgaacaaaatcacttaaacatataaattacagagttcttagatattagtagttctcattttgaaagtcttggaacacttatttcagtgcttttaatgtattaaatcatagtttaagatgaattctgatagactagatttgggagttgtgttttacattagagtgaagaaaaacagaaatactggtaaaacaaaaattc

SEQ ID NO: 86116 - DNA, 437 bp, Homo sapiens
tacaccagcgtgttggaattccgatggcatcggcatagatttcaataccatcatccgcacgtcgcccatttccttggtggcctacatcaacgggtcgaggggttcggcggccaacctgtccccgcagccggaggtctacgggcatttcctgggcgtgcgcggcagctgcattccccagccgcgcccggtgcccggcagccagaagggcgtgctggtggcccctggaggcctggcgctgccggcctacggcgaggacggggccctggagcacgagcgcatgcaacagctggagcacggcggcctgcagccaggcctggtcaaccacatggtggtgcagcatggcctgccgggccccgacagccagccggccggcctgttcaagaccgaacgcctggaggagttcccgggcagcaccgtatacctacccaccgcgcctt

SEQ ID NO: 86117 - DNA, 438 bp, Homo sapiens
ttcgttgacctctagtccagcgtggtggaattcgtttgcccttgaacgaggcctccaatagactcttctgtgtgttcttaatgagcagttgtgaacatctctttaggaactcattgccttctgcggcagcatagggcatgggctacctccacgccaagggaatcctacacaaggacctcaagtcaaagaacgtcttctatgacaacggcaaagtggtcatcacggactttggactcttcagcatttctggggtgctgcaggctggcaggcgggaggacaaactgcgcatccagaatggctggctatgccacctggcaccagagatcatccgccagctgtcccccgacacagaggaggataagctccccttctccaagcactctgacgtctttgcccttggcacaatctggtatgaactccacgccagggaatggcctt

SEQ ID NO: 86118 - DNA, 430 bp, Homo sapiens
tggtggacttcatcgtgactatggccatggatcctatgggggtcagagatccatggattcctacctaaaccagtcatatggcatggacaatcacagtggtggtggtgggggtagcaggtaaattgcttaatcatttggccaaataattagacaactataagattttggatatattattttaagtactctttaggcatgttatgatacttgaacttcactgtttgctatagaatcatcaccttaaatatttaaaggtgttaattaatgggtataaaatttaaatcagtattactggcagacgttattttaggaaaacaccagataactatatcatgtcaatataatagagtaagatacactttttagcagtgaacttttaaaaaattcttttacttttaacttcttgtcaatcaaagtatcctgaaaaatg

SEQ ID NO: 86119 - DNA, 520 bp, Homo sapiens
gcaaggacgctgacatctatggaggctcagactgatgatctcatcaaattgtcccaagctgctaagatcatggagcggatggtcaaccagaatacatatgatgacattgctcaagattttaagtactatgacgatgctgctgatgaataccgggaccaggtgggtaccctgctgccgctctggaagttccaaaatgacaaagccaagcgcctgtccgtcactgccctctgctggaatccaaagtacagggatctgtttgcagtgggatatggctcttatgacttcatgaagcagagccggggcatgctgctgctctacagcctgaagaaccccagcttccctgagtacatgttcagcagcaacagcggcgtcatgtgtctcgacatccacgtggaccacccctacctggtggcagtaggccactatgacggcaacgtggccatttacaacctcaagaagccccactcccagccctccttctgcagctcagccaagtctggcaagcactcagaccctgtgt

SEQ ID NO: 86120 - DNA, 442 bp, Homo sapiens
cgtgtggtggaattcgttgagtctgatcccaggatgggggaagagcagagccatgcctgccccacacgggctggccgccagagccacctctctctcaggcagggcggtggcagagagttggcatcagtcgcagccctgttctccctccttacccaggggctccgcctatgccaacatcatctcccagtttgcacagaccgtcttcctccttctctacattgtgctgaagaagctgcacctggagacgtgggcaggttggtccagccagtgcctgcaggactggggccccttcttctccctggctgtccccagcatgctcatgatctgtgttgagtggtgggcctatgagatcgggagcttcctcatggggctgctcagtgtggtggatctctctgcccaggctgtcatctatgaggtggccactgtgacctacatggtaagg

SEQ ID NO: 86121 - DNA, 475 bp, Homo sapiens
  misc_feature (1)...(475): n = a,t,c or g
atctacatatgtgtacatagatgtatatattagaagcctgaaacttttttattatcctgtttggctggattgactgctgtttccagtagaatgttttactaaaactcaatttaataaacaggaaaagacagagatgcttttatgatagagttgaagttcagccacctgagttttcatcagtatcattaatcacgttgcctgcctaccacataaggcaaggtcccattgtactgatcactcggccacatcttttcacacccccgccacccccacccccctgtcctgctttccacttggcattcctgcttcccagttcccacagcatttgtgatttcccacagctggcccgttggaagaagagcgagttggcttccctgcattcagcggcatctctcgcctgacctggctggtctccctctttgaagagctntctcttgtgtctgccactttggaagagcganaggaagatcagtat

SEQ ID NO: 86122 - DNA, 527 bp, Homo sapiens
atggtggtcacccttgagaaggggcgcttccagcttggagatacacagctccgagcccaccagagacaccacaaaacagaacttttctgccctctggtgttaaaagaaggaagagattttgctgggaagagatttgggcatgtgagtgtggcacacctcctgttggatcacggggctgatgtcaatgcccagaaccggctgggggccagtgtgctcactgtggcttctcggggcggccacctgggtgtggtgaagctgctcctggaagccggtgcctttgtggaccatcaccacccttcaggcgagcaactggggttgggcggcagcagggatgagcccttggacatcacagccctgatggctgccatccagcacgggcacgaggccgtggtgcgtctactgatggagtggggcgcggaccccaaccacgcagcccggaccgtgggctggagcccgctgatgctggccgcactcactgggcggcttggagtggcccagcagctggtggagaagggcgccaaccctga

SEQ ID NO: 86123 - DNA, 430 bp, Homo sapiens
agtgcggtggaattcctgtgttaactgtagttgtgccttcggaaatggagcctctctctccacaagtttaggggagagcagtggatgcctgtgggaaattgggaaatggttgagttgcagcttgctgtcttttccttcccccttagctgttctcatcatcaccttctgcattgtgaccgtgcttggaagggaggctctcaccaaaggggcgctgtgggcagtctttctgctcgcagggtctgccctcctctgtgccgaggtcacgggcgtcatctggaggcagcccgagagcaagaccaagctctcatttaaggtgagcagctcggcctagggaaggaaccctggtacacagaccctggccctcctgatgcctggccagccctgcgtgggctcagccgggcctgggtgctcccgaggaaggtttttgctt

SEQ ID NO: 86124 - DNA, 441 bp, Homo sapiens
tctttgaggtaaaggagatcttcaggaagtcacctttcttttttctaaagggcagtgttagcatcatggatggatccgacgaatgcatattatcttgggttactgcgaactttctgacaggtaatacatcctcaagtttatctttagagcttaactagcttttacatgcatagtcagaggagtaaaagccttttcttttattctgtattgtttcttcttctttaataaaaggaaaagaggctggctgtgcagttcatgcctgttaattcaggctttgtaggctgagttggctgatccttgatccagttgtcaagatcagcctgccattatgtgaaactatggttctaccatatttctaaaatagctgggctgtagtgtgtactgtgttcctgtactctggtgtttagaacacttttctcattcgttctgttttgttgtttg

SEQ ID NO: 86125 - DNA, 549 bp, Homo sapiens
  misc_feature (1)...(549): n = a,t,c or g
anagaaggcacagcagaagcatttgtgaacagcataaacgcacctgcttcagaaaggacactgtgggcaagagaaagaacacaagatttagcaccacttgagaagcactctgtaggagaaaatactatggtcaccaagactcatgaccaaccagttgaggaggaggatcggtaccagggggaggaccctgagtcaccattcacacagagtgatgaggggtcttctgaaactcccaacagcctggcttcagaggaaggcaatagcagctcagagacaggtgaactgcctgtgcaaggggactcccagagtcaaggggaccaacatggagagtctgtgcaaggaggtcacaataataacccagatacccagaggcagggaacacctggtgagaaaaacagagctctggaggcagtggtaccagcagtcagaggagaggatgtacagctcacagaggaccaggaacagcctgccagaggagaacacaagaatcaaggccccaggaccaaaggcccaggtgcagctgtggagctcaatgtacactcagatccg

SEQ ID NO: 86126 - DNA, 408 bp, Homo sapiens
cccgggtcgacccacgcgtccgcttgaatttatcattacttaggaattaagagttattatgcacatggcttcctgaagtccgcgggccgagcctccatgtatccccacactttgcacagcggtcagcacagtaagcgttggatttctcttttgctgtgaaaggtatgagagtgaactgtcccttcgccagctgttagaggctgacatcagcagcctgcatgggatcctggaggaactgaccctgtgcaaatctgatctggaggcccatgtggagtctctgaaggaagatctcctttgccttaagaaaaaccatgaagagacgaagaaactgaggcccttctacgtggtgaaaagagattcagcccaggcaatctgaatcaaaatctcacacttttacccactgctcca

SEQ ID NO: 86127 - DNA, 385 bp, Homo sapiens
agcagcacaggctgaagatggagaatgtttttttcgcgcggaggaagaagaataaagcgccggcggcggccagcgaggaggctgtattcccgtccgaggtggaggatgatgagaaggaggcgtcgggcgtgagcggaaatgaggaggagatggtggaggaggctgaagccactgtcaacaacagctcagacaccgagagcatcccctcttctcacactgaggccgccaaggacactgggcagaatgggcccaagcccacagccaccctgggcgctgacggtgcacccacagggccacccagactaccaccggatgacatgccggcccccagtgagccgaccccggcctctgaagccaccggagcccctaggccttcaccagcacc

SEQ ID NO: 86128 - DNA, 763 bp, Homo sapiens
  misc_feature (1)...(763): n = a,t,c or g
cgctcgatttcgggcgacacgcgtccgccagtcgattttacaaatgatgctctctctccaaaattcaacctgtcatcaagcatatccagtgagaactcgttaataaagggtggggcagcaaatcaagctctattacattcgaaaagcaaacagcccaagttccgaagtataaagtgcaaacacaaagaaaatccagttatggcagaacccccagttataaatgaggagtgcagtttgaaatgctgctcttctgataccaaaggctctcctttggccagcatttctaaaagtgggaaagtggatggtctaaaactactgaacaatatgcatgagaaaaccagggattcaagtgacatagaaacagcagtggtgaaacatgttttatccgagttgaaggaactctcttacagatccttaggtgaggatgtcagtgactctggaacatcaaagccatcaaaaccattacttttctcttctgcttctagtcagaatcacatacctattgaaccagactacaaattcagtacattgctaatgatgttgaaagatatgcatgatagtaagacgaaggagcagcggttgatgacttgcttcaaaacctggggtctcttacccggagtccnggggtcgttgggggactntttctactaataggtccctgttagggggttctctaagggtttttgggttttcagggagggttnccacacaacantttcaggaggaaaaaggggagntgggcatttnagggacttcccgnccc

SEQ ID NO: 86129 - DNA, 411 bp, Homo sapiens
aaactatctctgcatcgctaagaacagtgcgggcagtgccatggggaagacgcggctggtggtgcaagtcccaccagtgatcgagaatggcctcccagacctgtccaccaccgaaggctcccacgccttcttgccttgcaaggcgaggggcagtcctgagcccaacatcacctgggacaaagatggccagcctgtgtcgggcgccgaggggaagttcaccatccagccttctggggagttgctggtgaagaacttggagggccaggacgcaggcacctatacctgtaccgctgagaacgccgtgggccgggcccgccgccgcgtgcacctcaccatcctggtactgcctgtgttcaccaccctgcctggggaccgcagcctgcgccttggggacaggctgtggcttcgctg

SEQ ID NO: 86130 - DNA, 407 bp, Homo sapiens
cccacgcgtccgccacgcgtccgctttgataatgagtttgatgcagaatctcaaagaaaacgaacgacatctgtcagcaagatggaaagaatggatagctctcttcctgaagaggaagaagatgaggacaaggaagctattaatggcagtggaaacgcagaaaacagagagaggcattctgagtcatctgactggatgaagactgttccaagttacaaccaaacaaatagctccatggactttagaaattatatgatgagagatgagactctggaaccactgcccaaaaactgggaaatggcctacactgacacagggatgatctacttcattgaccacaataccaagacaaccacctggttggatcctcgtctttgtaagaaagccaaagcccctgaagactgtga

SEQ ID NO: 86131 - DNA, 111 bp, Homo sapiens
ttttttttttttaaaacagagggccctttttgtttcaaggcgggaagggccagggccaaaattttggttaagggaagccctcccccctccagggtataaggccttttttct

SEQ ID NO: 86132 - DNA, 411 bp, Homo sapiens
ggtgcatgtggtcgaacatgggctacaggaaagcctgctgtcctcgctgtccagcaggccccggtacatgttgatctcaccctccagccgggccttcacgtccaggagcacctggtactcctggttctgtcgctccaggtcgcagcggatctcggccagctggttctccaggttatcgatcaggcactgaatctgggccagctgggagctgtactgggcctcggtttctgccacggtgcattccagagattctgtcaggctttgctgtgcttggagctcaatttccagagcactggctgtgcgtttcagttccaagatctccatctggcagccctgcagctgctccgcgctggacagttgctgctgattcagctcttctgtctgaacagccaaccattcttcagcttctct

SEQ ID NO: 86133 - DNA, 526 bp, Homo sapiens
ccaggacttcctgacactgacgctgacggagcccactgggcttctgtacgtgggcgcccgagaggccctgtttgccttcagcatggaggccctggagctgcaaggagcggtgagaggtggggcagtgggaggcagtcgggcctgccagagggcaaggcccagaggggctgtgcttggctaggtggtccctcagcctggctgcccccacagaagtgctgctgggcatccggggcctgccctctggttggggtcagcatgcggcattcctctcctctctggcacttactgaattctgtgtagtggggtggtttggggcttccattctgtactaaaggaagtccccagagaatagggaccatgcctctgcactgggcgtccctgtgttgctgctgcaggctgtgcttgtgacacgtgctcagtccgtacctgtaacgtggctgacatccccttccctttccccagatctcctgggaggcccccgtggagaagaagactgagtgtatccagaaagggaggaacaaccaag

SEQ ID NO: 86134 - DNA, 402 bp, Homo sapiens
caaaagatggttatatccttggaatttataggattccacatggaagaggatgcccagggaggacagctccaaagcctgctgtgtatttgcagcatggcttaattgcatctgccagtaactggatttgcaacctgcccaacaacagtttggctttccttctggcagatagtggttatgacgtgtggttggggaacagccgaggaaacacttggtccagaaaacaccttaaattgtcaccgaaatcaccggaatactgggccttcagtttggatgagatggctaaatatgaccttccagccacaatcaattttatcatagagaaaactggacagaagcgactctactacgtgggccactcacaaggcaccaccatagcttttatagcattttctacaaacccag

SEQ ID NO: 86135 - DNA, 452 bp, Homo sapiens
cccatctgccctgactgcggctgtaccttccctgatcatcaggccctggagagccacaagtgcgcccagaatctaaaaaagccttacccttgcccagactgtgggcgccgcttttcctatccatccctgctggtcagtcaccggcgggcacactccggcgagtgcccctatgtttgtgaccagtgtggcaaacgtttctcccagcgcaagaacctctcccagcaccaggtcatccatacaggggagaagccctatcactgccctgactgtggtcgctgcttccggaggagccggtccttggccaatcaccggaccacacacacaggtgaaaaaccccaccagtgccctagctgtggacgtcgcttcgcctacccctccctgctagccatccaccagcgtacacacacgggagagaagccctacacttgcctcgacccgggaattgcggagca

SEQ ID NO: 86136 - DNA, 480 bp, Homo sapiens
aacttccgggttgacccacgcgtccgcttggggcgggtggggggaaatcagtgcctcagaggtagccttggagggttggctgggacagcatggccctgttgctaaccccctgttttggtgtgtatgtgtgtgccacctacccatgcttgtctctgcgccccggcgcacctggcggggtcccgccaggaagtgcagcggcggctgggtggctggaccggaccagagctcagtgcttttggggaactggtgttggagggcgcgttccgaggaggcggagggggtggcccccggctacgagggggtgagcggctgctcttcctgttctctcggatgctgctggtggccaagcgcagggggctggagtacacctacaaaggccacatcttctgctgcaacctgagcgtgagcgagagtccccgagaccctctagggttcaaggtgtctgatctgaccattcccaagcacagacacctgctccag

SEQ ID NO: 86137 - DNA, 416 bp, Homo sapiens
ctcacacaagaagggaggagagaaaagcatggccgttactgatgtggaaatggtaaactcagtcttcagggcactccatgcacatgtatggagactactgagggaaacaagaaggacagcgataaaacatgatcctcctgaagaagagacggctgcttatcaattcattgggtgaaggaaatgactacagagctggaggcatttgctcaccgcccagagcacaagacctctgacagcaccttcccggtgttcttgtctcatggggttcgggaaggcatttgtgggaagaaatactctgaacaagtccctgatatattacaattcaatgaaatatttaaaatgttgaatagcaagaactgcccaagtttgaaagacaaacccaaggtgatcatctttcaggcctgctggggtgagaa

SEQ ID NO: 86138 - DNA, 419 bp, Homo sapiens
caggacatgatggagcgcgccatcatcgacacttttgtggggcacgacgtggtggagccaggcagctacgtgcagatgttcccctacccctgctacacacgcgatgacttcctgtttgtcattgagcacatgatgccgctgtgcatggtgatctcctgggtctactccgtggccatgaccatccagcacatcgtggcggagaaggagcaccggctcaaggaggtgatgaagaccatgggcctgaacaacgcggtgcactgggtggcctggttcatcaccggctttgtgcagctgtccatctccgtgacagcactcaccgccatcctgaagtacggccaggtgcttatgcacagccacgtggtcatcatctggctcttcctggcagtctacgcggtggccaccatcatgttctgcttcct

SEQ ID NO: 86139 - DNA, 1660 bp, Homo sapiens
cgctggtgttgcggcgctggcgacagtcggggttgcgagcggcccggggccggggcggccagggccgctgcaggacgagaccctgggtgtggcgtccgtgccctcgcagtggagggccgtccagggcatccgcggggagacgaaaagttgccagacggccagcattgccactgccagtgcatccgcccaggccaggaatcatgtggacgcccaggtgcagacggaggcccccgtgcctgtcagcgtgcagcccccgtcccagtatgacatacccaggctcgcagcctttcttcggagagtggaggccatggtcatccgagagctgaacaagaattggcagagccacgcgtttgatggcttcgaggtgaactggaccgagcagcagcagatggtgtcttgtctgtataccctgggctacccgccagcccaagcgcagggtctgcatgtgaccagcatctcctggaactccactggctctgtggtggcctgtgcctacggccggctggaccatggggactggagcacgcttaagtccttcgtgtgtgcctggaacctggaccggcgagacctgcgtccccagcaaccgtcggccgtggtggaggtccccagcgctgtcctgtgtctggccttccaccccacgcagccctcccacgtcgcaggagggctgtacagtggtgaggtgttggtgtgggacctgagccgtcttgaggacccgctgctgtggcgcacaggcctgacggatgacacccacacagaccctgtgtcccaggtggtgtggctgcccgagcctgggcacagccaccgcttccaggtgctgagtgtggccaccgacgggaaggtgctactctggcagggcatcggggtaggccagctgcagctcacagagggcttcgccctggtcatgcagcagctgccacggagcaccaagctcaagaagcatccccgcggggagaccgaggtgggcgccacggcagtggccttctccagctttgaccctaggctgttcattctgggcacggaaggcggcttcccgctcaagtgttccctggcagctggagaggcagccctcacgcggatgcccagctccgtgcccctgcgggccccagcacagtttaccttctccccccacggcggtcccatctactctgtgagctgttcccccttccacaggaatctcttcctgagcgctgggactgacgggcatgtccacctgtactccatgctgcaggcccctcccttgacttcgctgcagctctccctcaagtatctgtttgctgtgcgctggtccccagtgcggcccttggtttttgcagctgcctctgggaaaggtgacgtgcagctgtttgatctccagaaaagctcccagaaacccacagttttgatcaagcaaacccaggatgaaagccctgtctactgtctggagttcaacagccagcagactcagctcttggctgcgggcgatgcccagggcacagtgaaggtgtggcagctgagcacagagttcacggaacaagggccccgggaagctgaggacctggactgcctggcagcagaggtggcggcctgaggggtcccgggaggcgggtgcaagccttcgctgtgccgagccttgtgtttctgacgcaagccaaatgaagaaaagcaaagcttaaaaaaaaaa

SEQ ID NO: 86140 - DNA, 1434 bp, Homo sapiens
caccaccaaatatggacaattcaatggggacagaggaaatcacagttctcaaaggtagttccacctctatggcatgcattactgatggaaccccagctcccagtatggcctggcttagagatggccagcctctggggcttgatgcccatctgacagtcagcacccatggaatggtcctgcagctcctcaaagcagagactgaagattcgggaaagtacacctgcattgcctcaaatgaagctggagaagtcagcaagcactttatcctcaaggtcctagttcctccaagttttcagaaactctgggaaataggaaacatgctagatactggcaggaatggtgaagccaaagatgtgatcatcaacaatcccatttctctttactgtgagacaaatgctgctccccctcctacactgacatggtacaaagatggccaccctctgacctcaagtgataaagtattgattttgccaggagggcgagtgttgcagattcctcgggctaaagtagaagatgctgggagatacacatgtgtggctgtgaatgaggctggagaagattcccttcaatatgatgtccgtgtactcgtgccgccaattatcaagggagcaaatagtgatctccctgaagaggtcaccgtgctggtgaacaagagtgcactgatagagtgtttatccagtggcagcccagcaccaaggaattcctggcagaaagatggacagcccttgctagaagatgaccatcataaatttctatctaatggacgaattctgcagattctgaatactcaaataacagatatcggcaggtatgtgtgtgttgctgagaacacagctgggagtgccaaaaaatattttaacctcaatgttcatgttcctccaagtgtcattggtcctaaatctgaaaatcttaccgtcgtggtgaacaatttcatctctttgacctgtgaggtctctggttttccacctcctgacctcagctggctcaagaatgaacagcccatcccactgaacacaaatactctcattgcgcctggtggtcgaactctacagattattcgggccaaggtatcagatggtggtgaatacacttgtatagctatcaatcaagctggcgaaagcaagaaaaagttttccctgactgtttatgtgcccccaagcattaaagaccatgacagtgaatctctttctgtagttaatgtaagagagggaacttctgtgtctttggagtgtgagtcgaacgctgtgccacctccagtcatcacttggtataagaatgggcggatgataacagagtctactcatgtggagattttagctgatggacaaatgctacacattaagaaagctgaggtatctgacacaggccagtatgtatgtagagctataaatgtagcaggacgggatgataaaaatttccacctcaatgtatatg

SEQ ID NO: 86141 - DNA, 496 bp, Homo sapiens
  misc_feature (1)...(496): n = a,t,c or g
gtccgcagttcccgaatcgacccacgcgtccgatgaagcagtgcaagaacatgcaggagcgcatgctgtcccagctggctgctgctgagagcaggcaccgaaaggtgatcctagaccttgaggaagaaaggcagcggcatgcacaggatacggctgaaggagatgatgtcacctacatgctagagaaggaaagagagaggctgactcaacagttggaatttgaaaaatcccaagtgaaaaagtttgaaaaagaacagaagaagctctctagtcagctggaagaggagcgctcccgccacaagcagctctcatccatgctagtgcttgagtgcaagaaagccaccaacaaggcagccgaggaaggacagaatgcaggagagctgagcctgaacatgaacaaagaggaaaagcaggacactggaaaggaaggtactgcaccatctgaaaatggcgaaactaaagctgaagaggcacagancactgaatctgtagatan

SEQ ID NO: 86142 - DNA, 465 bp, Homo sapiens
agatgaagcctcagatgccaggcctgggagctccaaacggctatggaccaggaaggggcagggctggggttccaggaggtccagagcggaggccttgggtccctcacttgctccctttctcttcaccaggctatttgggggttatgaaggcccagaagccaggtgctggagagggcatgaaacctcagaagccaggcctgcgagggaccttgaagcctcagaagtcaggacacggccatgaaaatgggccctggccaggtccctgcaatgcgagggtcgctccgatgctcctccccaggcttcccactccaggggtcccttcggacaaagagggtggctggggcctgaaatcccagcccccttccgcagtgcagaatggcaagttaccagggcaccagcctccaaatggctatggaccgggagcagaaccaggttttaatggtggcctcgagccacagaaaattg

SEQ ID NO: 86143 - DNA, 425 bp, Homo sapiens
  misc_feature (1)...(425): n = a,t,c or g
gctcgggggctgcccgcaccttacccccgacccagctcgagtggacagcgacctatgagaaggccagcatggcgctggacgtgggctgcttcaatggtgaccagttctcctgcccggtgcactcctggagtacgggggaagaggtggctggagacattctgaggcacagggggctggcagatggctggcgcggctggaccgtggccatgaagaatggtgtccagtgggcagagctggctggccacgactacgtgttagacctggtgtcggacctggagctgctcagggacttccctcgacagaagtcctacttcattgtgggcacagaggggcctgcagccagcaggggaggccccaaagtggtgtttgggaacagctgggactcggatgaggacatgtccactagaccccagccccaggagcan

SEQ ID NO: 86144 - DNA, 561 bp, Homo sapiens
actattttctaaattctgtgctaacagaaccggcttcagctgaagaaagagaggaatgaagcgccttctgcttctggttttgatctttataacattttcttctgcatttcccttagtccggatgatggaaaatgaagaaaatgtgcaactggctcagaataataaactatactccggatatggcacgagctgctgtggatgaggctatccaagaaggtttagaagtgtggagcaaagtcactccactaaaattcaccaagatttcaaaggggattgcagacatcatgattgcctttaggactcgagtccatggtcggtgtcctcgctattttgatggtcccttgggagtgcttggccatgcctttcctcctggtccgggtctgggtggtgacactcattttgatgaggatgaaaactggaccaaggatggagcagatctccatgacaattctcccttttatggacatgatggttgtcttgctcatgcattcccacctggaccaggtatcggaggagatgttcattttgataatgatgaaacaaggaccaaggatttcagaa

SEQ ID NO: 86145 - DNA, 445 bp, Homo sapiens
tggcgggtccacccacgcgtccgctgaacgtctggcgtgctccagtgttccccttgagggaatcccacaccctgactgtgagagaggggcaccctaccaggctgtcctgcgaatgccggggtgtccccttccccaagatctcctggaggaaggacggtcaacccctccccggggagggggctggcctccagcacgtgtcggctgtggggaggctgttgtacctgggacaggcccagctggctcaggaaggaacatacacctgtgaatgcagcaacgtggtggggaacagcagccaggacctgcagctggaggtgcacgttccccctcagattgccggtccccgggagcctcccacacaagtctctgtggtccaggatggagtggccactctggagtgcaacgccacagggaaaccccctccgacagtgacatgggagcgggacgt

SEQ ID NO: 86146 - DNA, 405 bp, Homo sapiens
aatggctggcacaggagtggtctccgtgcacagtgacatgtggccagggcctcagataccgtgtggtcctctgcatcgaccatcgaggaatgcacacaggaggctgtagcccaaaaacaaagccccacataaaagaggaatgcatcgtacccactccctgctataaacccaaagagaaacttccagtcgaggccaagttgccatggttcaaacaagctcaagagctagaagaaggagctgctgtgtcagaggagccctcgttcatcccagaggcctggtcggcctgcacagtcacctgtggtgtggggacccaggtgcgaatagtcaggtgccaggtgctcctgtctttctctcagtccgtggctgacctgcctattgacgagtgtgaagggcccaagccagcat

SEQ ID NO: 86147 - DNA, 732 bp, Homo sapiens
ttataacaccgcatttttactgtgcgttttctgtttagatacacaaatactcaccatggttaacaactgcctacagtattcagtacagtcacatgctgtccaggcttgtagcctaggtgtgtggtgggctataccatctaggtttgtgtgagtatattctgatgtttgcacgacgtcgaaaacgcctaatgatgcatttcttagaacgtatccccatctgtagaagcttacccagcagacaccgtggtgccttcgtggctgtcccaaccatgccttttgtttggttagggtgctctgaacttcctgaatgtagatcattcacagaggcttgcagttgagcaggccacctctgagcagtgcccccagctcaccctggggttggggctgtgacagtgagcagggggcacctctctcgatgcgctgacttggcccttgggacgaggggacccttaaggcccagttgtggctacgtgttggctgttgcatgtctgcccaggacttcagcattcaggcagtgggtgctgttcctccacgcgtgcccgtctctgcaggaggagcggacgctgttccagttggatgaggccatcgaggccctggatgctgccattgagtataagaatgaggccatcacatgccgccagcgggtgcttcgggcctcagcctcgttgctgtcccagtgcgagatgaacctcatggccaagctcagctacctctcatcctcagagaccagag

SEQ ID NO: 86148 - DNA, 430 bp, Homo sapiens
ggtagtggccgacaactgcagacaaggctacctggatgccctgaggttcctggagagacgtggactcaccaaggaaccagtgctatggacgctggtgtctaaggaacccccagccccggctgatggaaactgggatgctggctgtgaccaacgccggaaggggggcctgtctctcaactggaaagtgccccatgtgcaagtcaaggatgtacccaactttgagcagctctcaccagagctggaggctgcactgaagaaagcatgtacgagggatcccagccggtgggcccgcttctggcactcggggcctggacaggtgctgacgtacctgctgctaccctgcacactgcccttcgagtacatctacttccgcagcagaaggttggtggtgtggctgcccgatgtgccggcggacttgtggtggatgcag

SEQ ID NO: 86149 - DNA, 413 bp, Homo sapiens
agcggaccctcagcgactgccctgccctggaagggtcccagaatggttgccaacatgagaatgctgctgctgtcaggtgcaatgtccctaacatgggctttcagaatcaggtgcgcttggctggtgggcgtatccctgaggaggggctattggaggtgcaggtggaggtgaacggggtcccacgctgggggagcgtgtgcagtgaaaactgggggctcaccgaagccatggtggcctgccgacagctcggcctgggttttgccatccatgcctacaaggaaacctggttctggtcggggacgccaagggcccaggaggtggtgatgagtggggtgcgctgctcaggcacagagctggccctgcagcagtgccagaggcacgggccggtgcactgctcccacggtggcgggcgc

SEQ ID NO: 86150 - DNA, 424 bp, Homo sapiens
  misc_feature (1)...(424): n = a,t,c or g
agcgcggccagctcaggttttgagatgtgtcccatccggttggaggagaggtccagagtaagcaggtgggtggcgctcagaccgtgcaggtggtcgaaggagaacgaggcgagttcgttgcagcccaggtagagatggctgagcgcgcgcaggccgtggaaggcatgctcgtccaagtgcaccaagcggttattgaacagaagcagcttctccagcgcccccagcccgtcgaggtcgtggcggccaagcgcccgcaacgtgttagatgatagatcgagcagcctcaggccgctggcgttgacgaagacgccgcgacccagcgcatctagttcgttgtggtctaggtgcagggcgcgcagctggaagaggggcgccaaccagccggggcgcaagcgctggagcgcgttgtggctcangtcgaggt

SEQ ID NO: 86151 - DNA, 385 bp, Homo sapiens
ccagcctacaccacctccctcaccgcaaagtgcccgctccgcagctccatgcccctgcccagtggagcctcagccccgtcccacctgcagcatgcccagcccaagtgcccgaaacccagagcctcggactcagggcaaaaggaagccgccccattccaccacatcagggtctccactgtgcttatttagagcagagcacaactctccttgcgtctgagtcccttcacacaggtgactgagaggctcaggacagagcattgcaggggagacagaggaggggctcggcctcgccaagcagctggctctattcatttagcagaaccgctgccccaccccctcccagcccctgcacggagggaggccactggggccggcccgtccccaa

SEQ ID NO: 86152 - DNA, 537 bp, Homo sapiens
atcactgtgtcgacccacgcgtccggtagcccctttggcctggagccacagagtgggtggctatgggtgcgggcagcactagaccgtgaggcccaggaattgtacatactgaaggtaatggcagtgtctgggtccaaagctgagttggggcagcagacaggcacagccaccgtgagggtcagcatcctcaaccagaatgaacacagtccccgcttgtctgaggatcccaccttcctggctgtggctgagaaccagcccccagggaccagcgtgggccgagtctttgccactgaccgagactcaggacccaatggacgtctgacctacagcctgcaacagctgtctgaagacagcaaggccttccgcatccacccccagactggagaagtgaccacactccaaaccctggaccgtgagcagcagagcagctatcagctcctggtgcaggtgcaggatggagggagcccaccccgcagcaccacaggcactgtgcatgttgcagtgcttgacctcaacgacaacacataaaaaaaaaaa

SEQ ID NO: 86153 - DNA, 413 bp, Homo sapiens
aacagatgcagtcactcatttcggatgctgaggagagaggcgagcaggccctccaggatgcgtggcagaagctgcaggacctggaggaggccctgcagcagtccaaggaggagctggcccggctgctgcgtgactaccaggccatgctgggggtcaagctgtccctggatgtggagatcgccacctaccgccagctgctggagggcgaggagagcaggtgggtctggcagctgtgtttctggggctaaggcttgagatgcacccatgaagctgtgggactggctatttggagaaaagataagccccacctttttgggaagattggtagcccagggtgagcagaaacattccaattagaggcagaggctgtgtgaatggacaagcctcttcacacagggagaagtcattgttat

SEQ ID NO: 86154 - DNA, 412 bp, Homo sapiens
  misc_feature (1)...(412): n = a,t,c or g
cagactactctgttttatctcacatttctaatcccatcagttgagtttacataaacaaagaggcaacggtatttgttcccaagccaatttacttcggttattcttgtttgtaaaggcacgtttcaatatttaataaaaacactatgtaaatcaataaaatgtgtgaaaaaatgaagtgaattattatgaatatgactcaaagatatgtgtgatggggggacaagtgtatacatatttaggtactcacttgttccaatttaaagatatgctgattaaagtagtgctgtaaacgttcattagcaaaattaatacagaactgttcaaagctgttattttcataatcttcaaacccaaaaatatcaagaacaccaatagacaatgtctgtaaaacaagagaaagttttgattatna

SEQ ID NO: 86155 - DNA, 441 bp, Homo sapiens
  misc_feature (1)...(441): n = a,t,c or g
agggaccgcccgggttgagagcctccgattttagctcagactttactgtgggtagtcaggagccataggagattgttgagcaggggagagacatgattaaggctgaggttctgattccccaggtgactctttgaggaagggtttccaagactagggggtgctctgtgatgcccctggcggttggagggggcagcaaactgccctgcacagatggggtgactgaccggctgagggctgtgggagggcctgcaatatgggtgactgaacgcagcctctaagcacagcctctctggtgagcagtttgaggaggacatcctgaacatctgcctctccatcctggatcgaagccccggtcaccaaaacaacccagccaccgacgtgtcctgccgccacaaccccatctacgtcaccagggtcatcagtgccatggtgaacagcaan

SEQ ID NO: 86156 - DNA, 406 bp, Homo sapiens
cgctgggggagtcggaaaaggcccatactttaagcccaggcttctctcccccagccagttttctcgcaaccaaacttcttaaaaagctctctgcagcttaccttgtaagaacgaatgaatcggacaaatactgggaagaatacagaaggaggtgtagtcttgggactctcgccaaagtagcgcacaactgcattgtaggcctcctggggaaggggtgggcagaatgggtcaccctggcaggaagatcagcccagctcccacaccacggatgagaggcctgcagaaagcagagcccagggccaaagggaggaaaaccaagcacccaggcccctgtgagctggagggaacctggggctcccaaagctcctgagtatgagtctccagaggcagctgcctggcactcccg

SEQ ID NO: 86157 - DNA, 400 bp, Homo sapiens
cgaacttgtcgtggagttggtgtctgctggcaagtcgggtcctgagcgaaacacctatgaggttcaggtggtcacggggaatgtgcccaaggccggcactgatgctaacgtctacctaaccatctacggcgaggagtatggagacacgggcgaacgacccctgaagaagtcagacaagtccaacaaatttgagcaggggcagacagacaccttcaccatctatgccattgacctgggggccctgaccaagattcggattcgccacgacaacacaggcaacagagcaggctggttcctggacagaatagacattactgacatgaacaacgagatcacgtactactttccatgccaacgttggctggcagtggaggaagatgatggccagctgtccagggag

SEQ ID NO: 86158 - DNA, 3624 bp, Homo sapiens
atttgttgagccctctagatgcctcgcccagtaccctttgtgcattgtctcatttcctcctcacagcagtccagtggaggtagtattaatatccccattttccactgtcaaagctcacaccactcttcactgttggagacaagacataattctccatttccaaactaatcatcttataaaaggaagaaaattgacttcactgagtttcttctgatggtattcaagttggctcaagcatattatgagtctaccagaaaagagaatttaccgatatcaggacacaagcacagaaagcacagtcatcatgataaacatgaagataataaacaggaagaaaacaaagaaaacagaaaaagaccctcaagtctggaaagaagaaacaatagaaaagggaataagggaagatccaagagcccaagagaaacaggggggaaaaggcatgaatctagttctgaaaaaaaagaaagaaaaggatattcacctactcatagagaagaagaatatggaaaaaaccatcataactcaagtaaaaaagagaaaaacaagactgaaaatactagattaggagacaataggaagaggctaagtgaaagacttgaagagaaagaagacaatgaagaaggagtatatgattatgaaaatacaggaagaatgactcaaaaatggatacaatcaggccatattgccacatattacacaatccaggatgaagcctatgacaccactgatagtctattagaagaaaacaaaatatatgaaagatcaaggtcatctgatggcaaatcatcatctcaagtgaacaggtcaagacatgaaaatacaagccaggtaccattgcaggagtccaggacaagaaagcgtaggggatccagagttagccaggacagggacagtgagggacactcagaagactctgagaggcactctgggtcggcttccagaaaccatcatggatctgcgtgggagcagtcaagagatggctccagacaccccaggtcccatgatgaagacagagccagtcatgggcactctgcagacagctccagacaatcaggcactcgtcacgcagaggaaacttcctctcgtggacagactgcatcatcccatgaacaggcaagatcaagtccaggagaaagacatggatccggccaccagcagtcagcagacagctccagacactcagccactgggcgcgggcaagcttcatctgcagtcagcgatcgtggacaccgggggtctagcggtagtcaggcaagcgacaatgagggacattcagaagactcagactcacaatcagtcgcaggccaaagacaggctaggtcgagacaccagagccaccaagagtccacacgaggccggtctaggggagggtccggacgttcagggtctttcctataccaggtgagcactcatgaacagtctgaatcttcccatggatgggccaggaccagcactggcagaagacagggctcacgccacgaccaggcacaagacagctcccggcattctacgtcccaacaaggccaggacaccattcatgcacacccgggctctaggagaggaggcaggcacggctaccaccatgagcaatccgctgatagcactggacactcaggatcccaacacagccacaccacaacccagggaagatccgatgcctcccgtggctcgtcaggatccagaagcacaagcagggaaacccgggatcaggaacaatctggtgacggctccagacactctggctcacatcatcaagaagcttccactcgggctgaaagctccaggcactctcaggtcggccaaggagaatcatcggggtccagaaccagcaggaaccagggatccagttttagccaagacagggacagtcaggcacaatctgaagactccgaaaggaggtccgcgtccgcctctaggaaccatcgtggatccgcccaagaacagtctagagatggctccaggcaccccggttcccatcaagaggacagggccggacacaggcaatccgcagaaagctctagccagtcaggcacccatcacgcagagaattctagcggcggccaagccgcttcctctcaagaacaggcaaggtcaagcgctggagaaagacacggatccggccatcagcagtcagcagacagctccaggcactcaggcattgggcacgggcaagcttcatctgcagtcagagatagtggacaccgggggtacagcggtagtcaggcaagcgaccaagaaggacactcagaaaactcagactcacaatcagtctcaggccaaagacaggctaggtcgcaccagcagagccaccaagagtccacacgtggccagtctcggggacggtctggacgttcagggtctttcctataccaggtgagcactcatgaacagtctgaatctgcccatggacggtcagcgcccagcactaggagaagacagggatcacaccacgaccaggcacgggacagctccaggcattcagcgtcccaagagggtcaggacaccattcgtggacaccccgggtcaagcagaggaggaaggcagggctcccactacgagcaatcggttgataggtctggacactcaggttcccatcacagccacaccacatcccagggaaggtctgatgcctcccatgggacgtcaggatccagaagtgcaagcagacaaacacgggatgaggaacaatcaggagacggcaccaggcactcagggtcacatcatcaagaagcttccactcaggctgacagctctaggcactctcaggtgggccaaggacaatcagcggggtccaggacaagtaggaaccagggatccagtgttagccaagacagggacagtgagggacaatcagaagactctgagaggcattctggatccgcttccaggaaccatcgtggatccgctcaggaacagtcaagagatggctccagacaccccggctcccatgacgaggacagggctggacacaggcaatccgcagatagctcaagccaatcaggcactcgtcacacgcagacttcttccaggagacaggcagcttcatcccaagaacaggcaagatcaagggcaggtgatagacatggttccggccaccagcagtcagcagacagctccagacactcagccatcgggcgcggccaagcttcatctgcagtcagagatcgtggccaccggggctcaaggggtagtcaggcaagcgaccaagagggacattcagaagactctgactcacaatcagtctcagcccaaagacaggctgggtcgcatcagcagagccaccaagagtccacacgcggccggtcacagggaaggtctggacgttcagggtctttcatctaccaggtgagcactcatgaacagtctgagtctgcccatgggcggaccaggaccagcactggacgaagacaaggatcccaccacgagcaggcacgagacagctccaggcactcagcgtcccaagagggtcaggacaccattcgtgcacacccggggtcaaggagaggaggaaggcagggatcccatcatgagcaatcggtagatagatctggacactcagggtcccatcacagccacaccacatcccagggaaggtctgatgcctcccatgggcagtcaggatcc

SEQ ID NO: 86159 - DNA, 639 bp, Homo sapiens
gctggcactgctcgatttgtgtgtcaggcagaaggaatcccctctcccaagatgtcatggttgaaaaatggaaggaagatacattcgaatggtagaattaaaatgtacaacagtaaattggtaattaaccagattattcctgaagatgatgctatttatcagtgcatggctgagaatagccaaggatctattttatctagagccagactgactgtagtgatgtcagaagacagacccagtgctccctataatgtacatgctgaaaccatgtcaagctcagccattcttttagcctgggagaggccactttataattcagacaaagtcattgcctattctgtacactacatgaaagcagaaggtttaaataatgaagagtatcaagtagtcatcggaaatgacacaactcattatattattgatgacttagagcctgccagcaattatactttctacattgtagcatatatgccaatgggagccagccagatgtctgaccatgtgacacagaatactctagaggatggccatacttctgtagggctgctgcagtttgctgggggtctgctcctgaccctagttgcctcagtttttcctgtacctggagatactaccagtgaaggctgcgtaacagcaaag

SEQ ID NO: 86160 - DNA, 440 bp, Homo sapiens
cggtcctgaattgccagggacgacccacgcgtcctgtgcggatcaacggggatggacaggaggtcctgtacctggcagaaagtgataatgtgaggctgggctgcccctacgtcctggaccctgatgactatggtcccaatgggctggacatcgagtggatgcaggtcaactcaaaccccgcccaccaccgagagaacgtgttccttagttaccaggacaagaggatcaaccatggcagccttccccatctgcagcatagggtccgctttgcagcctcagacccaagccagtacgatgcctccatcaacctcatgaacctgcaggtatctgatacagccacttatgagtgccgggtgaagaagaccaccatggccacccggaaggtcattgtcactgtgcaagcacgacctgcagtgcccatgtgctggacagagggccag

SEQ ID NO: 86161 - DNA, 419 bp, Homo sapiens
tccgggtcgagacgacaggatctatgtcaccaactactactatggaaacagcctggtggagttccgcaacctggaaaacttcaagcaaggtcagggacccccggaggtggagagggggctgggtatggacaacctggggaggggtcctcatggggacttggccttccttgccttgtgggtttctatggtataggctggttgagctccagattgttagccaccccaaggagggggttctgggctgagggcactgggctggaggcccagacagaccccatggcaccccggtgtgctagcaccctgccaggaaccagaatgcagcggcaaacaagagagacatggtcctgccctcacaagtgtgacttaccatcaaggggccaatactgagtttccatttgttgaacgcttaccctgtgctg

SEQ ID NO: 86162 - DNA, 397 bp, Homo sapiens
tgaagagtatgaagtcaccactgaagatgggtatatactccttgtcaacagaattccttatgggcgaacacatgctaggagcacaggtccccggccagttgtgtatatgcagcatgccctgtttgcagacaatgcctactggcttgagaattatgctaatggaagccttggattccttctagcagatgcaggttatgatgtatggatgggaaacagtcggggaaacacttggtcaagaagacacaaaacactctcagagacagatgagaaattctgggcctttaggtaaatattagctaagaaaactcaagggggaaattggaggcaatttaaaaaaaataacgtggacgctattaatgattatctttgacgcttgaagtcatatagctccttgtag

SEQ ID NO: 86163 - DNA, 381 bp, Homo sapiens
aattaataaagacaccacccacttggagattgaacccttcactcttctcggcgtgtgtgctggacttatcccataccctcaccataaccagtcaccgagaaacacttaccagtgtgccatggggaaacaagccatgggtactataggatacaaccagcgaaacagaattgatactctcatgtatctactagcatatccacaaaaacccatggttaagacaaaaaccattgaattgatagaatttgagaaactgccagctggacagaatgcaacagttgctgtgatgagctatagtggctatgatattgaagatgctcttgttttaaacaaggcctctttagacagaggctttgggcgttgccttgtatataaaaatgctaa

SEQ ID NO: 86164 - DNA, 374 bp, Homo sapiens
cttccgagacctacagtgtgccctgtacaatggccgccctgtcctgggcacccagaagacctaccagtgggtgcccttccatggggcgcccaaccagtgcgacctcaactgcctggctgaggggcacgccttctaccacagcttcggccgcgtcctggacggcaccgcctgcagcccgggtgcccagggggtctgcgtggctggccgctgccttagcgccggctgtgatgggttgttgggctcgggtgccctcgaggaccgctgtggccgctgcggaggcgccaacgactcgtgccttttcgtgcagcgcgtgtttcgtgacgccggtgccttcgctgggtactggaacgtgaccctgatccccgagggcgcca

SEQ ID NO: 86165 - DNA, 432 bp, Homo sapiens
tccggaattcccgggtcgagggggttgaagccaaagcgcacggcgtgaccctcaggtgtggcattttttttcagctccaggcgcaggtggcgcaggtccgggaggtagtggtccctcgcaggctcgctgcaggtggggccctgggtgttggggcggcaccggcagacgcccgtcctcggttcacagctctggcccagtgcaccgccaatgtcacaccggcagctgcggcagccaaaatagtcagcctgatccagtccaaagaagccatccttgcaggacgcgcaagcctggccgcacacgtggggcttgcagaagcactggccggtgcccggctggcactcagcaactccacccagtgtgcccctgaggtcgcagctgcagcgggtacagccctcggggttgctggggctcagtctccagaacccaggtttg

SEQ ID NO: 86166 - DNA, 535 bp, Homo sapiens
ttttttttttttaaatttattgaagttgggttttaatgaagagtttttaaatcctctcccagcaattatatgattacaacattttgaacccaaacgtttttccatacaatatagatatttcaaatagagaagtagcttcgtggggaaattttctgtgagttggaaataacacacatagatcagcactatcagcttttataacagtaaaacaaaatagatgaacttggtcagtaaaatccaggaagtaatttaggatccattcagcttcagtggctgacaggcatgagagagtacaacagatggcagaaacaagtagctcaccacagtcccattcatctgaactgtctgagcagtcggcttcaccatcacaccacaggtcacgtgacacacacgcatggtttgcacattccagctcatcatcttggcaaaatgagcagtttttctcgtccatgtaatcagggcagtctgggaacccatcgcagatcactgtgtgcttcaaacattgtttattggatggacattcccaaagatctct

SEQ ID NO: 86167 - DNA, 182 bp, Homo sapiens
agccacccagagtggagcagtggttactactggattgaccctaaccaaggatgctctatggatgctatcatagtatgctgttcttgcagagggaggcgatgttctgagaggcatagatggtcaccaggcgcatgatggcaaggcgggtagccatttccttggaagctaggtctagatcgcga

SEQ ID NO: 86168 - DNA, 327 bp, Homo sapiens
ggccatggtctacggaggggtggtgccctacgtcccgcagtatcgggacattcgcaggacgcagaacgccgacggcttctccacttacgtgtgcctggtgctgttggtggccaacattcagcggatactcttctggtttggaaggcgctttgagtccccgctgctgtggcagagcgccatcatgatccagaccatggtcctgatgctgaagctgtgcgccgaggtccgtgtggccaacgagctcaacgccaggcgccgctcctctacagttgcagatagcaaccatgaggaagtcagggtcgctcagggaaatccggccgtgctact

SEQ ID NO: 86169 - DNA, 407 bp, Homo sapiens
  misc_feature (1)...(407): n = a,t,c or g
aaaaaatacgaagaggagctctccctgcgtccctgtgttgagaatgagtttgttgccttgaagaaggacgtggacacagccttcctgatgaaggctgacctggagaccaacgcagaggcactcgtgcaggagatcgacttcctgaaaagcctgtatgaggaggagatctgcctgctccagtctcagatctctgagacctcggtcattgtgaagatggacaacagccgggagctggacgtggacggcatcatcgctgagatcaaggcgcagtatgacgacatcgccagccgcagcaaagccgaagcagaggcctggtaccagtgccggtatgaggagctgagagtcacagctgggaaccactgtgacaacctccgcaaccgtaagaacgagatcctggaaatgaatan

SEQ ID NO: 86170 - DNA, 547 bp, Homo sapiens
aattcctcttgctgaagtttcaccaaggactctttctcttccaaacgaccttctaattgtgccttttgaacctctagggaggaagccttaatgctcaactcttttcttatctgttctgttctgcttaattcttttctaaggatatcaatggtttcttccttatcttccctttccttttgtaaggttttaatcttttcttcttgtacttttgttttttgatgcaaatttgctagcttatgttctctgtctactagctgattctgtacttcttttctctgttcttctttctctattaattgggcaatacttttttcattttgttccttgagtgactcattcaactttttcactgtctcaatttgtttattcagagaatcacatgtgatctgtaaatctttattcttcttttcagtactttcatttctctgaagaagttccatgtaggattttgtcagtatttcatgttcttcagccacagactctaacttcctattatgttgaaagagatgctcaatatcactctgcgctctttctgattcaacttgct

SEQ ID NO: 86171 - DNA, 433 bp, Homo sapiens
cctctgccgggtcagcacctgctttggattccccattcttagctccatgaaggcagggacacatctttattcacgcccatatgcccagaacacagaagtcactcgttacacattgttatcagctgagattatcctaatctcaccttgttttctgagtttttcgcttgtgcagttgatgaataaagaataaagcagttattactacagaagacaatgtccttctctaccctcttggtgctttctcgggaatcctgaaaagcacagagaaatgtgtgggaatctcaacaagtcaaaatttaataaaaacaggatctatacattatttttatgttatattcaaaagtgacagtggttctttatcttaatagtagaaaggaaactatgttccaatatttagcatgtgataatttagctagggaaaaaatacatgtag

SEQ ID NO: 86172 - DNA, 446 bp, Homo sapiens
gacgcgccttttcgggtcgacccacgcgtccgaacagacccgaaatcccaaagtcaaccacaagccagaatatttttgatgaaaatcaaacccatgagatgataatggagagactcgcaggagacagcttctggtactccatcctaggaggactctgggattttgattaccatccagagtttaaccaagaaaaccacaagagatatttaggacaagtaactttgacccacaaaaagatcacacaggagagaagccttgagtgtaataaatttgcagaaaactgtaatctgaactcaaaccttatgcagcagagaattccttccattaaaatacccctgaattctgacacacagggaaacagcatcaaacataattcagacttgatttactatcagggaaattatgtaagagagactccctatgaatatagtgagtggggaaaaatc

SEQ ID NO: 86173 - DNA, 406 bp, Homo sapiens
gcctttgcagtttcaggcaaaacacttggaccagcctttgcccactgccattggcttatataagaaccacgctctgtatgccctgaagcggcatctcctgaaatatgaggccatctattccgagacagctgccatccttgggtattgtcgtggagaagcggtctactccaggtgcgtgaggcagcctggttggcctcaggggcttcctgatggcatgggattagcagccttcttcctaggcaagggttgctgatgggagctcatctgactggacagcattctcgggctgagccagtgtgcgtgtgctgtgtgtgtgcgatgtgtaggagagaagaaaatttgaaaattaaaacagggattaaaagaatggcaggggaaaaacagttacagggaaaatataatacaa

SEQ ID NO: 86174 - DNA, 414 bp, Homo sapiens
actgaatttccaactcatcactgttgtggcaacagtgcatgtccttctggaaaaaacacatctccatcaagacgttggtgctgaagaacctgagcggcccactccaaagatccgttaattgccagagaaggagttccccataattagaaaatcatcttccttaaaagtcaccaagtgccttttcactgaacagcccaaacccataatcattttgcgctttgcagaaaattacgacgcgaggctcttacggattgacattgccaacacgctaagggagcaggtccaggagcttttcaataagacatatggtaagcagcgcagaacccctggggagggacatgtagctgctgtggacagagaagtggcaggtttcccagttccagccgaggggatttctggggaaacgattcaccc

SEQ ID NO: 86175 - DNA, 397 bp, Homo sapiens
  misc_feature (1)...(397): n = a,t,c or g
cgccgcagatgcttaccccgcaacagatgcagcttatcctgtcgcccccgcagctgcaggccttgctccagcagcagcaagccctcatgctccagcagctacaggagtactacaagaagcagcaggagcagctccacctgcagctcctcacccagcagcaggctgggaaaccgcagcccaaagaggcactggggaacaagcagctggccttccagcagcagctcctgcaaatgcaacagttgcagcagcagcacctgctcaacctgcagaggcaggggctggtcagcctgcagcccaaccaagcctcggggcccctccagacccttccgcaagcagctgtttgcccaacagacctgccccagctggggaagggcgagggtgcccccgggcagcctgn

SEQ ID NO: 86176 - DNA, 406 bp, Homo sapiens
  misc_feature (1)...(406): n = a,t,c or g
ctagctccctttttctctctccttttttatcctgtcttttgctgctgctttccaccttctgtccagctccatcttcagacagctccctgtataacgctccacttcctgagtattccagttgccagcctccttcagcacctcctccatcatacgctaaagtcatctcagctccagtgtcagatgccactcctgattatgctgtagtgactgctttgccacctacttccacaccccctacaccaccactgcgacactcagcgacacgttttgcaacatctttaggttcagccttccaccctgttcttccccattacgctacagttcctcgtcctctgaacaaaaactctcgaccttcttctcctgtgaacacaccctcttctcagcctccagctacgaagccctgtgn

SEQ ID NO: 86177 - DNA, 444 bp, Homo sapiens
gtcgacccacgcgtccgggcaggactgcactctctgtagctgcactttgtgtgcctgcaagtaaagggcacgcatcagttgttagccttttaattgatcgaggtgctgaagtagatcattgtgataaagatggcatgactccactgctggtagctgcctatgaaggacatgttgatgtggttgacttgcttctagaagggggagcagatgtagatcacacagataacaatggccgtacacccctcttagcagcagcgtctatgggtcatgcatcagttgtaaatacacttttgttttggggtgcagctgtggatagtattgatagtgaaggtaggacagtcctcagtatagcttcagcacaaggaaatgttgaggtggtacgtactctactggatagagggttagatgaaaatcacagagatgatgctggatggacacctttgc

SEQ ID NO: 86178 - DNA, 508 bp, Homo sapiens
aggcttctttgcctacacgtacggccgcctggtggtggtggaggacctgcactctggcgcccagcagcactggtccggccactctgcggagatctccacgctggccctcagccacagtgcccaggtcctggcctctgcctcgggccgaagcagcacgaccgcccattgtcagatccgcgtctgggacgtgtctggcggcctctgccagcatctcattttcccccatagcaccaccgtgctggccctggccttctcaccagatgacaggcttcttgtcacactgggggaccacgatggccgcaccctcgccctgtggggcacgggccacctatgacctcgtgtcctccacccgcctcccggagccggtgcatggtgtggccttcaacccctgggacgccggtgagctcacctgtgtgggccagggcactgtcaccttctggctccttcagcagcgtggggcagacatcagccttcaggtgcgtcgagagccggtcccagaggcagtggg

SEQ ID NO: 86179 - DNA, 693 bp, Homo sapiens
ttttttttttttcataggtataaactttatcttactcctacatatgaaaatggatgtgttacagggatattgatctcggggacttttttttgtttctttgtaaaaaacaaggtctcactctgttgcccgggctggagtgcagtggtgcaaacccagctcactgcagcctccaaactcctgagctgaagcaatcttcctgccccagcctttcaagcagttgggactacaggtacctaacaccacacttggccatctcaaggacattttatgacaaagaggaaagtgctgtgcacacagaaggagctcaaccaatgttggttagattggaaaaaatggtgctccctgcccccagcccctcaccgtgatggcgtctatcttgaagagggctttggcctgggtgctggtgtaggcgtcgaagcggtacgtgatttggttgaggttgtcgatggagtaggcctggacccgcacaatctcagtacccagtgccagattctccaggatggcagcctcgtatgaggcattggagaactgcacggcctcgtccagctcgttgagcagagtgatgtagacgctgcagaagccctggttgaagggcggggcctggtcagtggccgacacattcatcatgtagctggtcttggtctcgtagtccaggtaattcacggtgatgataagccctgtgctctcgtcaat

SEQ ID NO: 86180 - DNA, 383 bp, Homo sapiens
  misc_feature (1)...(383): n = a,t,c or g
gcgcgcggatcccgagagggaaagcctgtancaccgttttagggagatcgactggcgaactggaaggtttcgcctcctcccgcctgccccctcagccctgtggctgggggcagagctcagatttattatctaggatagatttggatgaactaatgaaaaaagatgaaccgcctcttgattttcctgataccctggaaggatttgaatatgcttttaatgaaaagggacagctaagacacataaaaactggggaaccatttgtttttaactaccgcgaacatttacacagatggaaccagaaaagatacgaggctctaggagagatcatcacgaaatatgtatatgagctcctggaaaaggattgtaattcgaaaaaagtatct

SEQ ID NO: 86181 - DNA, 387 bp, Homo sapiens
ttttttttcaaggaatggatgatagaattaagacagtcacataaaactaagacttaaaattacaagtggtttcatattttcagtgtttgaaatcagtgacggtcttttattgtttattagaaccaaaaaacattacacaaatatctgtgtatagatgtgagcaaccatctatttagtatttgaggtaaggcaccaaggaattgctgtgcttacatttttctgttttactataaaatatttttcagatgaaggattcagttttaacccattgaaaatagaagtctttgtacagactctgctacacttggcagccaaatcattcagccactccttcagtgctcttgcaaagtatgtatgagtacagagccttgcttgagagtttggaat

SEQ ID NO: 86182 - DNA, 396 bp, Homo sapiens
aattaatatctacaattaaaacatgcttttttgctgttgttactcttgacagtgaagaggaagaaaagttccaaatcagaggccaagggcactgtgtcgaaagtcactgggaaaaaaatcaccaagatcatcagtctgggaaagaaaaagccgtccacagacgagcagacctcctcagctgaggaagatgttcccacctgcggtaagactgcgcttcccggagacgagcagcgtgcacctaagtgggtttcattttctcctgcagtggtgtcggtacccagttcatccaaggctcgttaatttgagctcttttgcattggacttggaatcattcagatagtgggaaatgtattaaatgtttacatttttgcctcttattcatacaagactttgcag

SEQ ID NO: 86183 - DNA, 392 bp, Homo sapiens
tgtttccattttccaactagcaggttactggagagacttaacctacatatcctgagcaattcccaacctcctctttgcgtgtctagggtattggtggctctccaggaatcacaggctctaagggtgatatggggcctccaggagttccaggatttcaaggtaagacagcacagaccttgctgcacagcctttgcagcagcagatgccgtgtgaagagcttgctaacctcgggcaccttagcactgatagcaccgctgccattatagcacgagatactgttctcttcaaattaaaaatggcatttctgtgtggcagcccaatttgtataatcttatggatgccagtgtaaagacattctgattttcttattaagaatcagtggatcattaata

SEQ ID NO: 86184 - DNA, 458 bp, Homo sapiens
  misc_feature (1)...(458): n = a,t,c or g
gctccggaattcacgcatcgagccacgcgtccgcttatctggcttgatatttttagcttgcgtctttattctccacatgccagtgatttctgttcatttttctttatctccagtgaaatcctgtgatgacttcatgggccaacttcttaatggccgtgtgctatttccagtaaatctccagcttggagcaaaagtggattttgtttgtgatgaagggtgagtatgagcttgcctgacctgctggacattgaaattggggttgggaatcagtctaaaaaggggagatttggtgtggcacacacacacacaccttcagagagatgaactttcgaaagtatacctaggaagaaaggaaagaaacatatagaactaataacatgagatatgaagaggaaactggaacatatattaactggcaagttcaaaggcaagtataactactggttatgaatatatan

SEQ ID NO: 86185 - DNA, 439 bp, Homo sapiens
cccgggtcgacccacgcgtccggtgggtaaaatcctggatgccctggaccaggagcgcctggccaaccacaccctggtgtacttcacctctgacaacgggggccacctggagcccctggacggggctgttcagctgggtggctggaacgggatctacaaaggtggcaaaggaatgggaggatgggaaggaggtatccgtgtgccagggatattccggtggccgtcagtcttggaggctgggagagtgatcaatgagcccaccagcttaatggacatctatccgacgctgtcttatataggcggagggatcttgtcccaggacagagtgattgacggccagaacctaatgcccctgctggaaggaagggcgtcccactccgaccacgagttcctcttccactactgtggggtctatctgcacacggtcaggtggcatcag

SEQ ID NO: 86186 - DNA, 447 bp, Homo sapiens
ggtcgacccacgcgtccgggcgcttgaaagccattgctgccttctaaagaaggacattaaccagccacagcatgtctcttggtctaagtagagtgaatgagtttcatttctcacgacaggagaggtggattggtattgacggcctgtgccagtgtcatgaaggattctgaggctgtgtccaagcccgataggagagagtgcggaacagccttttccctgggaggggagacagccagtgtgcatgctgtccatccagtcctgtgtgggtcttccttgaaacaggatttttgttcccttggctcttcttgcaggtggaagtgatcaagaaagcctacatgcaaggtgaagtggaatttgaggatggagaaaacggtaaggatggggcggcgtcccccaggaacgtggggcacaacatctacatattagcccatcagttggctcggcatt

SEQ ID NO: 86187 - DNA, 369 bp, Homo sapiens
tgactaccatgccatcaatatagttttgtaaaggatttctaaaaagtttctctgcctggtagaacagacgtaggctagagcttagttttcttgtctggggttgaatgagtgagatggttccccagttcctcacacacctgctcttttctctctgcagcagacctgcgcagtctgtctggaagacttcaaggggaaggatgagttaggcgtgctcccgtgccaacacgcctttcaccgcaagtgtctggtgaaatggctggaagttcgctgtgtctgccccatgtgtaacaagcccattgctagtccctcagaggccacgcagaacattgggattctattggatgagctggtgtgagtgctgccgctaca

SEQ ID NO: 86188 - DNA, 424 bp, Homo sapiens
agcaaacgggaaggggaagcccaagcccaaggtaccagaaaggaagtcctctctgagatcttcagtatccatttcctcatcgtccacttctctttcttctagtacttctactgaaggaagtggcactatgaagaagctggatccagccgtgggctctcccccggctcctcctcctcctcctgttccctctcctccattcccttgtcctgcagacaggtctcctttccttcctcccccacctcctgtcacagattgctcccagggctctcctctgcctcactctcctgtgttcccccctccgccgccagaagctctcattcctttctgctccccacctgattggagcctttctcctccccgccctgcactgagccccattcttccagattcaccctgtgccttgccattgcccccacctctcttg

SEQ ID NO: 86189 - DNA, 425 bp, Homo sapiens
gaaactgctcaggggaaggaattgaattccctacaacaaatttatatgaactggaaagccgtgttttgactgatcattggtccatcccttacaagcgagaagaatcactaggcaaatgcctgttggcatctacctacctagcaagacttggtctttccgagtctgatgagaattgtagaaggtttatggacaggtgtatgcctgaagcatttaaaaagctcctgacatcaagtgctgttcacaagtggggtactgaaattcatgaaggaatttacaacatgttgatgctattaatagaactggtcgcagagagaataaaacaagatccaattcccattggtctcctgggtgtgcttacaatggctttcaatcctgataatgaataccattttaaaaacagaatgaaagtgtctcaaaggaattgg

SEQ ID NO: 86190 - DNA, 411 bp, Homo sapiens
aacagaacagtctacaggctttaacctggattttgaagtttctggcatctatggatatgtcatgctagatggcatgctcccatctctccatgctctaacctgtaccttctggatgaaatcctctgacgacatgaactatggaacaccaatctcctatgcagttgataacggcagcgacaataccttgctcctgactgattataacggctgggttctttatgtgaatggcagggaaaagataacaaactgtccctcggtgaatgatggcagatggcatcatattgcaatcacttggacaagtgccaatggcatctggaaagtctatatcgatgggaaattatctgacggtggtgctggcctctcttgtggtttgcccatacctggtggtggtgcgttagttctggggcaaga

SEQ ID NO: 86191 - DNA, 582 bp, Homo sapiens
agagcctataccagttctccgtggtggagacagctggacctggcacactggtgggccggctccgggcccaggacccagacctgggggacaacgccctgatggcatacagcatcctggatggggaggggtctgaggccttcagcatcagcacagacttgcagggtcgagacgggctcctcactgtccgcaagcccctagactttgagagccagcgctcctactccttccgtgtcgaggccaccaacacgctcattgacccagcctatctgcggcgagggcccttcaaggatgtggcctctgtgcgtgtggcagtgcaagatgccccagagccacctgccttcacccaggctgcctaccacctgacagtgcctgagaacaaggccccggggaccctggtaggccagatctccgcggctgacctggactcccctgccagcccaatcagatactccatcctcccccactcagatccggagcgttgcttctctatccagcccgaggaaggcaccatccatacagcagcacccctggatcgcgaggctcgcgcctggcacaacctcactgtgctggctacagagctcg

SEQ ID NO: 86192 - DNA, 1087 bp, Homo sapiens; identical to SEQ ID NO: 66458
  misc_feature (1)...(1087): n = a,t,c or g

SEQ ID NO: 86193 - DNA, 414 bp, Homo sapiens
  misc_feature (1)...(414): n = a,t,c or g
tgggaagacgcacacagccactgtagttgagttaaacccatgggtggaatatgaatttcgggttgtagccagtaacaaaattggaggtggagaaccaagtttaccctcagaaaaagtaagaactgaagaggcagttccagaagtgcctccttctgaagtcaatggaggaggcggaagccggtctgaacttgtgataacctgggatccagtccctgaagaactacagaatggtgaaggttttgggtatgttgttgctttccgccctcttggggttaccacctggatccagacagtggtgacatcccctgacaccccaagatatgtctttaggaatgaaagcatcgtgccatattcaccatatgaagttaaagtgggtgtttataataacaaaggtgaaggaccatttagcccagn

SEQ ID NO: 86194 - DNA, 550 bp, Homo sapiens
ttatatataatttttttttctgggtatatttttgaacatctaaccctagacattatcttcttgagtcaaccctggattcaataaacaacgctagggtttctttcaaatatcttatagcccgcatttgctacccctggccctggttagtgagctgggtagttaggtgagtccggagctggcttcctcactcggtactctctgagctggccctggaccgtgtcggagtagacgcggttccactgaaggctgatggctgtgctgttcatgactcggactttaacttcagtgggcgcagccctgggatctgcaatgtgttgggacagagagctggttatgcaggcaggactctacagttgcttctgacttgttctctgctggcctgtacctgcactccactcaacactgggcattccatgagggcaggggccatatctcctccatgagacagtacttgaaaaagtggtggggaaggctcaggacaaaagggtggcagtctaggtggaagagactgcctacatgttcagagggcactcatttgccccctcctgtg

SEQ ID NO: 86195 - DNA, 552 bp, Homo sapiens
tgtttattgatgatgagttggccactgagtggtcactgactatggagacattaactaaagttttagctaggaatttatatagtttggatctcagtgatttaccattggataagctgagtgaacagaaacaaaaaaagcacaaagggaaaggagttggacatgaatttcagaaagtttcagttgacaagtcattttctagaggatggagtcgtgatcagcctggccaagccccaatgagacagaggagtgcaacaaccactggttctccaggaaccgaaaaggcgaggagtatagtacggcaaaaaactgtcgatattgatgatgctcaaatacttccccgctcaactagagtcagacatttttcacaaagtgaagaaactggaaatgaagtttttggtgctttgaatgaggagcagccattgcctcgaagtagcagcacttctgacatcttggaaccattcactgttgaacgagccaaaggtgcagttcctgtcattgacagttcatcccgtcatgcaccaagcttgcagagtttcacagaggcttcttcat

SEQ ID NO: 86196 - DNA, 580 bp, Homo sapiens
caaataactatttgtataaatttttgtattctcagtggaaacaaataaatgacccatgggatgcactattctagcaatgaagtgtttccaggaagggttgaaggagaaggggaaattttttgaaaaagcatactctaaaattacctttgattttgttttaatcgtggtatttatttgcatatttattggtattaaaggagctcatgaaattgtaagttttttaaaggagggaatgaattttttaagttgactttaacagtatttttaatcttataaatctgttgacaatattttttctaatttaatgcttaatgtgattagactttttctgagagtttcttcatgactttaatattgatgatgatgatagcggcaggtaacatttattgaaagtccttatgtcctgggcactgttctaatcacactacctgttttggcttattttaccctcacagtatacatgtaaatactgttaggattccccaggtatagatgagaaaactggcctcatgtttaaggccaggatttaatattggtagggcccctttaatttatatgaaaactcctggtacatatgagt

SEQ ID NO: 86197 - DNA, 435 bp, Homo sapiens
cggcacgagtgactccagagaagaatattaaaaattatttgccagaaatcgctagcagctggggtggggaagggactgattacaaacggacacaagggaactttacggggtaataaaaatattccacattttgattgtggtggtgattacaaaacagtacatttttcaaaagtcatagaactatatatttcaaaaaggtgaattttcccacatataaattgtaactcaatcaatttgactgatacaaaatgtccttaccaattggatccatggcaacgatgggtttggaaggacgacttggtttcccagaccctcttgcattaatggctgtgacacggtgttcatattctaagccttcagtaaggccagtggagcggtaccgtgtcattgtcacaggtactttatttacacggacccatcgatctgctctcactt

SEQ ID NO: 86198 - DNA, 393 bp, Homo sapiens
aagatttcttcatctaaaaggaactcctgttttatcacttaattgtaaacaatattaacttttttaataccaggtatgcaaaaatacacattccaattattgcatcagtgtctgagcatcaacctacgacttgggtgtctttcttctttgatctacatattcttgtatgtaccttcccagcaggcctttggttctgcatcaaaaatatcaacgatgaaagagtatttggtaagagaggtttttaatgaatactttgatatggaatagttatttttctttttgagattatttactttaaatttttggttttctatggttgactctatatattcaagataaattttctcctttattttgcataggtgcttaaccaagaaaaattcactgagaggc

SEQ ID NO: 86199 - DNA, 797 bp, Homo sapiens
actacatgaaaatttctctaatcaaatactaaagaaaataaatcacagaatttaagaaagatggagatgtaaaagaatatttatatgtgtgcgtgtgtatgtgtgtattgaaattctttttaacctattgcataaggtttattgaaatagaaacatatttcatggaaaacattaataccattttgttattgaaagtactagataatctacaaataatcccatgaaaagagcaaattttctgaaaaatatataaacctgttaatataataaacaagatagcactcaaatgtatttgtcaaaattaatatataataactcagtaaaatgtaattatattgtaccttacttaaatatattttatgacatcaaaattatttttctctccaattaaaattagaaataaacaaaaaagttaatcaaaatcttaactatttggatatgaagaaatatttctagtctgtttctctggttaaatacagactggagaacttggcttaatgaattgtttgaggcatgaattaactatgttatttttctgcgcggtatcatcaaagaaaaatttttgggattctctatatttttacgctgtctgcaataaataggaaagagcctaatttatttatttacttatttatatttttcgagatggagtctcactctgtaacccatgctggagtgcaaagacacaatctcaattcactgcaacctctgcctcctgggttcaagcgattctcctgcctctgctttctaagtagctggaattacaggggcgcaccaccaggcccggctaatttttt

SEQ ID NO: 86200 - DNA, 362 bp, Homo sapiens
ggcttttagtatttcttaaaacatttttggggtaaaggggatttataaaagggtcagaaaaccaataccggttgattatctaaatacaggttgattatcttttatcccaaatgctttggtcagaccagaaacactttggatttcagattttggaatggtggcattactctgggtaccatgcaggcctttttgacctttttaaaaatatctttacaccacacagaagagaatatgcctaaatccacagtgagctttacacatagggcttggctcctcatggggaaacgggggaacttggcattggcatggctggcctgtacatgtgccattttatcatccttagtgggcgtgcttacttgggg

SEQ ID NO: 86201 - DNA, 623 bp, Homo sapiens
gaatgacttcctgccgctctacttcggctgggtcctgaccaagaagagctctgagaccctccgcaaagccggccaggtcttcctggaagagctggggaaccacaaggccttcaagaaggagctgcgacaatgtaggtggcaggttggggccttataagcccaccttgctgggcacagggtgctgcgggcaaaggaccatcattgtactcaaaggatggagcacgaagcagcaggaggcagagagaggctcacctcagcgggggcaggggcaagcggtgcgtcccagtggtagccttggggagttggcagcacattgggaacacgggggcttcccagagcgcctttcctcccaccacacctatccttctagccctcttctctccgacacccttttcccagcctgaatgtagaccactgtcccttgtcttggaggtgggaaaaacaaattactgtagtaacaggaaacatgtcctcttctaatgtaaccttagagggggaatcaagcccagtgttttccaacgcatttttagcagcagaatcatgttccaaaaaataataataataatcacatgaaattgtaagctgcaaaaaaattaaaactaggactattgtggcttcaaaaa

SEQ ID NO: 86202 - DNA, 172 bp, Homo sapiens
ttttttttttttaacttttccctttgaaactttctaaaaaatggttaggggatcaaaaaaattaatttccttttttccagggggcccatatggaatattggctggaagggatccctccaaaggactggccactttttgcctaaataaagaggcccttaaagatgaatttgag

SEQ ID NO: 86203 - DNA, 395 bp, Homo sapiens
gaaagtccgtgcttggggccctgggctccatggtgggattgtcgggcggtcagcggacttcgtggtaaaatccattggctctgaagtggggtctctgggtaagtggacacagctgaccagcatcttctggaggactgaggattacagggcttccgggctgtgtcaggctggatgttggggccttgcctaacctcaatacctttagcttcctggcctcctggccaccctaagccatctctgcgtgctgctgtacatttgcagttgcctctgataccagcattgattcattcaggagaccttgagggcagaaaccttatgtgggtattgtgcctaaaacaatgcttggaacgtagtaaacacttagcatatagtgttgactgacctttatagtttag

SEQ ID NO: 86204 - DNA, 68 bp, Homo sapiens
ttttttttttttatccaaaccttccaatattgaaaccttttttggaaagggtggatttaaaaggaaaa

SEQ ID NO: 86205 - DNA, 385 bp, Homo sapiens
gaaaacaggtaagtggcctgctgagtcatcagggtgacagttctgtatgggtagactacagttaatgtgtttttcctcaagtccttagcgatgagtggttagtagtctctaaatgaccctcctctctgtgtgccttgtccagggtaaactggttggaatctgcggcagtgtgggaagtggaaaaacctctctcatttcagccattttaggccaggtaagatttttgttattgtccttttctgctgctttctctggtttgcaagagtctcaggaaaaacgaacaaatttcctggagagtcaggaaaggtggaaacaaatgaaccctcagcctgcattgtatgcccccaatcccccgcagttccccccagttctcccccttcacagc

SEQ ID NO: 86206 - DNA, 385 bp, Homo sapiens
cttacccttgagtttttgcttttgcccgccgcctccgagctggctcatgggaagcggctggcctgttgcatcgtggaccacaagttacctgagtgtggcttctacggcctttacgacaagatcctgcttttcaaacatgaccccacgtcggccaacctcctgcagctggtgcgctcgtccggagacatccaggagggcgacctggtggaggtggtgctgtcggcctcggccaccttcgaggacttccagatccgcccgcacgccctcacggtgcactcctatcgggcgcctgccttctgtgatcactgcggggagatgctcttcggcctagtgcgccagggcctcaagtgcgatggctgcgggctgaactaccacaagcgctgtg

SEQ ID NO: 86207 - DNA, 1169 bp, Homo sapiens; identical to SEQ ID NO: 67131
  misc_feature (1)...(1169): n = a,t,c or g

SEQ ID NO: 86208 - DNA, 378 bp, Homo sapiens
atggttcaaattaggaccctataaactagattttcagcaaatgccacagcctttctcgctttgatgaactcataggaaatacggtgacaacatcgatgtgagaagtctgaggacactcctcctgaggaatgcacaaccccaggtgtagccacccctcacggcaaagctggagaaatggcatcagaacagacccaacatcactcccagaggcacatgtgttagggaaaggcttctgcggtacagcgtcctctgtagcactctccaagactaatgtggaatgggctcactcactcagtcttcccttgataaacaatagtgtcaaaggggctgaaatctcattaaaaaacacacaaaccacccaactcaaccacccacccc

SEQ ID NO: 86209 - DNA, 569 bp, Homo sapiens
ttccgtacttgaattacccggccgacgatttcgtgtcagcgcccaggtcctgggctggccgccgggatgttgccctacacagtgaacttcaaggtgtcggcgcgcaccctcacgggggccctcaacgcccacaacaaggcggcggtggactggggctggcaaggtttaattgcttatggatgtcattcacttgtggtagtgattgattccattactgcccaaactcttcaagttttagaaaagcataaagctgatgttgtaaaggttaaatgggccagggaaaactatcaccataacattggctcaccatattgcttacggttagcttctgctgatgtcaatgggaagatcatcgtctgggatgtagcagcaggagtagctcagtgtgagatccaagagcatgccaagcctatccaggatgttcagtggttgtggaatcaagatgcttcccgcgatttactgcttgctatccacccgccaaattacattgtgctctggaatgccgacactggcaccaaactatggaagaagagctatgcagataacattctttctttttcttttgaccc

SEQ ID NO: 86210 - DNA, 540 bp, Homo sapiens
tttcgtccacaatccgggtgtcgggagtttgttataacatcagctttgaggagaacaaaaaggttctaattcagaggcaggggaacggcacctttgtacagactgacaaacctctctacaccccagggcagcaagtgtatttccgcattgtcaccatggatagcaacttcgttccagtgaatgacaagtactccatggtggaactacaggatccaaatagcaacaggattgcacagtggctggaagtggtacctgagcaaggcattgtagacctgtccttccaactggcaccagaggcaatgctgggcacctacactgtggcagtggctgagggcaagacctttggtactttcagtgtggaggaatatgtgctgccgaagtttaaggtggaagtggtggaacccaaggagttatcaacggtgcaggaatctttcttagtaaaaatttgttgtaggtacacctatggaaagcccatgctaggggcagtgcaggtatctgtgtgtcagaaggcaaatacttactggtatcgagaggtggaac

SEQ ID NO: 86211 - DNA, 119 bp, Homo sapiens; identical to SEQ ID NO: 85074

SEQ ID NO: 86212 - DNA, 621 bp, Homo sapiens
tttcgtggtcccggaattaagaaaacagagcgacgagcaagaagcagcccaaagtcgaatgattcagacttgcaaggtttctaatattcaggcaagagcagttgtgttgtcctgggctccccctgttggactttcctgtggaccccacagtggtctttccttcccctacagttacgaggtggccttatcagacaaaggacgagatggaaaatacaagataatttacagtggagaagaattagaatgtaacctgaaagatcttagaccagcaacagattatcatgtgagggtgtatgccatgtacaattccgtaaagggatcctgctccgagcctgttagcttcaccacccacagctgtgcacccgagtgtcctttcccccctaagctggcacataggagcaaaagttcactaaccctgcagtggaaggcaccaattgacaacggttcaaaaatcaccaactaccttttagagtgggatgaggtaagcttattttcatattcacccatctaaaacaccatttcaaaaacaaaattaactgaacaaatgccatcttattcttttataagacatgctaaacacagaaaaaaggaatgctagtagagaaatttaaatcaatagtt

SEQ ID NO: 86213 - DNA, 445 bp, Homo sapiens
tttcgtggtgtctgcatttcaggacaaacaagttattggcattcatacattctctgtaaacatgaaattggaagctgtagacccctggtctccttttgggatctctcctgctacagttgttaaggtaaaatggagataactctcttggtaagaatccctgtcaaggtgactggtttaggaaatgggtagtgttttgatctttaagctctattgatccaacccatttttccttctaggccgtgcagctagaattacttctgtgcacgttttgtatttgtccagtttgctgtggcccattcctccttcagagcttggtagccctagccaaagcagccttgggcctgggcactggactagtaggggacgcattctttggggcaggcctagctgcatataagtaaaggagatttaactcctttaggaggccagggtatctgtaaagttg

SEQ ID NO: 86214 - DNA, 119 bp, Homo sapiens; identical to SEQ ID NO: 85074

SEQ ID NO: 86215 - DNA, 460 bp, Homo sapiens
tttcgtatttttgatccatctagaaacatggcaaagtatagaaatattcttagtagtcaaagtatgcagcctccaattattccactcttccctgttgtcaagaaagatatgacatttctacatgaaggaaatgactccaaagtagatggtttagtaaactttgagaagttaagaatgatttccaaggaaatccgccaagttgttcgaatgacttctgctaacatggacccagctatgatgtttcgacagaggaacaagaggtggcggagtctggggtcactgagtcaaggaagcacaaattcaaacatgctggatgttcagggaggtgctcacaaaaaaagggcacgccgcagctctctgcttaatgccaagaagctatatgaggatgcccaaatggcaaggaaggtgaagcagtatctttccagtctcgatgtagagacagatgaggagaagttccaga

SEQ ID NO: 86216 - DNA, 1747 bp, Homo sapiens; identical to SEQ ID NO: 67172

SEQ ID NO: 86217 - DNA, 1129 bp, Homo sapiens
tttcgtcctatggtcagctaggcccttttgcagattttggtctctctgctctcactgctttgggaaattatgctatgtggacagcatgatcagtaaacctgcctccctccttgtggccctgggaggaagccatggactctaccaagtctgaacccctgaagggatcaccagaggctgaagatggaaacattgaatataaaaagctggtgaatccatcccagtaccgctttgagcacctggtgacacaaatgaagtggcggctccaggagggacgtggtgaggccgtctaccagattggggtagaggacaatgggctgctggtggggctggctgaggaggaaatgcgagcttcgctcaagaccctgcaccggatggcagagaaggttggggcagacataaccgttcttcgagagcgagaagtggattatgatagcgacatgccccggaagatcaccgaggtgctagtacgaaaggtccctgacaaccaacagttcctagacctccgtgtggccgtcctggggaatgtggactctgggaagtcaactctgcttggagtcctgacccagggagagctggacaatgggcggggccgggctcggctcaaccttttccgccacctgcatgagattcagtctggccgaacctccagcatcagcttcgagatcctgggctttaacagcaagggagaggtgcatgggatcaatgggacccaatggggccagactctgaggatgggatggtagtagtgaaggacataggatgggggtagagtgtggagactttttgaaatagtatagatgaatgccctgaggggactgtgaacaagctctgcccctcttaggaaatcaatggggaatcaactaaattaaataaaaaatggggtcaagattaagaggcagggtcacccagggaatggtttaggtcctggcaactctgaaggggttggaagggctggcaggaggcactgagggccctgggccctgggccaggtggtgaattacagcgactcacggacagcagaagagatctgtgagagcagctccaagatgatcaccttcatcgacctggcaggccaccataagtacctacacaccaccatctttggcctcacatcatactgccccggcgc

SEQ ID NO: 86218 - DNA, 382 bp, Homo sapiens
tttcgttgcaattacaactgccattttgacagtaaaagaaatcgaacttgactttgctgtgcccctgaaggatgtcactgttccagaaaggcgacaggctcgattcgaatgtgtcctcacccgagaggcaaatgttatatggtccaaaggacctgatataattaagtcatctgacaaatttgatatcatcgctgatggaaagaaacatattcttgttattaatgattctcaatttgatgatgaaggggtctatactgttgaggtggagggcaagaagacctcagctcggttgtttgtcacaggtataagactgaaattcatgtcacctcttgaagatcaaacagtaaaagaaggtgaaacagcaacttttgtttgtgaactg

SEQ ID NO: 86219 - DNA, 397 bp, Homo sapiens
cactttgctccacgctcctgctgctgaccatcccttcatgggtcttgtcccagatcaccttgaaggagtctggtcctacgctgatgaaacccacagagaccctcacgctgacctgcaccttctctgggttctcactcaacactagtggagtgggtgtggcctggatccgtcagcccccaggaaaggccctggagtggcttgcactcatttattgggatgatgataagcgctacagcccatctctcaacgacaggctcaccatcgccaaggacacctccagaaaccaggtggtccttacaatgaccaacatgggcccagtagacacagccacttactactgtgcacaattcgcaaggggggcgaggggctccaattggttcgacccctggggccaggg

SEQ ID NO: 86220 - DNA, 289 bp, Homo sapiens
gcgtgagccaccatgcccgacccagccattgcatctttatgtataaaatagtggagagaaaaacagtaggcactgccatctgtgtgtggaagtctggacttgttttaagcgaccggtggggggcggcaggagcagcaacctgcacttcacaaacacctcctgtggacctcatccagtctcctcagctcagcccgggggtctgcacggtgacatcacctccattcccagcaccccacaccatgactcatggtccaaacccgccgtctctcgtgccgaattcctgcagcgc

SEQ ID NO: 86221 - DNA, 448 bp, Homo sapiens
cgctgaattcggcacgagctagcaacttctggactgaagaagaggcacttacattgtatctcctttcttgtaccacctcctgctggtggcacagaagaagtggccacaatccgggtgtcgggagttggaaataacatcagctttgaggagaagaaaaaggttctaattcagaggcaggggaacggcacctttgtacagactgacaaacctctctacaccccagggcagcaagtgtatttccgcattgtcaccatggatagcaacttcgttccagtgaatgacaagtactccatggtggaactacaggtaagcggaagtttctttctcttctctgtcagttgtggaagaggaagaatgagaatttggtggtacaccttgaagacagaagcaactctgagatcttggcccagagccccatgactctgcccagcaccgagcgcccacattc

SEQ ID NO: 86222 - DNA, 1537 bp, Homo sapiens
  misc_feature (1)...(1537): n = a,t,c or g
ctgcaggaattcggcacgaggcgcctcctaccacttccaaccgccaccggcgacagattgaccggggtgtcacccacctcaacatttcagggctgaagatgcccagaggcatcgccatcgactgggtggccggaaacgtgtactggaccgactcgggccgagatgtgattgaggtggcgcagatgaagggcgagaaccgcaagacgctcatctcgggcatgattgacgagccccacgccattgtggtggacccactgagggggaccatgtactggtcagactggggcaaccaccccaagattgagacggcagcgatggatgggacgcttcgggagacactggtgcaggacaacattcagtggcccacaggcctggccgtggattatcacaatgagcggctgtactgggcagacgccaagctttcagtcatcggcagcatccggctcaatggcacggaccccattgtggctgctgacagcaaacgaggcctaagtcaccccttcagcatcgacgtctttgaggattacatctatggtgtcacctacatcaataatcgtgtcttcaagatccataagtttggccacagccccttggtcaacctgacagggggcctgagccacgcctctgacgtggtcctttaccatcagcacaagcagcccgaagtgaccaacccatgtgaccgcaagaaatgcgagtggctctgcctgctgagccccagtgggcctgtctgcacctgtcccaatgggaagcggctggacaacggcacatgcgtgcctgtgccctctccaacgccccccccagatgctccccggcctggaacctgtaacctgcagtgcttcaacggtggcagctgtttcctcaatgcacggaggcagcccaagtgccgctgccaaccccgctacacgggtgacaagtgtgaactggaccagtgctgggagcactgtcgcaatgggggcacctgtgctgcctccccctctggcatgcccacgtgccggtgccccacgggcttcacgggccccaaatgcacccagcaggtgtgtgcgggctactgtgccaacaacagcacctgcactgtcaaccagggcaaccagccccagtgccgatgcctacccggcttcctgggcgaccgctgccagtaccggcagtgctctggctactgtgagaactttggcacatgccagatggctgctgatggctcccgacaatgccgctgcactgcctactttgagggatcgaggtgtgaggtgaacaagtgcagccgctgtctcgaaggggcctgtgtggtcaacaagcagagtggggatgtcacctgcaactgcacggatggccgggtggcccccagctgtctgacctgcgtcggccactgcagcaatggcggctcctgtaccatgaacagcaaaatgatgcctgagtgccagtgcccaccccacatgacagggccccggtgtgaggagcacgtcttcagccagcagcagccaggacatatagcctccatcctaatccctcnnnnnnnnnnnnnnnnnnnngttctggtggc

SEQ ID NO: 86223 - DNA, 450 bp, Homo sapiens
ctgccccctgagagtgtgggtcctgtggtagctggagtgttggtgcccatcttggtgctggcggtcctcatgctgatgtactactgctgcagacagaacaacaaactaggccaactcaagccctcagctctcccttccaagctgaggcaacagttcagttgtcccttcagggtttctcagaacagcgggactggtcatgccaacccaactttcaagctgcagacgccccagggcaagcgaaaggtgatcaacactccggaaatcctgcggaagccctcccagcctcctccccggccccctccagattatctgcgtggtgggtccccacctgcaccactgccagctcacctgagcagggctgctaggaactccccagggcccgggtctcaaatagagaggacggagtcgtccaggaggcctcctccaagccggccaattccccccgcaccc

SEQ ID NO: 86224 - DNA, 952 bp, Homo sapiens
aaacaaccaccatttcaaattttcacactcaggtcaacaggacatactgctgtggcacctaccgagcaggtcctatgcggcagataagtctcgttggagcagtagatgaagaagttggtgattatttcccagagttccttgatatgttagaagaatcaccatttctgaaaatgactttgccctggggtacactttctagcctccgactccagtgtaggtcccagagtgatgatgggcctataatgtgggtaaggccaggagaacagatgatccctacagcagatatgccaaagtcacccttcaaaagacgacgatcaatgaatgaaataaaaaatctccagtacctacctcggaccagtgaaccccgcgaagttctctttgaagataggactagagctcatgctgatcatgtcggtcaggggtttgactggcagagtacggctgctgttggagttttgaaagctgtacaatttggtgaatggagtgaccaacctcgcataaccaaagatgtgatttgttttcatgctgaggattttactgatgttgtacaaagacttcagttagatcttcatgaacctccagtttcccagtgcgtacagtgggtagatgaagctaaactaaaccaaatgaggcgggaaggcattcgttatgctagaattcagctttgcgacaatgatatctacttcatccctagaaatgtcattcatcagttcaaaacagtttcggcggtgtgcagcttagcctggcatataaggcttaaacagtaccaccctgttgtggaagccactcaaaacacagaaagcaattctaacatggactgtggtttaactggaaagcgagaattagaagttgactcccaatgtgtgaggataaaaactgaatctgaagaagcatgcacagagattcagctgttaacaactgcttcatcatctttcccacctgcatcagaact

SEQ ID NO: 86225 - DNA, 526 bp, Homo sapiens; identical to SEQ ID NO: 67036
  misc_feature (1)...(526): n = a,t,c or g

SEQ ID NO: 86226 - DNA, 628 bp, Homo sapiens
agcgtaaccatcattacgcctagcttggcacgagggtgagattacatcagttatctgaggagacacttcaggactgtctgttcaatgaagagagtttactcaaaagcacaaactgttttgacataatcatggatgcaattaagtgtgtgcaaggttctggtggactcttccctgatgctcgaccatccacaactgagaaatacatattcattcacaaaactgaggaaaatggagaaaatcaatatacattttgctataacattaaatctgattcatggaaaatactgccgcaatcacacctgattgatttgccaggatctagtctttcgagttacggagagaaaatattcttgacaggtggttgcaaagggaaatgttgtcgaacggttcgactgcatattgccgagtcatatcatgatgccactgatcaaacctggtgctactgtccagtgaaaaatgatttcttcttggtatcaactatgaaaacaccaagaaccatgcatacatcagttatggctctcgatagattatttgtcataggtggaaaaactagaggatcccgggacattaaaagtctcttagatgttgaatcttacaatcctctttccaaagaatggatatctgttac

SEQ ID NO: 86227 - DNA, 809 bp, Homo sapiens
aatagaggcgcgtgccctcgctgcggcgcctggacctgggcgagctcaagcggctggaatacatctcggaggcggccttcgaggggctggtcaacctgcgctacctcaacctgggcatgtgcaacctcaaggacatccccaacctgacggccctggtgcgcctggaggagctggagctgtcgggcaaccggctggacctgatccgcccgggctccttccagggtctcaccagcctgcgcaagctgtggctcatgcacgcccaggtagccaccatcgagcgcaacgccttcgacgacctcaagtcgctggaggagctcaacctgtcccacaacaacctgatgtcgctgccccacgacctcttcacgcccctgcaccgcctcgagcgcgtgcacctcaaccacaacccctggcattgcaactgcgacgtgctctggctgagctggtggctcaaggagacggtgcccagcaacacgacgtgctgcgcccgctgtcatgcgcccgccggcctcaaggggcgctacattggggagctggaccagtcgcatttcacctgctatgcgcccgtcatcgtggagccgcccacggacctcaacgtcaccgagggcatggctgccgagctcaaatgccgcacgggcacctccatgacctccgtcaactggctgacgcccaacggcaccctcatgacccacggctcctaccgcgtgcgcatctccgtcctgcatgacggcacgcttaacttcaccaacgtcaccgtgcaggacacgggccagtacacgtgcatggtgacgaactcagccggcaacaccacc

SEQ ID NO: 86228 - DNA, 865 bp, Homo sapiens
gcacgaggaattcgaagagctacctgtccttaggagaagagggaaacagaaagaaaaaggatataggcataaggttcctcagaaaattttgagtaaatgggaagccagtgttggacttgcagaacagtatgatgttcccaaggggtcaaagaaccgaaaatgtattcctggttcaatcaagttggacagtgaagaagatatgccatttgaagactgcacaaatgatcctgagtcagaacatgacctgttgcttaatggctgtttgaaatcactggcttttgattctgaacattctgcagatgagaaggaaaagccttgcgctaaatctcgagccagaaagagctctgataatccaaaaaggactagtgtgaaaaagggccacatacaatttgaagcacataaagatgaacggaggggaaagattccagagaaccttggcctaaactttatctctggggatatatctgatacgcaggcctctaatgaactttccaggatagcaaatagcctcacagggtccaacactgccccaggaagttttctgttttcttcctgtggaaaaaacactgcaaagaaagaatttgaaacttcaaatggtgactctttattgggcttgcctgagggtgctttgatctcaaagtgttctcgagagaagaataaacaccaacgaagcctggtgtgtggttcaaaagtgaagctctgctatattggagcaggtgatgaggaaaagcgaagtgattccattagtatctgtaccacttctgatgatggaagcagtgacctggatcccatagaacacagctcagagtctgataacagtgtccttgaaattccagatgctttcgatagaacagagaacatgtta

SEQ ID NO: 86229 - DNA, 631 bp, Homo sapiens
cggagtacggcacgagccaggttggagcctaccagcccttcttccgtggccatgccaccatgaacaccaagcgacgagtgccctggctctttggggaggaacacacccgactcatccgagaagccatcagagagcgctatggcctcctgccatattggtattctctgttctaccatgcacacgtggcttcccaacctgtcatgaggcctctgtgggtagagttccctgatgaactaaagacttttgatatggaagatgaatacatgctggggagtgcattattggttcatccagtcacagaaccaaaagccaccacagttgatgtgttccttccaggatcaaatgaggtctggtatgactataagacatttgctcattgggaaggagggtgtactgtaaagatcccagtagccttggacactattccagtgtttcagcgaggtggaagtgtgataccaataaagacaactgtaggaaaatccacaggctggatgactgaatcctcctatggactccgggttgctctaagcactaagggttcttcagtgggtgagttatatcttgatgatggccattcattccaatacctccaccagaagcaatttttgcacaggaagttttcattctgttc

SEQ ID NO: 86230 - DNA, 401 bp, Homo sapiens
  misc_feature (1)...(401): n = a,t,c or g
cccacgcgtccgaccgaatcctggagctgaaccaggaggacttctctgtggtggtggagccaggtgtcacccgcaaagccctcaacgcccacctgcgggacagcggcctctggtttcccgtggacccaggcgcggacgcctctctctgtggcatggcggccaccggggcgtcggggaccaacgcggtccgctacggcaccatgcgggacaacgtgctcaacctggaggtggtgctgcccgacgggcggctgctgcacacggcgggccgaggccggcatttccgcttcggcttctggccagaaatccctcatcacacagcctggtactcaccttgtgtgtccctgggacgtangaagagtgcagccggctacaacctcacggggctcttcgtgggctccgag

SEQ ID NO: 86231 - DNA, 418 bp, Homo sapiens
ctggtatcttccgggtcattgagaagaagccactttctcatgacagcatggccaggttcatcataaacaaatccaacatcaatcttaaattcccccatcagacaatctgcccgcagagagtgagaattataaacccggatgctgatgatctcatccatcaattcagaaggggtcatgttgacattgtagaaaaacaactcatcaaaaaaagggttgtttcctctcttgattcttgttcggtgtgtctggccacagacgtgaactttgaccacaggccttatgttgttaccacttaactgtcggccctcaatcactcggacgcggatctggaagtcctgtggcttatttgacagcatccgccgggctgttctttactttggtgagcctccgaacaaagctgagcttccgacaccgtgcc

SEQ ID NO: 86232 - DNA, 360 bp, Homo sapiens
tgcttggcgtgtaactggattcctttcctcttttaggtaatcacagacctggaggagcagctaaaccagctgaccgaggacaacgctgaactcaacaaccaaaacttctacttgtccaaacaactcgatgaggcttctggcgccaacgacgagattgtacaactgcgaagtgaagtggaccatctccgccgggagatcacggaacgagagatgcagcttaccagccagaagcaagtaaggagggttaacaaggtcgtgagatccctggaggacttttagaaggattttaggagtgcttggtgcgttctcccaagggttccaacactgaacctcatacagtaattgggctctttttagaag

SEQ ID NO: 86233 - DNA, 846 bp, Homo sapiens
ctgggatgcttggggcgactggagtgactgctcccggacctgtgggggaggagcatcatattctctgcggagatgtttgactggaaggaattgtgaagggcagaacattcggtacaagacatgcagcaatcatgactgccctccagatgcagaagatttcagagcccagcagtgctcagcctacaatgatgtccagtatcaggggcattactatgaatggcttccacgatataatgatcctgctgccccgtgtgcactcaagtgtcatgcacaaggacaaaacttggtggtggagctggcacctaaggtactggatggaactcgttgcaacacggactccttggacatgtgtatcagtggcatctgtcaggcagtgggctgcgatcggcaactgggaagcaatgccaaggaggacaactgtggagtctgtgccggcgatggctccacctgcaggcttgtacggggacaatcaaagtcacacgtttctcctgaaaaaagagaagaaaatgtaattgctgttcctttgggaagtcgaagtgtgagaattacagtgaaaggacctgcccacctctttattgaatcaaaaacacttcaaggaagcaaaggagaacacagctttaacagccccggcgtctttgtcgtagaaaacacaacagtggaatttcagaggggctccgagaggcaaacttttaagattccaggacctctgatggctgatttcatcttcaagaccaggtacactgcagccaaagacagcgtggttcagttcttcttttaccagcccatcagtcatcagtggagacaaactgacttctttccctgcactgtgacgtgtggaggaggtta

SEQ ID NO: 86234 - DNA, 570 bp, Homo sapiens
aacctcgaagggcgtatccagtctctaccatttgtagggggcacaaattgctgaggtagtactggaataatgggaggggttggaagtggaatgagaggggccgaggagaatcgattcagcacctgctgaacttcagctgctgtgctcctgaagagttcaatgtatcttttacccaacaagtctttatgcttcctcaacgcattctgtgcatattcctcacaggcaaagaggacaaaagcgtcccctgttggcctaccatctgggtaggtgacaaagaggatgccttcctttcccccagtaatagggcaatgctgtccaaagaaggccaccacttcttcagctgtggccgtgaaagggagcccccgcatgcgaacaatgacttgattttccttggagagaaactgggctacctcattggaagtaccaccagcaattttaaggaaatcttcacctgttgctttgtaaacctcaatataccgggtccccatgtgatgtttgtgcctctgtagtgctaggtctcggtgctcctcacttacaaacctaaccagagcttctccgttccttcgaccc

SEQ ID NO: 86235 - DNA, 473 bp, Homo sapiens
cctatgtaacatcacctttatcagaaaacttctcagctagatacagaaatcattccaatgacctaacctctgctcacacagaactccagaacaagatcaagctgacagtgctggaaggagacattctggatgagccattcctgaagagagcctgccaggacgtgtcggtcgtcatccacaccgcctgtatcattgatgtcttcggagtcactcacagacagtctatcatgaatgtcaatgtgaaaggtagggtagcctggggaggagataaagcaaggtggggaaatgaggatcagaaagaaggacaggaaggaaagagaagtctatccattgaacacctgctgtgctctgggccaagtgactttgctgatcactaccaactgggggaactcaaggctgctattttcagttttatagatgagaaaactaggactgagcaatgacaagcaacttgtccaaagtcccacagttga

SEQ ID NO: 86236 - DNA, 738 bp, Homo sapiens
aaaagttttagctactatacctggtcctcagttacagatcccagtatcgtgccttgcccttcctgtttctccaccccaaatgtttttgtgcatttgtaaagttgtgtgaccttgggataatgaaaatacatatgctgaagtagttattttcctggggaaagtgttcacatctcacacatttgcttttgtcttccttacagcttcattatgtccacagtactccagggggttcaggttcggcaaatccaccagtggtgagcacggtctatgcctacattggtactccacctgcccaacgccaaattgcctcattggtttggcgcctgggacccacacattttctagaagaagttttaccttcttcaaatgttactaccatttatgaacttggaccaaattatgttggaagctttcaggctgtatgtatgccatgtaaagatgcaaaatccgaaggggtggtgccatcccctgtgtcattagtaccagaggagaaagtgtcatttggcctctatgcactctctgtgtcgtctctaacagtggcaagaatccggaaagtgtataacaaattggatagcaaagccattgctaagcagttaggcatttcctcacatgagaatgccactcctgtgaagttgatacacaattcagcaggacatcttaatggatctgcacggacaattggggccgctctgattggatacttgggagtaagaacatttgtccctaagcctgttgcca

SEQ ID NO: 86237 - DNA, 347 bp, Homo sapiens
gggatgtggtgccgtcaggttccagaggtgcctcctcttaccccagaggctgagtggtggggaaacaggaagctggggctcactctgactcctgctgcctcctccacaccccgcccaggctgaccccagcccacagcaggaaggccctgcggaattcccgcatcgtcagccagaaggacgacgtccacgtctgtattatgtgcctacgcgccatcatgaactaccaggtcagccgaggggcatgggactggcgactagggagcccagcctgtcctcactgggggctacacaagctgccgaggctctgggatccactgtccctttaccctgtgctgtgctggggaact

SEQ ID NO: 86238 - DNA, 709 bp, Homo sapiens
aatcttgacatccctagtggagctaacccgctttgagactttgactccaaggttttcagcgactgttcctccatgctgggtagaagttcaacaagaacagcagcaaaggaggcatcctcaacatttgcatcagcaacaccatggtgatgctgctcagcatactcgaacttggaaactacagaccgacagcaacagctgggatgaacatgtatttgaattagtactacctaaagcttgtatggttggacatgtggacttcaaattcgttttgaactcaaacatcaccaatattccacagatacaagtgacactgctgaaaaataaagctccaggattagggaaagtcaatggtcttagattatgtccatttttggaggatcataaagaagacattctatgtgggccagtatggcttgctagtggccttgatctatcagggcatgctggaatgttgacgttaacaagccccaaacttgttaaaggtatggcaggaggaaaatatcgttcgtttttaatccatgtcaaggcagtgaatgaaagaggaacagaagagatttgtaatggtggtatgcgtcctgtagtaaggcttccatccctaaaacaccagagtaacaagggttattcacttgcttcacttttggctaaagttgcagcaggcaaggaaaaatcatctaatgttaagaatgaaaatacaagtggcacccgtaaa

SEQ ID NO: 86239 - DNA, 384 bp, Homo sapiens
cagatacatgagaagcaatgataaagaaaacagaatttagcaatgtgtgcagcatattttacttaatcctgcaagcaatgctaaaaggccttctacaattatcatgtcctggaattgcttcagatgctggtgacaggaggagtaagttctcagctggaacaacatttagataaggataaagtctatggtgtggcagatagctgcacgtcgctcttgtctggaagaaaccggtgtaagctggggcttctgtccttacacgaaaccattttatcagacgttaatccaagaaacacctttggacaactgttctgtggctcattagatctttttggaatcctgtgtgttggcttataccgaataattgatgaagaggagctcaaccca

SEQ ID NO: 86240 - DNA, 420 bp, Homo sapiens
ccaaataagtaaattaagcttctcaacattttgctacctgagacttcaggtaagcctgtcactaaattcacatgtgtccttactttcttaatagctgccagtagttcaagttatgccaaagagttatacttcctctttctaattgagtcccttcctttggaggccagtagtgttcaaaatgagctgcaggacccgcaaagttgacattcaattgtgatggtatacgaacatccagataggcaacattcagccaccactcttccagctaaaagaaattgagaacatcagcttaatgttcttcataatacatgaatgtgtaactactgggaattttaaaaagcaagctatatttggtctttaattattcctcaacatttaaaaacatgttttttggctgggtgaggtgactcacacctataa

SEQ ID NO: 86241 - DNA, 687 bp, Homo sapiens
  misc_feature (1)...(687): n = a,t,c or g
aaaatcaaacaattcgtgtctatttttttcagatgcccagacctggaggatccccagggtcttctcatggttgcagcaggaaggacacctctctgaggaagagatggccagaacatttaactgtggggttggcgctgtccttgtggtatcaaaggagcagacagagcagattctgagggatatccagcagcacaaggaagaagcctgggtgattggcagtgtggttgcacgagctgaaggttccccacgtgtgaaagtcaagaatctgattgaaagcatgcaaataaatgggtcagtgttgaagaatggctccctgacaaatcatttctcttttgnnnnnnnnnnggccagagtggctgtcttaatatctggaacaggatcgaacctgcaagcacttatagacagtactcgggaaccaaatagctctgcacaaattgatattgttatctccaacaaagccgcagtagctgggttagataaagcggaaagagctggtattcccactagagtaattaatcataaactgtataaaaatcgtgtagaatttgacagtgcaattgacctagtccttgaagagttctccatagacatagtctgtcttgcaggattcatgagaattctttctggcccctttgtccaaaagtggaatggaaaaatgctcaatatccacccatccttgctcccttt

SEQ ID NO: 86242 - DNA, 362 bp, Homo sapiens
gtgtaggacagtgaactgagaaggaagctattaagattctggccttggcttaactctcaactggccattggtcttgcagtaagtcttttttctgggcttcttctggtcctatttgtatgtattgcattgtcacatcatgcctctatcctagggaatactgtgagctgaaaaatgagacccttactgttcacgtcctgctaagggggaccgtcgtgtcagcactgtaatgcagtgatgttttttgtgtctttcaggtgacttcatggtcatgacgattttcttcaatgtgagcaggcggtttggctatgttgcctttcaaaactatgtcccttcttccgtgaccacgatgctctcctgggttt

SEQ ID NO: 86243 - DNA, 372 bp, Homo sapiens
tggaaaacccacattggggtgtgagtttggccgttttaactttccagttcattgtctttgattttttcctcagacctcatcctcacttgattacggaagccggcagatctgtcctgcctcccgttctgcccggtcccatttggaattcccagagttttcctgacctgtcgttcttgtggtgtctcatcaggctgaaccgttcacaggagaactccctgcccagcagacactgcccatcctcggagagaaactgcaccaggtcttccacagcgtcctggaaaacctcaccaacgtcatgagtggcttttgtctgccagagcccgtttttagcataaaggtaaagtcacctatgagcgcaggcgtgtagaccac

SEQ ID NO: 86244 - DNA, 1466 bp, Homo sapiens; identical to SEQ ID NO: 66468

SEQ ID NO: 86245 - DNA, 370 bp, Homo sapiens
tttttttttaaaggtttctgaatggtaatagcccttgcttcgaaaagtaacatgttgattatttcaggtaataaatgatcatcttgtgttttaacagttctgcattttccagttggtgagcactgagagtaatcgctatagtctcgatcatatttcttcactgttcacttctcaggtaggttgattcatcctttgcatatcacataagtacaagaaaaagaagtattgactaactctgttatggtataatgggattgtagtcttaaaatggaattatttcatgatatatggaacaaaatttcatttagactttaccaaattcatgtggcaccatgtttttgtttcatacatttacctctcctactgagga

SEQ ID NO: 86246 - DNA, 1153 bp, Homo sapiens
gagcaggaaaagcgaaagaggtccctgaagctcattctggagaagaagctggccattctggagcgggccattgagagcaaccagagcagtgtggatctgaaactggccaagctgaagctctgcacagagttctgggagccctccactctggtcaaagagtggcagaaactgatatttttgcatcccaataatacagccctttggcagaaataccttttattttgccagagccagtttagtaccttttcgatatcaaaaattcacagtctttatggaaaatgcttgagcactttgtctgctgttaaggacggcagcatcttatctcaccctgcgttgcctggcacggaagaggccatgtttgcactctttcttcagcagtgccactttctgcggcaggctggccactctgagaaggccatctcattgttccaggccatggtggacttcaccttcttcaaacccgacagcgtaaaagatctgcctaccaaaggacaggtggaattctttgaacccttttgggacagtggagagccccgggctggggagaagggagcccgaggctggaaggcgtggatgcaccagcaggaacgaggtggctgggtggtcatcaacccagatgaggatgacgatgaaccagaagaggatgaccaggaaataaaagataagactctgcccaggtggcagatctggcttgctgctgagcgttcccgtgaccagaggcactggcggccctggcgccctgataagaccaagaagcaaaccgaggaagactgtgaggatcccgagagacaggtgttgtttgatgatattgggcaatctttgatcagactttccagccatgatcttcagttccagctggtggaggccttcctgcagttcttgggtgtgccttctggctttactcctccagcctcctgtctttatctggccatggatgagaacagcatctttgataatggactttatgatgaaaagcccttgacttttttcaaccctttgttttctggggctagctgtgttggccgcatggataggttgggctatcctcgctggaccaggggtcagaaccgagagggcgaggagttcatccgcaatgtcttccaccttgtcatgcctttattttcaggcaaagagaagtcccagctctgcttcg

SEQ ID NO: 86247 - DNA, 479 bp, Homo sapiens
  misc_feature (1)...(479): n = a,t,c or g
ccccaagccctgtggccacctctgctgctgtgtggtgcgaggctgtgagcaggtggaggccattgagtactacacaaagctggagcagaagctgaaggaagactacaagcgggagaaggagaaggtgaatgagaagcctcttggcatggcctttgtcaccttccacaatgagactatcaccgccatcatcctgaaggacttcaacgtgtgtaaatgccagggctgcacctgccgtggggagccacgcccctcatcctgcagcgagtccctgcacatctccaactggaccgtgtcctatgcccctgaccctcagaacatctactgggagcacctctccatccgaggcttcatctggtggctgcgctgcctggtcatcaaagggcgcctcttcatcctcctcttcttcctcaccactccagccatcatcatcaccaccatggacaagntcaacgtcaccaagcctgtggagtacctcaaca

SEQ ID NO: 86248 - DNA, 640 bp, Homo sapiens
gtcatcctgtagcagattgggtttcaaaaattcggatgtaaacattgacatccagtttccagccattatgtctcagccagatgtcctcttacttgttcaagaatgtttaaagaacagtgactcctttattgatgttgatgcagacttccatgctagggtgccagtggtggtgtgcagagaaaagcaaagtggtcttctgtgtaaagtgagcgcaggaaatgaaaatgcttgtctgacaacaaagcatttaactgcccttggaaaactagaaccaaagctggttcctttggtgattgcatttaggtactgggcaaagctttgcagtatagatcgccctgaagaaggaggtctgccaccttatgtgtttgccctgatggccattttctttcttcagcagaggaaagaaccccttttgcctgtatatctaggatcatggattgaaggattctcattaagcaaactagggaatttcaaccttcaagacattgaaaaagatgttgtgatctgggaacatactgacagtgctgcaggggacacaggcataacaaaagaagaggcaccaagagaaacgccgattaaaaggggacaggtgtcattaatattggatgtgaaacaccagccttcagtaccagttgggcag

SEQ ID NO: 86249 - DNA, 547 bp, Homo sapiens
ggtgtcttgattccgtcatttcaaaatcaactcttcgctgacattctcgcgggaatagaatccgtcacctctgagcataattatcagacccttattgctaattacaattacgatcgcgattccgaagaagagtcggtgattaacctgctctcttataacattgacgggattatactttcggaaaaatatcacaccatcaggacggtgaaatttctgcgttcagccaccattccggtcgtggaattgatggatgtacagggagaacggctggatatggaggtcggttttgataatcggcaggccgcttttgacatggtgtgtaccatgctggagaagcgagtcaggcacaaaattctgtatctcggttccaaagatgacacccgcgatgaacagcgttatcaagggtattgcgatgcgatgatgctgcataatctttccccattacgcatgaatccacgcgccatctcatccattcatttaagaatgcagttaatgcgtgatgcccttagcgcaaaccccgatttagacggtgtattttgcaccaatg

SEQ ID NO: 86250 - DNA, 350 bp, Homo sapiens
actaccgattcaatgtccgtcgcctgacatcgcgcggactgacaggagcctggctgtacccagcctatttaatttgcacaacaacgtggtgatgaagcacgcgccaaccaacatctggaacgcgcagcggagctggccggcaacgacaccattccggtagaaatcacccgcgtacgtctgcaactggcccgtaatgaaaaccatgctgcacgccacggcgtggataagctgctggaagttacgccacgccatccggaagtattacgtctggcggaacaggcgtatatccgcacaggtgcatggagttcgctgctggatattatcccatcaatcgcccaagcccatgttgg

SEQ ID NO: 86251 - DNA, 393 bp, Homo sapiens
ccgggttaaacggctgagtaacgcagattaacgccagaatcagcgagaaggtgacgatgataccgaggatcaaccgccgcgccccggcactcaaatgaccgagctcttttttctcatccagatgctgtgttttatggctaacgcgctcaggcagctcgttcatccattgatggtaacgtccacgaatattttgcagacctgaaaatgcccgcctgcgcggtttcggcgtttctttgcgcgatgcaccgatcaataaccagcatgtttgaatgagataacggaccgggtccagcggacgcggacgcgaggcgttgatatgcggatacaggtttttatgttctgcgcgaatacgctgccagcgcgggtgctccagcggaataaaaatccaggcca

SEQ ID NO: 86252 - DNA, 461 bp, Homo sapiens
gggaacttttgcgggttcttgtgaaccaggcagtgccagatcggcagtcgtacaggggcgcgtgttgcccagtttgcggcataccgcgtcggtagcccattcagccatcagccgataggtcatcagtttgccaccggtgatggtgataaatccgtccagaccatcgcgttcagcatggtcgagcagcacgatgccacggctgacgttacgtccgctcgggtcgtcatcgctggcaaccagcgggcgcacgccagaataggcccgcaaaatgcgcgttttcgccatcacgggggccagtttttccccttcacgcagcagaatatcaacctcttctgccgtcactcgattatcgtcaatctcgttgtaatcaatacgtaaagaggtggtaccaatcagcgaaatggtatcgccaggcaccagaatatcggcgtcggaaggtttacggcagcggttgatcctct

SEQ ID NO: 86253 - DNA, 586 bp, Homo sapiens
ttcccgggtcgacgatttcgtgcgttacccactgaatcagcgctacaaacagagtttggcgtcagccgggttacggtgcgtcaggctttgcgccagctagtcgagcagcagatcctcgaaagcattcagggcagcgggacttacgtcaaagaagagcgggtcaattacgatatttttcagttaaccagttttgatgaaaaactgtcggaccgtcacgtcgatacacacagtgaagttctgatattcgaagtgattccggctgacgattttcttcagcaacagctacaaatcaccccgcaggatcgtgtgtggcatgtgaagcgcgtgcgctatcgcaagcaaaagccaatggcgctggaagaaacctggatgccgcttgcgttgttcccggatctcacctggcaggtcatggaaaattcgaaatatcactttatcgaagaagtgaagaaaatggttatcgatcgtagcgaacaggaaatcattcctctgatgccaaccgaagagatgagccgtctgcttaatatcagccagacaaagccgattctacgaaatcgtcgacccgggaaaatcactagtgcggacggct

SEQ ID NO: 86254 - DNA, 250 bp, Homo sapiens
ccataaatcctaaaccgcgcgtcgcggcaatcagctccgccgccaccagcgtagaccagcccacccccagaccaatacgtaatccggtgaggatttccggcagcgcaccgggcaaaatgacaaaccacagcacctgcgcacggctggcacccagcgactgggcggcacgaatgcgaacctgctgcacgcttttcacccccgccagcgccgacatcgccaccggtgcaaaaatcgctaaatagatcagtaa

SEQ ID NO: 86255 - DNA, 138 bp, Homo sapiens
gctctatttcgatgcttatctccagtcgctacaggtggctgcgatttcgacattttgctgtttactgatcggctatccgctggcgtgggcggtggcgcacagtaagccttcgacccgtaatattttattactactggt

SEQ ID NO: 86256 - DNA, 351 bp, Homo sapiens
  misc_feature (1)...(351): n = a,t,c or g
catacacaggctgccaattggagggggggaaatgagaggggtggaggcttcctttgtcttaatcangattctcttgatggccgatgatagaaagtcagcccaaggaactctggcaagaaggagcctgtctgccccagagctggtgtgtctggtggagaatgcggggcccatgcctggtcccaccgcctccctccgtcttttgtcccttcttggctccaggcttcctgcaggtgcacctcacccagggaggtttggaagctacatcccgggtgggcaggggcaggcatggctcaaggagatgggggtctacnaggagggtggggaggggtctcctgtccccagcagaagggg

SEQ ID NO: 86257 - DNA, 467 bp, Homo sapiens
cgttgccagtttcattgccagtagcgaatgaccgccaagcgcgaagaaatcagcatcggcatcctgcacgtcacaccccagcaacgacgagaatgccgcggcgataatcgtttcactgcccgctttcggcgcacgccctggcgcttgtgccttcagttcaggcaacggtaaggctttgcgatccagcttgccgttggcgataagtggtaactgtggaagttgcagcagaaccaccggtaccatatgtggtggcaatgtttcacgaagctgcgcctgcaatgcgctggtatccaacggcaggcccgattgcgacaccagatagcccaccaattgacgcgcatcaccaccggtggcagccgcctggttaatcacacaggcgtgggtaacggcttgttcgacatccggcagcgcctgcatcacgcgatcgatttcgcccagttcgatacgctgcccgcgaatttttagct

SEQ ID NO: 86258 - DNA, 705 bp, Homo sapiens
agattttcccgggtcgacgatttcgttggaaaatcatcacaaacgggctactgttggatttcacttccacccacggatagagcgccagtaaaaccaccagtgaaccgatgtaaaacagcaggatgcgatacaccacctgatttaccgcctttggaatgcttttttccggatcgcgcgcttcagcggcagtaatcccaatcagctccagaccgccgaaggagaacataattaccgccagcgacaaaatcagcccattccagccggtggcgaagaaaccaccgtagcgccagaggttgtcgatactggctttctcgccgccgtgaccagaaaacagcagccacaggccaaagccgatcataccgatgattgccagcactttaatcaacgcaaaccagaactcggtttcgccatataagcgcacgttcaccaggttaacggcgttgatgataataaagaaggcggcagcccaaatccacgttggaacatccgggaaccagtactgcatatagatgcccgcagcggtcagctctgccattcccaccagcacgaacattacccagtagttccagccagagaggaagcccgcaaacggtccccagtatttataggcaaagtgggcaaatgaaccggataccggctcctcaaccaccatttcgccaagctggcgcacaatcaggaaagcgatgatcaatcccgcggccatgg

SEQ ID NO: 86259 - DNA, 592 bp, Homo sapiens
cccgggtcgacgatttcgtgcagctggtacagcagtctgacactgtggagtgggatgacgcgcaaggtacgctgaaagcctggcgtcggctacaaatcggtcagttgacggtgaaagtgcagccgctggcgaaaccgtcagaagacgagttgcatcaggcgatgcttaatggcatccgtgataaaggtttaagcgtgctcaactggacggcggaagcggaacagctacgcttgcgtttgttatgcgccgcaaagtggttgccggaatatgactggccagcggttgatgatgaaagtttattggcagcgctggaaacgtggctgctgccacatatgactggcgtacattcactacgcggcctgaaatcactcgacatttatcaggcactacgcggattacttgattggggaatgcagcaacgtctggatagtgaattgcctgcgcattacactgtgccgacgggaagccggatcgccattcgttatcatgaagataacccgcccgcgctggcggtgagaatgcaagagatgtttggcgaggccaccaatccgacgatcgcccaacgaaatcgtcgacccgggaaaatcactag

SEQ ID NO: 86260 - DNA, 466 bp, Homo sapiens
tgattacggattccatgtccgtcgccgtacatcatgatgactgggaatatcatagaactacccaaataaatatagttgtggtaaagcttaatcaccttcagcgccggaaaatcctgactcagcagcaccaggttttgcggacgtgcaccgcgccaggagtagatcgactggtcatcgtcacccaccacggtaaagcgcgcgcggctgcccaccagcagtttcaccagctcatactggctggtgttggtgtcctgatactcatccaccagcagatagcgaattttgttctgccagcgcttgcggacttcttcattgcgttgcagcagcaacgtcggcaataaaatcagatcatcgaagtcgagaacgttacaggctttcaggtgtgcatcatacagcccataacaatgggcaaaaatacggtcccgctcgccaatcgcacttgctgccgcctgggacggtgttttga

SEQ ID NO: 86261 - DNA, 403 bp, Homo sapiens
ttccggtaacgcctcgaactgatcgaacactttgccgacttcatgcgccaggttgagcattttcttttcggggattagctggttgttatcggcctgagcgagaaacagcatatcgctgaccattttcgccattcgcgtcagctcttcgagattagagtagagcacatcttccagctccttctggctgcgcgactggctgagggcgatttcggtttgcgttatgagattcgtaattggtgtgcgaatttcgtgagcgatatccgctgagaaattggactggcgggtaaagacatcctcaatacgctcgatcatatggttgaacgacagtaccagctgttccagctcaatgggcacggtctgcgggtcgaggcgaacgtcgagatctttcgaggtaatattctgg

SEQ ID NO: 86262 - DNA, 542 bp, Homo sapiens
ttacctggcagcgggtctggcagctcacagccagaaaggcatcccagcattctccatttacggtcatgacgttcaggatgccgatgacacatcgattcctgccgatgttgaagaaaaactgctgcgctttgcccgcgccggtttggccgtcgccagcatgaaaggtaaaagctatctgtcgctgggcggcgtttcgatgggtatcgccggttccattgttgatcacaacttctttgaatcctggctgggaatgaaagtccaggcggtggatatgaccgaactgcgtcgccgtatcgatcagaagatttacgacgaagccgaattggaaatggcactggcctgggctgataaaaacttccgctatggcgaagatgaaaataacaaacagtatcaacgtaatgccgagcaaagccgcgcagttctgcgcgaaagtttactgatggcgatgtgtatccgcgacatgatgcaaggcaacagcaaactggccgatattggtcgcgtggaagaatcacttggctacaacgccatcgctgcgggcttcc

SEQ ID NO: 86263 - DNA, 340 bp, Homo sapiens
tgaacgaactgacctttaaagaggcggaaatctccaagctgtacaccaaagttcacccggcgtaccgcacgctgctggagaaacgtcaggcgctggaagacgaaaaagccaaacttaacggtcgcgtaacggcgatgccgaaaacccagcaggagattgtccgtctgacccgcgatgtcgagtctggtcagcaggtctatatgcaactgctgaataaagagcaggagctgaaaatcaccgaggccagcaccgtcggcgatgtgcgcattgttgacccggcaatcactcagcctggcgtgctgaaaccgaagaaagggctgattatcctcggcgcgattat

SEQ ID NO: 86264 - DNA, 630 bp, Homo sapiens
  misc_feature (1)...(630): n = a,t,c or g
aaccacccagctcaatgttcgcgacgtcacgcagcagcacgcgggaaccatcctgattcactttcagcaggattttgccgaactcttcagtagaggtcagacgcgtctgagcaataatagaggcgttaagctgttggcctttcaccggcggcgtaccaccgagctgacccgccgcaacctgggcgttctgcgctttgatggcggtaatgacatcaaccggcgttagctggaatttgttcagctcattcgggttcatccagatacgcatcgcgtactgtgaaccgaacaactgaacatcacccacgcccgacgtacggctgatggcatctttcatattcgccgccacgtagtcggagatatcctcctgcgtcatggtgccatcggtgttgataacgccgacaaccatcaggaagctgctggatgatttctcaacgctcaccccttgctgctgaacttcttgcggcagcaacggcatcgccagctgcagtttgttctgcacctgaacctgcgcgatatccgcatcagtaccagactcaaaggtcagggtgatctgcacggtacccgtggagtcactgttagaggacatgtacctcaggttatcccccccgttcacactctgttcgatancct

SEQ ID NO: 86265 - DNA, 723 bp, Homo sapiens
gtcgcactagtgattttcccgggtcgacgatttcgtggaagcatcatgcatccccaaacgactggccagaacgtcaagatacatttccggcacctgttgctggcacttaagaccactcaacagggtatgaactaccggaccaagacaggcaaccgctttcagacgcggcgattcaaggtatgccagacgcacggcaacgttagcgccgaaacggaaaccaaaggccgcgacgcgagtgtgatccacccacggtacgttaggcagcgcctttaagacgtgctgatgcaacaggctggagtcctgggtgagcttccattttgaagaaaagcccaccgacggcatatcaatagtcagcatcgcaatgccgcgcggcgcaaaataacgttcatacaggctgtaatagtccgtctgcatcgcatccagaccaccacacattaataccgtcgggaacgggccatcgcctttcggcatatgcaaaaagccggtgatgggcgcaccgccgggtacggtaaactccatctgccgcatcgtgcccggtagacgctgagcggcctcttcataggcgcggtttgacaaagcctgcgcttgctcggccaggtcatctcctttcagatgaggataggcggcaatgttgtacaacgtagccgcatgcagccagtgacgaccactgagttgcggatcgtcttccgcacaggctttttgttgccacaccatcgcctgggt

SEQ ID NO: 86266 - DNA, 249 bp, Homo sapiens
acgaattcgatcgtccgacccggagatcactcttgccggtacacctttgcatgcggcttatttgattggtatgacgctgatttgcgccggtttctcggtaggttttggtgtggcgatgagtcaggcgttagggccgttttcattacgcgcgggcgtagccagctcgaccttaggtattgcgcaggtttgcggttcgtcactgtggatttggctggcagcggtggttggtatcggcgcatggaatatgct

SEQ ID NO: 86267 - DNA, 433 bp, Homo sapiens
aaagcgacacatcattttggattcaatgtccgtccgctgtacatcgtcacgaatgggaagaccctggaggtaaccaacttattcgccttgaagaacaatgtggcaattttcattcccgctacctgggcagcaaaaatggagttcgtttccagaatcccccactcaatggacatcgtggttgcgataactgccaccgcagagagacgacttactcccagactcaccagcgtcggaaataaggtgaccatcagcaacatacccagaccggaggcgctggtaataaactgcgccatgatttggccgatgacgtaagttgccgacagaataatatacggcgagcgaatgagttttaacgggcggcttaacaagctcaccatcgcgcgactggcccctatgcgctccatgtagcgggcataaccgcccaccgccatag

SEQ ID NO: 86268 - DNA, 415 bp, Homo sapiens
ggcgaccaaataccggattctctgcgcgtggccggaatatattgcgcaacatggcgcgccaaaacatttaaccgatctttctgcattgccgggcctggtcattaaagagcgcgatcatccttttggtgtctggcaattacgcaataaagaaggcccccatgcgattaaaggcaccggcccactgtcgtctaatcatggagaaattgtccatcagtggtgtctcgatgggcaggggattgctctgcgttcctggtgggatgttagcgaaaacattgccagtgggcatttagtgcaagggctaccggaatattaccagccagcgaacgtctgggccgtttatgtttcaaggctggcgacgtcagcgaaagtgcggataacggtagaatttttacgccagtatcttgccgagcactac

SEQ ID NO: 86269 - DNA, 616 bp, Homo sapiens
catcattacggattcgctgtccgtacccgtacaacaacctgactggcaaagacctggtgtctaccgttttaaccttcttggcccacaatgcggatagctataacaaaaaaggttcggggactgttttcgacagtcagggtaatgctcatgacatgagcgtctactttgtgaagaccggggataataactggcaggtctacacccaggatagcagtgatccaaacagcattgcgaagacagcgacaacactggaatttaatgctaatggcacattagtggatggggcgatggcgaataatatcgcaaccggcgcaattaacggtgcagaacccgccacgtttagtctgagcttcctcaactccatgcagcaaaataccggcgctaacaatattgtggcaaccacccagaacggctacaaaccgggcgatctggtgagttatcaaatcaatgatgacggtacggttgtcggcaactattccaacgaacaaacccaactgctggggcagattgtactggcgaactttgccaacaacgaaggtctggcatccgaaggcgacaacgtctggtctgcgacgcaatcttctggcgtggcgctgttggggacagccgggacggg

SEQ ID NO: 86270 - DNA, 244 bp, Homo sapiens
tcttcgaatgtcacggcgatggcattacccgacaggccatcatagataacgacctgtacgtccggattggcaacacactgcgctttcagcgcttcaacagcttctgcacacaggcggcggcccatatccgggcgagtcaggtagagatttttgtcgctaatttcagagcgtacttccagcaagccctgcgctttcacccactcttccggcacttctttcagtacggtatctttcgaacgagagt

SEQ ID NO: 86271 - DNA, 803 bp, Homo sapiens
ccatggccgcgggattttcccgggtcgacgatttcgtggatatggcgaacccggcgagctgtcagctttttgggcaaaaattggatcgcctgcgcaaccataccgccgcacaattgattaacggctttaattttttacgttggctggaaagcgaaccgcaagattcgcataacgagcatgtcgttattaatgggcagaatttcctgatggagattacgcctgtttatcttcaggatgaaaatgatcaacacgtcctgaccggtgcggtggtgatgttgcgatcaacgattcgtatgggccgccagttgcaaaatgtcgccgcccaggacgtcagcgccttcagtcaaattgtcgccgtcagcccgaaaatgaagcatgttgtcgaacaggcgcagaaactggcgatgctaagcgcgccgctgctgattacgggtgacacaggtacaggtaaagatctctttgcctacgcctgccatcaggcaagccccagagcgggcaaaccttacctggcgctgaactgtgcgtctataccggaagatgcggtcgagagtgaactgtttggtcatgctccggaagggaagaaaggattctttgagcaggcgaacggtggttcggtgctgttggatgaaataggggaaatgtcaccacggatgcaggcgaaattactgcgtttccttaatgatggcactttccgtcgggttggcgaagaccatgaggtgcatgtcgatgtgcgggtgatttgcgctacgcagaagaatctggtcgaactggtgcacaaacgaaatcgtcgacccgggaaaatc

SEQ ID NO: 86272 - DNA, 478 bp, Homo sapiens
tacgagattcaatggccgtacccgtacaacgtagagactgcgaaaaccctgtggataccggagctgagacccgtggaccacagataaccaagccccgcggccccccagtgctggggccctgtgagagcacgtgaggcaggccagggcccacaacacccctccccgcagcccatcccctctgtcccccaaggctggcctcgcaggcactgggccctacagctgcccccggcgtagggtgactctccgcaggtctccacctgcctctaccctccacctcctgtaactgcctagagaggagatgaggaggcccgaggggcagccattccaaagtggaggaacagacgccattttcaaatgagtcatgggcgagccagaggactagcttgaggaggtctccgtgaagcacttacctggagcaggaggatgaactgtgggaacctctggatgggcttcatcatcaggctgtagagcgtggttc

SEQ ID NO: 86273 - DNA, 438 bp, Homo sapiens
tggcatcaggcatcgcaattaccctcacccgccatttgcacaatggcctggtagaagcgctgaaaaatatcaccgatgtcgtacatgatgtgcgttccaaccgcaatttttcccgacgagtttcggaagaacgtatcgctgagtttcaccgcttcgctctcgacttcaacagtctgctggatgaaatggaagagtggcagcttcgtttacaggctaaaaatgcgcagcttctacgtaccgcgctacatgacccattaaccgggctggctaaccgcgcagcgtttcgtagcggcatcaacacgttgatgaacaattccgatgcccgaaaaacgtcggcgttactatttcttgatggcgataatttcaaatacatcaatgatacctggggtcatgcgacgggcgatagagtcttgattgaaatcgcaaaacggttagctg

SEQ ID NO: 86274 - DNA, 471 bp, Homo sapiens
atcttcaatctgcacgctggaaaccgaatcggtcagcatcatgcggacgttttcgcatttcagcgcgttcagaacatccatcacataactgacgttgaagccgatttccatctccgcaccgctatagggaacgtcgaggatctcttccgcttcttcctgatccgggttgttggcggtgattttcagctggttttcgctgacataaagacgtacgccgcggaatttctcgttagagagaatcgccgcgcgagcaaacgcctgcttgagcagatcgcagccagcttccagatgtttgtccgggttcttcggcagaacgcggcgataatccgggaagcgaccatccaccagtttggaggtgaagataaagtcgccaacgtgggcgcgaatgttgttgctgccaatctgtacgcgcagcggattgtcgccgccgtcgagcatacgcatcagttcaatcacgcctttacgcggtac

SEQ ID NO: 86275 - DNA, 404 bp, Homo sapiens
tttcgtgcacatcctcatcatgggctcccagatggccctgggtgtcctcaacgtggaatggctggaagaattccaccagagccgcggcctgaccgcctgggtcagctccctcagcatgggcatcaccttgatagtgggccctttcatcggcttgttcattaacacctgtgggtgccgccagactgcgatcattggagggctcgtcaactccctgggctgggtgttgagtgcctatgctgcaaacgtgcattatctcttcattacttttggagtcgcagctggcctgggcagcgggatggcctacctgccagcggtggtcatggtgggcaggtatttccagaagagacgcgccctcgcccaaggcctcagcaccacggggaccggattcggtacgttcctaatgg

SEQ ID NO: 86276 - DNA, 456 bp, Homo sapiens
  misc_feature (1)...(456): n = a,t,c or g
aagtacgcaaattcccgggtagatgannnnnagaanacgctgcctgccttgggcctggagctccaagcccaacaggtccctggcggacctttcgtctgggggccagcgcacagacctgcccaccctgccctgcgagtctacacaccatgccctgctctgctgcctggtgggcaccctcccgctagccatatttttccgggagtcctccttgccaaaaatgatactgctctccgggctcaccacgtcctacatcctcgttctggagctcaacgaatacaccaggactgtgggtggtgccgactccggacgcagctaccagccgatcgtggccatcctgctcttctcctgtgcgctggccctgcatgccatgcaggtggacatcatgctgaggctggactacctctgggccgcacacgcagaggaggagcgagaggacatggagagggtgaagctgga

SEQ ID NO: 86277 - DNA, 627 bp, Homo sapiens
catagaagccgtagagctcactggccggaccggaattcctggggcgacgatttcgtcattccgacgctggctggtgccgggggccgggacgctccgtacgccgcccgccagggtgtggagccgcactggggcaagatcaggtgggacagcccaaagactccgggccaagttcctgggggactcggcggagatggaagatgattctcgaagctctccatttccttaattttgagttatcttcagtccttcttcaatgctgtgactgagtgcttgctgattattgggcttgctgatcctgactaatactctctcttgatgagcttcatattcatcacgacttggataaattttgctgatgagtgcatcaaactttgggtctggccttggtgatcttttggaaactagttttttccaacagttggttggatctaggatgtaaactgcaagtgtggcaggccgactgcactgttttgttactagagggagtgagaacacacctgtggacttgagcaccttccattcaccagttgctccatgggcatactctaattcaggtctccccacaaccctctgagttaatatttctctcccccttttaaagatgagaaaataaagcataaacagttt

SEQ ID NO: 86278 - DNA, 424 bp, Homo sapiens
aggaagcgcccgaagcaacccctcaaccttcccagcctggcccttcttcaccaatttctcttagtgctgaagaggagaatgctgaaggggaagttagcagggcaaacactcctgattcagatataactgaaaaaacagaagattctagtgttccagaaactccagataatgaaagaaaagcaagtatatcatatttcaaaaatcaaagaggaatacagtatattgatttgtcttctgatagtgaagatgtcgtttccccaaattgctccaatacagttcaagagaaaacattcaacaaagatacagtgattatagtttctgagccatctgaagatgaagagtcccaaggccttcctaccatggcacgtagaaatgatgatatttcagaactggaagacctttcgggaatggaagaccttaaaga

SEQ ID NO: 86279 - DNA, 762 bp, Homo sapiens
atggcagcgtacgtatgctaggatcctccagagcggccgcgggcttggtcgctgtggcagcggctgccgagtactctggcacggtagcgtcgggaggtaacctccctgggtgttcactgcggcccaagctccggggcaggccctggttttggcccgggctcgtggagccgctctctcgatcgagccctggaggaggcggcggtcactggggtgctgagcctgagcggccggaaactgagggagtttccccggggagcggccaaccacgacctgacggacaccacccgggcggacctgtcgcgaaatcgcctttcaaaaattcctatagaagcatgtcactttgtttctctggaaaatctcaacttgtaccaaaattgtattcgttatattccagaggcaattttaaacctacaagctctaacattcttaaatattagtcggaaccaactgtcaacattgccggtacacttgtgtaatttgccattgaaagtcttaattgctagtaataacaaattggtgtcacttccagaagaaattggacaccttagacatttgatggaacttgatgtgagctgcaatgaaattcaaactataccttcccaaattggtaacctggaggccttgagagaccttaatgtaagaagaaatcacctagtacatttgcctgaagagctggcggagttgcctttgatacggttagacttctcatgcaataaaattaccacaatcccacgaaatcgtcgacccgggaatagggaccgg

SEQ ID NO: 86280 - DNA, 2173 bp, Homo sapiens
tgaagatcaaagctgtgagggctgctaagttttggaaaatatgtcccatggagcacattctggttcgtctggaaactgattctcgacctgtgtctcggcgcctggtgagcctcatctttaattctttcctgcctgtgaatcagccggaggaggtctggtgcgagcgctgtgtcaccctggtgcagatgaaccacgccgctgccaggaggttctatcagtacgcccacgaacacaccgcctgcaccaacatagcaaagctgattcacgttattcgtcattgcttaaatgcctgtatccagagggcagtgagagagcctccagaggacgaggaggaagaggacggaagggagaaggagaatgtgactgatgatcgctgcaagatccctttattcatgctaatgtcctttatgccggcctctgctgtccccccattcagctgtggtgtgatttccacgctgagaagccgggaggagggcgctgtggacaagagctactgcactttgttggattgcctctgctcctgggggcaggtggggcacattctggagcttgttgacaactggctgcccacagagcatgcccaggccaagagcaacacagcttctaaaggtagggtgcagatccatgacacacgcccagtcaaacctgaattggcattggtctacattgagtatctgctgactcatccaaagaaccgcgagtgcttgctctctgctcctcggaagaaacttaaccatcttttgaaagcccttgaaacgtcaaaggcagatctggagtcacttctgcagacaccgggtgggaagcctcgtggcttcagtgaagcagctgccccgcgagcctttggtctccactgtcgcctgagcatccatcttcagcacaagttctgctcagaaggaaaggtgtatttgtccatgttggaagacactggcttttggttagaaagcaaaattttatcttttattcaagatcaagaagaagactacctgaagcttcatagggtcatttatcagcaaattatccagacctacctgactgtgtgtaaagatgttgttatggtaggccttggtgaccatcagtttcagatgcaactcttacagcggagtcttggaatcatgcaaacagtgaagggatttttttatgtttcattacttcttgacattctgaaagagataactggaagttccttgattcagaaaacagattcagatgaagaagttgcaatgctgttggacacagtccagaaagtatttcagaaaatgttggaatgtattgcacgaggcttcaggaagcagccggaagaaggcctgcggctgctttattctgttcagaggcctcttcatgagttcattactgctgttcagtctcggcacacagacacccctgtgcaccggggtgtactttctactctgatcgctgggcctgtggttgagataagtcaccagctacggaaggtttctgacgtagaagagcttacccctccagagcatctttctgatcttccaccattttcaaggtgtttaataggaataataataaagtcttcgaatgtggtcaggtcatttttggatgaattaaaggcatgtgtggcttctaatgatattgaaggcattgtgtgcctcacggctgctgtgcatattatcctggttattaatgcaggtaaacataaaagctcaaaagtgagggaggttgcagccactgttcacagaaaactaaagacattcatggaaattactttggaagaggatagcattgaaagatttctctatgaatcatcatcaagaactctgggagaacttttgaattcataaccaagccaacatctccagacatgtaaaaatagggaaaagtgattcaaattgaaatgcctgtgtattttcctattgtttttaatgttaataacccatataatagggaaagggtgggatttttttgtgggaatgtgggaaggtgggggttatggaggagataactcaaaacttcttcaattttgcctagtgcctgcgtaaataatatatttaatataaaggactccaggtatgaatggtgtagaaatccatgattccaagaaaaaacacttttctagcaaacctggttgtttttaaaatgacttttatatatgtaatattgcttggaaactatgagtaataaagcaatgacaacatccaaaaaaaaa

SEQ ID NO: 86281 - DNA, 41 bp, Homo sapiens
gcacgaggaaaaaggtcacccagttctctggaaaaaaaaaa

SEQ ID NO: 86282 - DNA, 41 bp, Homo sapiens; identical to SEQ ID NO: 86281

SEQ ID NO: 86283 - DNA, 1518 bp, Homo sapiens
actctctcagtgaggatttatggctgagagctcttgacctgcaacagtgcggcctcaccaatgaaggagcaaaggctttgctagaggcccttgaaaccaatacaactctggtcgttctggatataagaaaaaatccactcattgatcattctatgatgaaagcagttatcaaaaaagtcctccagaatggaaggagtgccaaatcagagtaccagtggataacttctccatcagtgaaggaaccatccaaaactgctaaacagaaaaggagaactataattctaggaagtggtcacaaaggaaaagctactattagaattgtaggattggctacaaagaaacctgtaagtagtggcagaaaacactcccttggtaaagaatattatgcgcccgcacctcttccacctggtgtgtctggtttcttgccgtggcgtactgcagaacgtgcaaaaagacacaggggtttcccattaatcaaaacacgtgatatatgtaatcagttgcagcaaccaggttttcctgtgactgtgacagtagagagtccttcatcctctgaagttgaagaggttgatgattcttcagagagtgttcatgaagtgcctgagaaaactagtatagaacaagaagcattacaggaaaaactggaggagtgcctaaagcagttaaaggaagaaagagtgataaggcttaaggttgataaacgagtcagtgagctggaacatgaaaatgcccagttaagaaatataaatttctctttgtctgaagcccttcatgcacagtcattgacaaatatgatcctggatgatgaaggtgttttgggcagcattgagaattcttttcagaagtttcatgctttcttggatctccttaaagatgctgggcttgggcagcttgccacaatggctgggatagatcagtcagattttcaattactaggtcatccccagatgacttctactgttagtaatccacctaaagaagaaaagaaggcgcttgaagatgaaaaaccagaaccgaagcagaatgccctagggcaaatgcaaaatatccagtttcagaaaattacaggtgatgctagaattcctttgcctctcgactcctttcctgtcccagtttctactccagagggcttaggaacttccagcaacaacctaggagtcccagctactgagcagcggcaggagtcttttgaaggattcattgctagaatgtgttctccttcaccagatgcgacttctggaactggaagtcaaagaaaagaagaggagttgtccagaaatagcagatcttcttcagagaaaaagaccaaaacagaatcccattgaaatgactggagaaatattaaaataaaaataatagcagagttggaaaccagaaatttgaacagtgagatttctggtagataagaggcagatgatttagtaccagttaatttaaggatggacagctagccattccactcatctttggagcatctgattctggagtttgccaccaggctaggatagcagctatctg

SEQ ID NO: 86284 - DNA, 41 bp, Homo sapiens; identical to SEQ ID NO: 86281

SEQ ID NO: 86285 - DNA, 170 bp, Homo sapiens; identical to SEQ ID NO: 66913

SEQ ID NO: 86286 - DNA, 71 bp, Homo sapiens
cccccccccaaaaagaggtttttttccaaaaaaccccagggggtttttttttcccccccccaaaaaaaaaa

SEQ ID NO: 86287 - DNA, 404 bp, Homo sapiens
cataaagaagaaccatatcatcggctaccagctgctccaccgacgcgccctgttcgagaagcgcacgcggctcagcgactacgcgctcatcttcggcatgttcggcatcgtggtcatggtcatcgagaccgagctgtcgtggggcgcctactacaaggcgccgctgtattccttagctctgaaatgccttatcagtctcttcacgatcatcctgctcggtctgaccatcgtgtaccacgccagggaaatacagttgttcatggcgaactatggagcagatgactggcgaagcgccctgacttatgagcctattttcctcatccttttggaagcactgaggggggtcattcatgccacaccatgcagagtatctctctctctctgggacggcctggatttgcccg

SEQ ID NO: 86288 - DNA, 441 bp, Homo sapiens
ccgtccggaaattccggtagagggcctccgtccctgcctagcttcatgggtcctcgggccaccgggctgtctgggagccagggcagcctgacgcagctgttggggggccctgcctcctcctcctcctcttcctcctcctcttcagctgctgacaaacccctggcatttagtggctgggccagtggctgcccatcagggacgctatccgactctggccgaaactcactgtccagcctgcccacctacagcaccggaggtgccgagccaaccaccagctccccaggcgggcacctgccttcccatggctctgggcgaggggcactgcctgggccagcccgaggggtccctactgggccctcccactcagacagtggccggtcctcctccagcaagagcacaggctccctagggggccgtgtggctggggggcttttgggcagt

SEQ ID NO: 86289 - DNA, 340 bp, Homo sapiens
aatcacttctggggcagcaacctgctcttccagtgcccgccaggcctcggaataataaggacgcgcaacacggttaacgataaatccaggagtcgaatgacagcgcacaggctgcttaccccaactcaacgttagttcacacaactgctcaacaacttccgccgccgttgccagcccactgaccacctccaccaacttcatcaccggtgccgggttaaaaaaatgcagccccgcaacacgttcaggattttttatctccgcagcaatcgcggttatagagattgacgaagtgttagtggtcaatagcgtttgtggcgggcaaacttccgccagctgtgca

SEQ ID NO: 86290 - DNA, 188 bp, Homo sapiens
gccatttttcgctcttccgcatcgcttttgcggtttttctcacctacatgaccgtagggttgccgttgccggttatcccgctgtttgttcatcatgaactgggctatggcaataccatggtcggcattgccgtcgggattcagtttctggctacggtgctgacgcgtggttacgccgggcgactggcc

SEQ ID NO: 86291 - DNA, 193 bp, Homo sapiens
tttcgtaggaccctgctgccagcctcacagggctggaatgaatactggagctaatggcgtgacgctcccagcccaggctggcacacagcaggagcagcaggaaggaggtgtctcctcccatcattcctccctaggaagcccctgctccgtgctaattccatttctccctatactgcccatactcttgttggtg

SEQ ID NO: 86292 - DNA, 268 bp, Homo sapiens
ttcccgggtcgacgatttcgtgggcctggagcagcacagactccgacagttccaaccgcaatctaaagcccgccatgaccaagacggcgagttttgggggcatcacggtgctgaccaggggtgacagcacttccagtactaggagtaccgggaagctgtccaaagcaggttccgagtcttccagcagtgcaggctcctcaggatcgctgtcccgcacccatccacctctccagagcacacccctagtctcaagtggcagcaatcttca

SEQ ID NO: 86293 - DNA, 603 bp, Homo sapiens
cccttgtttccttgtgactagcagattctgtgaggagaaccagtttttaaatattaaagggagtcatattcgcaagagaaatgaagacatatgtccacacaaagacttgtacaccaatgttcatagcagcattattcataatagttaccaagagaatcaaccaaatgtccgccaatagacggataaacaaaatgtggtaaatctgtacaatggaaggttatttggtaacagaaagaaatgaagtgctgatgaatgctacagcatggatgagccttgcagacatgatgctggaagaaggcagacacaaaggagcacaggcggtatgattccacttagacacaaggtccagaaaaggcaaatccatagagacagaaagagccgtggttgacaggggctggggatggggaaaagaggagtgactcctaatgggtaggggcttctgaggtgatgaaaatgttctagaatcagatagaagtgatggttgcataacactgggagtgtacttaaaaatcatagacttggatactttaaaagggtgaattttatggtaagtgagctatatctctactgagataaggcttttataaaaattttaaggctttt

SEQ ID NO: 86294 - DNA, 6028 bp, Homo sapiens
gtggttctcccagcatggagcttgagatctgagaacggacagactgcctcctcaagtgggtccctgaccctcaagtagcctaactgggaggcaccccacagtaggggcagactgacacctcacacagccgggtacccctctgagacgaaacttccagaggaacgatcaggcagcaacatttgctgttcagcaatatccgctgttctgcagcctctgctgctgatacccaggcaaacagggtctggagtggaactccagcaaactccaaaagacctgcagctgagggtcctgactgttagaaggaaaactaacaaacagaaaggacatccacaccaaaaccctatctgtacgtcaccatcatcaaagaccaaaggatcaaattcacacataacaatattaaccttaaatgtaaatgggctaaatgctccaattaaaagacacagactggcaaattggataaagagtcaagacccatcagtgtgctgtattcaggagacccatctcacgtgcagagacacacacaggatcaaaataaagggatggagggagatctaccaagcaaatggaaaacaaaaaaaggcaggggttgcaatcctagtctctgataaaacggactttaaaccaacaaagatcaaaagagacaaagaaggccattacatgatggtaaagggatcaattcaacaagaagagctaactaccctaaatatatatgcacccaatacaggagcacccagattcataaagcaagtccttagagacctacaaagagacttagactcccacacattaataatgggagactttaacaccccactgtcaacattagacagatcaacgagacagaaagttaacaaggatatccaggatttgaactcagctctgcaccaagtggacctaatagacatctacagaactctccaccccaaatcaacagaatatacattcttctcagcactacaccacatttattccaaaattgaccacatagttggaagtaaagcactcctcagcaaatataaaacaacagaaattataacaaactgtctctcagaccacagtgcaatcaaactcgaactcaggattaagaaactcactcaaaaccgctcaactacatggaaactgaacaacctgctcctgaatgactactgggtacataacaaaatgaaggcagaaataaatacattatttgaaaccaacgagaacaaagacacaacataccagaatctctgggacacattcaaagcagtgtgtagaaggaaattcatagcactaaatgcccacaagagaaagcaggaaagatctaaaattgacaccctaacatcacaattaaaagaactagagaagcaagaacaaacacattcaaaagctagcagaaggcaagaaataactaagatcagagcaaaactgaaggaaatagagacacaaaaaatccttcaaaaaaatcagtgaatccaggagctggttttttgaaaggatcaacaaaattgatagaccgctagcaagactaataaagaaaaaaagagagaagaatcaaatagacacaataaaaaatgataaaggggatatcaccactgatcccacagaaatacaaactaccatcagagaatactacaaacacctctacgcaaataaactagaaaatctagaagaaatggataaattcctcgacacatacactctcccaagactaaaccaggaagaagttgaatctctgaatagaccaataacaggagctgaaattgtggcaattatcaatagcttaccaccaccaacaacagcaagaggcccaggaccagacggattcacagctaaattctaccagatgtatgaaaatgaactggtgccattcctactgaaacgattccaaaatattgaaaaagagggactcctccctaactcattctatgaggccagaatcatcatgttagcaaaagcctggcagagatacaacaaaaaaagaaaacttcaggctaatatccttgatgaagatcggtgcaaaaatcctcaagaaaatactagcaaaccgaatccagcagcacatcaaaaagcttatccaccatgatcaagtgggcttcatccctgggatggaaagctggttcaatatacgcaaatcaataaatgtaatccagcatataaacagagccaaagacaaaaaccacatgattatctcaatagatgcagaaaaggcctttgacaaaattcaacaacccttcatgctaaaaactctcaataaattaggtattgatgggacgtatttcaaaataataagagctatctatgacaaacccacagccaatatcatactgaatgggcaaaaactggaagcattccctttgaaaactggcacaagacagggatgccctctctcactgctcctattcaacatagtgttggaagttctggccagggcaatcaggcaggagaaggaaataaagggtattcaattaggaaaagaggaagtcaaattggccctgtttgcagacaacatgattgtatatttagaaaaccccatcatctcagcccaaaatctccttaagctgataagcaacttcagcaaagtctcaggatacaaaatcaatgtacaaaaatcacaagcattcttatacatcaataagagacaaacagagatccaaatcatgagtgaactcccattcacaactgcttcaaagagaataaaatacctaggaacccaaattacaagggatgtgaaggacctcttcaaggaggactacaaacaactgctcaacaaaataaaagaggacacaaacaaattgaagaacattccatgctcatggataggaagaatcaatatcatgagaatgggcagactgcccaaggtaatttatagattcaatgccatccccatcaagctaccaatgactttcctcacagaattggaaaaacactactttaaaattcatatggaaccaaaaaagagcccgcattgccaagtcaatcctaagccaaaagaacaaagctggaggcatcacgctacctgacttcaaactatactacaaggctacagtaaccaaaacagcatggtactggtaccaaaagagagatatacatcaatggaacacaacagagccctcagaaataactccgcatatctacaaccatctgatctttgacaaacctgagaaaaacaagcaatggggaaaggattccctatttaataaatggtgctgggaaaactggctagccatatggagaaagctgaaactggatcccttccttacaccttatacaaaaattaattcaaggtggattaaagacttaaatgttagacctaaaaccataaaaaccctagaagaaaacctaggcattaccattcaggatataggcatgggcaaggacttcatgtctaaaacaccaaaagcaatggcaacaaaagccaaaattgacaaatgggatctcattaaactaaagagcttctgcacagcaaaagagaaactaccatcagagtgaacaggcaacctacaaaatgggagaaaattttcacaacctactcatctgacaaagggctaatatccagaatctacaatgaactcaaacaaatttacaagaaaaaatcagacaaccccatcaaaaagtgggtgaaggacatgaacagacacttctcaaaagaagacatttatgcagccaaaaaacacatgaaaaaatgctcaccatcactggccatcagagaaatgcaaatcaaaaccacaatgagataccatctcacaccacctccgctgctgatacccaggcaaacagggtctggagtggacctctggcgaactcccaacagacctgcagctgagggtcctgactgttagaaggaaagctaacaaacagaaaggacatccacaccaaaaccccatctttacgtcaccatcataaaagaccaaaggctggccctcatgtctgcatgcagtggctgccactgcattaatacttttagaggccctcaaaatcacaaactatgctcaactcactctctacagttctcataacttccaaaatctattttcttcctcatacctgacacatatactttctgcttcccagctccttcagctatactcactctttgttgagtctcccacaattaccgttgttcctggcccagacttcaatctggcctcccacattattcctgataccacacctgacccccatgactatctctctgatccacctgacattcaccccatttccccatatttccttctttcctgttcctcaccccgatcacgcttgatttattgatggtggttccaccaggcctaatcgccacacaccagcaaaggcaggctatgctatagtacaagccactagcccgtctcttagaacctctcatttcctttccatcctggaaatctatcctcaaggagatcacttctcagtgttccatctgctattctactacccctcagggattgttcaggccccctcccttccctacacatcaagctcaaggatttgtccctgcccaggactggcaagttgactttactcacatgccccgagtcagaaaacgaaagtatctcttagtctaggtagacactttcactggataggtagaggcctttcctgcagggtctgagaaggccaccgcagtcatttcttccattctgtcagacataattcctcagtttagccttcccacctcaatacagtctgataacagacgagcctttattagtcaaatcagccaagcagtttttcaggctcttagtattctgtgaaacctttatatcccttacggtcctccatcttcaagaaaagtagaatggactaaaggtcttttaaaaacacacctcaccaagctcagccaccaacttaaaaaggactggacaatacttttaccactttcccttctcagaattcaggcctgtcctcggaatgctacagggtacagcccatttaagctcctgtatagatgctcctttttattaggccccagtctcattccagacaccagaccaacttagactgtgccccaaaaaacttgtcatccctactatcttctgtctagtcatactcctattcaccgttctcaactactcatacatgccctgctcttgtttacactgctggttacactgccggtttacactgtttctccaagccatcacagctgatatctcctggtgctatccccaaactgccactcttaactcttgaagtaaataaataatctttgctggcaggactatgctgaatctccttaggcactctctaatcagatgtcctaggtcctcccaattcttagaccttttatacctgtttttctccttctcttattccatttagtttttcaattcatacaaaaccgtatccaggccatcaccaatcattctaaatgacaaatgtttctgctaatagtcccacaatatcaccccttaccacaaaatcttccttcagcttaatctctcccactctaggttcccacgccgcccctaatcccactcgaagcagccctgagaaacatcgcccattctctctcccctaccacccctcaaaaattttcgccaccccaacactttaccactattttgttttatttttcttattaacataagaagacaggaatgtcaggcctctgagcccaagctaagccatcatatgcccagtgacctgcacgtatacatccagatggcctgaagcaactgaagatccacaaaagaagagaaaatagccagttcctgccttaactgatgacattccaccacaaaagaagtgaaaatgctctgttcctgccttaaccgatgacattatcttgtgaaattccttctcctggctcatcctggctcaaaagctcccctactgagcaccttgtgacccctccactcctgcctgccagagaacaacccccctttgactgtaattttcctttacctacccaaatcctataaaatggccccacccgtatctcccttcgctcactctcttttcagactcagcctgcctgcacccatgtgaaataaacagcctcgttgctcaaaaaaaaaaaaaatataagaaaaaaaccccccgcccctcg

SEQ ID NO: 86295 - DNA, 365 bp, Homo sapiens
cttgcttaaacttttgtctgcccaagaataaaagcactattataacagggtgcatttctacttttgaattcattagcctcataaaatatgtatgtgtctggcatttaatagagtagcacttaatatttgctgaaagaatgaagaataagtatctacatgtgaccaaaggctggaagcatggttattacgtgtgctatttataaaaacccagggcagtgctcatgaaaggaaaacaaggcctcttacctcagtcatgttggagaagggaaaggagcttctgtcatacacccagccatttacacatgattccgtgtctgtctcacctatgttgagaaatgtcccattcaggtgaaagagctgccatg

SEQ ID NO: 86296 - DNA, 1250 bp, Homo sapiens
  misc_feature (1)...(1250): n = a,t,c or g
gaatggactctaaagtaatgatacctgagtggtaggagtacaagccctttctaagttttctctgaacacatattactcgtgtaggaagttatttttttaagtaataaatctagtctacctcatctcttctcccaggcctgagctgaagcctgtggacaaggaatcagaggtcgtaatgaagttccctgatgggtttgagaagttctcgccgccaattctgcagctagatgaggtggatttctactacgatccgaagcacgtcatcttcagtcgcctctctgtgtctgctgatctcgagtctcgcatctgtgtggttggagagaatggggctgggaagtctaccatgctgaagctgcttttgggggacctgggcacctgttcggggcatcagacacgctcacaggaatctgaagattggctatttcagccagcaccatgtgggagcagctgggacctaaacgttcagtgcttgtgggaacttgctgggcacgcaagttttcctggggcggcctgaggaggagtaccngtcaccagcttgggttcggtatgggcatctccggagaactgggccatgcgtcctctttgccagcctgtcttgggggccagaaagaagccgaagtggccttttgctcagatggactattgccctgccccaactttctacattctgggatgaacccacaaacccaccttggacatgggagagccattgaggctctggggccttgccttcaaacaatttcaggggttggtgtgattctggtgtcccacgaatgaagcgctttatcaaggctggtgtgccgggaagttgtgggtatgctaaggaaggcggcgtcacccgtgtggaaaggaaggattttgaccagtaccgcgccctcctccagggaacagtttccgcccgcgaaggctttcctctagggccacccaggctgaaggactcgcccagggacatgggactggtctctcagaccccctggggccaccatgtaggctatccactcccaggccgtggacnttccccccaactttggggacagcctttatttcccaaatgtctctatccttttgactggagcatcttctgcacaaccttgggagcccatccaagggttggtgaggactggtctcccgggggtgggggtctggggggtaccctctggggttatagattcccccactgccccagctctgactggaccccaagtggctgctatgtaaattaaatctctccccgcgtcaaaaaaaaaaaa

SEQ ID NO: 86297 - DNA, 435 bp, Homo sapiens
ggaaagcatccagtcattcaccatagaatattatgttatctgtaagatttttttgtgtaaaccttgtcagattttacaaatgcccttctattttttgtttgcagaatgatttatcatgaaatgttgaattgtgtcaaatgccttttctatgtctatgtggcttttattttttgtatcttcctttttatatatttctggatttcatttgttagtattttacttaaaatttttccacgttcatgagggatattagtttgtagttttcttctggtattatagtatctttgtatagtttttgtttcaggactatcgagtctcataaaatgagtaaaatttgatagtttttcttttttgaatgtttgaaaaaattcattattgacgccatctgggtcttgaattttctttgtgggaaagttttgaattatgaattgagtt

SEQ ID NO: 86298 - DNA, 558 bp, Homo sapiens
tggcgtgcctgttgtctgtgtggcatgcctgtcgtctgtgcacccatgctgtggcgtgcctgttgtctgtgtggcatgcctgtcgtctgtgcacccgtgctgtggcgtgcccgtcgtctgtgcacccgtgccgtggcgtgcccgtcgtctatgcacccgtgctgtggcgtgcccgtcgtctgtgtggcatgcctgtctgtgcacccgtgccgtggcgtgcccgtcgtctgtgcacccgtgctgtggtgtgcccttcgtctgttccttttattgccgagcagggttgcacccacatgtgcaagccagcgacggaccccaggttcacccgttcaccggtcagtgggcatatgggttgtttcagtttggggcatttacaagaaacgtgctagaacatttgtgtacaagtcttgtgtgaacctaagttcatttctcttgggtaaatacctgtgcgtggagcagctgggtcatgtggtgaatgtggccctaggggggtccctccgcctccgtttcctcatccagaaaccggcagtgaccatcaccaccattgttgtcacctag

SEQ ID NO: 86299 - DNA, 756 bp, Homo sapiens
aaaaaaaaaataaagaagtaacaaaacagaaaaatgaacaaaacaatttaaatgttaaacattctattcaccaggctggtaattgtgctagcactgaggatacaaaaattaaagactctggttggcagcttacattctaaagagagcgaggaatagatttccagactctgtgctaagtgcagtaatgacagtaggcccaacatgctgtaggagctccacgtcagggggttacctgggggcaggagggtagagggttttaagaatgtcagacagaacaatgagtaaagtaggaaggcaaatagctacaaaatatcacaagcactgtgtatagctggaaccaaaagtgtgaggcaggacctgggtggagaggtagacagggtcagagcttggagggccttgatactatgctggaagactgcactttatcttgttgataatgggatcctctgaagcatttcaagcaaggaagtgacaatgtcagttttagtttcagcaggatcagatggtagttcaatatggaggaaatatgtgtggcagaaagatatggccctgaactagggcaggtatagtaaaccttttattataagtatgtatgtgtataggtatatagatagatataggtatatatgtatgtatatgtattccaaatgacaacagtatcatcgacttattataaagttaaaagctcattttttaaaaaatggcaatatggaaaaatataaagcaaaacaattatttgaaatctcaaaaaaaaaa

SEQ ID NO: 86300 - DNA, 544 bp, Homo sapiens
  misc_feature (1)...(544): n = a,t,c or g
ttgatttgcccacttgacatgcagcccttgttgtgtggcatggcccaccatgcagctgaggtcagggtgggtgcgcctgctgccgacacaaccctggaggctcattagatggctgcatgtctttttcttttggcaaaggggtggccgtgactggggagagcacaaccagcggctagaggagcaccaggcacgcgcctggcagggtgccatggacgcaggcgcggctagccgggagcacgccaggtggcaaggtacggggctggctccagggacgagggtggctgtggcccccacatgtgtccaggggcttccccaggaacggagtgtttgcagacccttcttctcttctaggtggcgagaggggcctgtctgggccctcggggccggggcacatggcaagccgcggtggagtggcggggtaaggtgtgtcgtccgtggaggacggtggttcactcctgctcctcacttcctcttccttttttgcatgtttgatcagctggctgggttggatgttatgaaaacaaagcanaaagcagctctttga

SEQ ID NO: 86301 - DNA, 383 bp, Homo sapiens
aaggtaacaggaaaataaccaaacacttggaaattaaataacacacctctatataacccatgaatcaaagaggaactctcaagagaaattttaaaatgcattatactaaatgaaaatgaaaatgtagcatatcaaaatttgtaggacacagctaatgcagtgataatacatacattataaaagaccaaaagtctcaaatcaataatcaaagctttcaccttgagaacccaaagtaaaataaatacaataaaagaaaagcaaaataaacacaaagcaaacaaaggaaagaaataataaagagcataaatgaaattgaaaacagaaaaacagtggataaaattaatgaaacagagatccctgagaggatatggctctgtgtcccc

SEQ ID NO: 86302 - DNA, 1993 bp, Homo sapiens
ttttttttttttacagtctctgattttaatgagtcaatctcaaggcaaagctataaccttttccatgtgaaccttaaaacggaaatcctacgtgtttggctcagctaccatagacatgtcttgccccagagttccagtgtatttttcacctttagtttcttggctcctctccgcctctacaccagcctcatatccacacgggatgctctctgctgagtattgtcttgagttagttctccctctcatgttctggctgatgctactcatggtcatagtatcacctgagggggaaggagtatgctatgaaggtgaaaaatgctaccatagcattttgtttgtttataaaatgtcaggccctggttccatttttcccccctcttatatctaaattttgaaaccactggcctctaacagtctgtagtaggcttaagttcaaggtgccatttgcttctctggtgcctgtttgtgagccaaatagaggaagagtatgctagagagagcgctgaccaggaagatcacatcaaaccaacggtgatagaagttgaactgcagttctccaaggacttcagtgattatggtgcggtattctaaaggcatactcattcggatcagcagcacagaggagacaaagtacatgccctgtaagtcaaatgaattaatccagaagtgactctgaatgtagtgaggaacaggacaaaggaaattattaaaattcttaaaagtatcaagcacatttctgatattttacagctgtcaacataaaggtaactaattaaacttaccattatctgtgctaatagcaggacaatgacattggaggacttactgctagagatggcataaaagaacttggtaagagtgatcagcaatcctctgatggatgtgacgatgattattccaacaagaatgaaggaaatgtgttgggaccaaaacttcaccatgaaaattttccaaacacagtaaatagagaaaaagtaaccaagaaaattaaaatatttccccttgaaggttttggagtattctattctctccttggtagcatatagatcagctgtttccagaaaaagctgcctgcttaattcttccaaagcatccacttcctgttgaataagagtaagattttcacttcctgatgctgaagtggtaacactttttatcattccccagaaacctgatggtttgttatgcacttcccccttctggaacattgttctccgtgccattgccatccttttctttttgcttatgatcatatccatggtttgcagcagtcgccgttccagggctagaatatccgtgtcagtcacattcctgaggaagtaagacatgtaagtgtatgggcagttgacagcaccaaatccagaaagaagagccatgagagtcactccaatcacaccaacccggctgatgagctgttctatggataagatcccatgttttgggctgagaatgggaaagggatctcctagtttccagaagaaatacataaaggtcagccataagagacaggaaaaaagcagtcgttgtttatgcactgagacagaggagacaaaagtagtcggatattgctcacaataaaatagccaatgtaaaaaggcaccatgaaaaccaggatcagcagaattacacacaggttcattttccagtgaaaataacgggagctgctattcaatactcctaagatttcaaagatgatgagctcaaacatggtgcaagaaaatgcaaacgtcacggagaagatcacctgtacaacatactgacgtatctcatagtctttaaacaattggcgcatgaagaaaagccacccaaatccaaaaaatagtatctgggaggtaatcatgatgctggagtcgatcaggaaactcatggcgaagtgtaaggaaggctcctgcctccacttcccactcccggaggccacagcacgctggggccacaggccccctcacacggtctgcattctcccaggtgctgcagccgggactgcggcacgaaa

SEQ ID NO: 86303 - DNA, 1249 bp, Homo sapiens
ttttttttttttctggttataaaagattttaatatcaaataaaatgtacatgatcaaaaggctttgattgccatgtaaagcatagtttccaggttacatcaagtgattttatcttctcccatttcaaatgaaatgttgaaagcacaaacaatctgccatgaatgataagaagcaaaggcagcacatatcatctgcaagtttcttcccaagctataaaatatcatgttcatatttttcctgtttgtgatcccaaaacaggcaatattttcatttcatccactctattcttatgtatttgaaaagcaggtgttatccacctaccacaagagcactgttcaccataccagttgaaggaacccaacttggcactgcattttgggcaaagaagctgtccatccatcactcccaacaaagcagattccatccactgtacaggttcaatgaaataagatgtacattgagcttgcctccctgtggtaagcatggaagatggtgtcattctcttgtgggcaaaggctataggtccacttccttcacggtgatccagaatactagaacttcgaaataatgatcgcctgcactttctacacttgtagagaacctcatctttcaatccttgtgaaacggtagttgggtcaacagcaaagagttcttgaggtaaattctgcaattctggatacttctctgtaaccttttgtaaacgatattgcttataaattgcactagaggtatccacttcgtatcccattgcctggtataatttcagttgccactcaaacccctcattcatcttagcctctggtttgagaatctggagcttttcataggctttttcaaagggaagttggtcagtcttcatgagaaaagcagttattatggccacacttcgactgactcctgcatgacagtgcaccaacaccgcacggccctcagcgcgggcctgaccgatgaaggccacgcaccggtccagatggctgagtaggtccgtctcgggtttgtccagcgctggcacgaagaggcgccatagatcctcgaccccaggccccgccttgaagctgggctcctccgagtccactgttagcacggccgtgatgcccgcttccctcaggtgatctggctccgcgacggccgcggccccaccgaaatacaatcctggctgcacttccagcatctgcccggcacagctgactctgctggcgctggggttgctgagctcgcagccatcactcgggcccggagcctccaacat

SEQ ID NO: 86304 - DNA, 708 bp, Homo sapiens
ggcacgagtttttttgtttgtttttttgagacagagtcttactctgttgctcaggctggagtgcagtggcgtgatctcagctcactgcaacctctgcctcccgggtcaaagccattctcctgcctcagcctcccgagtagctggtactacaggagcccaccactacgtccagctaatttttgtatttttagtagagacagggtttcaccatgttggccaggctggtctcgaactcctgacctcaagtgatccacctgcctcgtcctcccaaagtgctggaattacagatgtgagccactacacctgactttagttcttattttctctgacaacagcttctaactcatcctgttttcttttttgtccttcacaacaagaagggcacagccaaatctcattctcttgcagtcttttatttctttgtctttatatatatagtctcaatttcccatttctctctctagtttttcaaactttttgtctacatatcctttgtggtgcataccaccttaagtagaaacattcagtccctcatctgtatgtcatctgcgccctgtacttatatctgttcttgcaccccccaccctgtattatttttattggcttcagtattgcatcgccaacaagaccatgagctctttgtggggggaacaggccctgtgaaggagttgctagaagttgccatttttgagcacaataccaggcatg

SEQ ID NO: 86305 - DNA, 350 bp, Homo sapiens; identical to SEQ ID NO: 36845

SEQ ID NO: 86306 - DNA, 1135 bp, Homo sapiens
cgccagtgccccctccgcgagccccaaccagtagacggttccctgtctcccgcgccccaatttcgattttcaaacgcaactcctacaggattctgagaccccgtcccatctcccatatcccatttccagctgcaaattactgcagaatctgaacccaggaaagaaacccatttgccgaccccctcttccctctccagacaggtggagagcgggtgagggtctcgctcggctttccccctgcacctttcccaccctcccacgtcgggcggctgggatacctgcaggcgctggtcacggaattccaggagacccaaagccaagacgccaaggagcaagtcctcgccaacctcgccaacttcgcttatgaccccagcaactacgagtatctgcggcagctgcaggtcctggatttatttctcgattcgctgtcggaggagaatgagaccctggtggagtttgctattgctgctgcagtctgaacggtgacggtggcccctgcagaagcatgtggctaaatctccaccagggggcgatagagctcctccaaatcaagctgctgcccctggagaaaaattggcggaagtcacagagcagtccccaccaaaagtgtttaccaagtggagtctttcctgctggcgtttcctcagggtcaggaagcaactttcccaggacaggggcaccctgaggtccgggtccactgagctatgggggcggcgtgggccctgggctgggttcttgccatcctgggcagcttcccggcgtgggtgactgagcccgggtcctggagtccgcggtcccagcgtctccacttctcagctgattcctagaagctgagtcccgtcccttctccgagcgtggtttcctctcccgccttgcctgcgtcgcaagcagttgtgggagcagaagtgtgtctgtgcatctgtgtctctgtgcaggtattttagaattgttaggatcattatcaccagctttacttttcccaaccatttttttcctcctttttttctcttccttcttctgccacagcaagacccccccgccccaagcacagtagctttctcagcgtcgagatccctccgtgggaccatgttgcaatgaaatttcaacatgcaaatgaaatttctcgaaatttcgc

SEQ ID NO: 86307 - DNA, 841 bp, Homo sapiens
tgaaattgtccctcgttacatagcaaacgagatagatggtgtggtttatctgaaagaactggaacccgttaacactcccattgcgtttttcaccataagagatccagaaggtaaatacaaggttaactgctacctggatggtgaagggccgtttaggttatcaccttacaaaccatacaataatgaatatttactagagaccacaaaacctatggactatgagctacagcagttctatgaagtagctgtggtggcttggaactctgagggatttcatgtcaaaagggtcattaaagtgcaacttttagatgacaatgataatgctccaattttccttcaacccttaatagaactaaccatcgaagagaacaactcacccaatgcctttttgactaagctgtatgctacagatgccgacagcgaggagagaggccaagtttcatattttctgggacctgatgctccatcatatttttccttagacagtgtcacaggaattctgacagtttctactcagctggaccgagaagagaaagaaaagtacagatacactgtcagagctgttgactgtgggaagccacccagagaatcagtagccactgtggccctcacagtgttggataaaaatgacaacagtcctcggtttatcaacaaggacttcagcttttttgtgcctgaaaactttccaggctatggtgagattggagtaattagtgtaacagatgcctgacgctggacggaatggattggtcgccctctctgtggtgaaccagagtgatatttttgtcatagatacaggaaagggtatgctgagggctaaagtctctttggacagagagca

SEQ ID NO: 86308 - DNA, 488 bp, Homo sapiens
gagaattcaaaatagctgttttgaggaagcttaacaaaatccaagataacacagagaaaaaattcagaatcctatcgataaatttaatgaagagattaaaataattaaaaagaatcaagcagaaattctggagctgaaaaattcaatagacaaactaaagaatgcatcagtctctcaacagtagaatggatcaaggagaagaaagaatgagcgagcttgaagacaggctatatgaaaatactcagaggaggcaaaagaaaaaaaatatgaagcatgcccacaggatttagaaaatagcttcaaaaggggaaatctaagagttattggtcttaaagaggaagtggagagagagattgaggtagaaagtttattcaaagagataatattggagaactttccaaacctagagaaagatatcagtattcaagtccaaggaggttatagacgatcaagaaaaattaactcaaagaagactatctcaagacatg

SEQ ID NO: 86309 - DNA, 385 bp, Homo sapiens
ctgaaatgaattaggactagtaaatgcatttctacattccttacagtagtaaggtccattgctagtatgttataataaccacctttgaaagtttgctagacaaagaaagttttttcatattcctcacattcattatatatatatttttgaagtatgagtttggtcatgttttcaaaaggtactgaaaaaaatggaaggttttagtacatttttatattcatacaacttttttcagtgtgagtctcttatgtatttgtaagaagctgaaagtacttaaggctttctcacatgttcaacactcataggggttttctctagtgagtcatttcatgtttatgaaaggaactgatacaatgaaatgcttccccacattctttacacttaa

SEQ ID NO: 86310 - DNA, 339 bp, Homo sapiens
ctcaagcctaatataaggaaagggggcccctctttagtgaaatattgtacgtttggagacgccattgttcttttacacaaaatatcaagcataaggtaataaagactgcgtgcttacccctaagatcaggaagaaagcagttctgtccacgctcaccatttatattcagaagtagaactaaaggttctagccagtgcagttagcccagaaaaagaactaaaggcatgtatattggaacagaagaagtaaaattcttctgatccacaaataatatggttatctctgcagaaaatctgatggaatctacaaaaagagctactagaactagttgaagtcata

SEQ ID NO: 86311 - DNA, 389 bp, Homo sapiens
  misc_feature (1)...(389): n = a,t,c or g
ggcacgagcatctattattgctactattgtgtgtttttctagttaagtcccaaggtgtcaacgacaatgaggagggtttcttcagtgcccgtggtcatcgaccccttgacaagaagagagaagatgctcccaacctgaggcctgccctagctgaccatcactgtatgtgactatcgggctcagatagcctaagctgcttccactcccaagagagcagctagcattgcccataatgctgtaagctgtcgttaggctttaatcagacatggtgatcatatattgttccctcagcgaacgtgaattttaccggaaaggccgagataggatgaccgttttcctatgtgtacttcttctgcatggtctctgagatcctggtgcacaacataatn

SEQ ID NO: 86312 - DNA, 382 bp, Homo sapiens
ggcacgaggatattaaaagcaaacaaggattattaccagaaataagagggacattaaataataataaagaggtaatttcaccaaaaagacataaaattaaatgtgtatgcacaaaacaacagagcttcaaaatatacaaagccaaaactgataaagacaaagactaaacaacccacaattaacagctggagacttcattctcattaatcaataaaacaaatagaaaaccagtaagtcatgatgaactcttgccgtgatggaaaaaagaaaagaaaaccagtaaggatatagaagacctcaacaacattattaatcaacatcattaaaacatacaccaagatggatcatactctgggccatgtaattcactgcaccaatttag

SEQ ID NO: 86313 - DNA, 785 bp, Homo sapiens
cgtgagccaccacgcccggcgttgttgtttttttgagacagggtctcactctgttgcccaggctggaatgcagtggtgcaatcacagctcactgcagccccaacctcccaggttcaggtgattctcccaccttcccaagtagctgggactacaggcatgtgccagaatacccggccaattttttgtagagacagggtttccccatgttgcccaggctagtctcgaactcctgggctcaaacagtccacccacctcggcctcccaaagtgttggatttacaggcgtgagcccctgtgctcagcctggttgtgccattttttgaaaagcaaatttcatccttttggacacatacatgacacttaccgcaccctcactccccccagttatgctttctaaaaacttctgtcaaggtaaagattgaaaacatgttcatcttttgtgtgcactgtttatgaatagtagctgaatagcccctccgcaaggaggatgcagccccttccataaaggatgctgttgtggctccatgtctgcttagcccgagtgtgggcagcccagctgtgtgcccagctctgtgccagctgcccggggcaggcctctagagcagttgcggttagctcccacagtgattgagcacaggctgggtgagttagtacagatgtcattttctgtattagaaaattaatgtcaaatctgctaagaaaataggctgttttggtctctatccagatttacaacataaagagggtataattttccatcttcagaggggcttgatgtattttgct

SEQ ID NO: 86314 - DNA, 1826 bp, Homo sapiens
ggaggtggcattcctgggttctgggtttctggattcgcgggccgttcacacgtagcctgtgccggctcctcgggtgagtccgtccgcgcgcggtgccccgggacggcctaggctgccgggggtccggggccccaggcattccgggctgcagattgacggggatcccggatgcaccgcgcgcccccgcgccctcaccgacgggtccagacctggtgggaagaaggtgcggggacgggtccctgaggatcccgatgcctacgagccaagatgctcagctttataggtgtgacctacacatgtgacttcacctcagttttgtgatccgtaaaatggacaaattcgaagctacttcacagtgctgttgagaggattaaatgaaacaatgcttgtaaagctctttgcaggagggagcctcggaagcagggcctggccggcagagcacacctgctgtcaccagggaccacaggcagcatgaagacccccgtggagctggccgtcagtgggatgcagaccctcggccttcagcaccgctgccgaggtggctaccgggtcaaggccaggacgtcatatgtggatgagactctgtttggcagcccagcaggcacccggcctaccccaccggacttcgatccgccctgggtggagaaggctaacagaaccagaggcgtgggcaaggaggcatcgaaggccttgggggcaaaggggagctgtgagaccaccccctcaaggggcagcacccccaccctcacaccaaggaagaagaacaaatacagacccatcagccacaccccgtcttactgtgatgagtcgctgtttggctcccgatctgaaggcgccagcttcggggccccgcggatggcgaagggggatgccgcaaagctccgtgctctcttgtggacgccaccacctacccccaggggtagccactcgccccgccccagggaggcaccactgcgagccattcacccagctggtccctccaagacagagccggggccagcggcagactcccagaagttatctatgggtgggttacactcttcacgccccctgaagcggggactttcccattccctcacccacctgaatgtccccagcactggtcatccagccaccagtgccccccacacaaatgggcctcaggatctcaggccttccacgtcaggggtgaccttccggagccccctggtgacttccagggctcgctcagttagcatttcagtgccatctaccccacgacgaggtggggccacccagaaaccaaagcccccttggaaatgatactctttcatcagggttgcctatggggccacggcgacaggtatggccccttgccagggtaggaggacattcatcacccagggaaccccaggtattaaagaagcccctgtgggggcagacagacatagcaggggtgggcagtgcctccctttatcctgacaatctctagtcgattcttgcctttttctcccgattgcggatttgggggccacctctaagatgcctctctccagccctgtctcaaccatactccaaattagtgccaacccaggggcctggcacctcccacatcatccattgtcttgctgccaagtgcgaataaacggtgtgattgccaacctggagggtcccctcttatcccttcaagccaagcttcctgctcaggattagtttccagctaagtctgcaagccctagaggagtttttccaggctgtctgtgaagcctggggaacacaacggcaactgggagatttgtgagtgaacactgtttcatcttaatatgcttctgaatttattttcatgtactaaatagatcagctcatca

SEQ ID NO: 86315 - DNA, 1293 bp, Homo sapiens
tttgaagccaaattggagagagatgtatttataccagtggggctaaggaggaagcagtccagtgggggactttgagtgctgtgcagtgttctcttaagagtcgtagtacagtcctggggtcaagtctctttccctaatctttgctggggaagccttgagccttgatttatccttcccttggctttgggctttgaggaagttggggatggaggggatgatgcttctttaggtttctctattccaagcccctctgaatttctagttgcaacctcaggactcatccccctccaggccttcctggatgcagatatacacaaagatggaagctgggcggaggctgatgccatctttggacagcaggtgaatgtggcggtaaccttgttgcatgcaggtcccagggcaaggggtcttgcccaataagtcatttcgggatttccagtcataatccattttcccaaaacgcagcattggaaagtcagggcccagcacccggaaacatagtgtctgcccccagtatggattaaaaccattgttctccacatagttggtctcctgccgtgctgtgtctagacgaacgccaaagatctgcactttcaccagtggatccacaatggacccctctttggtcttgtccactttggggagttgctgaacgctgatcacctggtttaagagagtctgggctttgaaagggctgatgggcttctcagggtggaaagaactctggatatcacgcaggaagtctggcttcagcacatagccacagccgccattctggcggaaatgcccatcacagatgtccatttcaagccctgcagtctgcatattcatggccactgagggccccaggagaaaagaagagcaagattcaccatggaggccttccagcccctctttcagggagttaagaagataggtactgggtgcacggtacctgctggtaatatccactgatagcatttctcagcctagcaattttcttgagcattccccaaccctaccatcactagagaacttatttcccacctgctgctcctccactccctcttcccagtccctgctgcctcctcacccatctggcagcctgcattccagagttcctgggggttgtagttggaagagtctgtcctcaggtcgctgggatacacacggcttaactgccaagtattgtgctgcacaaactcattgcctgtaaaagggtatagagggggagatggaggtggggtggaatctcccacttccctagtcccaaggaccatgcctactcttcacccttctctccagcatttgaag

SEQ ID NO: 86316 - DNA, 343 bp, Homo sapiens
ggcacgagaggtggggttggttgtggcaaggcattcctacaggggtgccacctaaagaagcacgcatttgtgcacacgggccacaagccctttctttgcactgagtgtggcaagagctatagctcagaggagagctttaaagcccatatgctgggccaccgaggggtgcggaccttcccctgtccactatgcgacaaggccaaaggtgcggaaacgagaccatttacatcacccggaggtacattcagaataccggtcattctgatagatcgaggatatagggggtctgagagttacatcatctaaggggagcacacgaaccagcgggctttaattgcactac

SEQ ID NO: 86317 - DNA, 351 bp, Homo sapiens
ggcacgagattctttttaacctatgacacttttgccttcttccatctcaaccttttaaaatcttacctacctgtcccttacttcatcaaatgtttctaattatttagaaacaacttctaaatttcctaatatatatgtatatctgtgttgtgtatgtatgtgttataactaaattagagctaaaatattcttttattagtatgaaaatttgtggaattagttgatttatcccttcatatatctctgtgagaaatctcttgttcagcctgttagcctcagagaacttaaagttttattgattttattgtatgtatgtatgtatgtatgtatgtatgtatgtaatgaatgatg

SEQ ID NO: 86318 - DNA, 336 bp, Homo sapiens
ggcacgagcggtttttgtgtggacacaagatttaaacttgttgggtagataccaaggaaatgtttgctggatcatatggtaagagtatgtttagttttagtaagaaagtgttaaactgtctcccaaagtggcggtaccattttgtgattgcaccagcaatgaatgagagtcctcttgctccacatcttcaccagcatttggtgttttcagtgttccaggttttgaccattctaataggtgtgtagtgatatttcattattgtttaaatttgcaatcccctaatggtgtatgtagtaagtccattctcacactgctatagagaacagcaccaaacca

SEQ ID NO: 86319 - DNA, 418 bp, Homo sapiens
atggtttccataatcctccgtgcatttgaccagctgagttattgcagaaataataatcagctttcaaaacccttcagcttcctgcattttctttgtattttgatcttgggagcctgaagcttctaattctaagaattcatacatcaatagttaaaaatcacaaggtagagtcccccaggactatgtctccaggttaggacccccaaagcttcctgcagattccacagccccggcctcctcagctcagagtgggcctcacctctggcctgatccagcatttccattcaccctcctcctgccaatttccactcctcagagggcctccttttcccagacaaccacctttgggcatcagtggggccagcctctgccctgtgttgtcacctcccaggtgaccgctccagcccagcagtctatt

SEQ ID NO: 86320 - DNA, 309 bp, Homo sapiens
gagactttcaacaacagaatgaagagaggaaagaatcagtgagctcaaagataggctatttaagaatcctgtcagagaagaaaaaaacaacaatgaaaagaaatgaagataacctaaaagacatatacaaaattacctaaaaagaccaaatctaagaattattggtatttaagaggaagtggagaaacagcagaaagtggaaagcaataataacagaaaacttttcaaaacttgagaaggagataaaatccaggtaaaggaaggtcagacataccaaacagatgtgacccaaataagactaccccaagg

SEQ ID NO: 86321 - DNA, 3294 bp, Homo sapiens
ttttttttttttaggtttgacatttattgtagcagaatttttaatatcacagtatgggacaaaggtttacactttgcagggtattctttgggggaatgttaaatactgtaataaaaacatgttcaatcatggtaaaatgttcaacttgttaaaattacaaatgaacaaaaaaaaatttttttcctcatatattggccttaaataccaaatgaaggagtttaaaacttaaggattcaatgtggaaaacgagttaaatatgttcctaaattttgcaggaaaataaaagataaactgtaggaaaaagggtattttgatttaacagttcacaaaactggtatctggaacatttccccagaaaaatctaaagtttcctttccaagatccgtaaacctacggtccacctggggtcccataggttaacccaataacctacccccaaatcaccaccaccaccaccacccttgcagccacattgcaaagttcacagatcctgcggcaaccgctagtgttctgcagaggcccctcctgcactcagaagctcgatttcctccaatccaatgcagctggtcgggtgggcggttacggactggacaaaacaatttaacaaccccacttcctttccgaggacactcttcacttcgtagctcccatcttcaccggcggcaaacctcagcagggaggaaatgctgcgctgcaacagcttgaccttcactctgcactgcggtcttgagcggcagtccaggaagacctgcaggtgcctcttgagaacaggagatgtgaccacccgggagcagtccccacaggaaaaggcgcctctgtcttccggcctctgttccaatctcccgttgccacacatgtcacacacaggccatgagaaagcagtgctctcgtccacgccaaccacagtgccttgaacactgcagatggagttgacaggtgttgcagagtccaggctgtcgagcatcacccgggccaggcagctcacaggaacttgcaccagagaccacactcaaaaggggcttctgaagcaaggaggaccagttcgttcaagcacaaacaatcccgaccctggtcacggagagcgtcccttgaagaagaggctgtggaggggcagcccccagcgagtgcctcccaggacttcagagcccagcacacacaagggggccacatagaccagcagggttttggggagcctggggtctctcttcctccttcgtttgcaggagtgacatcggtcactatcagccagatctccctttgctcccaggaagcagcagactcttcagcttgtgggtttttggtaaatcaccgtggcatagaaactgcaacggggtaccaagatcattcatctggagaatgtctcttaagcagcgggtaactggaggctggtaaagcttataaatggggtcttcgtcaattatatcaatttgtcccagatttggatgagctgtgaggatgtaacacaaggctggagtagccagatggagtttttatctcttcaacagggctggtcgcggcccaggtgttttccagaggtatcgctgggggccaacagggtgtcaatcaaactgaaaatccccgctgtccttcctctggtgactttctgtagaaccttcattccccacccaggctgcaagacttcccttccaaactgtcttgccttcgaacatgttgaactccaaagtgcacttcaccgaaacattccaacaggcatcttgtaccaagaaggcaggctcgagttccagctgggtctgtgtgtcctgagctggccccctgctgacccctggtgctgtctctgctgggaagagaatacactctttgaaccaccactcggactccagctccctggccacgaggcagctcccctggctttccaccacatcccaggagagaatccctcaggggagtgctggttgggatgcgctgttttgcttctttgtgcccatgggtccaggctgtccctgtagtggctacaccactacacacaacctggatttcaggtgaattatttgttagacccttaattacaaacatctgggccaaagagatgcttcttcttggaaggggtatgtccggacagtacacttcacaagttttttctgaatcttctttggcaacaactttctcacaaaagtaagtattcagaataacagggcaacttccacttggaataatcagtttttgccagggagggaagatccggacagtgtcctggggacggcccctgaggtagcctgcagtctccttggtgaagagaactttcaggccagctccaggcctgggagccacactttgggaggagctggtggctggtgaccccaataactgctcacacatggcaacttgcatggcacattcctcatgcagctctaaaattttcacagttaatacaccagattttctacctgaaagtgtcttttggtaagaaatacattgatgtctccacaaagaaatagcagatctctctcgattctgcagtccatttagtctttctgctagtccacctcttaaaagcttcttctttgctgaattttctggagtcctgggaaacttagctgtgggtttctgaggtgtatgcaaaatggtctctgttgattttgtccttggatctatcagtctctccataatctgtcttgcatccgatgcaaactgcacgtggtatttgtgaggggattctgaatcaatgagtaggacattttccaaatcatcttctttttcactatctgatgaatactctaaaatttctatagaacttggcttgggaagctccgacagcttctcatcacttgtcaaagactgattacttgcacaagaagcacagtctgagatttccacagcaccctcgtcatcttcaaattcatcacagtcactagcctctgccctgtcactgtcaatctcccagtcgataaactgtaattcatctctctgtaactgagaaagtgtcttatcttcatccgacaaatcacttccactggagctccatgttatgtctgtaagcccactggtgcttttagatgtggtggtttcttgcttgggtctagggcataattcaaggtgcttttctgtaatccgtcttctcttcagctgttaatgaccggattcccagaagtgttctgaaacccttctccacacctgagccatgcttcaggagagagaggcagctgcccctgctgtcctgagacctgctcttctgacctgcagtggtctttctcctggaaaggatgggcattctgtattccaactcctttttctcttagagccccgagcgcggctgccgcggggcatctccgggag

SEQ ID NO: 86322 - DNA, 1198 bp, Homo sapiens
ttccagtgtttgaaccatctttatttaatgaattattgatatccttttttgtttccaaattaaaacttcaccacatattttcagctaaggtaaatctgcttggtccaaacaaaacaaaacaaaacaaaacaccagactgcaacaataacaggaaaagatcctcttcagtgatttatgttgttctcttactttcataactagtttgaatgcaaggctggtaaagggatacacagagaatcattattttaaataacaaaagccattcaaaactctctctacctgtcaaggatgttttatgctcccattcttatttgtttggcagtaaacataccttgcccacagtcgccagcatcaaacccacaggacaagacattgcatgcttggtcacagaacttatcagcgagccaggaattcgcacatccctgattacagtaagagacactgtttattcctccaccaaactgccagggctgtccaactccaatactcccagtacctccacctcctgcaatatagcgactccctccactgtttccagagcaatccccaccatcccaatcgcagggtgaattattacaagccttgtcacaatagccatccttaatccaggaacctgggcagccctcggcacagtttggcacaggccatgtcaaataaaccttctggcctttggagtgactgtaaaaatcatctggccagacatccttcccaaacatgacatcatcatttaggtaaataaacttctgggacagcccttcgatgcgatgaatgtgactttcaatagcaggtgaactaaaggtaggcaagtggctcaaatttcgaaaaacatcctggtgtgttactattgtcactcgaggattgtcaaggttcagccaggatggaatctgcccgttggtgacaatgaaaatattccgaacccatggtgcatgcctctcgatagatcgcaatgagtacctcagttcttcgttatcttcaaaacgactggcagagatgtcttcatcctgcttagactggctgatggcgctcagatcccataataaatatgcaggacttatggtcagttcttttccatcaatggtcatgttcttcttagtttgcttattcaattcttgaaaatccttggggttattcagttttagaagcgctacactggcctctgaatacaactgcaacagtttgactttagaggaaagatttt

SEQ ID NO: 86323 - DNA, 378 bp, Homo sapiens
ttcgtatttcagataaagtagtgggcattctcatgcgtgccaggaaacatggactggtagactttgaaggagagatgctatggcaaggccgagatgaccatgttgtgattacgctactcaagtgaaccttcaaaaacaaaagccaaatttggcccactatggtcttaatgctaaatgctcatgtaggtaaaatgaaaatgcaaactctctgtaataagttagtaaatattaaacaatttttacataaacgactttctggcattctatttctatctagaatgaggaattttggagattttgagaaggcacaaagcatttcagaaagcacatagaatgttaatgtataataatagtattaatagttgaaattccacaggg

SEQ ID NO: 86324 - DNA, 3055 bp, Homo sapiens
taaattgattcaataaagatttgcctagaattcccaagacctttataggtgattctgttttctgggctccttaacttcatagatagctagtatcttccagcagtagtaacagtctggataacttcttccatatccctccctctttgtttttttgagacagtgtcactttgtcacccaggctggagtgcaatggtgtggtctcggctcactgcaacctccacctcccgggttcaagtgattctcccgcctcagcttcctgagtagctggaactacaggcgtgtgccaccacacccggctaatttttcgtatttttagtgtagacggggtttcactatgttgcccaggctggtctcgaactcctgaccgcgtgatccaccacctcagcttcccaaagtggtgggattacaggcgtgagccaccgcacccggcctccatatcccccttttaaaattctgtagtgtatggtaagtcatatcagatatcagacctaatttaaatttcattttagctttacaagtccaaaaacacagaatttatatattcagatactctagcactaattttagtcttaaaatattcccacgatattctgtacacaaaatgttctttttgttacaagagctgagttgcatatactgtagataaatcatattatttttgccaatttcacaaattcctctggcccatcatgtcagtcattattgagtatatgcacacattgctacttatttgattatgtatcttttaaattgattcagtgcatagaaaactatctcttacaaactttaagtgctctgatatgacttcccccccaaattttattatgaacatttttaaaaacaggaaaattgaaaatctgtttggtaagcacatgtatatctaccatttagattcagcagttgttaatgttttgtcatttgttttctctatacctatatatgtatagatacagctagttatgcatatatatgcatatatgtgtttgtttgtgtatgtatatatgcttttttccccctgaaccatttggatgttacagacatacttatcaccgtgaaaatacttcaagtatctcctacagataatgacattctcctaaaaatccgtaataccattgtaaaagtaataattccccaatatcatctaatcaagccatatttaaatttctgaagttaactccaaatttctttatagctgattatttcaaactaggatccaattaaagtttacatatgacacttggttataactctttagttggatataacattattattattttgataaaatatggaacaaatcaattctattaataagtggtcacatttgttttgggcttaaattactttttaaagatactggattttcctaagatttctgatttacactgatatttttttttgtcattcttaattgcatcacacaatagatgtaaatgaagatgtagtcacctcagataaaattggtatcgggtatgataatattgtatcatttatatttgccttatgttaactttaagaaattgatttttttgtattaatcattttcccattgcaacagagctatattttttctattttaagaatcatattttaggattatttttggcaaatacagtgagcacttatgtaaccagatgataatgaactcaaatgtcatgatagcttgcataaatggtgactctagtagatttgactcaagcacttctagaatcatgcactgaattcaaaagaaaaatcttgctgctttttgtccagggcttgttctattcaacttctaatttgaaagctgtacaaagtaatagaagttccatttaaatatgagttcaaaactgtatttactttttatgtggccctctctttaggggattctaattttacttagggtctctaagtgcagcataatgttcctgatgttaacagaagactgtatttttaaagttacaaatttgtatatggaattaagtaatggcgctatatacgctgttgtggggaggggggaagaaaaggaggaaccaattaaataggaccttttaaaaattgttaattttgtaaactttgcttctcttataagttattgtgattcattttagttactgtgttttattttgaaaatatttaaatattgcacttctataaatagtatgataaatgcacagacaattgcagtaaattcttttttaagctaggatatttgaaatgacaacctttggttaagtgtgtcaaggttgcaacagaattttcacaatttttttgttgtttgcaaattgttactaatattgaagaggtaagggaggcaatgcaaatgatttttaatctttttttattatcttttcagcagtttatattttttgtgactttatgcaaccatatttttactttgtcttgacaactgaaagatgtataaggttttttgccagaaatgtactgtatacatagttttaagtataacagattttactgatatgtaaaaattttgccattaaaataaatgatttctcactgagaggaacttttctaccaggttggggcatatgggagcttaatatatcatatctaatttaaaataatttcactgaaataaactccattgcttttacctaatttttttcttgagatgcttttgtagtttttcagagttttagatgattttatacaaaatcctctgcctagcactgctctttttgatgttgtagtgacaccatttacattgaattaatgcttggtagcctggggctagatgtggaactccatggatctgtgttctgactggcacctttggaatgaaaggaaaagtgtgtgctgtcccaaattttttcccccttaattctttcccctcatccttctcaccccataatagaaattttatttccattgtgagttctgacaagaatgaaattccacatacaacataactgtaaattgttggtaggtagaagttaatatttgtggttcatgtatattttgaccagagtatatttaagtatataatttcagcttccttgatttagaaatatgatataataaagaaaaactccatttatcatctgttaaaaaa

SEQ ID NO: 86325 - DNA, 351 bp, Homo sapiens
cccacgcgtacgcccacgcgtccgcggacgcgtttgctttaatgtgggaatcgatgcgctagatgggacttactccaggagatcaggatgtacaagataacccctgagggcgctcagccaagcttagagcagctatcagattataagttatcatcatcttattcttcaaatttttttctcacaattcctctaatctttactcatgttatgtccctgaatgtcttggtataggtttaagtgagggacagtctgaaaattgatatgcatttagcatttcttttttctcagaaagaaactgtaggaaatacatgacagagaaagttacactcagggagcagctgcacctccaga

SEQ ID NO: 86326 - DNA, 388 bp, Homo sapiens
gcgcgtacgagtcctttgggtcctcagtaatttttgagagcattaagaggtcttggtgatcacagagtttaacaactgccaccgcgcccaggcctcttgttgattttttatgactacatagtagtctattctgtggaggtactatagcggatttaaccagctggatattggttctaatcttttgctcttacagcgctggaaggaataagcttatgttagttgatacaagtggagatatatctgtaggatagattcttaggggtagaattgtgggccaaagggtagatatatctgtaattgttaagatactgccatattcctttctgtaggagatacactattttacattcctaccagcaaaatacaagagaaatattttcctcattct

SEQ ID NO: 86327 - DNA, 1558 bp, Homo sapiens
tagttgtataatacatacacgtgtttgcacttgtaacatgcacatttattcagaacaaacaactcattaatttattccaaaaccatttcacctgataacttaaaatacagagtaaaacaaattggtcaggtaaatatacatgtaacttaaaaagaaacagtcatgtactttaggcataaggacaatgcttttctcttttacaaattctaagttaggtcaaattctctgaaagtcactgcttttctttactgtgatgtgttttcggtgaagttacagcctatttgcaaatcacatcactggtttgtccaagcagaggtagatgagaggtaagctcctgtcctgctaaaagtctcctaaaaacagcaagaaaatatttttacatgttcaaaaatgctcatttatttatattcctaaattttcttttactcagtataatatagataatttaaaaatcagtagaatatttttattatatatgttttatttttatacttctagttaaattaatagtggaacattatatatctattaaatgttttaaattacatggaattaaaatatcaaagttaattatgttattataatttttaaatttcagaaaccttctttaaaattcttactgttttatcttaaaaaattcatatagaaattgtggtcagatgtaaactgtgactctgagcacaaatcccaatgctattgccaattaaattccaatttttgtgttcacacatgaaatgtagtttttcttttattgagttttaaaaatctgtaagatttacctatctgaatatacactcaggtctagcttcatgttcctgtgacctgtgtggtcacacaaggacccatgtacataatgacctcatacttggcctaatgctctcctgttgccatcttgaaatgcttaacactttgaacgaggtacaacatccacttcattttgcgctgggccctgcaaatcatgtagacagtcatatatgagtccagtattttcctaccaccagacattttaatgtactgaagagataaaaaaaaacctaataattagaagttttaaaagaatatttttaagagttgttgtttgtttgtttgttttttaatcctagatgtctcaagcttgccttccattagataatgcagtaaggaacccccagtttacaacacagggcaggcaggaagacaaccaactcaatgggatctctgtcctgtgcagtcatcaccagctgatccttctttttctccactaaggtggtgacagcgttaacccccattaaaaggacaggtgatctcttagtggggatgtctcctttgcttttttctcagcccaggccaacagtctctgctgcttctcttgctttgtctgtggtctgtacttgccagccagcttaccccattgagcagctgtttggtggtccaaggccctggtgaactgattaatcacagaaggcacttctagctgcttatagaggatggctctctgctgttgcaacctagtataatggggccatttgacaaagcaagtgaggtgccttttgggctggatgttctgtccaatgccaaa

SEQ ID NO: 86328 - DNA, 338 bp, Homo sapiens
tcgcggacgcgcggtcgatattattgaatccatggccaaaaatctatccaggattcaacccgtgacatctatggctatggggatgcatggcattgacaatgaaggcatcctgagccttgcatgtatcctcagtgcccggagattaaccaacgttatcaactccgaagctttaggacgatgaggttgctcagctcatgataagtgcagataccctgagggacatctcagaaggacctgatggacctgtgactagctgagctctatgctgtatatgattatattctacactgggactaactcgagcctttagttttcatccatgtacatggatcacagtt

SEQ ID NO: 86329 - DNA, 246 bp, Homo sapiens
ttttgaatcagtttgttgctgagttttaggagttcttcatatattgtggccattaatcccttatccagatacataatttgcaaatatttttctcccattctgtggttctctttatagtatccctcaatacacaattttttaattttgataaagttcagcttatctattttttcttttgttgcctgtgctttgggtgtcatatcaaaatcattgccaaatctaatgtcatgaagcttttcccctaca

SEQ ID NO: 86330 - DNA, 331 bp, Homo sapiens
gttttactcttttccagtcttgatgcatttttcttgctttattgtgctggcaagaaccttcagtataatgttgaatagaaatggtaagagtggatgtcactgcctcattcctaatttttgagggaaaacattgattctttcacgtctcagtaaagtgtttcctgtaaattttcatagctgtctattatcgatttgaagatgtttacttctattcctggtttctggagagtgtttattaggaatggttgttcggaatttgtcaaatgcgttttcctcatctattgagctgttaatatggtgtttcttttttagtgcgttaatatggtgactt

SEQ ID NO: 86331 - DNA, 2367 bp, Homo sapiens; identical to SEQ ID NO: 65790

SEQ ID NO: 86332 - DNA, 1700 bp, Homo sapiens
  misc_feature (1)...(1700): n = a,t,c or g
ggcacgagtctcttcactgatgactgccgctggggcatcgtgggctcagctgcctacctcccagatgagcctcaccctccattttttgagggatatcggaacagtgaatcagtgacccccaacccacggtcccctctagaagactattccctccatatcattgaccttcacaccggccgcttatgtgatacacgcacgttcaagtgtgacaaggtggtcttgtcacacaaccaagggctgtacttgtacaaaaacatcctggccatcttgtctgtgcaacaacagaccatccatgtcttccaggtgactcctgaaggcactttcattgatgtgcggaccattggccgcttttgctatgaggatgacctgctcactgtgtcagctgttttccctgaggtacagcgggacagtcagacaggcatggccaatccctttagggatcctttcatcaattccctcaaacaccggttgctggtatatttgtggcgccgggcagaacaggatggtagtgcaatggccaagaggcgcttcttccagtattttgaccaactgcggcagctgcgaatgtggaaaatgcagcttctggatgaaaaccacctgtttatcaagtacactagtgaggatgtagtaacactgcgagtcacagatccatcacaggcatctttctttgtggtgtacaatatggtgacgacagaggtgattgctgtgtttgagaatacatcagatgagcttttggagctctttgagaacttctgtgacctttttcgtaatgctaccctgcacagtgaagttcagtttncctgctcagcttctagcaacaattttgcaaggcagatccagcgccggttcaaagacactattataaatgccaagtatggagggcacacagaggcagtacgccggctgctgggtcagctccccatcagtgctcagtcttacagcggtagcccctatctggatttgtctctcttcagttatgatgacaagtgggtatctgtcatggagcggcccaagacttgtggagatcacccaatcaggttctatgcccgggactcgggcctgctcaagtttgagatccaggcggggttattgggccgccccatcaaccacacagtgcgacgccttgttgccttcacctttcacccttttgagcctttcgctatttctgtgcagaggactaatgctgagtatgttgtcaacttccatatgcgacactgctgcacgtaggtgcctcaccagagccagattatctggtcttccaagactttgccactcacttatctcagtggactccaaagcaaaagctcccgactactagctctgttagttccagcctgctatacctcagatgggagagagccagagagaggagtgagggtggctcaacctaatggaatttttaaattgtatacaatactggtactgattgttataatatcctcttgcgttttccctgtgggaatgcccagcattaattaagcccatttcatttttgctttactttgcatttgattgctgtgaagatgaaagcattaaacttttatccccttcatgtcacttcttcggcattatggtttgcatctgaaagcagttaaatcttgtttactgatgagaatgacatacatcctttccatttagctcataagcacggctatctttttaagagaaaaataaagccatggtattttcatacttaaaaa

SEQ ID NO: 86333 - DNA, 1535 bp, Homo sapiens
ctcccatgaatcttaccatgtaaatccaaatctctgcaatcctgtggcaccaaccagtggtgctcattctattgtttaaaaatggccttcttggctgggcgcggtggctcactcctgtaatcccagcactttggtaggccgaggtggacggatcacccgaggtcaggagtttgagaccagcctggccaacaaggtgaaaccctgtctctactaaaaatacaaaaaattagccaggcatggtggtgcgcacctgtagttccagctacttgggaggctgaggcagaagaatcacttgaacccgggaaggggaggttgcagtgagcggagactgcaccactgcattccagcccggcctacaagaacaaaactccatctcaaaataaataaaaaaataaataaaaataaaaatagactatatatagtctttgaattcatttattttaaataaatgaataaaataaaataaaaaagaatattcagtcgttggcacataaactatgttctcttctgtcatttcagggtaggagtcaatgaagacatcttagtcttaacaagttacagataatctctgactggcatgttttctgcttctagcttggagctaaatgctgctcatgctgaaaagaataatgtctatttctttgtttgggtattagctctattttgatctatagcacagttttgtaattcagatcatcacccctgcactttgtaccacatgggcgtattctttcttcccagtcattgctgcaattatcttgtctgttctttgtgtaatatgttctgtgtgagcctctgcattaaactcgatttcttgggcaattatggaaattccagtgtggctgcagtttaactttgcactctctatgcatatgaggtttcctaaataaatgaggagtagcatagtttaaaatatatatatcttataactttctacaacaaagaattattgagtccaaatgtcatcagtgctcattttgagataccctgctatcgatggtcgctacaaaccaggaaatactcaagttattatgtgtatacattggttttagttttatgaaacaatttaccttcatgatctcatagttaaaattgtaataaatttaggaatataaaggatcaatatgggaagcaaaatttctaaaggcagtttctgttgttttaattagtatttgtgtagttcaaaccaggaaggatttgactatcattagattttgcttaactttatgaaagctaaaatattctctgttataaaggggcaactccatctggtcctatagcatctttactactgatttttttttgtttaatttgaaaatgcaaagaattgttaaatgttcttaaatgttctcactacaaaaaaagaaaaaagataactacgtgaggtgatggatatgttaattagctggattgtggtaatcattttggaatgtatatgtatatcaaaacatgtagtacaccctaaatatatataatttttatttgtcaaatatacctcaataaagatggaaaaaaatcgaaaaaaaaaaaaaagg

SEQ ID NO: 86334 - DNA, 381 bp, Homo sapiens
cttttttttttttttttttagtaaatagtataaatgtattttgtaatttaaacaaaagcttctgttaacattattgctaacatggctagacactgtcactaaatttggtggctctgctcaggatggtctgaacacatgcaacattctttttggagccacctgaaaaacaaggattcatcatccagctgaaaccgaagacagattttttttttaccaaactggagggaattttgaaatggctgaccaaatctgtgggatacagaatgtacaaaattctcttttagggttgctggggtgacagggcagctcaaagaggtaaccatctataacatctgaaactgaggtatgagacctgtattacaactgataacaaaaaaaaaa

SEQ ID NO: 86335 - DNA, 409 bp, Homo sapiens
  misc_feature (1)...(409): n = a,t,c or g
tcgctatgcgccgctgtacaggatcctgaactgggtccaggcttacccgtgcctgcgatggatgacctctatccctacggtgcggactattacttgctagctagcaaanctctctacgacccctgttctgagtgcgacctagtggacttactacctacagtcatttatagctgtatggtgcctttcatgaaatcatacgggtaaggcggaagactagctgcctatgctggctgctcgtcaagcccgcggactgagtacgacccatcgaggtggcatacccgggagctgacgatcatttctggaaaaaggtgcagctccagtggccccaaatcctgggaaaggagaatccgttcaacccccagattaaacaggtgtttggagaccaaggcgggcactgagcctctcanga

SEQ ID NO: 86336 - DNA, 398 bp, Homo sapiens
cttttgtaaacaatcatatcagccatttagttgctccccaaagaaccaggggtcttaggaatttaaccatgtcagtgaaatcttttttacattattaactgaagaaaaatgggtgccctttttaagattaagaaacaaaaattaggagtagccaaataaggataataaggtggatgtctaatgagtttccactgaaactcttcacaaaattgccctcgtttgatgagaggaatgaacaggaacatttacatggtggagaaggactccttggtgaagttttctgaggtattttcctgctaaagcattcactgactttctcaaaattagctctcataataagcaggtgttatcattctttggttctccataaagtcaacaagcaaaatgcctcagcatcc

SEQ ID NO: 86337 - DNA, 1485 bp, Homo sapiens; identical to SEQ ID NO: 65820

SEQ ID NO: 86338 - DNA, 719 bp, Homo sapiens
tagtttcctctcctgctctgtgcagtagcttttccagaactatggacaaattgatcagaagaagattgattatttcctcatctttttttcttttttttgagacagagtttccctcttgttgcccaggctggagtgcagtggcatgatctcagctcactgcaacctctgcctcccgggttcaagtgattctcctgcctcagcctcctgagtagctgggattacaggcacccaccaccacacctggctaattttttgtatttttagtagagacagggttttaccatgttggtcaggctggtctcaaactcctgacctcaggtgatccacctgcctcggcctcccaaagtgctgggattacaggcgtgagccactgcgcccggcctatttccccacctttcgtgtaaggtgctactgaacatgacagcttcttgtcatgacaggaaacttgcatcagttggatatccttttgagaaactgaattttgcaaagggccaaatttccccaaactgaacgggctcaggaaatgttcctttacactcagaacattctattttaagtatattatttattgttggcagttcctcagggatttcccttttctctgtattggtcagtgtagttgatgtaaaaccgttttgtggatggaaaatatttttattttattgctcttttagtttggtaggttaaataaaggttcttggtaatttggaaaaaaaaaa

SEQ ID NO: 86339 - DNA, 4093 bp, Homo sapiens
  misc_feature (1)...(4093): n = a,t,c or g
ttttttttttttgagaatggaagcaaaacttttattccttcttggctggagaaaggagaaactatgtgggtggttgtgtacccaggacccccattccttcaccccctcccaagaaccaaaagaagacaaagcagcggccacccaaatggcttccctctgcccaaagtgaaagccgagaggtgcagcggcttggctggggaggcaggtgagcgcaagcaccggcacagggcaggggcggcttgcagtgacagggcgggcggcccagggcggcccaggggcccgggcgttgaagggaagaaggccggggctgctttgggtagcggggcaaggctttgggggcttccggcttggcacgggccccaagactcaggggcaccaacaacgcggttaggggcttgccttgggatgtgcttcgtcccccccaatttgacccaccagtagtatactcccccatgtcctttgagcaaggtaggacacgctgtagagccaggctgcccgacgtgctttcaccgaggatctcctcggcaggggggtcctttgggccatgaacccccaccagcaagcatgttggatgcctgctttgctgcagtctactgtgaagctgctctgcactggcctacggtaggcccttgcttcagccgcncaggcccctgggccaccacccttggctggcgtcagcaggccccaggacccccgngcccccatggctgggggggcacaggtgggccttgggtcagagagtctaccaacacttgatgatgtctcgtgggaggctgtggttgcttgacgagaccgggggccctgtgactttggcccttgaaggggctgcccccaatgtggtaggggccgccgtacttgatggagatgaggtagctgccaggtgccatgggggtataggtgacgcggtagccctcagggcactcctggcaatccatcttcaccttggaggggccgtcaatggtcaccgacagggcaccagctcccgcattgctcgtgttcacgacgaactcagctgggttccctgtgacaccgccttccagacctgctccgtaagcagacaccaagcctgggtcccctccatgcccaggctccccaactcggatcttgaaggggcttccagggatgtgggtgccgttgaacttgacgtcaatcaggtaaacgccattctcccgagggatgaagcgcacagcatacttatcttggtcaatttctgtgacatagcactcctccagggctcctgaggggctgtgcaccttggcatcgatcgcccccttggccccgttcaggctgactgcaaaagaggctggctggttgacctttagccctgactcctggaagcacagcagacatggttagatgggggtgcttgagccagggcaagggaggacggaaaggccccaggagcaacaggcccgcgggtcgcacttacccatctggcgtccaacttggtttaaagagggagagccactgatttgcaaggggcagcaagccacaggcgcacatccccgcccctgcccccacactctgccgtcgcacacacccaggtggcaggaagggagggctgccccaccctgtgggcagcacccagccttggcaggctgtccctctttaaaccgcagccctggtgctcaaggggcacaggcttctgttcaaagcctccagacctgagacacgagaaaaactccacgtggtgggcaggatatttcctgccgaccccaagcgtgggctgcacccggccagagcagaggcctggaacccagagctgggccaggggggtcactgaacacagggccaaggcctggtctctgcggtggctctggtctgtccgggcccaggagccccaggtgggcggtttctctcggtgcctcacccgaaggctagaaacagtgaggcggcgggcgtcgccagacggagaagccacaggcaccacgaaggggctgtcgggaatgtgttcctcgttgaacttgactgagacttcgtagtcacctggctcctggaccacataagccacaccacaggagccgtccttgcggtcctcaaaagagatctcagccttgctggggccctcgacagcaatggccaggcctccagcaccagcttcccgggtccagatactgaaattcggcttgccaattagagcttctagtactccccagtcccaggtcctccaagcacggacctatgtgactccccctttccactaggggccccacggtgaactggaaggggctccccaggcacgtgcttggcccttgtacttcacgcttgactgtgtgtgtgcccatctcagcgggaacaaagcggatgcagtaggtgtggttctccccttccacgatctcggcctcatgggtcttgcccgatgggctggtcacctgggctgtcatatcctggatgctaatttcagggattttcaggctgaggtcacaatgactaccaacgttggccactgaaggagcccgacgcctgcgggtgatgctctctttcacccggccctcgcctgtcaccttcacagagaaggggctgccaggcacgtgcttggtcgggcaaacttgatgttgatgatgtagttgcctggctcttgtggggcagtaggtgaccctgcacgtcccgtcctccaaggtcctcttgtgttgatgtccaccttgctggggccctcaatggacaggctgagcccaccatagcctgcatcgggggtatcaatgataaactctgcaggctcaaaggtgtggccttcgtgaaggccctgaccaagagacccgaacacgactggcatccccaatttccgactggctgatcaccacccgggatggggctggtggccacgtgctgggccattttttttcacattgcaccaggggctcccccgtctccttgggcacgaatgaaatccccacgtggccatttacgcagccgcttcagcaaacagggctcctcccggcccgagggcgggaccacagtggccgtcagcaggctgagatccgtctctgagatgttgatggggatgtcggcagcagagccgacctttaggtgggacatacgcatggagtcgtcacctgtgacccgagcagtgaaggggctgcctgggacgtgctgttcattgtacttgactagaatgctgtagtcccccggcagcacaggcaggtaggacacgctgcatgtcccatcctggttgtcagtgcagctgatttctgctttggacgggccctcaatggccagagacaggcccccctctcctgcatccttggtgttgacggtgaaggtggcaggcttgttcactactccatgggtgaggccaggcccataggcagtgacatggccacagttgacgtaatccacatagaactgcaaggggcttcctgggatgtgcatgttgtcatagcggatgtccatctcgtgcaggccagcctcgctgggtgcataccgcacggtcacggtgccgtctttgttgtcagtgatggtgggctgcgccaccttgcctgagggcatccgaacctcccctgtgatctcgcccttcttgatggtgaaggggatgacaaggtcaaagggcctcaggctggtcacatccagcccattgacacccaccaggggcctctccggggcccaagtctgctggccgccctgggcgtaggtgtactgtggggccagctgctgagaccgtagagggggctgcaccgagggctggtccccagccagagccgtcacttggaaggggctgttgggcacgtgctcgccaccaaagcgcacacagatgacgtatttgcccggctggggggccgtgtagaagatgtcgaaagtgccgtcctcattctccaccacgtccacatccacctctgagccatcaggcgtgcacacggtgcacgtcactttgcctttgcctgccgccttagtgtccacagtgatcaccgtctcctccccaatctgaatggtggggccgatgccagcacctgtgacagtgcacttgaccttggacgcatctgtcacatcatgcacagggaccttgaaaggactgcctggcacttgatggccaccataggtgacgttgaggctgtaggtgccagcctcataagggatgtactcgaccgagcagctgccc

SEQ ID NO: 86340 - DNA, 420 bp, Homo sapiens
cggacgcgtggggtgaagtagaagtgaagaggcatagaaaaaaaatctgaaggaataatgggcaaatattttccaaattttattaaaattataaacccacaggtccaaaagctcaatgagaaacatgagctttaacatgagaaatataaaagaaaattacatcaagacacatcataatcaaattgttcaacaccaatgataaagaaaaaatattaaaagcagcaagagaaaaagaatgttatataaagaagatcaaaaataaggaagaaaacagatttcttttcagaaacaatataagcaagaagacagaagagcaatatattaaaagtgctgaaagaaaaacaaaatgtccacctagaattctacacctagagaaaatatcatccaaaaccaaaggcaaaataaatttcaagaaatata

SEQ ID NO: 86341 - DNA, 803 bp, Homo sapiens
caagtttgctattgtatcagaaacatatcttttagtattaacagtttccaaaggattatgtcttccacattccttatactgatagatttccccttggctatgatttccctgatatgcaaaacagttccaatccatggtgacatgtatatacattcttaatatttataaatttttacttgtctatagtctagtattgttataccatgtggtcttgttataatcatggtttccattctgtgagtcttcagattatgagtccaacacacaaggggatgtccacactaacctgtgtgaactctctgatgtacaaggtgtttgacttcaggcaggagtttctgattcactatactgaaagggttctctgatataaaatgaggtctgacttcagagaagccttcccacatctattacattcatattgcctctcctatgaattctctgatggctgttgaatgctgatttgtggtagaatttttttccacattcagtacactcatagggtttctctcctgaatgagttctataatgtacagtgaggtatgacatccgagagaaggcttttccacactcattacattcaaagggtttctctcctgaatgaattcgatgatgtatagtgagataggacatctgagagaagcacttcccacattcataacattcgtaggctttctctcctgtgtgtgttctctgatgtcgattaagggctgaattctggcagaaggttttcccacattcactacattcatagggcttctctcctgaatgaattctatgatgtatagtgaggtatgacatctgag

SEQ ID NO: 86342 - DNA, 2664 bp, Homo sapiens
ggaattcaaaagtggcgggtgtggcgcggggctggtagcggccggagccgtgctagttctctaccctgcttcgcgagcgggcgagagaacgcgagtcccaggatccccggcacccagttctcttccactgcattcccccggcgcgtgtgggaccgaggtggacatggatccgcagaggtcccccctattggaagtaaaggggaacatagaactgaagagacctctgattaaggccccttcccagctgcctctctcaggaagcagactcaagaggaggcctgaccagatggaagatggcctggagcctgagaagaaacggacaagaggcctgggtgcaacgaccaaaattaccacatcccacccaagagttccatccctcactacagtgccacagacacaaggccagaccacagctcaaaaagtttccaagaagacaggaccccggtgttccacagctattgccacagggttgaagaaccagaagccagttcctgctgttcctgtccagaagtctggcacatcaggtgttcctcccatggcaggagggaagaaacccagcaaacgtccagcctgggacttaaagggtcagttatgtgacctaaatgcagaactaaaacggtgccgtgagaggactcaaacgttggaccaagagaaccagcagcttcaggaccagctcagagatgcccagcagcaggtcaaggccctggggacagagcgcacaacactggaggggcatttagccaaggtacaggcccaggctgagcagggccaacaggagctgaagaacttgcgtgcttgtgtcctggagctggaagagcggctgagcacgcaggagggcttggtgcaagagcttcagaaaaaacaggtggaattgcaggaagaacggaggggactgatgtcccaactagaggagaaggagaggaggctgcagacatcagaagcagccctgtcaagcagccaagcagaggtggcatctctgcggcaggagactgtggcccaggcagccttactgactgagcgggaagaacgtcttcatgggctagaaatggagcgccggcgactgcacaaccagctgcaggaactcaagggcaacatccgtgtattctgccgggtccgccctgtcctgccgggggagcccactccaccccctggcctcctcctgtttccctctggccctggtgggccctctgatcctccaacccgccttagcctctcccggtctgacgagcggcgtgggaccctgagtggggcaccagctcccccaactcgccatgatttttcctttgaccgggtattcccaccaggaagtggacaggatgaagtgtttgaagagattgccatgcttgtccagtcagccctggatggctatccagtatgcatctttgcctatggccagacaggcagtggcaagaccttcacaatggagggtgggcctgggggagacccccagttggaggggctgatccctcgggccctgcggcacctcttctctgtggctcaggagctgagtggtcagggctggacctacagctttgtagcaagctacgtagagatctacaatgagactgtccgggacctgctggccactggaacccggaagggtcaagggggcgagtgtgagattcgccgtgcagggccagggagtgaggagctcactgtcaccaatgctcgatatgtccctgtctcctgtgagaaagaagtggacgccctgcttcatctggcccgccagaatcgggctgtggcccgcacagcccagaatgaacggtcatcacgcagccacagtgtattccagctacagatttctggggagcactccagccgaggcctgcagtgtggggcccccctcagtcttgtggacctggccgggagtgagcgacttgaccccggcttagccctcggccccggggagcgggaacgccttcgggaaacacaggccattaacagcagcctgtccacgctggggctggttatcatggccctgagcaacaaggagtcccacgtgccttaccggaacagcaaactgacctacctgctgcagaactctctgggtggtagtgctaagatgctcatgtttgtgaacatttctccactggaagagaacgtctccgagtccctcaactctctacgctttgcctccaaggttgaacccagtgtgttattcggtactgctcagtccaacaggaagtggaagacggatccagatctctgtgtgtgtgtgtgtgtgtgtgtgtgtgtgtgtgtgtgtgtgtgtgtgtgtgtccctatgtctatgtatcgggtgaggggtgggagggttgctggagggtgctttattgggtggagggcaccatgtcccagggctatcaaataaagaatagtttggttttttttttaaataaaggttttattagcatttgcccaagaaggcagatactttcatatctgtaaaagtgggagctgtgatctgtaccctctgccaaacgtttacgtgggaggcgggagcgggggctgagggcttcgtcttttctcccctctgctatcaccggttctggaccttggcctggatcatcttcccctctgctaataccccctaccccgtccgtcacatcagggaggtgtgccctctagctatccacgccccctccttggtcactagttataggtaactttcacccttccgccggc

SEQ ID NO: 86343 - DNA, 1698 bp, Homo sapiens
  misc_feature (1)...(1698): n = a,t,c or g
ttttgttataaataaatttttaattattttattattattttaaataaacaaataagttcagactgttatttatgaattacccagtctcaggtattttgttacagcaggaacaaactgagattagtaatgtgctgaggctaattggacaagcaggtgttcatgctgtctcctctcccttcaactcctatctctcctcaataaaccatcacatccctgggtcaaggtgctcccaccttcaccttttcatacactcattcctttcatgctgtcaccatgatgaaccacttagcttgaacaaacacaataaaaattgtatacagtcaaacacaaaactttctgtattatttaggagttgtgggttttggaagctcatctttagaaaaaacattggatcttttttcctggaataggagcttggagaggataggatatcatcagttgatatttcttctagtaacattccctgctatatcatgtatactgtatttagcctaatatcccatatatatttgtgtccagtatatttaatgtacctataaagtagcaataacaggagaggataatctctaaagacctgctgaggagagtccacttgttgatcataagggaaaggctttagaaagggaaagaaagaagtcatagtgctcagaaaatttaattcacctcttcctagctcccagaaaaactggcaagggtcttgcaactgaggaaccagggattccaggagaagtaatttggagcaatatgtatctgatgaagtgtcatagaggtcctggaaatgtggggaggtaaattgcttatgtcaaatgtaagaggacctgggcctgcttcccactgagaaacctgtgaatgcagggaccatggcgatgctgttgaacatcacactgcttccccagagtccaaacagtgcccactcctttactgctgattacaatttattatttcttttcatccaccatccactcctcaaattatacgccctgacctgcccaacactgtcttatgttcaggattggcatcacagaggtacacagttccactggttccagcttctgggaatcgggaacatcgttgcagtgtgtaactcatttttttgcatagcttcattgctgtagtctacatgagaatagacaggaaacccaagtttgcccaatttctggggcgtggggaataggatgacatacggtcacaaggccatgggagcccggtattccgcgganagggtgccctgcccattctcatctctcccagtctgggtcccattaggatccccaggcacacaggggggtccccttcaggcccccaggagacagcaggtgggaaaggtctgaatgcagcgctcaatgaatctctgggctcctctcattaccaccaaaatgccagaatttattcaccaagtgagcatgggtaacatccatggatgagagtttaaacatctcttggttgatggccttgggtttgccaccactgggagataaaatctttgatttcagcaggaaaggagtcagttccttggctgtttcagctgccatatagagaatgcgttgtgtttgtttgactttgaaggacttaatgcctgcaagcttttgtatagcctcattcaggttaggctgtgacctttgaatctgtaaaggctgtttccagttgatgagttctggtgatcnaaaggaattcctgacagttttggggatctttgga

SEQ ID NO: 86344 - DNA, 401 bp, Homo sapiens
tatctgctaggatgagtcacccaatttttttctcctcattatgtagaaggttttgattctatttttggcaatcttggtcttcagtacaaattttagaattagcttatcaagatttataaaaaatctggttaagattttaactggaattgcatcaaatctatagatttagagagaattgatatctttacaatatttagtaaccccaccccaccaaaatttattcaatttttcttatatatttaaatttattcaatttttcttatatatcctggcaatgcattaaaattattttcatgcagcgattctgtgtttgcagtgagagggcctcgttctatatcaatccatctgccttgactggtatatcctcaaatactattaaccagatctatatttttaacaag

SEQ ID NO: 86345 - DNA, 407 bp, Homo sapiens
cacatatgaaagttgactcctgcaaacttaatcaagtcatagcccaaattacagttactgtcccaaatatgatatctcgtgaaaatagattaacatagcttcagatgcatggtatgtggtttgaggtgaatgaattttttctatctctatcaggaattaagatcagaaacaattcacaatcatatgggataaataagagtagacatgtagtgttcatcccagtgatagtaatactcccactctccatcctaatatagctcaaaggaacttgggcaatctagacatttcacaaaaacaattaattagtctactgtatagagtgtcacataaattgatctagaggagttaaagtggcaagtacattggatgacttgttaagtcacttcagaaaatgaaatataaaaaaa

SEQ ID NO: 86346 - DNA, 438 bp, Homo sapiens
tatgctaaccaaacagtagaaacttccaaaactgaaaatcaaagagaaaaaagactggaaaaaaaaacccataatatccaagaactgtggcaagaactgtagggcaactacgaaagatataacctgtaataggagtaccatagtacaaaggaacagaagcaatatttgaagaaatgaagactaagaattaccccaaattaatgtcatacaccaaaccacagatctcagaagtttagagaacaccaagcagaataaatgcaaaaaaaaattaaacctaggtgtgtcgtatttaaactgtagaaaatcaaagataaagaagaaatcttgaaagaagctagagggggaataaaaacctgtagaagagcaaagaaaataattatatctgacttctcttcagagaccatgcaagcaagaagagaatggcatgaaatatataag

SEQ ID NO: 86347 - DNA, 435 bp, Homo sapiens
aaaagaactgaaacaatacatagcgcattctctcatgacaataaattcaaactataaatcaacaacacaaggataaaggaaaacctctaaaaacctgtaaatgaaatagcacacttctaaataacttacagatcaaagaaatctcaaggaaactttaaaactaaatagaagcgagtaaaaatgaaactatcgtatagaaaaacaatcgatggtacacacagaaaatagcagtactgaaaagacaaattaattttattaaatactaacaatagaaataaggaaagaatccaagtcagtaacctaagtttctgtcttaggaaactagaaagagaatatcaaataaacccaacctagcagaagggaggaaataataaggaaaagggcaaatatcaacaaaattgaaaattggaaaaaatagagaaaatcagtgaaagg

SEQ ID NO: 86348 - DNA, 401 bp, Homo sapiens
cccacgcgtccgcccacgcgtccgcccacgcgtccgagtttctcttgtacagatcttgtacacctccttggttaaatatattttaattaggtattttaggtatttcaatgaggtattttaatttttatgtggatattgtaaataggattgcctccttgatttgtttcttagttagattgttactggtctatagatatgctaccaatttttgtacattgattttacatgctgcaactttactgaattccatttatcaaataagagttttttgtggcatctttaggttttccttgacataagatcaaattgtcagcaaacaaggataattagacttcattttttccagtttagatgccatttatttctttccattgcctaatttctctcactaggcctttcag

SEQ ID NO: 86349 - DNA, 392 bp, Homo sapiens
agagacagcaggaacaggggagaggaggcagcccattcacctggggaaatgactgcgatggacagggacggtggcggcagccccaagggggacgtgtacccgatgtactatgactataagaccgttctgattgggggcctgatcttcgctggactggccttaattgcgggggtcctcatcctcctcagcagaagattgcgctgcggcggcaataataagcgcatgcaagacactgaaaatgagccgaaacagcagactgacgcggtgccacccactgctctggggccatgtgctaatccaagcatggccctgcctcttgcgcctcctgttcttgcatgggctttagaccttcgaccccgtcaataacagcgcttggactgatcgatgctccg

SEQ ID NO: 86350 - DNA, 404 bp, Homo sapiens
  misc_feature (1)...(404): n = a,t,c or g
cagatttctcatcagaagccacagagtcaaataagaaatggtgttttccaagtgctgaaagaaaatacttgtcaactcagaattctgtattgagtgaaaatctccttcggagatgaaggagaaatcaagacattttcagatgaagaaaaactaaaagaattggttggcagctggtctaccttaaaagaatggctgaaagaaattttctaaacagaaaggaaaggataaaagcaggaattttagaacatcagcaaggaggaaaacaaaaatagccattaatatgataaattttccttctctggtgttttcaaaattatgctttatctttaagcaaaaattataataccatctgatgtgattcanaatacaagtagtaggaagatttaagacaattatattttaaa

SEQ ID NO: 86351 - DNA, 479 bp, Homo sapiens
  misc_feature (1)...(479): n = a,t,c or g
ntactgaaagctctccgaanttttcgtatcaccggcctcgacccacgcgtncgggtaaaataaacgctccactctatcctccctcataagcatgttagttattctgagtacttttctctttcttgtgaatttgggaattcgtttttcaaggtcagtgaaaatctctattagaatttgattgagataacagtaaatgtataggtttatttggataaaacttatatatttgagatactgagtctacaaacttacaagtatggcaaatgttttcatttattttgggtcatcttttatagactgtcatatgttttataatttgtcccttaaaggtttggtactcttcttgctagatttattcctcagtactttataatgttgttgtaagtgtgaacaggagcttgttttgtgtatattggttttccatgtaatagtgtcgctgaattcttctcattctaatcattttcttctgggcttccttg

SEQ ID NO: 86352 - DNA, 770 bp, Homo sapiens
gctttggctactttgtgcatccttgacctcatccacctattaaatccacatcagagctatttcccacccctaaccaagcaaggccctattttctctgggtctggaggttactcctgactccagcttaaaactactctcagaaccaccctaaccctatctctggcatctttagactttcccattcttttctctaaccattttctctcctcacagggcattttgggttccttggaaaatttgttctgatggcttttcctcacttgaataatgtaatctttggactgcttggcattgtggttgatgtgcgtggatcttgagccttctctgatcttctcatgcttcctggaccccattttctttttctctttcctgcttttcacatgtccatctcccagagatatcatcaaagaagacggtttgaaatggtaggtttatctacctgattacatggaaatcatgagaaaacataaatctgaaaatatccgaatcttgattcataagctcttaaaaatataaattttggggccgggcaaggtggctcacgcctgtaatcccagcgctctgtgaggccaaggcaggtggatcacaaggtcaggagatcgagaccatcctggctagcacggtgaaaccctgtctctactacaaatacaaaaaaaataactgggtgtgggggcgggccgcggggactcacccctacttaggaggctgccgcgcgagaaagcgcctaaatgggaagggggaatttgactgagcccacaccccccgttgcc

SEQ ID NO: 86353 - DNA, 399 bp, Homo sapiens
aagagcctgtctcaaaaaaaataataatgattattatgtggattcaaagagactcagatgctccttctacgagcgggggcaaatccttgggcatccgaggtcctgaccgtggattaccccagctggtctccagaggacttctgagtatcaccatgggtgggtacaagagggtagtgggttggggttgaagtcgactttagcaaatagctcattgttctctttcacccttctgtgaaagaggatcagaagttcagggcatggctctaaggaagttcctggcagctgtgtttagagtagcaagattttggaaatgacccaagtgtctgacaatagatgattggttagataaggtatgggttagccagacgttggaattttattcagccactaaaaatgatg

SEQ ID NO: 86354 - DNA, 373 bp, Homo sapiens
ggttttagtataaaggtaatactaatttcatgaaatgaattgagaagtgttccctcctcttctattttctggaagagattctacagaatttatattaatgcttctttaaacatttggtcaactgaaccagtgaaatcaccaggcctgagattttttcatgaatccagttatgaattcaatttgcttaatagtgataggataattcaaattatttatttcatattggatgagtctgggcagtttgttgttttttgaggaatgggtccattttatctaagttgcaaaatctatgtatgaagagttgtttatggtattcctttactatccttttgatgtctgtagagtctaaatgatgtccctgctaatctgtgac

SEQ ID NO: 86355 - DNA, 2502 bp, Homo sapiens
catgtgcgaggatatctgctaggcactgcggactctattccagcgcacagtaccttctctgtcccacgggaaattactgatatagtttttaaaattgagctgtattttcaagcagctttgcttggaatcattgatactgcaatgccaccttactttgccatggaaaatgcagagaatcataagatcaaagcttatactcaacttaaactttcaggtcttttgccatctgcatattggattggacaagctgttgttgatatccccttattttttatcattcttattttgatgctaggaagcttattggcatttcattatggattatatttttatactgtaaagttccttgctgtggttttttgccttattggttatgttccatcagttattctgttcacttatattgcttctttcacctttaagaaaattttaaataccaaagaattttggtcatttatctattctgtggcagcgttggcttgtattgcaatcactgaaataactttctttatgggatacacaattgcaactattcttcattatgccttttgtatcatcattccaatctatccacttctaggttgcctgatttctttcataaagatttcttggaagaatgtacgaaaaaatgtggacacctataatccatgggataggctttcagtagctgttatatcgccttacctgcagtgtgtactgtggattttcctcttacaatactatgagaaaaaatatgggggcagatcaataagaaaagatccctttttcagaaacctttcaacgaagtctaaaaataggaagcttccagaaccaccagacaatgaggatgaagatgaagatgtcaaagctgaaagactaaaggtcaaagagctgatgggttgccagtgttgtgaggagaaaccatccattatggtcagcaatttgcataaagaatatgatgacaagaaagattttcttctttcaagaaaagtaaagaaagtggcaactaaatacatctctttctgtgtgaaaaaaggagagatcttaggactattgggtccaaatggtgctggcaaaagcacaattattaatattctggttggtgatattgaaccaacttcaggccaggtatttttaggagattattcttcagagacaagtgaagatgatgattcactgaagtgtatgggttactgtcctcagataaaccctttgtggccagatactacattgcaggaacattttgaaatttatggagctgtcaaaggaatgagtgcaagtgacatgaaagaagtcataagtcgaataacacatgcacttgatttaaaagaacatcttcagaagactgtaaagaaactacctgcaggaatcaaacgaaagttgtgttttgctctaagtatgctagggaatcctcagattactttgctagatgaaccatctacaggtatggatcccaaagccaaacagcacatgtggtgagcaattcgaactgcatttaaaaacagaaagcgggctgctattctgaccactcactatatggaggaggcagaggctgtctgtgatcgagtagctatcatggtgtctgggcagttaagatgtatcggaacagtacaacatctaaagagtaaatttggaaaaggctactttttggaaattaaattgaaggactggatagaaaacctagaagtagaccgccttcaaagagaaattcagtatattttcccaaatgcaagccgtcaggaaagtttttcttctattttggcttataaaattcctaaggaagatgttcagtccctttcacaatctttttttaagctggaagaagctaaacatgcttttgccattgaagaatatagcttttctcaagcaacattggaacaggtttttgtagaactcactaaagaacaagaggaggaagataatagttgtggaactttaaacagcacactttggtgggaacgaacacaagaagatagagtagtattttgaatttgtattgttcggtctgcttactgggacttctttctttttcacttaattttaactttggtttaaaaagttttttattggaatggtaactggagaaccaagaacgcacttgaaatttttctaagctccttaattgaaatgctgtggttgtgtgttttgctcttctttaaataaaacgtatgtataattaagtgaagctgcatgtttgtattgaagtatattgaactatatagtttgtatgtcatctttttcaccattcaaaaacagtgcttctgaatttgtgatttaaaggaattgtaatagaatagttttatttttaagttatctttaagtttatgccatcttcttaaataagtacgtaatgttccaatctaaataaaaaactaatacataactaatgcatagaaaagatacataaagcaatgggaaagtttcttgcttctcctttttaatttctaaaaaagccactttgaatggaagttgtcatccgtaaaagctgaagtgtaagcactaggaaatctcaatatagagatt

SEQ ID NO: 86356 - DNA, 2708 bp, Homo sapiens
ggcaaaaagagtgagactctgtccaataccacatcaataccatatccaaaaccaaaaacaaaacattagccaggcatggtggtgtgcacctgtaatccagcctgggtgacagagtaagactttgcctcacacacacacacacaaaagtggatataaagtgattcatgtgggatccacaacactttaatttatagtttgcctcagggctattataattccccaggcctctatagtacagtcttaagagatctggagaacctggatatactatagaatattaaattcctttatttcattgacaacatcatgttgactgggatggatgagtaagaggaggaaggtacactagaggctttggtaaaacatcttctctccagaggggtgaagataaataaaccttacagagattcagaagtggccactgcagtgaagttttacaggtctagtggttaggggcatccagggggtgtcccttccaatgtgaaagacaaactgttgcatctttgcatcctcatgcaagggaagggaagcacactgcctggggtgagccctgttttgagtttcttgacatcaccattcctacatgtaggtgctattgctttgacccacacttctaggtgacataggaggatgccagctttgagtggagcctccacaggaaaggacactgcagcagatccaggccatggcgcagtcaccatccttcagaccccctggtgctgaaagtgccagtggtggggtaagatttggggtggagctgaaccaagcaccagtaggagagtcacagtggagggcctgggattctggagtaaggccatgtcatccacagcacagaaatatgccccatccaaagcagagaaatatgttggaagcaacttttggcatgttactgtaggccctgataagatagaatgcttgaccatgggacacaaaacaaccatgtgattccaagtgcccctacgaattagcatctgtgtaactcatgaagtcatacattggacatgcccaacagcatccatcatgagatggaaaagtttcttgtgagttgagcctgaatcccatgttaacatccccagaaaacacccaaacctgaaatggccctgaacaaccaagcacaagcactgaaattagccagccttccccatgggtcagcccaggccgggtaggatgggtacataaatggagcaaacacagtggcagggatgaggctacctatgggtccaacagtactgactccctcctaccaaggtagatccagacactgccacctctaaatgtcctactcatcagcatttgaacccaatgatcttccctggtagggctctatttctttaggtgaccaaccagaccctaagtgaggagttgactacattgcactccttccatcctggaagggccagaggttcatcttcacagggataggcacctattccataggtgggttttcctgtcctgctctcagaccctcagccagcaccactctctgggggctgttgatattcctgatccacaggcttggcactgctctccgtgcagtatcttcgtgggggacccacttgacagcgaaggaggtgcagtgtggccatgctgtgggacccactgggtcctatcaccatctgcaccaaccaagggctcctggaccataaagaatgttgaaaagagcttctataggcacagctcaacgccagcttgcaggaagcactcctgcgggtgggagggtgccatctttcaggacatggtgcattttaaaaatcaaagacatctctacagttctgtaatctcagtaggaagaacacgtgggtccagataccaaggggtggaagtggatgtggctccatatcccattccttcaactcacctgtcgtgggattttgcacttctctcccaaaaccaccactctgcagggtagaaggtcctggattctaaaggagggtacccttaaaaggggacaaatgagtgcccattgaactgcacattacagctgccacaggggaattggacagtatgtgtccagagaccagcgggtgagaagaggagtcccctcctctccaggcacaggtaatagatcctgatccccaggaggaggcatggctgctgtcacacaatgagggtaggaggagttcgtgtggaacccagggatccccttgggggcctcctggttccccttgtcccattgtaagtgtgaggagaatcgtccagccacccaacctgagagggtttgatttccaagagcccagacccctcaggaaggaagatttcagtcgcatttccaggtaatttcccaaggcctcgttcctgtgctctgacatcctcagcagcattggtgcagaggccctacttctctcaggctgttcccagcgggtgatgggtcacaccagggacaccaaagcaggaccattcctgggacacagaggactcctttgatggccaatagtggctggaggactcttccacggccttgatcaactctccttagattacctgtgttctagaatgcatccaaaacaccttctctccttctgcccatcacttgggggcacacttgcatctcagtctattgccttttccagagttgtaatgtaaaaatgagatcatttctgccttgattgtaattgtaatctgcccaggtctggatcagggccacggctcccgagaacagcaggaggagggttcgggactccatgacccgcaaccttggcgtctgggcc

SEQ ID NO: 86357 - DNA, 341 bp, Homo sapiens
ggtggtatagctaataaatcattgccaaatctaaagttgtgaagatgtatccctatagtttccctgaaggttttatagctttagctcttatatttagaaatttgatatattttgagttaatttttgcatataatgtgaggtagaggtctaaattcatccttttgcatgtagataaccagttgtctaagtactatttgttaaagactctattaactactcataaaatgaccttaataactttgtcacaaatgaattgaccacagtgtctgagtttatttccaggctctccatcttttccattaatcactgtgtgtattcttatttgattatcacactgcttt

SEQ ID NO: 86358 - DNA, 371 bp, Homo sapiens
caaaacagtatggatgggatagaattaaatgtccagaaataaacttatatatcaaatagccaattgattattcagtggactagcctcttcaacaactattcagtggtaccaagactattcagcggaatagtctcttcaacaactggcatttgaacagttggttatccacatgcaaaacagtgaagttggacccctgtttcacatctacacaaatattaaccaaaaattgataaaatacctacatgaaagggctaaaactataaaattcctagaagaatacataggaataaatcttcatgtcgttggattaggccacagtttcttagctgtgataccaaaaagtacgtcgacgcggccgcgaattccagatc

SEQ ID NO: 86359 - DNA, 381 bp, Homo sapiens
ttcctttaggaggagtcttcaaaaagtttgtggaaaattggaattaaaaaataaacacaaaaggtacaaactttatttctcaacataagctcaataatgttgaagacacttttgtaagcagtgataccagccatttagtctatccttgtagaactgagcattctggaatgtaaccatgtcgaaacagtcttttttacattatcaactaaagaaaaatgggttctctttaaatatgtttttaagattaagaaacaaaaagcagccagaaggagccaaatcaggactttaaggtaaatgcctaatttccaactgaaactcttgagaaatttccctcttttgaggagaggaatgagcaggaacattgtcatggtggaggactct

SEQ ID NO: 86360 - DNA, 14887 bp, Homo sapiens
cagcggtgcgagctccaggcccatgcactgaggaggcggaaacaaggggagcccccagagctccatcaagccccctccaaaggctcccctacccggtccacgccccccaccccccctccccgcctcctcccaattgtgcatttttgcagccggaggcggctccgagatggggctgtgagcttcgcccggggagggggaaagagcagcgaggagtgaagcgggggggtggggtgaagggtttggatttcggggcagggggcgcacccccgtcagcaggccctccccaaggggctcggaactctacctcttcacccacgcccctggtgcgctttgccgaaggaaagaataagaacagagaaggaggagggggaaaggaggaaaagggggaccccccaactggggggggtgaaggagagaagtagcaggaccagaggggaaggggctgctgcttgcatcagcccacaccatgctgaccccgccgttgctcctgctgctgcccctgctctcagctctggtcgcggcggctatcgacgcccctaagacttgcagccccaagcagtttgcctgcagagatcaaataacctgtatctcaaagggctggcggtgcgacggtgagagggactgcccagacggatctgacgaggcccctgagatttgtccacagagtaaggcccagcgatgccagccaaacgagcataactgcctgggtactgagctgtgtgttcccatgtcccgcctctgcaatggggtccaggactgcatggacggctcagatgaggggccccactgccgagagctccaaggcaactgctctcgcctgggctgccagcaccattgtgtccccacactcgatgggcccacctgctactgcaacagcagctttcagcttcaggcagatggcaagacctgcaaagattttgatgagtgctcagtgtacggcacctgcagccagctatgcaccaacacagacggctccttcatatgtggctgtgttgaaggatacctcctgcagccggataaccgctcctgcaaggccaagaacgagccagtagaccggccccctgtgctgttgatagccaactcccagaacatcttggccacgtacctgagtggggcccaggtgtctaccatcacacctacgagcacgcggcagaccacagccatggacttcagctatgccaacgagaccgtatgctgggtgcatgttggggacagtgctgctcagacgcagctcaagtgtgcccgcatgcctggcctaaagggcttcgtggatgagcacaccatcaacatctccctcagtctgcaccacgtggaacagatggccatcgactggctgacaggcaacttctactttgtggatgacatcgatgataggatctttgtctgcaacagaaatggggacacatgtgtcacattgctagacctggaactctacaaccccaagggcattgccctggaccctgccatggggaaggtgtttttcactgactatgggcagatcccaaaggtggaacgctgtgacatggatgggcagaaccgcaccaagctcgtcgacagcaagattgtgtttcctcatggcatcacgctggacctggtcagccgccttgtctactgggcagatgcctatctggactatattgaagtggtggactatgagggcaagggccgccagaccatcatccagggcatcctgattgagcacctgtacggcctgactgtgtttgagaattatctctatgccaccaactcggacaatgccaatgcccagcagaagacgagtgtgatccgtgtgaaccgctttaacagcaccgagtaccaggttgtcacccgggtggacaagggtggtgccctccacatctaccaccagaggcgtcagccccgagtgaggagccatgcctgtgaaaacgaccagtatgggaagccgggtggctgctctgacatctgcctgctggccaacagccacaaggcgcggacctgccgctgccgttccggcttcagcctgggcagtgacgggaagtcatgcaagaagccggagcatgagctgttcctcgtgtatggcaagggccggccaggcatcatccggggcatggatatgggggccaaggtcccggatgagcacatgatccccattgaaaacctcatgaacccccgagccctggacttccacgctgagaccggcttcatctactttgccgacaccaccagctacctcattggccgccagaagattgatggcactgagcgggagaccatcctgaaggacggcatccacaatgtggagggtgtggccgtggactggatgggagacaatctgtactggacggacgatgggcccaaaaagacaatcagcgtggccaggctggagaaagctgctcagacccgcaagactttaatcgagggcaaaatgacacaccccagggctattgtggtggatccactcaatgggtggatgtactggacagactgggaggaggaccccaaggacagtcggcgtgggcggctggagagggcgtggatggatggctcacaccgagacatctttgtcacctccaagacagtgctttggcccaatgggctaagcctggacatcccggctgggcgcctctactgggtggatgccttctacgaccgcatcgagacgatactgctcaatggcacagaccggaagattgtgtatgaaggtcctgagctgaaccacgcctttggcctgtgtcaccatggcaactacctcttctggactgagtatcggagtggcagtgtctaccgcttggaacggggtgtaggaggcgcaccccccactgtgacccttctgcgcagtgagccggccccccatctttgagatccgaaatgtatgatgcccagcaccagcaagttggctccaacaaatgccgggtgaacaatgccggctgcagcagcctgtgcttggccacccctgggagccgccagtgcgcctgtgctgaggaccaggtgttggacgcagacggcgtcacttgcttggcgaacccatcctacgtgcctccaccccagtgccagccaggcgagtttgcctgtgccaacagccgctgcatccaggagcgctggaagtgtgacggagacaacgattgcctggacaacagtgatgaggccccagccctctgccatcagcacacctgcccctcggaccgattcaagtgcgagaacaaccggtgcatccccaaccgctggctctgcgacggggacaatgactgtgggaacagtgaagatgagtccaatgccacttgttcagcccgcacctgcccccccaaccagttctcctgtgccagtggccgctgcatccccatctcctggacgtgtgatctggatgacgactgtggggaccgctctgatgagtctgcttcgtgtgcctatcccacctgcttccccctgactcagtttacctgcaacaatggcagatgtatcaacatcaactggagatgcgacaatgacaatgactgtggggacaacagtgacgaagccggctgcagccactcctgttctagcacccagttcaagtgcaacagcgggcgttgcatccccgagcactggacctgcgatggggacaatgactgcggagactacagtgatgagacacacgccaactgcaccaaccaggccacgaggccccctggtggctgccacactgatgagttccagtgccggctggatggactatgcatccccctgcggtggcgctgcgatggggacactgactgcatggactccagcgatgagaagagctgtgagggagtgacccacgtctgcgatcccagtgtcaagtttggctgcaaggactcagctcggtgcatcagcaaagcgtgggtgtgtgatggcgacaatgactgtgaggataactcggacgaggagaactgcgagtccctggcctgcaggccaccctcgcacccttgtgccaacaacacctcagtctgcctgccccctgacaagctgtgtgatggcaacgacgactgtggcgacggctcagatgagggcgagctctgcgaccagtgctctctgaataacggtggctgcagccacaactgctcagtggcacctggcgaaggcattgtgtgttcctgccctctgggcatggagctggggcccgacaaccacacctgccagatccagagctactgtgccaagcatctcaaatgcagccaaaagtgcgaccagaacaagttcagcgtgaagtgctcctgctacgagggctgggtcctggaacctgacggcgagagctgccgcagcctggaccccttcaagccgttcatcattttctccaaccgccatgaaatccggcgcatcgatcttcacaaaggagactacagcgtcctggtgcccggcctgcgcaacaccatcgccctggacttccacctcagccagagcgccctctactggaccgacgtggtggaggacaagatctaccgcgggaagctgctggacaacggagccctgactagtttcgaggtggtgattcagtatggcctggccacacccgagggcctggctgtagactggattgcaggcaacatctactgggtggagagtaacctggatcagatcgaggtggccaagctggatgggaccctccggaccaccctgctggccggtgacattgagcacccaagggcaatcgcactggatccccgggatgggatcctgttttggacagactgggatgccagcctgccccgcattgaggcagcctccatgagtggggctgggcgccgcaccgtgcaccgggagaccggctctgggggctggcccaacgggctcaccgtggactacctggagaagcgcatcctttggattgacgccaggtcagatgccatttactcagcccgttacgacggctctggccacatggaggtgcttcggggacacgagttcctgtcgcacccgtttgcagtgacgctgtacgggggggaggtctactggactgactggcgaacaaacacactggctaaggccaacaagtggaccggccacaatgtcaccgtggtacagaggaccaacacccagccctttgacctgcaggtgtaccacccctcccgccagcccatggctcccaatccctgtgaggccaatgggggccagggcccctgctcccacctgtgtctcatcaactacaaccggaccgtgtcctgcgcctgcccccacctcatgaagctccacaaggacaacaccacctgctatgagtttaagaagttcctgctgtacgcacgtcagatggagatccgaggtgtggacctggatgctccctactacaactacatcatctccttcacggtgcccgacatcgacaacgtcacagtgctagactacgatgcccgcgagcagcgtgtgtactggtctgacgtgcggacacaggccatcaagcgggccttcatcaacggcacaggcgtggagacagtcgtctctgcagacttgccaaatgcccacgggctggctgtggactgggtctcccgaaacctgttctggacaagctatgacaccaataagaagcagatcaatgtggcccggctggatggctccttcaagaacgcagtggtgcagggcctggagcagccccatggccttgtcgtccaccctctgcgtgggaagctctactggaccgatggtgacaacatcagcatggccaacatggatggcagcaatcgcaccctgctcttcagtggccagaagggccccgtgggcctggctattgacttccctgaaagcaaactctactggatcagctccgggaaccataccatcaaccgctgcaacctggatgggagtgggctggaggtcatcgatgccatgcggagccagctgggcaaggccaccgccctggccatcatgggggacaagctgtggtgggctgatcaggtgtcggaaaagatgggcacatgcagcaaggctgacggctcgggctccgtggtccttcggaacagcaccaccctggtgatgcacatgaaggtctatgacgagagcatccagctggaccataagggcaccaacccctgcagtgtcaacaacggtgactgctcccagctctgcctgcccacgtcagagacgacccgctcctgcatgtgcacagccggctatagcctccggagtggccagcaggcctgcgagggcgtaggttcctttctcctgtactctgtgcatgagggaatcaggggaattcccctggatcccaatgacaagtcagatgccctggtcccagtgtccgggacctcgctggctgtcggcatcgacttccacgctgaaaatgacaccatctactgggtggacatgggcctgagcacgatcagccgggccaagcgggaccagacgtggcgtgaagacgtggtgaccaatggcattggccgtgtggagggcattgcagtggactggatcgcaggcaacatctactggacagaccagggctttgatgtcatcgaggtcgcccggctcaatggctccttccgctacgtggtgatctcccagggtctagacaagccccgggccatcaccgtccacccggagaaagggtacttgttctggactgagtggggtcagtatccgcgtattgagcggtctcggctagatggcacggagcgtgtggtgctggtcaacgtcagcatcagctggcccaacggcatctcagtggactaccaggatgggaagctgtactggtgcgatgcacggacagacaagattgaacggatcgacctggagacaggtgagaaccgcgaggtggttctgtccagcaacaacatggacatgttttcagtgtctgtgtttgaggatttcatctactggagtgacaggactcatgccaacggctctatcaagcgcgggagcaaagacaatgccacagactccgtgcccctgcgaaccggcatcggcgtccagcttaaagacatcaaagtcttcaaccgggaccggcagaaaggcaccaacgtgtgcgcggtggccaatggcgggtgccagcagctgtgcctgtaccggggccgtgggcagcgggcctgcgcctgtgcccacgggatgctggctgaagacggagcatcgtgccgcgagtatgccggctacctgctctactcagagcgcaccattctcaagagtatccacctgtcggatgagcgcaacctcaatgcgcccgtgcagcccttcgaggaccctgagcacatgaagaacgtcatcgccctggcctttgactaccgggcaggcacctctccgggcacccccaatcgcatcttcttcagcgacatccactttgggaacatccaacagatcaacgacgatggctccaggaggatcaccattgtggaaaacgtgggctccgtggaaggcctggcctatcaccgtggctgggacactctctattggacaagctacacgacatccaccatcacgcgccacacagtggaccagacccgcccaggggccttcgagcgtgagaccgtcatcactatgtctggagatgaccacccacgggccttcgttttggacgagtgccagaacctcatgttctggaccaactggaatgagcagcatcccagcatcatgcgggcggcgctctcgggagccaatgtcctgacccttatcgagaaggacatccgtacccccaatggcctggccatcgaccaccgtgccgagaagctctacttctctgacgccaccctggacaagatcgagcggtgcgagtatgacggctcccaccgctatgtgatcctaaagtcagagcctgtccaccccttcgggctggccgtgtatggggagcacattttctggactgactgggtgcggcgggcagtgcagcgggccaacaagcacgtgggcagcaacatgaagctgctgcgcgtggacatcccccagcagcccatgggcatcatcgccgtggccaacgacaccaacagctgtgaactctctccatgccgaatcaacaacggtggctgccaggacctgtgtctgctcactcaccagggccatgtcaactgctcatgccgagggggccgaatcctccaggatgacctcacctgccgagcggtgaattcctcttgccgagcacaagatgagtttgagtgtgccaatggcgagtgcatcaacttcagcctgacctgcgacggcgtcccccactgcaaggacaagtccgatgagaagccatcctactgcaactcccgccgctgcaagaagactttccggcagtgcagcaatgggcgctgtgtgtccaacatgctgtggtgcaacggggccgacgactgtggggatggctctgacgagatcccttgcaacaagacagcctgtggtgtgggcgagttccgctgccgggacgggacctgcatcgggaactccagccgctgcaaccagtttgtggattgtgaggacgcctcagatgagatgaactgcagtgccaccgactgcagcagctacttccgcctgggcgtgaagggcgtgctcttccagccctgcgagcggacctcactctgctacgcacccagctgggtgtgtgatggcgccaatgactgtggggactacagtgatgagcgcgactgcccaggtgtgaaacgccccagatgccctctgaattacttcgcctgccctagtgggcgctgcatccccatgagctggacgtgtgacaaagaggatgactgtgaacatggcgaggacgagacccactgcaacaagttctgctcagaggcccagtttgagtgccagaaccatcgctgcatctccaagcagtggctgtgtgacggcagcgatgactgtggggatggctcagacgaggctgctcactgtgaaggcaagacgtgcggcccctcctccttctcctgccctggcacccacgtgtgcgtccccgagcgctggctctgtgacggtgacaaagactgtgctgatggtgcagacgagagcatcgcagctggttgcttgtacaacagcacttgtgacgaccgtgagttcatgtgccagaaccgccagtgcatccccaagcacttcgtgtgtgaccacgaccgtgactgtgcagatggctctgatgagtcccccgagtgtgagtacccgacctgcggccccagtgagttccgctgtgccaatgggcgctgtctgagctcccgccagtgggagtgtgatggcgagaatgactgccacgaccagagtgacgaggctcccaagaacccacactgcaccagcccagagcacaagtgcaatgcctcgtcacagttcctgtgcagcagtgggcgctgtgtggctgaggcactgctctgcaacggccaggatgactgtggcgacagctcggacgagcgtggctgccacatcaatgagtgtctcagccgcaagctcagtggctgcagccaggactgtgaggacctcaagatcggcttcaagtgccgctgtcgccctggcttccggctgaaggatgacggccggacgtgtgctgatgtggacgagtgcagcaccaccttcccctgcagccagcgctgcatcaacacccatggcagctataagtgtctgtgtgtggagggctatgcaccccgcggcggcgacccccacagctgcaaggctgtgactgacgaggaaccgtttctgatcttcgccaaccggtactacctgcgcaagctcaacctggacgggtccaactacacgttacttaagcagggcctgaacaacgccgttgccttggattttgactaccgagagcagatgatctactggacagatgtgaccacccagggcagcatgatccgaaggatgcaccttaacgggagcaatgtgcaggtcctacaccgtacaggcctcagcaaccccgatgggctggctgtggactgggtgggtggcaacctgtactggtgcgacaaaggccgggacaccatcgaggtgtccaagctcaatggggcctatcggacggtgctggtcagctctggcctccgtgagcccagggctctggtggtggatgtgcagaatgggtacctgtactggacagactggggtgaccattcactgatcggccgcatcggcatggatgggtccagccgcagcgtcatcgtggacaccaagatcacatggcccaatggcctgacgctggactatgtcactgagcgcatctactgggccgacgcccgcgaggactacattgaatttgccagcctggatggctccaatcgccacgttgtgctgagccaggacatcccgcacatctttgcactgaccctgtttgaggactacgtctactggaccgactgggaaacaaagtccattaaccgagcccacaagaccacgggcaccaacaaaacgctcctcatcagcacgctgcaccggcccatggacctgcatgtcttccatgccctgcgccagccagacgtgcccaatcacccctgcaaggtcaacaatggtggctgcagcaacctgtgcctgctgtcccccgggggagggcacaaatgtgcctgccccaccaacttctacctgggcagcgatgggcgcacctgtgtgtccaactgcacggctagccagtttgtatgcaagaacgacaagtgcatccccttctggtggaagtgtgacaccgaggacgactgcggggaccactcagacgagcccccggactgccctgagttcaagtgccggcccggacagttccagtgctccacaggtatctgcacaaaccctgccttcatctgcgatggcgacaatgactgccaggacaacagtgacgaggccaactgtgacatccacgtctgcttgcccagtcagttcaaatgcaccaacaccaaccgctgtattcccggcatcttccgctgcaatgggcaggacaactgcggagatggggaggatgagagggactgccccgaggtgacctgcgcccccaaccagttccagtgctccattaccaaacggtgcatcccccgggtctgggtctgcgaccgggacaatgactgtgtggatggcagtgatgagcccgccaactgcacccagatgacctgtggtgtggacgagttccgctgcaaggattcgggccgctgcatcccagcgcgttggaagtgtgacggagaggatgactgtggggatggctcggatgagcccaaggaagagtgtgatgaacgcacctgtgagccataccagttccgctgcaagaacaaccgctgcgtgcccggccgctggcagtgcgactacgacaacgattgcggtgacaactccgatgaagagagctgcacccctcggccctgctccgagagtgagttctcctgtgccaacggccgctgcatcgcggggcgctggaaatgcgatggagaccacgactgcgcggacggctcggacgagaaagactgcaccccccgctgtgacatggaccagttccagtgcaagagcggccactgcatccccctgcgctggcgctgtgacgcagacgccgactgcatggacggcagcgacgaggaggcctgcggcactggcgtgcggacctgccccctggacgagttccagtgcaacaacaccttgtgcaagccgctggcctggaagtgcgatggcgaggatgactgtggggacaactcagatgagaaccccgaggagtgtgcccggttcgtgtgccctcccaaccggcccttccgttgcaagaatgaccgcgtctgtctgtggatcgggcgccaatgcgatggcacggacaactgtggggatgggactgatgaagaggactgtgagccccccacagcccacaccacccactgcaaagacaagaaggagtttctgtgccggaaccagcgctgcctctcctcctccctgcgctgcaacatgttcgatgactgcggggacggctctgacgaggaggactgcagcatcgaccccaagctgaccagctgcgccaccaatgccagcatctgtggggacgaggcacgctgcgtgcgcaccgagaaagcggcctactgtgcctgccgctcgggcttccacaccgtgcccggccagcccggatgccaagacatcaacgagtgcctgcgcttcggcacctgctcccagctctgcaacaacaccaagggcggccacctctgcagctgcgctcggaacttcatgaagacgcacaacacctgcaaggccgaaggctctgagtaccaggtcctgtacatcgctgatgacaatgagatccgcagcctgttccccggccacccccattcggcttacgagcaggcattccagggtgacgagagtgtccgcattgatgctatggatgtccatgtcaaggctggccgtgtctattggaccaactggcacacgggcaccatctcctaccgcagcctgccacctgctgcgcctcctaccacttccaaccgccaccggcgacagattgaccggggtgtcacccacctcaacatttcagggctgaagatgcccagaggcatcgccatcgactgggtggccggaaacgtgtactggaccgactcgggccgagatgtgattgaggtggcgcagatgaagggcgagaaccgcaagacgctcatctcgggcatgattgacgagccccacgccattgtggtggacccactgagggggaccatgtactggtcagactggggcaaccaccccaagattgagacggcagcgatggatgggacgcttcgggagacactggtgcaggacaacattcagtggcccacaggcctggccgtggattatcacaatgagcggctgtactgggcagacgccaagctttcagtcatcggcagcatccggctcaatggcacggaccccattgtggctgctgacagcaaacgaggcctaagtcaccccttcagcatcgacgtctttgaggattacatctatggtgtcacctacatcaataatcgtgtcttcaagatccataagtttggccacagccccttggtcaacctgacagggggcctgagccacgcctctgacgtggtcctttaccatcagcacaagcagcccgaagtgaccaacccatgtgaccgcaagaaatgcgagtggctctgcctgctgagccccagtgggcctgtctgcacctgtcccaatgggaagcggctggacaacggcacatgcgtgcctgtgccctctccaacgccccccccagatgctccccggcctggaacctgtaacctgcagtgcttcaacggtggcagctgtttcctcaatgcacggaggcagcccaagtgccgctgccaaccccgctacacgggtgacaagtgtgaactggaccagtgctgggagcactgtcgcaatgggggcacctgtgctgcctccccctctggcatgcccacgtgccggtgccccacgggcttcacgggccccaaatgcacccagcaggtgtgtgcgggctactgtgccaacaacagcacctgcactgtcaaccagggcaaccagccccagtgccgatgcctacccggcttcctgggcgaccgctgccagtaccggcagtgctctggctactgtgagaactttggcacatgccagatggctgctgatggctcccgacaatgccgctgcactgcctactttgagggatcgaggtgtgaggtgaacaagtgcagccgctgtctcgaaggggcctgtgtggtcaacaagcagagtggggatgtcacctgcaactgcacggatggccgggtggcccccagctgtctgacctgcgtcggccactgcagcaatggcggctcctgtaccatgaacagcaaaatgatgcctgagtgccagtgcccaccccacatgacagggccccggtgtgaggagcacgtcttcagccagcagcagccaggacatatagcctccatcctaatccctctgctgttgctgctgctgctggttctggtggccggagtggtattctggtataagcggcgagtccaaggggctaagggcttccagcaccaacggatgaccaacggggccatgaacgtggagattggaaaccccacctacaagatgtacgaaggcggagagcctgatgatgtgggaggcctactggacgctgactttgccctggaccctgacaagcccaccaacttcaccaaccccgtgtatgccacactctacatggggggccatggcagtcgccactccctggccagcacggacgagaagcgagaactcctgggccggggccctgaggacgagataggggaccccttggcatagggccctgccccgtcggactgcccccagaaagcctcctgccccctgccggtgaagtccttcagtgagcccctccccagccagcccttccctggccccgccggatgtataaatgtaaaaatgaaggaattacattttatatgtgagcgagcaagccggcaagcgagcacagtattatttctccatcccctccctgcctgctccttggcacccccatgctgccttcagggagacaggcagggagggcttggggctgcacctcctaccctcccaccagaacgcaccccactgggagagctggtggtgcagccttcccctccctgtataagacactttgccaaggctctcccctctcgccccatccctgcttgcccgctcccacagcttcctgagggctaattctgggaagggagagttctttgctgcccctgtctggaagacgtggctctgggtgaggtaggcgggaaaggatggagtgttttagttcttgggggaggccaccccaaaccccagccccaactccaggggcacctatgagatggccatgctcaacccccctcccagacaggccctccctgtctccagggcccccaccgaggttcccagggctggagacttcctctggtaaacattcctccagcctcccctcccctggggacgccaaggaggtgggccacacccaggaagggaaagcgggcagccccgttttggggacgtgaacgttttaataatttttgctgaattctttacaactaaataacacagatattcttataaataaaattgt

SEQ ID NO: 86361 - DNA, 3585 bp, Homo sapiens
aagaaattgcaggtgctgcagcagagaacatgttaggcagtttgctgtgcctcccaggttcagggtcagtgcttcttgacccctgcactggttctaccatatcagagacaacaagtgaagcttggagtgtagaggtattgccaagtgactcagaggccccagacctaaagcaggaggagcgtctgcaagaactggagagctgttctggactgggtagcacatctgatgatacggatgtcagggaggtcagttcccgccccagcacaccaggcctcagtgttgtgtccggcataagtgcaacctctgaggatattcccaataagattgaagacctgagatctgagtgcagctctgattttgggggtaaagattctgtcactagtccagacatggatgaaataactcacgattttctttatatacttcagccaaaacaacattttcaacacattgaagcagaagcagacatgagaatccagctgtcttctagtgcccaccagctgacctctcctccttctcagtcagagtctctgctggccatgtttgatccactgtcttcacatgaaggggcttctgctgtggtaaggccaaaggttcactatgctaggccatcgcatccaccaccagatcccccaatcctggaaggagctgtgggaggaaatgaggccaggttgccaaactttggttcccccatgttttaactcccagctgaaatggaggcattcaagcaaaggcattccttacccctgagagactagttcgaagcaggagctctgaatatagtatcttctgtccggagacccatgagtgaccccagctggaaccggcgtcccaggaaatgaagagcgagaactccctccagctgcagccattggtgctacttctttggtggctgcacctcattcatcatcttcatccccgagtaaggactcctcaagaggagagactgaagaacgcaaagatagcgatgatgagaaatcagacaggaacagaccttggtggagaaaacgttttgtttcagccatgcctaaagctcctataccatttagaaagaaagaaaaacaagaaaaagacaaagatgatctggggcctgacagattctcaacactcacagatgatcccagccctagactcagtgcacaagctcaggtggctgaggatattctggacaaatacaggaatgccattaaacggaccagccccagtgatggagcaatggcaaactatgaaagtacagaggttatgggtgatggtgaaagtgcacatgattctccccgtgacgaagcactgcagaacatctcggctgatgatctcccagactctgcaagccaagcagcccacccgcaggattcagctttctcttacagagatgcaaaaaagaaactgaggcttgctctttgctctgcggactctgttgccttcccagtgctgaccccattcaacaaggaatggtttaccagaccacacagacccagaagacaatgaaattgtatgcttcttaaaagttcaaatagctgaagcaattaatttacaagataagaatctaatggctcaacttcaagaaacaatgcgctgtgtgtgccgttttgataataggacttgtaggaaactgctggcttcgattgctgaggactacagaaaaagagccccatatattgcttatctcactcgttgtcgacaaggactacagaccacacaggctcacctggaaaggctattgcaaagagttttgcgggacaaagaagtggccaatcgatactttaccactgtctgtgtgagattactgcttgagagcaaagaaaagaagatcagggaattcattcaagactttcagaaactcaccgcagctgacgataaaactgctcaggtagaagattttctgcagtttctttatggtgcaatggcccaggatgtcatatggcaaaacgcgagtgaagaacagcttcaagatgcacagctggccattgagcgaagcgtgatgaaccggattttcaagctcgccttctaccctaatcaagatggggacatacttcgcgaccaggttcttcatgaacatatccagagattgtctaaagtagtgactgcaaatcacagagctcttcagataccagaggtttatcttcgagaagcaccatggccatctgcacaatcagaaatcaggacaataagtgcttataaaaccccccgggacaaagtgcagtgcatcctgagaatgtgctctacgattatgaacctcctgagcctggccaatgaggactctgtccctggagcggatgactttgttcctgtgttggtgtttgtgttgataaaggcaaatccaccctgtttgctgtctactgtgcagtatatcagtagcttttatgctagctgtctgtctggagaggagtcctattggtggatgcagttcacagcagcagtagaattcattaaaaccatcgatgaccgaaagtgaccaagaccaaggcccaccaaggcagcagactgttaatcagacaaacagatctctgagaaggtgcatcagctgctttgaaggctgaagattgttttgtatgatactgcacagcatcaggcattttaaagcagatctttactaaacaggttaatgagctaacaagcaggttctctcgtctttgggctctttcctttctgagttgcatattctattttcttgtccccaagtagagactagtactacaaaaagggaccacatttttcaagtatttctaagtataaaaaacaaaacaaaaatctcttaggaaatgtctagacctccattcttggattccctttctttccttttattttaaaaaagaacagtacccctcttttaagatgctgtcttacattaatgagcatctaatggaaagaaggtatgagttgcactgaggattagaatagtggtgcgttagtggcattatctataaatacactcacctaaattgaaagctaagaaggaaatgtaaatataatatatatttatatttgatgtaatatggacatctgcagattctaataaacaaggactattgctgatagtaggctgtgacatactgtcttgtgaaatggtttccttgacaaaatttaagctgagcttaaaagcaaaaaaacaaaaagtacacagaaatatttattaaaatgtaatacagtttattgaactttctaggtatggagtttgatggacagggctgcctttaatgagtgtgaaggtcactaagtcacttagacatctcaccgtggaagtttgtgagcctgcattaggagatagactgattaccatacatgacataaaaaggaacagtggatagctcatactttatggtggttcttctcctccgaaataatatactgcagaaatcccagacagagctccttacaaacctttaattgtaatatatttttgatgattattcacattgaatgcacagaccaagaattcagtgaatgtcattttttaaaaaactaatttgtattgtctgctctagtgatacaagttttactagtgataaactattttaatcaaccatactattcttatggaaaataatatctattttggcaggtttctgtgcctttatttccctcttg

SEQ ID NO: 86362 - DNA, 429 bp, Homo sapiens
  misc_feature (1)...(429): n = a,t,c or g
ncctgatccctgagtcctagacttgatcactcaattccagtcctcatcagtgggccctggtcgtgatcactgagccctgatctggatcactaggctctggtcctaactcagtcctggtctggatcgctgagtcttgatcctgatcactgggccatgttctggatcaatgagccctggccctgatcactgggccctggtcctgctaactatgctctggtcctgaccactgagcccttgtcccagtcaacagtcaataactgagctctggtcctagtcaatagtcaatcactgagccctggtcctgatcactgggtcctggtcctgatcactgggtcctgttcttatccctgaatcttggtcctgatcactgagccctggccctcatcactgggtcttgttcctaatcactgggctctggttctgaccaat

SEQ ID NO: 86363 - DNA, 350 bp, Homo sapiens
gcaaatttggtctggaagtcacattccttgctctgcaggtaatcatcagagacaaccaccaccatccggcggcacctaggggagagtgggcaggctgcaggtcctgtggcaacttagttcagcatatcccctgggaatagcttcaggaagggcccactgtgcccaggctggacagtgcacagctaggaggagatgcccagtatctggaccccagggcagggcttcatgcatccacgcacccaccccgtggccttctagccaacctcttttcgatgagctcactagcaatagaccagacacaggtgccaggcaggacatcgcggtcagacacacacaacttcagtcgatag

SEQ ID NO: 86364 - DNA, 539 bp, Homo sapiens
ctggagactagcgttaaccggcgtttcggccggttttatgaatgaagctatggctacagattccccaagaagacccagtcgttgtactggtggagttgtggttcgcccccaggctgtcacagagcagtcctacatggaaagtgttgtgacttttctgcaggatgttgtgccacaggcttacagtggaacacctctaacagaagaaaaggagaaaatagtctgggtcagatttgaaaatgcagatttaaatgatacatcaagaaatctggaatttcatgaaatacatagtactgggagtgaaccgcctttgttgattatgattggctacagtgatggaatgcaggtctggagcatccctatcagtggcgaagcacaagagctcttctctgttcgacatggcccaattcgagcggctagaatcttgcctgctccacagtttggtgctcaaaaatgtgataactttgctgaaaaaagacccctccttggtgtttgtaagagcattggatcttctggcacaagcccaccgtactgttgtgtgg

SEQ ID NO: 86365 - DNA, 1623 bp, Homo sapiens
ttttttttttttttgtaacagtttgtaaaacatttttattgtaaaaagttcgagaagccatttacgagccaaaaagtatcagaattaaataacacataatttttatagacacatttttctgtacaaagggctgatctttataggaattttaaatagataatctaaaaatcaatgtcactgattgcggaataggtctctctctcgaccgtctcaaggtggcatgcattctatgcagccagaagatgaggggtttgacatctgtgacgagcccgggcagtgagtctctggcgagagatttctcactttcttaataagattctgtcccggtggtgtcgcattctactgcgcttctatttaaagaaatctgtgttgagggatgcagttcagaagagtcatttaattgtgaggttctaggcagacagcttgagtcctgttcattttggaacctgggttcgtctttatgacatggattttcagcatgttctacagccgcatttatctcttgctttaaaaaccactttctagacgcatctgaaagagcagaagctttctttgctgatctcaaacggaactcttttccttcagcttccttccacttcttggcttcctcctccacatgcattatatccattctcctctgtttcctagagttgctactcctgtacattgtcgttgtagatcatcacattttgtttatgtaaagactgaatctgccagtcggtatttaggcatgcttgttcagcctttgccaaattttctttaatcaccttctgagtgtctggctctgggtttcacctgcttctatcagcttatgaaacatgtgttcttcaagatccacttttcgtctataggcatctgcatctgctcgcatttcttttgcaagagcttcttgattttcagtaagattcttctcataaagtctcttttgtgattcgagttccagctgtctcatttctaggtctctggctgtggcagcaatttctcgatctctcatatatacctttctcccaatttcatcatccagtcttcttagttccatttcctgttgatcttgctgaagcttcagaaaaacgccttcttgcagcatcttgtaagtgcatttcctttactttcagctctcttttcacagcagctagcctctgtctttgttgtatcattttctcctcctcttgtaagagcatttctcttcttgtttcttcagctttacgaagcagctcctgtttctggtaccaagcttcatcttcaactctttgctggtcgactttagcttgcatatcttcaactgtctgcctctctcttaagtaatccaattcatcattccttattctttctcgttcctgtgtttgatagtccacaataaactttggatattgattaaatactggatactgcccttttgtcagtgcaacaaaaacattaagcatgctgtctggatgaatgtcagtaggcgtggtctccatgagatgataaacttgtctaatcacaacatttatatccaggttattccgatggtgaaaaaaaaactcaaagtcatctttaagattacagctgagcagaggcgttctagaacatatgttgtaggctacaacagtcatcagaaggaaggaaggatggttggaaaag

SEQ ID NO: 86366 - DNA, 1909 bp, Homo sapiens
  misc_feature (1)...(1909): n = a,t,c or g
tgttaatatttgaagttttgctcacttttatttttcctagtagagcaggataaaaggagagacttagggtcttatttatttctttatacagatctgatagatagattcatttattattattattttttaactgcaagggtaattgtaaaatcatagtgtaaagtttgtgtggtgtttctgctttttgtaatgtttggaacttgcctctgcaggtaaaatcccagaggaatccaaagccctctctttattggctcctgctccaaccatgacaagtctgatgcctggtgcaggattgcttccaataccgaccccaaatcctttgactactcttggtgtttcacttagcagtttgggagctataccagcagcagcactagaccccaacattgcaacacttggagagataccacagccaccacttatgggaaacgtggatccttccaaaatagatgaaattaggagaacggtttatgttggaaatctgaattcccagacaacgacagctgatcaactacttgaattttttaaacaagttggagaagtgaagtttgtgcggatggcaggtgatgagactcagccaactcggtttgcttttgtggaatttgcagaccaaaattctgtaccaagggcccttgcttttaatggagttatgtttggagacaggccactgaaaataaatcactccaacaatgcaatagtaaaaccccctgagatgacacctcaggctgcagctaaggagttagaagaagtaatgaagcgagtacgagaagctcagtcatttatctcagcagctattgaaccagggtggctgcactcaacgagtttatgcaatgactttcttggatgtttctgaaggaggaggatgtacagagagtaggccccttgcactatatgtggtacattccacttgtgcctgattattaactgggatctttaattgttctgagcttacactgcaaagtgattttttcctcccagagtctggaaagagcaatgaaagaaaaggcggtcgatctcgttcccatactcgctcaaaatccaggtctagctcaaaatcccattctagaaggaaaagatcacaatcaaaacacaggagtagatcccataatagatcacgttcaagacagaaagacagacgtagatctaagagcccacataaaaaacgctctaaatcaagggagagacggaagtcaaggagtcgttcgcattcacgggacaagagaaaagacactcgagaaaagatcaaggaaaaggaaagagtgaaagagaaagacagggaaaaggagagagagagggaaaaggaacgtgaaaaagaaaaggaacggggtaaaaacaaagaccgggacaaggaacgggaaaaggaccgggaaaaagacaaggaaaaggacagagagagagaacgggaaaaagagcatgagaaggatcgagacaaagagaaggaaaaggaacaggacaaagaaaaggaacgagaaaaagacagatccaaagagatagatgaaaaaagaaagaaggataaaaaatccagaacaccacccaggagttacaatgcatcgcgaagatctcgtagttccagcagggaaaggcgtaggaggaggagcaggagttcttccagatcgccaagaacatcaaaaaccataaaaaggaaatcttctagatctccgtcccccaggagcagaaataagaaggataaaaagagagaaaaagaaagggaccacatcagtgaaagaagagagagagaacgttcaacgtctatgagaaagagttctaatgatagagatgggaaggagaagttggagaagaacagtacttccttnagagaaagagcncattaagaccngattcagtgtgaccaagaatngatacaggatcncccaggctgngaaacaatacacacattgggaatgtcgct

SEQ ID NO: 86367 - DNA, 1925 bp, Homo sapiens; identical to SEQ ID NO: 65855
  misc_feature (1)...(1925): n = a,t,c or g

SEQ ID NO: 86368 - DNA, 1534 bp, Homo sapiens
ggcacgagctacatttttgtgcaagagacccccagaggaagattagtcataattcgagtccaaggaagacggctaattctagcgatcaatgtttgtttcccattcagaagaagtagatggctgccctgtcattctagtttgtggatcccaggatgttggaaagtcaacatttaatagatacctgattaaccatttgttaaatagtcttccctgcgttgactatttggaatgtgatctgggacagacagaatttacccctcctggttgcatttctttgcttaatattacagaaccagttctgggaccacctttcactcacctgaggactccacagaagatggtatattatgggaaaccttcttgtaaaaacaactatgagaattatattgacatagtgaaatatgtgttcagcgcttacaagagagagtcccctctcatcgtcaacactatgggatgggtttcagaccaggggctcctgcttctcattgatctgatccgattgctgtctcccagccacgtggttcagttccgctctgaccacagtaaatatatgccagaccttaccccgcagtatgtagatgacatggatggcttgtacacaaaaagcaagaccaagatgagaaatcgacgtttcagactcgcagcatttgcagatgctttggaatttgctgatgaagaaaaagagagtccagttgagttcactggacataaactgataggtgtttatacagactttgcattcagaataactccaagaaatagagagtcacataacaaaattcttcgagatctgtccatcttgagttaccttagccagctgcagcccccgatggcccaaaccactttctcctttacatagcctgacaccctatcaggtccctttcaatgcagtcgcactccggattacccactctgatgtcgcccctacccatatactatatgctgtaaacgccagctgggttggtctttgcaagatccaggatgacgtcagaggatacacgaatgggcccatcctgcttgcccagactccaatctgtgactgcttgggctttggcatctgtagaggcattgacatggagaagcggctgtaccacatcctcacccctgtgcccccggaagagctaaggaccgtgaattgtctgctcgttggagctattgccattccacattgtgtccttaagtgccagcgtgggatcgaagggacagtaccttatgtcacaacggattacaattttaaacttcctggagcatcagagaaaattggagcaagagaacctgaggaggcacataaagagaaaccataccgaagacctaagttctgtcgaaaaatgaagtgatgctcgcgtttttaataagggaagaaactttcctaccagaaagctttgtctcaagcctgaccacaagagacatgatggagtttcatggccatgaatggtgcccttattaacaacagtgttttttgtgtaattcgtgaatgtcatatagtagtcttaagtttctcttttaaagctgcatgagctagaatttgttctaa

SEQ ID NO: 86369 - DNA, 445 bp, Homo sapiens; identical to SEQ ID NO: 66255

SEQ ID NO: 86370 - DNA, 1850 bp, Homo sapiens
gagcatctgcatttgacccctgctgccctgtttcttcctcccgagctgcaatctttggccatcaggccgctgctgctgccccaagtcaacctttatcatcaatagatggctatggatcaagcatggtttgcgcagccccaagcccccagccccctccacagccctctctctcatcatgtcgacattacatgccacccccttatgcctctttgacaaggccacttcatcatcaagcttctgcctgcccgcattctcatggaaaccccccatcctcagactcagcctccgcctcaagtggattatgttattcctcatcctgtacatgctttccattctcaaatatcttctcatgcaacatctcatcctgtggcacccccaccaccaactcacttagccagtacagctgcaccaatccctcagcatcttcctcctacacaccagccaatttcgcaccatattccagccacagcacctccagcacagagactgcatcctcatgaagtgatgcagaggatggaagttcaaaggaggaggatgatgcagcatccaacgcgggcacatgaacgccccccaccccatccacataggatgcacccaaactatggtcatgggcatcatattcatgtgcctcagactatgtcctcacatcctcgacaggctccagagaggtctgcctgggaactgggaattgaagctggagtgactgcagctacttatacacctggtgcattgcatcctcacttggcccattatcacgcacctcctcgacttcatcacttacaattaggagctcttcctttaatggttcctgatatggcaggctatcctcacatccgttacatttcatcaggattggatggaacatcattcagaggtcctttcaggggcaattttgaggaactgattcatttggaagaaagattaggcaatgtcaatcgtggagcatcccaggggacaattgaaagatgtacatatccacataaatacaaaaagaggaaactgcactgcaaacaagatggggaagaagggactgaggaagacacagaggaaaaatgtactatctgtttgtctattttagaggaaggtgaagatgtgagacgtcttccatgtatgcaccttttccaccaagtgtgtgttgaccaatggttgattaccaataagaagtgccccatatgcagagtggacattgaggcccagctgccaagtgaaagttgacaccatgtttcagaactcttgccctccctctcattcccatccttcctggtactgcagtcaaccaaagatggcatgacttacctgcgcagatttggaagcattgaacttagagtgctggctctgctatatggtacaactaatgctagacctacagtttatgtatacagttgattttgatgtatttataaaagcttttttttctagatttgacatttttctgtatcattttactgtatttttgcatggttccttgtattgcatttctttgcacatattatgggcttgtgaccctaaacttgcaggcaaggttagctgctttagtaagtagaattttgtggtctttttgttttttacatagtaccaagccttgataattatgaattttttatccattactaacctttaatttaatcaatcatgtactttagtttaatgtataaagatcctctacaaaatgataatattgtgtattaagacattccttaattaggacaaaatggctgctgtatatttactatatggagttctgagttaaataccatccttaatactgggaacagaatacaacccatataaatcagatgcaggtggtagtcacatcaccagagtgatcagtataaattttcttggtgtat

SEQ ID NO: 86371 - DNA, 413 bp, Homo sapiens
tgggaacacagagccaaactatatcaaacatacgtgaggggacttcaaaaagtttgtggaaaatggaattaaaacataaaaataaaaaatgtaaactttatttcttaacataagctccatcaagatcaggacacttttgtgagtgatgataccagtcatttaatccattcctgaaggatgagggtatctggagatctggagactagggataaaaaagaaccaagggtcctgggaatttaaccatgtcaatgtagtcttttttgactgaagaaaaatgggtgccccttaaagattttttaagattaggaaatgaagccagaaagagccaaattaggaccttagaggtggatgcctaataatgtcccattgaaattcctgtaaaattgcccttgtttgatgagaggaatgagcag

SEQ ID NO: 86372 - DNA, 5891 bp, Homo sapiens
  misc_feature (1)...(5891): n = a,t,c or g
gtgaatactgctatgcatgaggcaaaacttatggaagaatgtgacgagttggtagagatcatccagcagaggaagcaaatgatcgctgtcaaaatcaaagagacaaaggttatgaaactgagaaagttggcacagcaggttgctaattgccgccagtgtcttgaacggtcaacagtcctcatcaaccaagctgagcatatcctgaaagaaaatgaccaggcacggtttctacagtctgcaaaaaatattgctgagagggtcgctatggcaactgcatcttctcaagttctgattccagacatcaattttaatgatgcctttgaaaactttgctttagatttttccagagaaaagaaactgctagaggggttagattatttaacagccccaaacccaccatctatccgagaagaactctgtactgcctcccatgacaccattacagtccactggatctcggatgatgagttcagcatcagctcctatgagcttcagtacaccatattcactggccaggctaacttcatcagcctgtataattcagtagacagctggatgattgttcccaacattaaacagaaccattacacagtgcatggactccagagcgggactcgctacatcttcatcgttaaagccataaaccaagccggcagccggaacagtgaacctacccgactaaaaacaaacagccaaccctttaaattggatcccaaaatgactcacaagaagttgaagatctccaatgatggattgcagatggagaaggatgaaagctctctaaagaagagccacaccccagagaggtttagtggcacagggtgctatgtatatggtgtcttacacaactcagataattcataaatgtttatttctctctcctttccactgtctcacaggtatgcaattggcattgcctacaaatcagctccaaagaatgaatggattggcaagaatgcctcctcatgggtcttctctcgctgcaatagtaacttcgtggtgagacacaacaacaaggaaatgctggtggatgtgcccccacacctgaagcgtctgggtgtcctcctggattatgacaaccanatatgctgtctttctatgacccagctaactctctccaatcttcatacttttgatgtgaccttcaattcttccagtttgtccaacatttacaatctggaacaaatccctaatgatcctgtctggcttgcctgccccagattttattgattaccctgagcggcaggaatgcaactgcaggcctcaagaatccccttatgtttctgggatgaaaacctgtcattaagtttcaggagagtatataattcactggctctctagttcagcagttcttcccctcctacacctaagttagcgttcaatatacgagacacaaaataaagtttgtttgaagcatccaaaataactagatattgcagatttaatttttgtgcattaaagcttgtatttgaattaatttattgagtttttcagaacaaattatctgagtagtctgcgttcaagccattggagaaaaatttagaaaatgcctctgttgtcattggagaattaaaaattcccaatgatttaagaatataaattatattggaagcaattagggtaattctagttaaataatgtggaaaggtgccctgaataaggagctagcaagccagagcggggggtggtcagcctttctagtactggccagtttggccatgtagaattttgaacagtgtcaaattatcacatattatattttacttttgatgaaaacctatcatcaagggtttgttaggaaaccatgaatgtgtatatgtaatatataaagtgaacatatatgtactttatatatattcacttgtgtatgtatgtttatgcatattcactttatatattacatatacacaaaaaacttttttttccaaacaccacctcgaactagaacaaaaaactttttaatttgctaatttgagtgagaaatatactggaagggaaaataagttacaccatccatttttgtcccctaaaggaaacatcaaaatcaatcaacatttatttcctccctctatccatcattgccttcctccctcctgtcacgcacacatacacatgcaaccatgacacagataatgggaagagctttattggattagcagagatttacagacaagattgcacaagagatgctgttgctggatagaaaattgatcaggtagaagtgatgctacctacttgaggatggccatctgaattgttaaaaattctgtcatagactattaaaaaaaaagttttactactcccaagtacacacagttatgagaattaggcttttaaaaagttgcacagtgaaggctctttaggaacctactttacttaatcagtaaaaattgagtattattgatgcaccaactattcccatataaatgtacttgctttttcagataaaacacttctgaagtgctcaagaatgtctgaaaacagtttgttttcttaaataggataaataatcattccttttgcaatcttgtttacagtattcattctcttagccaatccctccacgcaaatggagacaaacttcatcccagtcctaaccagtatagttgaagggaatggagccttgtagtctatgatttttttttttaaatttccatcgaagggattggggatgtcagagagccagagctttcccctttccaggagctaagttggcttcggaagtcttctgggatttgtgaaaatattactgttgtaaaattacaaagtggtagccataacaactccctcagattggagacttgaaatgtcaaaactcccctcttcctttcccctagtttggtggatgctcatttattaattcattcaataaactattagatgccaggtaccaaactactgccatgggagtgcacatattaacaaaatgctctacctgctgccaaatggcttactattctgtggaagaaacaaagtatataatcctccccaataacagttatgtattgtttgttcacttaatgtggaaggcaagactgatgcagacacacaaggaaggctcaaaaatataaatctagcagcaatgtcatcttttttgattttaaataccatatgtgcttactgctaatcaggaaatgaacaacctcagtaaaattcatcagtgctggtaaatagtttgctgtagtggaaagctcataacctttggattcaaatgatcctagtttctgtaccatttattagcgttgtgacctaggacaagtacctcacttctctgagcctgtttcctcctctgtaaaataatgtctacttcacaaggctgtttcaaaggttaaaaaagatagcatatgtaaactgtcttagctcagcgcttgacatttcctaagtgtgccataaatattaatctctttccttactcccagctccaatacagcgtaacagtgctttaaaatgtatgtccttcatttctccttcatttctcagtcacctttgtctcttccctagggcatatccccaaattcttaaacaaaaaaaaatgatttttttccccttcatcaaacttttcactggctcccttagcacccagtagaaggtcccaactccttacagagtctgggttttcatgtccctgtttgcttacacagcttaatcttttgccactttccccctcacattgattaaggtagccaagtttaactatttacacaactattcacacaagttattctctgggcctgcagcagaaacatgattaacaattttaatgcccagagtaaacaacagaaatttttcttaaattaaaggaatagtgtgaaaatgctgtaagtacagaaaatgcaacctccattccagtagaacaatttcctttgccttgtccttggctctccaaaactgttcatttattgtggtgtcttttagattttagtgccctgggacaaagatctaatttccccaccctacttttgactctatcctggactacctttcctcacctctatctctctcaaccagactaactctttattccttagacttgatgatgcatccctctttagagatccaaagacaccccaagcatccccctctctcagcaataatcacattgtatagcagtgtttttcaaagtgtggtcctcacaccgcctgtgttagaatcacctttagtgtttgttaaaagaattgattttgggttcccactcctgacctaaccagaatatctgagaacataggcaggaatttacatttttgacaagctcctcatgattctgatgcaccaaaaattttaatgaataatcatcttcccctactagactgaacaccttgagaggaaggactgtgtcttttattgttgttatattgttaatacctggcacagtgcttggaacattagcttggctaatgtttattgaatgaatgtatgaatgaaaaaatgcattatgaaagtttcctcttgtactctcatgttcgtagtgatgtttgttacttcctgggcagaaaagcttggttactactccatttgagctgtattaattctattttgcagagatatcaaggctcctacataataaatgatcattgtcctcctcaaaaactctttggcagttatcttggggaaatgtctttgggagcatatgggcaccattgttttcagtaacatttcagtcttgtcaaactttgttgtttgaaggtgggattacatttcggttataggccaaaaatcactcaaaggctaaggcctacttaaaaaagtggggaattaaactgggtttggattaagcaatgaagtttgactctgaagtcccaaattctgagtcaaacagtgaaaaatgacttctaagatacaacatggtgacaaagtacttagtgggggtgcgatgggccccagatatttacttcagttaacttggcttttatagaatcctggcaatgccatggaccttaagagaagtaattggctacctctagctaaacccagctggacaaagagaataggacttgtatttaacattttcaaagaaggtgactgcataagcttttgttgttgttgctctactcaacctgttctccacaactgtttctaccagaagattattttatgtctgcaatttatgcttgtttccactttttatattgtcttattgaagaaagcacaaaaataatcaaaaataaagtaaaacctgttttgagagtatgaaagaaattttaatgccacattgaggttctggctacttgtaagtaagagtaactgcatctggatgtgtttttattatacaattctatgtgtatctttagatgcagtgaaattcagattgcagcaaaatcacttatctgttcttttcggctaaaacactctaggtgaattttctaaacttccatggtttacatatttatatatgactaccaagatggagcaatccacggatggacttttgaataaactcaaatatttgatactgctttcctccaaggaatgggagagtgtcaggccaggtaggtaaagaaaccactccctaaacttaattcctagctccctgaagccaactgccagccttggagccaaatggtcgtatttggctgtgtgttacaggttggccaaacgtgattgcccatcaggtcagacaaaagctgccttttatgggtgtagtctgccagcttcagacatatgctgtattgttgttattggctagactatttattagactattgttggactattttttatcaaatgctttaccccacgcctgtttgtattgggagctctggacccaatagtgtctctcctagtgacagaaatatgagcatctgtggattacacagcctcatccctctctacaatattccagcccatccaaaatgctatattatgaattaaataaatatatatgtattcatgaa

SEQ ID NO: 86373 - DNA, 487 bp, Homo sapiens
cgctccttgcgcgtctgtcccactttctccctcttttcctttactttcgagaaaccgcgcttccgcttctggtcgcagagacctcggagaccgcgccggggagacggaggtgctgtgggtgggggggacctgtggctgctcgtaccgccccccaccctcctcttctgcactgccgtcctccggaagaccttttcccctgctctgtttccttcaccgagtctgtgcatcgccccggacctggccgggaggaggcttggccggcgggagatgctctaggggcggcgcgggaggagcggccggcgggacggagggcccggcaggaagatgggctcccgtggacagggactcttgctggcgtactgcctgctccttgcctttgcctctggcctggtcctgagtcgtgtgccccatgtccagggggaacagcaagagtgggaggggactgaggagctgccgtcgcctccggaccatgccgagagggctgaag

SEQ ID NO: 86374 - DNA, 644 bp, Homo sapiens
gcgacatctctaagtgacaactggtaggcggaagggggttcctgccgaggctgatggcccaaatacccgccttaccattctaaaacagacgctactcactcacgctggcgaggcccttcagggttcctgctctcacccagtgctgggcaagaggggggtgccctgaagccctgcatggcaaacatgcccctgcttttctggtttcatgttgcctgctgcctcctgccccccggtcactggctggaaaagcagctctgctctcctgctgtctccggtccacggtgcccccactcttctgctcttagctcccagctggactcactgggggccaggagcaaggtgtgggctcggtgggccccctcatatctcattccccacccccctccgcattttctacctgtgtggttcatgttgcttcccgtgccacgaggaccccgccaatgcgaccactctgcttgttcccccagctcagttcctacccccggttgcgagaggagacagagcgaatcgtcaccacttacatccgggaacgggaggggagaacgaaggaccaggtactggccttttgtcttctttattgggtataatttacatgcagtaaatgtcaagtgtactgttctgtgcatgctgacagctgcatatgg

SEQ ID NO: 86375 - DNA, 3374 bp, Homo sapiens
caagcttatatccttaatcacctaaagatcagagtgtgaagaaacaaacctgtgacagatctgtggttgaggtttagactacgggaggagtatattacctgactttctttgtaacttgtaccatgactggggcagagattgagcctagtgcccaggccaagcctgaaaagaaggctggggaagaggttatcgctgggcctgagagagagaatgatgtccctctggtggtcagacccaaggttaggacccaggcaactactggggcaaggcccaaaactgagaccaagtctgtgcctgcggcaaggcccaaaactgaggcccaagcaatgtctggggcaaggcccaaaactgaggtccaagtaatgggtggtgcaagacccaaaacggaggctcaaggaatcacaggggccaggcccaaaaccgatgccagggcagtaggtggcgctcgttctaaaactgatgccaaggcaatccctggagcaaggcccaaggatgaggcccaggcatgggcccagagtgaatttgggactgaagcagtgtcacaggcagaaggagtgtcccagactaatgccgttgcttggccactggccactgctgagtctggatcagttactaaatctaagggcctgtctatggatagagaactagtcaatgtggatgctgaaacctttcctggcacccagggtcagaaaggaatccagccctggtttggaccaggggaggagactaatatggggtcttggtgctattccaggcccagggccagagaggaggcctctaatgagtctgggttctggtcagcagatgagacctctacagcgtcttctttctggactggagaagagacaagtgtcagatcatggcccagggaagagtccaataccaggtccaggcacagggctaaacatcagactaatcccaggtccaggcccagatccaagcaagaagcctatgttgattcctggtctggatctgaggatgaggccagcaacccattctccttctgggttggagaaaataccaataacttgttcaggcccagagtcagggaggaggcaaatatcaggtccaagctcaggacaaatagagaagattgttttgaatctgagtctgaagatgagttctataagcagtcctgggttttgcctggagaagaggccaatagtagattcaggcacagagacaaagaagatcctaatactgccttggaaactcagggcccagaaagatgttgacagtgatagggtcaaacaagaacccaggtttgaggaggaagtcattattgggtcctggttctgggcagaaaaagaggccagtttggagggtggagcttcagcaatctgtgaatctgagccaggaactgaggagggggccattggcggatccgcgtactgggctgaggaaaagtccagtttgggggctgtggccagagaagaggccaagccggagtctgaagaagaggccatatttgggtcctggttctgggacagagatgaggcctgctttgacctaaatccctgtcctgtgtacaaggtcagtgataggttcagagatgcagctgaggagcttaatgcatcctccaggccccaaacctgggacgaggtcactgttgaattcaaacctggtctttttcatggggttggcttccgatccacaagcccctttggaattcccgaagaggcttctgaaatgcttgaggcaaagcccaagaacctggaacttagcccagaaggagaagagcaggaatctttgcttcagcctgatcagcctagtcctgagttcacatttcagtatgatccttcctaccggtcagtccgggaaattcgagagcatcttagggccagggagagtgcagagtctgagagttggtcctgcagctgcatacaatgtgagctgaaaattggttctgaagagtttgaagaattccttttattaatggacaaaattcgggatccttttattcatgaaatatctaaaattgcaatgggtatgagaagtgcttctcaatttacccgagatttcattcgagattcaggtgttgtctcacttattgaaaccttgcttaattatccatcctctagagttaggacaagttttttggaaaatatgattcacatggctccaccttatccaaatctaaacatgattgagacattcatatgtcaagtgtgtgaggaaacccttgcacatagtgtggattcccttgagcagctgactgggaataagggatgctttagacacctcactatgactattgactatcacacaactgattgccaactaatatggtccggggtttcctctccttttttaaccacaagcccaatgcggagaaacgaagtttcacgttctgaaaatgctattgaatttgtctgaaaatcctgctgtggcaaaaaaactattcagtgccaaagctctttcaatatttgtgggtctctttaacatagaagagacaaatgataatattcaaattgttattaaaatgtttcagaatatcagtaacattataaaaagtggaaagatgtccttaattgatgatgatttcagtcttgagccgcttatttctgcatttcgtgaatttgaggagttagctaagcaactacaagcccaaatagacaaccaaaatgatcctgaggcgactggaactacagcatttgttggtaaaggaaacaatccgtcagccaaccgggagcgtcttagcccgtctgtcttttgtccaggagctcaagaagcagagagtctacctgcccgacgcgttcgtggagaggagcagcggttgctgttggaggaggtgggtgcaaggacggcagatggcatccctgaggggtggtgactgagactagatgcgggtgcaggttcctgtaaagatctgtatgtagctgttcacttggaagttaattaagaaagaacaaaaactattcatttggattcaaggtccatctccactggtggctgtggtggctttggattgttggaagaccatcaccttcagcaggtctgcacttgggaacaatcattctcccccagcccgagcgtgcctctgccctctgtatcattgacagaggctgtatgtttggaaagagaactttgtgactgcagaactgacagttgactctaattcttgctaccaagtttttccccgacccagtgaaagagtgttaagacttcgacctaggacacattgagaaccaaggccaagactggacagggccatataactgggcttcaaccatggctgggactaagaataagacaagagcccaggccaaaactgaaaaaaaggctgctatacaagctaaagctggagcagagagggaggctactggtgttgttaggcctgtagccaagaccagggccaaagcaaaagccaagac

SEQ ID NO: 86376 - DNA, 433 bp, Homo sapiens
cggacgcgtggggaatacacattctttacctcagcacatggatcattctcaagaatagaccatatgttaggccacacaacaagtcataaaacattccaaaaaataaaaataaaataatagcaagcattttctctgatcacagtggaatataactagaggaataataggaattttggaaactatacaaacacatggaagttaaacagtatgctcctgaatgacaagtagatcaatgaaaaaagaaaaaaactgaaaaatttcttgaaacaaatgacaatgaaagcacaacatactaaaatctatgggatacactgaaagcagtactaaaaaagaagtttatggctatggtgcctaaatcaggacagaagaaaaactccaaaaaaataatgagggattttaaaaaacttagaaaagccaaagcaaattaacctga

SEQ ID NO: 86377 - DNA, 3296 bp, Homo sapiens
ttttttttttttaaataaaagttttgcttttatttaaaataaaatgcatttatacagtctttgaaccatggattattgaacaatactggtaatccacctctccctcgcacccttttgggctatgtgagctaggaattttctgactagcaccaatacagattgtaacagcgcaacagactagaacatggccagtccaggcattagagttaaggacattgtggcaaatcatgatcataatgaagtcattcttaatttagtagatattaaaactgcacgttaattatatctcttaaaggcatttaattaacgcagagattgctacatttaagccatctgctagttgtgagtagtttttaaaaaactgtacaattttataaaatttgtgtttttacattagttacacaaaatgcatacttcatagaactttacttcatattgtaatgcaaagagttgcatattttaggcagacagtgattatgctggtgaatactaaaagtgtaatacaatatggtgtaaaaataaaaacacgagacaatatacataacatgcttattcaaggacaaaaacaaatcaagcacgacggactaatagcattttccttcaaggtcaaacacaatgacattactaaatatcaggcctcctgcatgcctgatttatttgggggtagggggaggaattaaatggctaccagaagtaggatattttaaaacatgatatcaaattaaacatacattaaatcacatgcattagacatgataaatagagttcatataggttaagccctggatagctttaaaatagatggcttgtttcttacagtttggctagcttaaatcagtaaatcagtgatggtttgttcctgatttgcccactatttcagttttcaattcatggccctaaggaatgtgtgccaaattcaagtttattatatcataacatgatagattaatagtcgtgcttgtttagtgcacatattaactggtctggtaaggcaaagaagttttcatgataaaatgataaatttcaagcttactttattaagcagcatataacaaacagcttttaaagttaaatattgttatggccgtggagtttcattaaacagtatttctattcacacccaaccactggtaagtttgtagaacatctcttcatctaaactctcgttttggtcttttgcacgtgttgagagaaatatgtagccaccaatgaattcatgaaccactttgcaatctacttcagtacaaatgaaggacaatcgtacttcatctgcaaactctacggtgaccattttgatttcccagttgacattccactgtttcatgttgctgaaacgccatgttttaattgcatctccagtgctggcatccatccgaatcagtctgttgtatgcaattccaataagttcttcttttttgcccccttggaaccttgcaatgaagtgagtgatgccaaattcaggtagtgactggccaagcttgaataaatctcatcttggcttcaattaaactcatctgagctacattctgatgggcctccaagattctcgctgttatctgcttgttcttatactgtgttagatagcggggagacaccaaacattgcagagttatatcagtccgtgatctgctctggtattaacttgaggatctgggtttaaatgctgcatcttcagaaaggaaagaatattcttgaacttctaagttgtaagaactgtcccgcccatggtccttggccctttgggaggctaatcctgccaggctgccatccagtgtgcatactgtttttcattgtcacaacgaagccagatttcattcatgccttctgcaactggaatcaggagtttaatgttaaatttttggcctgaaatgtttacatctggggtaacttcacatcccctgaggttcatctgatgagctggtgtgccactggattcttctttgctcttataacaagaaatggatgtgtctttgaaggtgcaccaatattgtttgtaacctttcagagtcagcttttttggcttgaaaactttaatgtagtcagcaagttcaggaatggaagtaatgtcacccaaaattgttgacgttttacccccttccagagtaatctccaggtctgaaagggcagcatcaacttcatcaacttctttgtcactgttgttcaaatgattctctgatgtcatgattgacagcttattgatatgatactgcagggctgcaaacatcatcatttcttcttctgtgcattcaatctcttccaggagaatggcccatttggcctgctcataaagctgattgattctgattgcatcatactttggattcaaatcaaaaaagctgtaatacttgaatcggagcagcaaggcctcattttccttcacatcttgttccatgagagatcttgaggaatcaagccatccttggttgatttttgctttatcaagaagagcttgaggcttgaacatttttgccaagatttctggtgacgtgattggttgactgacagcaagtataccaggattgccttctgacaaagcactgtcaccaaaccaagcagaagttggtgacaaggggcttccatcatgagcatcataagtgggggtcattgttttactatacagtcctgggcttgaatatatacttcctgatccaggagtgataagaggcccctctaattcaagtgcctcatcttcagactggtcatctagcttcttcttttttttttttgttggatctctgggtttctttaagagagaaagttcttcggggtgtctgatattaaaagtcttacagatgtcagaaacagctttgaagactctatcagagaaattcactttcaccttcacatacttcatgttgggaagctgcaggcggagcagtttgtgctgaggggtgaactgaagcttagcatctgcctgaataccatacttatctaaggtccaatgtgtcttcagaagccaagttctcttcttttcccaccagagagcatggtcagaccaatctttttttacatcgagtttctccaccagcttaagcatcacgcctccaatgtgcacctcgccggtcactctcagggtgacatcgcggttcaggtccgtcacatggacactcagttcccacgtcccgtccgcgtagcagccatctggcatccttatcccgtccagagccatggctccttccgcgcgctcctagcgctccgggcccgggactcgcgcggcaacaggcgaggggctggaggctcgcggggcgcggtgtccgcgtccggttcctcggctggcgaagcgctgcctgtggccc

SEQ ID NO: 86378 - DNA, 975 bp, Homo sapiens; identical to SEQ ID NO: 66204

SEQ ID NO: 86379 - DNA, 457 bp, Homo sapiens
  misc_feature (1)...(457): n = a,t,c or g
cttctcagcaagccaaactcattgccttaacttgagttcttacttctgcaaaaggactgtgtgtcaatgtttacactgattttaaatatgccttccatatcctgcaccatcatgctgttatatgggctgaaagaggttccctcactatgaaaaggtccccccatcattaatgcctctttaatgaaaactcttctcaaggctgctttatctccaaaggaagctggagtcattcactgcaaaggccatcaaagggcctcaaaccccatggctcaaggcaacgcttatgctaataagacaggaannnnnnnnnnnnnnnnnnnnnnctgtgtgtatacatccgnnnnnnnnnnnnnnnnnnnnnnnnnnnnnnnnnnnnnnnnnnnnnnnnnnnnnnnnnnnnnnnnnnnnnnnnnnnnnnnnnnnnnnnnnnnnnnnatgatgagtcntggaaactccc

SEQ ID NO: 86380 - DNA, 2305 bp, Homo sapiens
  misc_feature (1)...(2305): n = a,t,c or g
caaagacgttcacctcatcagagaaatccctgactcctttgcagtggtgtagacatgtcctagataacccaactcctgagatggaagcagcgagacgttccctgtgctttagactggagcaagctagccgatggcggagtctcttctccttcaactgcctcactggcttttccttatagtcctgttgcaagactcagccccttatagccaatggccattaatactccccagcttctcttaaaacctcaaataaagcaatactaacaccctgnaaaaacaggttacacttccaggggctccccactcagtccccagtcatctatcgacagtgagctgagtacttcagaattggaggatgattctatctccatgggatataaattacaggacctcactgatgttcagatcatggctcgtctgcaagaagaaagtctcaggcaagattatgcttctacttcagcatctgtatcaagacatagttccagtgtgtcattgagttcaggaaaaaaagggacatgtagtgatcaagaatatgaccaatacagtctggaggatgaagaggaatttgatcatttgccaccacctcagcctcgtcttccaagatgttcccctttccaaagaggaattccccattcacagactttctccagcattcgggagtgtaggaggagccccagttcccagtattttccttcaaataattaccagcagcaacagtattattcacctcaagcccaaactccagatcagcaaccaaataggaccaatggagataagctccgaagaagtatgcctaacctagcccggatgccaagtacaactgccattagtagcaacattagttctccggtcaccgtgcgaaatagtcagagttttgactcaagcttgcatggagctggaaatggaatttcaagaatacaatcttgtattccatcaccgggacagcttcaacacagggtccacagcgtggggcatttcccagtgtctatccgacagcctcttaaagccacagcctatgtgagtccaaccgttcaaggcagcagtaacatgcctttatcaaacggcttacagctgtattccaacacaggaatccccacaccgaacaaagctgcagcttctgggataatgggtcgcagtgcactcccaagaccttcgttggcaataaatgggagtaacctgcctcgaagcaaaattgcacaacctgttagaagttttcttcagcctccaaagcctctgtcttcactcagcactctgagggatggaaattggagagatggttgctactaatgcagttttatgtacccttgaaaaatgggaaagaagtaaaaatgagggttgtgttacctagctggctgggtagcagtggatgttgggatattctttcccttttgtgttttaatatatttactgcattgtttctcaatggaccagtcaccagagactaattattgcacttaaatatttgcctgagatactgcaacattctcaaacccatggttgcagtattgtgacacttagatctaggaagtttttgtagaactgctctgtacctgaatactttttgagagaattaagatgtatcaataatgctttgccatatgagttttttaaagtaacttgttcaatttactcacgtgttctaaacatctttccattacatgttctgtattttaatacattgcatattgacaactaggttctataatgtatgctttgaaatttacttttttatagtttacaggaattttattttttgtgcctatttctttttacacctatgtgaaccactatggaacaacttaaattttgtgccataaaaatatttttgtggtaaggtactatttttttagctctagggatatatcagcaaaaacacatcatgcaatttgagacacataattttgtgttgaatgagcacaacataatttgaagcattgcaaggagataaccagacagcagaattaaatggtcctgtctttttcatttttaatttattgtcatacatgggtttcatatttataacggcatcatgagctcattgcacttaatacctgcaatgtttgctactgtaccacaattgattttcaatactttattacgaaggatgaaactgtaatgttttattaacaatgcttctggaaatgaatgcattttaaagcaaataaatctttttgatagaccttttacaaaatccatttgcactaatgaatgctttcttatggcatataacttaatatttgttcctggggcccccgctgttttggaatgttcaaaaataaagactctatttcccccaaaaaaaaaa

SEQ ID NO: 86381 - DNA, 2107 bp, Homo sapiens
aggttagaaggccagtctcagtccttgtcccttaaaggtctggggaacctgggggctgggctccagcgtccatccctgggacagaagcttgcttgtgttcacaccccataggttcctggagtgactgagagccgcccctcagtgctacggggcgaccacctgtttgcccttttgtcctcggagacacaccaggaggaccccatcacatataagggctttgtgcacaaggtgggaattggaccgtgtcaagctgagcttttccatgagcctcctgagccgctttgtgggatggggctgacctttcaaggtgaacttttacctttcaaccgccagccgctgcgagttccagcaccgtgccctggagctgacagggcgctggctgctgtggcccatgctctttccttgtggcacctcgggacgtcccgctgctgccctcagatgtgaaactcaagctgtacgaccggagtctggagtcaaacccagagcagctgcaggccatgaggcacattgttacgggcaccacccgtccagccccctacatcatctttgggcctccaggcaccggcaagactgtcacgttagtggaggcaattaagcaggtggtgaagcacttgcccaaagcccacatcttggcctgcgctccatccaactcaggggctgacctactctgtcaaaggctccgggtccaccttcctagctccatctaccgcctcctggcccccagcagggacatccgcatggtacctgaggacatcaagccctgctgcaactgggacgcaaagaagggggagtatgtatttcccgccaagaagaagctgcaggaataccgggtcttaattaccaccctcatcactgccggcaggttggtctcggcccagtttcccattgatcacttcacacacatcttcatcgatgaggctggccactgcatggagcctgagagtctggtagctatagcagggctgatggaagtaaaggaaacaggtgatccaggagggcagctggtgctggcaggagaccctcggcagctggggcctgtgctgcgttccccactgacccagaagcatggactgggatactcactgctggagcggctgctcacctacaactccctgtacaagaagggccctgatggctatgacccccagttcataaccaagctgctccgcaactacaggtctcatcccaccatcctggacattcctaaccagctctattatgaaggggagctgcaggcctgtgctgatgtcgtggatcgagaacgcttctgccgctgggcgggccctacctcgacagggctttcccatcatctttcacggcgtaatgggcaaagatgagcgtgaaggcaacagcccatccttcttcaaccctgaagaggctgccacagtgacttcctacctgaagctgctcctggccccctcctccaagaagggcaaagcccgcctgagccctcgaagtgtgggcgtcatctccccgtaccggaaacaggtggagaaaatccgttactgcatcaccaaacttgacagggagcttcgaggactggatgacatcaaggacttgaaggtgacatgctgttccacagtcactccctgccttccgtgtgcccccacttgcccacttccagagacttcctcaagcttccactccagcccacgtccccgtcccacccctgctgccttgaatagagctcgagctctccctgagcctctcactcctggagattccaacttaagggtctgggatgggatcaggaagcctgcatgtttaacaaacacctcctgtcattcttagactgaggcaggtttgaggcctctgccctaaggataaagtccaaattccgtggcctgtcatgtgatgctgccacccccacccccagtagcctctctcttaaggatctggtctcaacactggctgcagataacaatcacctggagagcttttaatactgccgaccgcatgccacgggcccacccaccagctcatacagctatcggggcagagccaggtcactggcagtttttacagcttttcaggcgactctaatatgcagccagggttgaaaacacttgtcctaagacttacagggcccttcccttggaatatgcgg

SEQ ID NO: 86382 - DNA, 928 bp, Homo sapiens
ttttttatttttcaagaataaacatttcctatattaatctgatataaaaaacacttcacattatttcaaactagtcaataaattaacattatataccaaaatagcaataagttaacaatcccttcttttcacattttaatcaagtatattctcaaaagtcttacaatattacattaagatttaatgtatcaaatccaacagcatttcatctcaatatttaacaatattatgttcaatattgaatagtaaaaagaagctaaactttatctctttgtgtattgatttcagcaattctgacagtgtttgatcctccatgcacgtgtttctacgcatcaagaaagcacagctacaaggttaacccaaagaacaatttaaaagctatttcaatggcaatttctgtgactgagtcatgaaaacagacataaagttcttgaggttttggatgaagaaaaagtctccctactacccagtaagccataactggtggtgcttttttctgatcagtccagtttccaggtgaacattcaaacaacacaccatgttctttaacagggttaagagaagacactgactttgcagaatctgaatggtctccactatttagtcctttctttttctcttccaccaatgtctgttggaaaactgcacgaatggaaagacaacactgatggaaattctttattagctgagggtggatagagccacttagctgtgccacctcttcaagggtaggagtaataaagattccttgcactgtttctaaggcaacgtagtggaaaagtgtgttctcaggaccagatgtcagtttcactgtgttatatatttctaattctttttctggaaggtcctttttcaagtttcccaaatgaaatggatttggaagagtagacttctttttagtgaccttaagcaaggtcccactttcttc

SEQ ID NO: 86383 - DNA, 441 bp, Homo sapiens
ttttttttttttgccgagtcgcgccgcggcccgggcgcggcccctttattcgcttcaagaaggccagaaaaactttctcagcgcgacgaccacgagcgccagcaccacgcaggtggccagcagggcggcgatcacgatggccgcgatagcgccgggccccagcgacccgccgccctggtccagccgctcctgcgcggtgctgtcctcgggtcctggcgcgacggtgggggctgggggaccggtgtccacgggctcccggccggggctggtgctctccacggggccttctcccgacggcagctcggccggctcgttccacagcgtgggcacgggctcctgtggaacatcgtctgcaaagccaaggagaggtgctggggccccaggtgacggggccgacagggacgtcaccccccacctctaggttaagcaagttgccggtag

SEQ ID NO: 86384 - DNA, 441 bp, Homo sapiens
  misc_feature (1)...(441): n = a,t,c or g
natggagangtcntgaggnacattgatagcactgcgggaccgacccaggcgtccgagagaggttcaacaaagctagaagttggaaccttgacaaagctaattttattgaaaaaaaattacgaatatcaggaacagagaggaggacattactatggaacgtagagacattaaaaaaagataagaggatattatatacaaatttataccaataaagtttgaaggtttatgtgaaatagacaaattccttgaaatctacaacttagtaaaattaacacaagaagtaaaggaaaatgtgagtagtcccataacacaaaataagtggaatgtgtaatgaaaaactttttcacaaagaaaattctaggttcagatggcttcatctgccaattctgtcacatatttacagaagaaataacactaatctcacataaattttttcagaag

SEQ ID NO: 86385 - DNA, 432 bp, Homo sapiens
  misc_feature (1)...(432): n = a,t,c or g
gatcncnngaattctgcggcccccgcgtcgaccctttcccgtggtngggggggtgganngggttgagaaaacctttatgaacattnnctgtagggnngccactgggtctgctcnncacggtgctcccttttcatgcgtnngacctggcagctgtagctttttgtggggaaacttccactgctcannggcgtcaggctcnaggtagctgctggcccgcgtacccttgttgttgctttgtttnnggagagctgtggtggtctccactttcccgccttgacgggnngctgctatctgccttccaggnccactgtcancggcttcccgggtagaaagtcactttatgnagacacanccagtgtggcccttggttggcttgaagcttcctcagaggaagggcgggaaccagagtnngaccgagggggcagccttggg

SEQ ID NO: 86386 - DNA, 507 bp, Homo sapiens
  misc_feature (1)...(507): n = a,t,c or g
gcgccgcccccccattgaactgatagctatggtcggancccatgntggtacaggcccncgctctgctgntgngaggncgacctcacgacccagcacaggatttggatgcgaggtgcacgcgaggctctccacagcgcaggaaggcagcctgtcaccctgctctccgagccaggggccaaggtgtgggggggcacaggccatcctcatcctgccaggcccccgctttcaggagtgggggggtgccaatgctcccactcaaaaccctggactgcggggtcccctgagcagagggaccatccagctccccataaacagattgaagctggacaggggctgcctgggccccaggcttggggagggtagaaaggccctgcantgctgctgcctgggcccggaggagggcctggccccgtagcatcattggaggccagagcccaagccagttccggagtcacacccaacggcggagggagaacctacccatatcccaccttcagctctggggag

SEQ ID NO: 86387 - DNA, 388 bp, Homo sapiens
gaataaatacaagttgtacaagacctttgtttagactattttaaagcttcattgaaatatttaaagggtacttaaataagtagagaagtatgctttgtttttggataggacaagacaattttgtaaagatactgctctccaaatttacagatttaatgcaattgcaatcaaaatcctaatagtgatttttatagtaattgacacactaatgttaaaaattatgtgggaaaataaagagttgggaataggtagagtttatctgaagaaaaataattaggcaaggaaaccagcgctaccagatatgaagacttataatgttataagaccgtgtagtattgacataagggtacacaaacaaaactaatgaagagaatggggattctaaaaa

SEQ ID NO: 86388 - DNA, 1893 bp, Homo sapiens
atttttggaagtaggaaaaaagtatggcaacagtgtcatgaagattgaaactgtcagtaaaattgtgtcaaatgttcctcagttggagtttctaaacctgagttccaaccctctgaatttgtcggttttagaaagaacatgtgctgggtccttctctggggttcgcaaacttgtcctcaacaacagcaaagcttcttgggagacggtccacatgatactacaggagttaccagatttggaggagctcttcctgtgccttaatgactatgaaacagtgtcttgtccttctatttgctgtcattctcttaagctactacatataacagacaataacctccaagactggactgaaatacgaaagttaggagttatgtttccttcactggataccctcgtcctggccaacaatcatttgaatgctattgaggagcctgatgattcattggccaggttgtttcctaatcttcgatccatcagcctccacaagtcaggtttgcagtcctgggaagacattgataaactaaattcatttcccaaactggaagaagtgagattgttaggaattcctcttctgcagccatataccaccgaggagcgaaggaaattggtaatagccagattgccatcagtttccaaacttaatggcagcgttgttactgatggtgaacgagaagattctgagagattttttattcgttactatgtggatgttccacaggaagaagtgccattcaggtatcatgaactgatcactaaatatgggaagttggagcctttggcagaagtggacctaagaccccacgagcagtgcaaaagtacgaagtccactttaaccgatcaggtggaagaaatgagcattccgtctgggaccaaacagtgggcagaactaaagaaaccagttaaaaactctagtacaattaccccacaagcaacatgcttctctactattttgaccatgaagcaccctttggcccagaggaaatgaagtacagctctcgggcattgcattcctttggcattagggatggagataaaatttacgtggaatccaaaacaaaataacctctaccagccttgtgaaaaacatacacataaggacttgttgcagggcatttgtttttaatgtggttttctttaggagggagaggttgtttttgttttgttttgttctgtttaggtttgggaaggattttgtatatttttccccctggagtgagtaggggccatttttgggtgttttctaccacagattgatttggctcagccagcggaattggccacatttccagtgtatgtgccctctctaaggaaagatgacaaagaaatcaccgacttcttactgtgttcactgggatttgcctgccacttggttatcattactgttgggtgaacctgtgaagataacatgaacactgtagccccttagaagggtctcatagagaatttaaacagggtgacaaggaatcttcacaggaagggccagaacttctctctcccagttcttccttccgctaccctccctccttggcttttttggttcagttccatttttttttcattttgacatgtggtttacctaatagttttgttctgttcataattcttatttctcaacctgggtgatttttttgttctcatttctcccttttgaaataattgaaagtgttttaagcatttttaacctgattctaatctcaggtacgcagtaagaagctataactctgttagaacctcgaagagtagatgtagaatgaaaactccaggaaaacttgcagttattctggaagcaccggcagaacagtctgatctctttgtatgttactaactcacttttaatgtccctgtacattatgtcagccattactttcataacatgaaatatgtcagattcct

SEQ ID NO: 86389 - DNA, 364 bp, Homo sapiens
atgagtatgatgatgacaacatttgtgcaaaaattttcagtttataaaaatacatcaaaattcattaatacctctttcaaagatttatatgttttgctcattcaaatatttgtatatatctatatatatttgtacatcttgattctcaatttaaatgcattacttcacttactgctcttttaaggatttatacatattcttttttcaatgatttatacacagtgctttttgatgtaggcaaatgaagcagctgaaatgttagaagaacaaggttgtaacttaactactttatagcatcctatatgcagagttgaagactagacatactagctccctttcttcaaatgggtaaacgaatacacag

SEQ ID NO: 86390 - DNA, 366 bp, Homo sapiens
  misc_feature (1)...(366): n = a,t,c or g
gaacctgaaaggagctacaggacaatttcagaaacagcacccttcaggaactgcgttgcagctgttgtgtcttggatccaccacagttggctgaaaccggcagctcaggacaagtgaaccagccagcaggacccagaccatttgactcggctgatcttgtgacaagactgagttgctgctgagtacaacagccctgctctggtcactccagaggctgaccagtctacacacgggtgaagcttgaggaaacaacaagccctgctctagtcacacaccagaagctgactagtctatgcacagctgaagcttgaggacttgtcaagcangtaaatgtagttagaaatcttaagactagtagttttcctg

SEQ ID NO: 86391 - DNA, 1717 bp, Homo sapiens
atgcggggcctaagcaactccaaggatggagctgccatgaactgcaatgaggaagcctgcggaagcaagcgcacttgggcttccagggaggcaggatgcctgggcctggtcttccttctgccactgagttcagccctgggctttgccaagctccccaaaagaccctacaaggacccaggctccccttccgtggcccagaagtcagaactgcccccccgcacctccaatcccactcgatctcgctcccatgagccggaagccatccacatcccacaccgaaagccccaaggcgtggacccggcctccttccacttccttgacaccccaatcgccaaggtctcagagctccagcaacggctccggggcacccaggacgggagcaagcactttgtgaggtcccccaaggcccagggcaagagtgtgggtgtgggccacgtggccagaggggcaagaaacaagccccctctgggacccgccatccctgcggtgtccccctccgcccacctggctgccagcccggccctcctcccctccctagcccccctcgggcacaagaagcacaagcaccgagccaaggagagccagcagggctgccggggcctgcaggcaccactggcctcaggtggccctgtcctggggcgggagcacctgcgggagctgcccgccttggtggtgtatgagagccaggccgggcagccggtccagagacatgagcaccaccaccaccatgaacatcaccaccattaccaccacttctaccagacatagagcccctccccagggccccaccctgccatatgaaggaccccacccccgacaccacaaggcattattattctattaattattgttattatgatgattattgttattaataattattgttactccactaatatttagctagcctacatgtagaagatctatggaaacacagaactaaacttttatttatatgttgtggggactgcataactagcccaggaaatgactctggttttgagtggcctgtaatgggcagaggctccctcggggctcgggatctgcagcatctatgtggatcagcccacacccttcccagagccagggagcccttagcctcaactctgccccaccccagcctcttccaggagagcacccttacttggcccggcttccagagaccctcgaaatctccgagaagataaacagctgctacctcttagtattattctgattttattttgcccttaactgattgttatatgctacaagggatttcagtggactgcagagtgcgaacgtcttgctgttgtgtttttatgtcccaacctagaaaccttagctgtcttttctggagttgtctttcatgcttttccagtgggatcaagcccttttccccaagagtcccatctcttctgccatgcacgacatgaaaatccacttctcttccttctccttcttctctctctactttacagtgatacacacacgtatttaaggactatccctgagaccatccctctcattttggaaactgctagggagggaaccaaccacttaaacaagcgtggttttccaagatccaggcaattgtgtgctgttggttgtggtggaggatgtggcacatatatacgtacctacacggttctctaacagagctttctgtatctatagatagatgccatctgtccatttctatgtatctttctataaatatacactctcaggtatcttt

SEQ ID NO: 86392 - DNA, 679 bp, Homo sapiens
ttttttttttttgcaccccagcgtctccctcctgggggactcgtgtgatttattaacgttggaagacatcacatagattgcactctggaagctcgcatgtctgctgggccgtgggggcgttccctctgccaccccgaggtgctggggtccactgtgaagagccagtggccaggcccccagccactggagtggtggctgggctggttgtggctgtctggtagcctttggtggggccacagggtccagaccctcctgttccgtgccccacgggtctcctgagcactgtggggagggggcatcaaggggcacgggggagaagggacacagcatttcactgggtgtagcagagtcccagctcctgggggccttgggcctgggctgggctgtgcagacccacggccgctgcgggaggcggcctgctgcgtccctcggggaactggtgccgtgcaggggctacggaggaggctgtcccaagggcggggacttcctgggcccttctgtgaggagccttggtctcagcttccggctgtcctgcccccagtctgcctggcacgctgaggggcaaacaaggcaggagaggcggggagagccccacagtgcccagactgctgttgagggtttctgccagccagggcatggagggccctgagtcccctgggctcaaggccggacgcgtggg

SEQ ID NO: 86393 - DNA, 3396 bp, Homo sapiens
gcagccccggcggccgaacgcccgcggcgcgggactccatcgtcagagaagtcattcagaattcaaaagaagtatctatagtttattggcaagaaaaaaactgctgcgcttcaagcgcggttcgttgcaagttatccaggcgaggtgacggacaagcttgatgctaggaaatcaaccgagaatttggctgaggaggctggtctgaacatcactcacatttgcctccctccagatagcagtgaagccgagattatagatgaaatcttaaaggtcaatggaagataccaagagtacatggccttgcccttcagatctctgaggaacttgtttagcaacaaagtcctaaatgccttgaaaccagaaaaagatgtggatggagtaacagacataaacctggggaagctggtgcgaggggatgcccatgaatgttttgtttcacctgttgccaaagctgtaattgaacttcttgaaaaatcaggtgtcaacctagatggaaagaagattttggtagtgggggcccatgggtctttggaagctgctctacaatgcctgttccagagaaaagggtccatgacaatgagcatccagtggaaaacacgccagcttcaaagcaagcttcacgaggctgacattgtggtcctaggctcacctaagccagaagagattccccttacttggatacaaccaggaactactgttctcaactgctcccatgacttcctgtcagggaaggttgggtgtggctctccaagaatacattttggtggactcattgaggaagatgatgtgattctccttgctgcagctctgcgaattcagaacatggtcagtagtggaaggagatggcttcgtgaacagcagcacaggcggtggagacttcactgcttgaaacttcagcctctctcccctgtgccaagtgacattgagatttcaagaggacaaactccaaaagctgtggatgtccttgccaaggagattggattgcttgcagatgaaattgaaatctatggcaaaagcaaagccaaagtacgtttgtccgtgctagaaaggttaaaggatcaagcagatggaaaatacgtcttagttgctgggatcacacccacccctcttggagaagggaagagcacagtcaccatcgggcttgtgcaggctctgaccgcacacctgaatgtcaactcctttgcctgcttgaggcagccttcccaaggaccgacgtttggagtgaaaggaggagccgcgggtggtggatatgcccaggtcatccccatggaggagttcaaccttcacttgactggagacatccacgccatcaccgctgccaataacttgctggctgccgccatcgacacgaggattcttcatgaaaacacgcaaacagataaggctctgtataatcggctggttcctttagtgaatggtgtcagagaattttcagaaattcagcttgctcggctaaaaaaactgggaataaataagactgatccgagcacactgacagaagaggaagtgagtaaatttgcccgtctcgacatcgacccatctaccatcacgtggcagagagtattggatacaaatgaccgatttctacgaaaaataaccatcgggcagggaaacacagagaagggccattaccggcaggcgcagtttgacatcgcagtggccagcgagatcatggcggtgctggccctgacggacagcctcgcagacatgaaggcacggctgggaaggatggtggtggccagtgacaaaagcgggcagcctgtgacagcagatgatttgggggtgacaggtgctttgacagttttgatgaaagatgcaataaaaccaaacctgatgcagaccctggaagggacacctgtgttcgtgcatgcgggcccttttgctaacattgctcacggcaactcttcagtgttggctgataaaattgccctgaaactggttggtgaagaaggatttgtagtgaccgaagctggctttggtgctgacatcggaatggagaaattcttcaacatcaagtgccgagcttccggcttggtgcccaacgtggttgtgttagtggcaacggtgcgagctctgaagatgcatggaggcgggccaagtgtaacggctggtgttcctcttaagaaagaatatacagaggagaacatccagctggtggcagacggctgctgtaacctccagaagcaaattcagatcactcagctctttggggttcccgttgtggtggctctgaatgtcttcaagaccgacacccgcgctgagattgacttggtgtgtgagcttgcaaagcgggctggtgcctttgatgcagtcccctgctatcactggtcggttggtggaaaaggatcggtggacttggctcgggctgtgagagaggctgcgagtaaaagaagccgattccagttcctgtatgatgttcaggttccaattgtggacaagataaggaccattgctcaggctgtctatggagccaaagatattgaactctctcctgaggcacaagccaaaatagatcgttacactcaacagggttttggaaatttgcccatctgcatggcaaagacccacctttctctatctcaccaacctgacaaaaaaggtgtgccaagggacttcatcttacctatcagtgacgtccgggccagcataggcgctgggttcatttaccctttggtcggaacgatgagcaccatgccaggactgcccacccggccctgcttttatgacatagatcttgataccgaaacagaacaagttaaaggcttgttctaagtggacaaggctctcacaggacccgatgcagactcctgaaacagactactctttgcctttttgctgcagttggagaagaaactgaatttgaaaaatgtctgttatgcaatgctggagacatggtgaaataggccaaagatttcttcttcgttcaagatgaattctgttcacagtggagtatggtgttcggcaaaaggacctccaccaagactgaaagaaactaatttatttctgtttctgtggagtttccattatttctactgcttacactttagaatgtttattttatggggactaagggattaggagtgtgaactaaaaggtaacattttccactctcaagttttctactttgtctttgaactgaaaataaacatggatctagaaaaccaaccagcaagttttcagtgccagataaaactcctgccgcctcctagaggtaactccctcatgggaggccagcctaggagtgttaccctgacacccagtttccctagaaaactgtgacaagcaaagcaataacacacgtcgagaaatatcctgatcaagcgggaaatcttctgactgtcggggatctctagtaagatctcttggaatgaagtgcactgtgtatccaaaactaaa

SEQ ID NO: 86394 - DNA, 4111 bp, Homo sapiens
  misc_feature (1)...(4111): n = a,t,c or g
gccgcggatcgcgtggtctgcttggctcgccgcgcctctcccccgtccgtccatattgctgcagcccccgagccgggaagcccgggccgccccgggggcgggggggagggagggacgggactagaagcctgccgggctcggggtgggggcgtcttgcgaggaacgggcggggggggacgcacgcctaggaggcctggactgcagagtggggggccttcctccccccccgccccgctagtgggcctcggatttacggcggctgcatctaactgggagggggccgcacctcgcgtgaaccccgacccttctctgcagggactggggcccagcgccccggaggaaggcgtcgcgggcgctctgctagccaaggtgaacccgtggactaagaacgcattgccgccggtcctgaccagtcntnaccgtgaacggacagtcccccccagaacactctgctccagccaaggtggtgagggcagctgttcctaaacagcgcaaaggcagcaaggttggtgactttggagatgcaatcaattggcccacacctggagagatagcccacaagagtgttcagccacagtcccacaagcctcagcctacccgtaaactgccacccaagaaggacatgaaggaacaggagaaaggagaagggagtgatagtaaggagagtccaaaaaccaaatcagatgaatcaggggaggaaaagaatggagatgaggattgccagcgaggcgggcagaagaagaaaggaaacaaacacaagtgggttccattacaaatagacatgaagcctgaagtgcccagagagaaactggcttcacgccccactcgcccaccggagcctagacacatacctgccaatcgcggagagatcaaagggtctgagtctgccacctacgtgcccgtggccccccccaccccagcctggcaaccagagatcaaaccggagcctgcctggcacgaccaggatgagacatctagtgtgaaaagtgatggggctggtggggcgcgggcttccttccgtggccgtggacgggggcgtggtcgcggccggtgacgcggccggggtggcactcgaacccattttgactaccagtttggctaccgaaagtttgatggtgtggaggggcctcgtacgcccaagtacatgaacaacatcacctactactttgacaatgtcagcagcaccgagctttacagtgtggatcaggaactgctcaaagactacatcaagcgccagattgaatactacttcagcgtggacaatttagagcgagacttcttcctgcgaaggaaaatggatgctgatggtttcctacccatcacccttattgcttccttccaccgagtgcaggcccttaccactgacatttcactcatctttgcggccctaaaggacagcaaggtggtggagatcgttgatgagaaagttcgtaggagggaggaaccagaaaagtggcctcttcccccaatagtggattattcacagactgatttctcccagcttctcaactgccctgaatttgttccccgtcagcactaccaaaaggagacagagtcggcacctggctctcctcgtgcagtcaccccagtgccaaccaaaacagaggaggtcagcaacctaaagacactacccaagggcctgtctgccagcctgcctgacctggattctgagaactggattgaagtgaagaagaggcctcggccatccccagcacggcccaagaagtcagaggagtccagattttcccacctgacctctctgcctcagcagctgccttcccagcagctgatgtccaaggatcaggatgagcaagaggaactggattttctgtttgacgaggagatggagcagatggatgggcggaagaacaccttcactgcctggtctgatgaggaatctgactatgagattgatgacagggatgtcaacaagatcctcattgtcacccagacaccacattacatgcgccggcacccagggggggaccgcacaggcaaccacacctcgcgtgccaagatgagcgccgaactggccaaggtcattaatgatggcctcttctactatgagcaggacctgtgggctgaaaagtttgaacctgagtattcccagatcaagcaagaagtcgagaacttcaaaaaggtcaatatgatcagccgggagcagtttgacacactgacccctgagccccctgtggatcccaaccaggaagttcctcctgggccacctcggttccagcaagttcctacggatgccctggccaacaagttgtttggtgctcctgagccctccaccatcgcccgctctctaccaaccactgtcccagagtcaccaaactaccgcaacaccaggacccctcgcactccccggacaccacagctcaaagactcaagccagacatcacggttttacccagtggtgaaagaaggacggacactggatgccaagatgcctcgaaaaagaaagacaagacacagttcaaacccacccttggagagccatgtgggctgggtgatggattcccgtgagcacaggccccgtactgcttccatcagctccagcccctcagaagggacgcctacagttggcagctatggctgtacccctcagtcattgcccaagttccagcatccttcccatgaactgctcaaggaaaatggcttcacacaacacgtctaccataagtatcgtaggcgctgccttaatgagcggaaacgcttgggcattggccagtctcaggagatgaacacactcttccgcttctggtccttcttcctccgagatcacttcaacaaaaagatgtatgaggagttcaagcagctggctctggaggacgccaaagaaggctacagatatggtttggagtgcctttttcgatactacagttatggcctggaaaagaagttccggctggacatattcaaggattttcaggaggaaacggtgaaggactatgaagctggccaactgtatgggctggagaagttctgggccttcttgaaatattccaaagccaaaaatttggacattgaccccaaactgcaagaatacctcggcaaattccgacgtcttgaagacttccgagtagatccccccatgggtgaggagggcaaccacaagcgacactcagtggtagcaggaggtggcggcggtgagggcaggaagcggtgcccctcccagtcttccagcaggcctgctgccatgatcagccaaccccctacaccacccaccggccagcctgtccgggaagatgccaaatggacaagccagcactcgaacacacagactttgggaaagtgaaaagctccttagccctggggcttgaggggggaaaggggtagggtgggtaagagtccatgggggtgcccagtcccaggagaggggacaatgaagggacaggcctggagttactaggacaggcctttgtgctgagtagcaatgtatacaccatttgggctatcagaggtacccctgggcaggagcctctacatccccttccccctcctctctccatgactcttgacatcctagcttcttctaaggggggagggaaaggggggagatttttatatatatatacatatatatatatcaagttttaaattattgatagttcatctggattaccaaaatcactctgcagccctgcccgaggctagtaggctgcaaccctggtccccacccctaacctcctgctccccctcaagccaactatgcagcccacaagaaggccctgcgggcccccccattgcccagcactgtctcatagaaggctctggtggtacctctgggccccaggagcatcagccccttgatcatctggggtttgtcatcaccatattttctccctgctgttcccaccatgcccttctgccatcttctgggagaaggaaaccaaaggatctaaaactggggtttgggggaaggtttcagcctctccccactccccttgccccacaccctttactccccagcccagagagacgctgcttttaccaggaaagactattgaaagatgttttattttatttttctctgacctttccatccttgaaaaaatggggaaaaaagaagaaaaaagacaaaatcgaccataaaagaccaaaaaaaaaa

SEQ ID NO: 86395 - DNA, 1295 bp, Homo sapiens
gcacgagacaagacttgggagtgattcacacctggaacaacatactggacttcacactggagagaaaccttacaagtgtaatgagtgtggcaaagcctttggcaagcagtcaacacttattcaccatcaggcaattcatggtgtagggaaacttgactaatgtaatgattgtcacaaagtcttcagtaatgctacaacgattacaaatcattggagaatccataatgaagagagatcttacaagtgtaataaatgtggcaaatttttcagagatcgttcacatattgcaggtcatcggtgaactcatactggagagaaaccttacaaatgtcatgactgtgccaaggtcttcagtcaagtttcatcctatgcaaaacataggaggattcatacaggagagaaactcacaagtgtgatgattgtggcaaagcgtttacttcacattcacacctcaatagacatcagagaatccatgctggacagaaatcttataaatgtcatcagtgtggtaaggtcttcagtccgagatcactccttgcagaccatcagacaattccttttggagacagttgtttcaaatgccattagtatagcaagccatcaagcattaattgacattacagttaaatgagcactgacctgagtttgagttgacttaacattgagtttaagcattaattgacattaaactgtttatgttaagaggactgggctgggcactgtggctcacgcctgcaatgccagcactttgagaggccaagactggtaggtcactggaggttaagagtttgagaacagcctggccaacagacgggagccacttttcccagcctgtgttttcatttctattctttctttcttttttcttttttttgtttttgtttttgagatggagtctcttgctctgtcatccaggttggagtgcagtggcatgatcttgactcactacaacctccgcctcccaggttcaagcgatcctcctgcctcagtctcctgactagctgggactacaggtgcgtgccaccacacctggataattttttgtatttttagtagagactgggtttcactgtgttagcctggatggtctcgattttctgatcttatgattcacccacctctacctcccgaagtgctgagattatgggcgtgagccaccgtgactggcctgttttttgtttctttaacaaaaagttatggggatttctatgagtattgtgttgaatctaaatcacattcggttatataatcattgagcaatactaatttttccaatcaatatggaaaaaaaaaaa

SEQ ID NO: 86396 - DNA, 758 bp, Homo sapiens; identical to SEQ ID NO: 72273

SEQ ID NO: 86397 - DNA, 498 bp, Homo sapiens
gctcagggagggcccatggaagaggcagacaggcccccaaccccgcagactgcctccctgggggccgctgccatggggccgggccgggtggtgtgctgggtgaaggggagctcacggcggtgttgcccctgtctgggatgctggcccaggtctggagaccctgccccaggctgcgagaggacatggccaggtaccatgctccacggagccagcaggagccggggataagtgggatccctgccccttgcagtttggcgaggtgagagttccccaggtacaactgcccaagtcgtggctgtggatctgggccttctgctccatggaggaggcaggagccagcccccactcctggtgcagtttcagctgccccaactggggctgctgacccaggcatcgctgctctcttggggagccagggaaggcccctctttcccttgtaggcctggaggtgcctgttcccgctgcccagcttcttcccgctcccaccacccactccaa

SEQ ID NO: 86398 - DNA, 361 bp, Homo sapiens
ctctgcttggttttaagatttcatctgtatcactagtctgaagcaatttgattatgatgtgccttggtgatgattttctttaaagttcttgtccttgagtttcactgaacttctctggtctttgagtttatagctgctatcagatttggagttttttcagccattatttcttcaaatatttttttctgcccctgcctcttctttcctttggcgattctactacacaaatattagatcacttgaatttgtttcacagctaactcaggctttgttcattttttggcaggcttttttctttctaggtttcattttcgcgtaatttccattgctgaggctttaaattcactcatctttcctatag

SEQ ID NO: 86399 - DNA, 3917 bp, Homo sapiens
tccaggctctgcgtgataagctgtggatcttcctggttcagtctttctatgctgttcgtcacacagaaagctggaagctgatgagcacagatgatcaacagaaaatccaagcagctgcatttgacaaaggtgatgatcgaagacttggcaaaaagcctatattcagtagctcgcagcaaaggaaacaagtttctgactctggtgatataaaaatcaaatcttggaggggaaataacaagaaagagtgttggagttatctctctactaataaaaagatgaaatctgatggattaggagcatctggacattcgtcaagtaccaatagaaatagtataaataaaactctgaagcaagatgatgtaaaggaaaaagatggtacaaaaatagcatctaagattacaaaagaactaaaaactgggggaaaaaatgtttctggaaagcccaaaactgtaacaaaatccaaaacagaaaatggtgataaggcacggttggaaaacatgtcacctagacaagttgtagaaagatcagcaacagcagcagcagcagcaactggacagaagaatttactaaatggaaaaggagtgagaaatcaggaagggcaaatttcaggtgccagacccaaggtactcacaggaaacttaaatgtgcaagccaaagcaaagcctttgaagaaagctacagggaaggattcaccatgcctcagcatcgcaggaccctccagcagatccacagattcaagtatggaattctcaatttccactgaatgtctggatgaaccgaaagaaaatggatcaacagaagaagaaaagccttctggacataaactatccttttgtgattctccaggacagatgatgaaaaacagtgtagatagtgtcaaaaattccactgtagccataaaatctcgacctgtttcaagagttaccaatggaacttccaataaaaaaagtattcatgaacaagacactaatgtaaataacagtgtactaaagaaagtcagtggcaaaggatgtagtgagccagtaccacaggcaattttgaagaaaagaggaactagcaatggatgtactgcagctcagcagaggacaaagagtaccccatctaatcttactaaaactcaaggatcccaaggagagtcaccaaactcagtaaaatcttcagtctcttcaaggcagtctgatgaaaatgtggcaaagttggaccacaatacaactacagagaaacaagcacctaagagaaaaatggtcaagcaagtacacacagctttgcctaaggttaatgcaaaaatagtggcaatgcctaaaaatctaaatcagtcaaagaaaggtgaaactttgaataataaagattcaaaacagaaaatgcctcctggacaggttatatcaaaaactcagccttcctcccaaagacctttaaaacatgaaacatctactgtccaaaaaagtatgtttcatgatgtgcgtgataataacaacaaggacagtgtttctgaacagaagcctcacaaacctctcattaatcttgcatctgaaataagtgatgcagaagcactccagtcatcctgcaggcctgacccacaaaagccattaaacgatcaagaaaaagagaagttggcgttagaatgccaaaatatttcaaagctggataaatcattaaaacacgaactggaatcaaaacagatttgtttagataaaagtgaaacaaaatttcccaatcacaaagaaacagatgattgcgatgcagctaacatatgttgtcattctgttgggagtgataatgtaaattcaaaattttatagcaccacagccctaaaatacatggtttcaaatccaaatgaaaactccttgaactctaatccagtttgtgatttagactcaacaagtgcagggcaaatccatttgatatcagatagggagaaccaagtagggagaaaagatacaaacaaacaatcaagtattaaatgtgtggaagatgtttcactgtgtaatcctgaaaggacaaatggtaccttaaattctgctcaagaagacaaaaaatcgaaagttcctgtggaaggactgacaattcctagtaagttgtcagatgaatctgctatggatgaagacaaacatgctacagcagactcagatgtatcttccaagtgtttttcgggacagctatcagaaaaaaattctcctaaaaatatggaaacatcagaatctccagagagccatgaaactccagaaactccatttgtgggtcactggaatttgagtactggtgttctgcatcagcgagagagtcctgaatctgacactggcagtgctaccacctcctccgatgacataaagcccagatctgaagactatgatgctggagggtctcaggatgatgatgggtcaaatgacagaggtatctctaaatgtggcactatgctgtgccatgattttcttggaagaagtagcagtgataccagtactcctgaagaattaaaaatttatgatagtaatttaagaattgaagtaaaaatgaaaaagcaaagtaataatgatcttttccaagttaattcaacgagtgatgatgaaatccctaggaaaaggccagaaatttggtctcgatctgcaatagttcactctagggaaagagaaaatattccacgaggcagtgtccagtttgctcaggaaatagatcaggtatcttcttcagcagatgaaacagaagatgaaagatctgaagctgaaaacgttgcagaaaatttctctatatctaacccagctcctcagcagtttcagggaataattaatttagcttttgaagatgcaactgaaaatgaatgtcgtgaattttctgcaaataaaaagtttaaaaggtcagttttactttcagtcgatgaatgtgaagagctgggatcagatgaaggagaagtccatactccctttcaggcttctgtagattctttttcaccttctgatgtttttgatggcatttctcatgaacatcatggaaggacctgctattccagattctcacgagaaagtgaagataatattttagaatgtaaacaaaataaaggcaatagtgtatgtaaaaatgaaagcactgtcttggatcttagtagcattgactcttcaagaaaaaataaacagagtgtttcagccacagaaaaaaagaacacaatagacgtcctatccagtagaagcagacagcttcttcgagaagataaaaaagtaaacaatggaagcaatgtggaaaatgacattcagcaacgcagcaaattcttggatagtgatgtaaaatctcaagaaagaccatgtcacttggatcttcatcaaagagaacccaattctgacataccaaagaacagctctacaaaatctctagactcctttcggagtcaagttctgcctcaggaaggtccagtgaaagagagccattctacaactactgaaaaagctaatattgctttatctgcaggagacatagatgattgtgacacactggcacaaacccgcatgtatgaccatcggccttcaaaaaccctgtctccaatatatgagatggatgtaatagaagcatttgagcagaaagtggaatcagaaacacatgttacagatatggattttgaagatgaccaacattttgcaaaacaagattggacactactaaagcaactgctctctgaacaggattcaaacttagatgttacaaattccgttcctgaagacttaagtttagcacagtatctaatcaatcagacactacttttagcacgagatagctcaaaacctcagggtataacacatattgacactttgaacagatggagtgaactaacatctccacttgattcctcagcgagcatcaccatggctagtttttcctctgaagattgttcacctcaaggcgagtggacaattctggaactggaaactcagcat

SEQ ID NO: 86400 - DNA, 676 bp, Homo sapiens
gactctctgatccacaccacccacgctgcgcgggggtgggggcattccagatgtcttactttttgtcgggttccagggaaccctgactgggttttggcactcctgggtcctccctctgaattttcgggctcctgcttctccattctgggttcacctccctcctccctcgggttcctgggtgcctggagttgaatggaggctttcatggggaggcggagggcgaactcctgtgtgtgtttaaggggggcggccggcctttcatcctggctgccgccagctggtgagctgagcgccccttcccccgcagcgagcaggggcgacggaaagttggtggtgatctggcccccccgcagaaaggtctcggagaacggcctggagcaggtgggagcccccttacccgtgtgcctctagcgcttgtcggtccccccacccctccggtgccaggacgcttggtggggaaaagtgcatcctccctggagggccactctggtcagaactcagtctgggacgcatccccggggtgaagaggagacggtggtcttgaggcccaaaccgccaccccgagcctggatgcagtgcgcaggtccctgaggccggccttccttctggtcctctgtccccaggaggagcgcaaaccttgaggtttgaaaaggctgggacccccggccggaagtaa

SEQ ID NO: 86401 - DNA, 652 bp, Homo sapiens
tttacatttttaaaaagtgattttatttctatatactagtaatgaatgtttgaaaatttaaaaaccactaccattgacaacagtagaaaatatataaaatatttggtataaatataaaatatgtccaggatctgtatgctgaaagtggaaaaaaaagcaagaccaaaataaatatacagctatatcatgtttgtggcctaaagacaaaatattgtgaggatgtaaattttcttcaaattcatctatagttctaactcaacagatatactagccagaattttttataggaaagcaacaattctaaaatttctgggaaaagcaaagtagtaatcaacacgatttttgagacggacgaagttgtacacactatctaattttaagacttcctatgattaggaaagtgtggtatttgtgaatggataccaatggaacagaataggcagcccagaattagacccaaacaaatataatcaattgattttttgacagaagtgcaaaagcaatgcaataaaaaagaaacaatcttttcaacaaatggtactagaacaattagatagccatattttaaaaaatgaaccttgacccatagctaagctttatacaagcctttattcagaaagtaaatagaaatgaatgtagatcttaaaactat

SEQ ID NO: 86402 - DNA, 707 bp, Homo sapiens
  misc_feature (1)...(707): n = a,t,c or g
ggcaactgccagacaaacagcacccatgatccttatgcaaaagccatatttgaactcagcaaaatcatatttcaccgcttgtacagtttgttgtatcacagtgacataattttcaaactcagccctcagggctaccgcttccagaagttaagccgagtgttgaatcagtacacagatacaataatccaggaaagaaagaaatccctccaggctggggtaaagcaggataacactccgaagaggaagtaccaggattttctggatattgtcctttctgccaaggatgaaagtggtagcagcttctcagatattgatgtacactctgaagtgagcacattcctgttggcaggacatgacaccttggcagcaagcatctcctggatcctttactgcctggctctgaaccctgagcatcaagagagatgccgggaggaggtcaggggcatcctgggggatgggtcttctatcacttgggaccagctgggtgagatgtcgtacaccacaatgtgcatcaaggagacgtgccgattgattcctgcagtcccgtccatttccagagatctcagcaagccactttaccttcccagatgggatggcacattgcctggcaggggattcaccgtggttntttagtattttnggggtttttcaccacaaccntgttgttttgggaaaaacccaaaggttttttgacccnttgaggtttt

SEQ ID NO: 86403 - DNA, 3275 bp, Homo sapiens
agatgtgccactgattcgaattgaagaggatactggtgagatcttcactactggcgctcgcattgatcgtgagaaattatgtgctggtatcccaagggatgagcattgcttttatgaagtggaggttgccattttgccggatgaaatatttagactggttaagatacgttttctgatagaagatataaatgataatgcaccattgttcccagcaacagttatcaacatatcaattccagagaactcggctataaactctaaatatactctcccagcggctgttgatcctgacgtaggaataaacggagttcaaaactacgaactaattaagagtcaaaacatttttggcctcgatgtcattgaaacaccaggaggagacaagatgccacaactgattgttcaaaaggagttagatagggaagagaaggatacctacgtgatgaaagtaaaggttgaagatggtggctttcctcaaagatccagtactgctattttgcaagtgagtgttactgatacaaatgacaaccacccagtctttaaggagacagagattgaagtcagtataccagaaaatgctcctgtaggcacttcagtgacacagctccatgccacagatgctgacataggtgaaaatgccaagatccacttctctttcagcaatctagtctccaacattgccaggagattatttcacctcaatgccaccactggacttatcacaatcaaagaaccactggatagggaagaaacaccaaaccacaagttactggttttggcaagtgatggtggattgatgccagcaagagcaatggtgctggtaaatgttacagatgtcaatgataatgtcccatccattgacataagatacatcgtcaatcctgtcaatgacacagttgttctttcagaaaatattccactcaacaccaaaattgctctcataactgtgacggataaggatgcggaccataatggcagggtgacatgcttcacagatcatgaaatccctttcagattaaggccagtattcagtaatcagttcctcctggagactgcagcatatcttgactatgagtccacaaaagaatatgccattaaattactggctggcagatgctggcaaacctcctttgaatcagtcagcaatgctcttcatcaaagtgaaagatgaaaatgacaatgctccagttttcacccagtctttcgtaactgtttctattcctgagaataactctcctggcatccagttgacgaaagtaagtgcaatggatgcagacagtgggcctaatgctaagatcaattacctgctaggccctgatgctccacctgaattcagcctggattgtcgtacaggcatgctgactgtagtgaagaaactagatagagaaaaagaggataaatatttattcacaattctggcaaaagataacggggtaccacccttaaccagcaatgtcacagtctttgtaagcattattgatcagaatgacaatagcccagttttcactcacaatgaatacaacttctatgtcccagaaaaccttccaaggcatggtacagtaggactaatcactgtaactgatcctgattatggagacaattctgcagttacgctctccattttagatgagaatgatgacttcaccattgattcacaaactggtgtcatccgaccaaatatttcatttgatagagaaaaacaagaatcttacactttctatgtaaaggctgaggatggtggtagagtatcacgttcttcaagtgccaaagtaaccataaatgtggttgatgtcaatgacaacaaaccagttttcattgtccctccttccaactgttcttatgaattggttctaccgtccactaatccaggcacagtggtctttcaggtaattgctgttgacaatgacactggcatgaatgcagaggttcgttacagcattgtaggaggaaacacaagagatctgtttgcaatcgaccaagaaacaggcaacataacattgatggagaaatgtgatgttacagaccttggtttacacagagtgttggtcaaagctaatgacttaggacagcctgattctctcttcagtgttgtaattgtcaatctgttcgtgaatgagtcggtgaccaatgctacactgattaatgaactggtgccgcaaaagcatttgaagcaccagtgaccccaaatacttgagatagctgatgtatcctcaccaactagtgactatgtcaagatcctggttgcagctgttgctggcaccataactgtcgttgtagttattttcatcactgctgtagtaagatgtcgccaggcaccacaccttaaggctgctcagaaaaacatgcagaattctgaatgggctaccccaaacccagaaaacaggcagatgataatgatgaagaaaaagaaaaagaagaagaagcattcccctaagaacctgctgcttaatgttgtcactattgaagaaactaaggcagatgatgttgacagtgatggaaacagagtcacactagaccttcctattgatctagaagagcaaacaatgggaaagtacaattgggtaactacacctactactttcaagcctgacagccctgatttggcccgacactacaaatctgcctctccacagcctgccttccaaattcagcctgaaactcccctgaatttgaagcaccacatcatccaagaactgcctctcgataacacctttgtggcctgtgactctatctccaattgttcctcaagcagttcagatccctacagcgtttctgactgtggctatccagtgacaaccttcgaggtacctgtgtccgtacacaccagaccgcctgttgacttagaggtaggaggagcccagagtggccaggtagcaatcttaacttccagtttaatggaattgttgttgtgtctcatggtggcagcattcctccctctggagttaagacctctaggccagcagaacgtaatgtcatgggaacaggaagcaaaaattcttctagtaggttactggggtgatggtgagtggtgccacttccacttccaccacttgattcctggacctgtgaatcctggctatgagaggaagcagtaccatatattggacagtgattcagaggatacacagccttctggagaactttgccccatccctgtaaggccattcacaattctatcaatccagctgcttcaggatgatggggaacactgtggaactaaacaaggctttcaacctgctgtacaattaggtttgctccctcataaaacactgaaatga

SEQ ID NO: 86404 - DNA, 1097 bp, Homo sapiens; identical to SEQ ID NO: 66192

SEQ ID NO: 86405 - DNA, 1343 bp, Homo sapiens
ttttttttttttagggagggcacaggaaactctttattatggggatgagatcgacaatctcccctactgttaaccttcgctcctgcacacttcagtgtcctcactctgtagggctcgctggcctgggcttctgcgacccgcgatcgtccaggagagggcactcggcgcccttcctggggcgcttctggggcggaatttgctaggccgccgtagcagcggtgccaggtcagaagccgagccggcccgcttttcgttctttaattggactcttggctaagacgctaccgacaccccgtcaggtggtggaggaagaaggacaacagggagaggtcgagggccgagacggcctctaggaggagtagaggaaggtggagcggatggtccatccgggcgggagttggctgggcgagtgaccgcgcatgtgcgcctgcatggaggccaggctgggacagccggccccgcacagggagcagcggtacggagcggccccgtgtgtccgcaggtgcttgggtcatggccgagaagtcccgggagcgctgaggacaaaggctacaggagaagggcttctctcctgtatggactcggtagtgcgtctccatctgatgcttgagtgaaaacctctttccacagacagagcacgcatagggccgagaccgagcaggaggggccgggggagggtgcgggcgaggtgggcagcctgccttgtcctcatgacccgcacaggttgcaagtgcgcctgtgtgcccctgatcagactcttccatctccccagggctgagctgtgcggggccctgggggagggaacctggggtagggctggaggaggccaactggttctggctccagagccctttgggggcatttagggacagtgggatcctctgttcccgccagacctcctgccaggctccagtggtgggggtgctatggtagaagggaatgccatatctgggcggcatcagcaggatgctccacagggcaggctggccccccaccaaccaaggggcctcagcccacgagggcctaggggtgacgctggtttgcagggagcctgctgggggaagggggccagggagcttgcgcagactttcctcagagccccctggattttccctcaaccacgtgagcactccatgcttcccatctgctcccctttggccaacaggggcttggaggcgtttctcctttgacctggtctgttcctgctgagcctcctgcgttgctcctgccatctcgggtctgcctcttggtggcgagtgcttgtgcaacatctcctgttctctcccaccagttctagaaacctgttctggtttctgcttctctccagggtcccccagttctct

SEQ ID NO: 86406 - DNA, 1215 bp, Homo sapiens; identical to SEQ ID NO: 80094

SEQ ID NO: 86407 - DNA, 4461 bp, Homo sapiens
gcgaccgtcgggatcccggggccgcgcgctcagcttcacccgacttacttcaacctggccgaggccgaggatttggccaccgccacctgcggggagaggggacccggcgaggggaggccccagcccgagctctactgcaagttggtcgggggccccaccgccccaggcagcggccacaccatccagggccagttctgtgactattgcaattctgaagaccccaggaaagcacatcctgtcaccaatgccatcgatggatctgaacgttggtggcaaagccctcccctgtcctcaggcacacagtacaacagagtcaacctcaccttggatctggggcagctcttccatgtggcctatattttaatcaaatttgcaaattctcctcgccctgatctttgggtcttggaaagatctgtagactttggaagcacctactcaccatggcaatattttgctcattctaaagtagactgtttaaaagaatttgggcgggaggcaaatatggctgtcacccgggatgatgatgtactttgtgttactgaatattcccgtattgtacctttggaaaatggtgaggttgtggtgtccttgataaacggtcgtccaggtgcaaaaaattttactttctctcacaccctgaggggagtttaccaaggcaacaaacatccgcttgcgtttcttagaaccaatacgcttcttggacacctcatctccaaaagcccagcgagatcaactgtcaactcgccggtattattacagcataaaaggacacagccattggtgggcagtgtgtttgcaatggccatgctgaagtgtgcaatataaacaatcctgaaaaactgtttcggtgtgaatgccagcaccacacctgtggggagacgtgtgatcgctgctgcacagggtacaatcagaggcgctggcggcccgccgcttgggagcagagccacgagtgtgaagcatgcaactgccacggccatgccagcaactgttactatgatccagatgttgagcggcagcaggcaagcttgaatacccagggcatctatgctggtggaggggtctgcattaactgtcagcacaacacagctggagtaaactgtgaacagtgtgctaagggctattaccgcccttatggggttccagtggatgcccctgatggctgcatcccctgcagctgtgaccctgagcatgcggatggctgtgaacagggttcaggccgctgtcactgcaagccaaatttccacggagacaactgtgagaagtgtgcaattggatacaatttcccattttgcttgagaattcccatttttcctgtttctacaccaagttcagaagatccagtagctggagatataaaagggtgtgactgtaatctggaaggtgttctccctgaaatatgtgatgcccacggacggtgcctgtgccgccctggggttgagggccctcgatgtgatacctgccgctctggtttctactcattccctatttgccaagcctgctggtgttcagcccttggatcctaccagatgccctgcagctcagtgactggacagtgtgaatgtcggccaggagttacaggacagcggtgtgacaggtgtctctcaggagcttatgatttcccccactgccaaggttccagcagtgcttgtgacccagctggtaccatcaactggaatttggggtattgccaatgcaagcttcatgttgaaggtcctacttgtagccgctgcaaactcttatattggaatctggacaaagaaaaccccagtggatgttcagaatgcaagtgccataaggggggaacagtgagtggaactggagagtgtaggcagggagatggtgactgtcactgcaagtcccatgtgggtggcgattcctgcgacacctgtgaagatggatattttgctttggaaaagagcaattactttgggtgtcaagggtgtcagtgtgacattggtggggcattgtcctccatgtgcagtgggccctcgggagtgtgccagtgccgagagcatgtcgtgggaaaggtgtgccagcggcctgaaaacaactactatttcccagatttgcatcatatgaagtatgagattgaagacggcagcacacctaatgggagagaccttcgatttggatttgatccgctggcatttcctgagtttagctggagaggatatgcccaaatggcctcagtacagaatgatgtaagaataacattgaatgtagggaagtcaagtggctccttgtttcgtgttattctgagatacgttaaccctggaactgaagcagtatctggccatataactatttatccatcctggggtgctgctcaaagcaaagagatcatcttcctgccgagtaaggagccagcctttgtcactctccctggaaatggttttgcagacccattttcaatcacaccaggaatgtgggttgcttgtattaaggcagaaggagtccttctggattacctggtgctgctccccagggactactatgaagcctctgatctgcagctgccagtcacagaaccatgtgcctacgcaggacctccccaagaaaattgcttactctaccagcatttgccagtgaccagattcccctgtacccgttcttgtgaggccagacacttcctgcttgatggggagccaagacccgtggcagtgaggcagcccacacctgcacaccctgtcatggtggacctcagcgggagagaggtggaattgcatctgcgcgtgcgcatcccacaggttggaccctacgtggttgtggtcgagtattccacggaggcagcccagctgtttgtggttgatgcgaatgtgaagagctccgggtctgttctggcaggccaggtgaacatttacagctgcaactacagtgttctctgccggagtgctgtgattgatcacatgagccgcatcgccatgtatgagctattaacagatgcagacattcagctcaagggacacatggcccgattccttctgcatcaagtttgtatcatacctattgaagaatactcagctgagtatgtgagaccacaagtccactgcattgccagttatgggcgatttgtcaatcaaagtgccacctgtgtctccttggcccatgaaactcctccaacagcattaattttggatgttctaagtggcaggcccttccctcacctgccccagcagtcgtcaccttctgttgatgttcttcctggggtcaccttgaaggcaccgcagaatcaagtgaccctgagaggacgtgtaccacacctgggccgatacgtctttgtcatccatttttaccaagcagcgcacccgacgtttcccgcgcaggtgtcggtggatggcgggtggccacgggcaggctccttccatgcctctttttgcccccatgtgcttggctgccgggatcaagtgattgtttaaggccagattgagtttgacatctcagagcctgaagtggccgcaactgtgaaggttccagaaggaaagtccttggttttggtccgtgttctagtggtgcctgcagaaaactatgactaccaaatacttcacaaaaaatccatggacaagtcactcgagtttatcaccaattgtggaaaaaacagcttttaccttgacccccagacagcctccagattctgtaagaattccgccaggtccctggtggccttttaccacaagggcgccctgccttgtgagtgccaccccactggggccaccggccctcactgcagccctgagggtgggcagtgcccatgccagcccaacgtcatcgggcggcagtgcacccgctgtgcaacaggccacctacggattcccacgctgcaagcccaagccgtgcagctgtggtcggcgcctttgtgaagagatgacggggcagtgccgctgccctccccgcacggtcaggccccagtgtgaggtgtgtgagacacactcattcagcctccaccccatggccggctgcgaaggctgcaactgttccaggaggggcaccatcgaggctgccatgccgagatgtgaccgggacagcgggcagtgcggatgcaagcccagaatcacagggcggcagtgtgaccgatgtgcttccgggttttacggctttcctgagtgtgttccctgcaattgcaacagagatgggactgagccaggagtgtgtgacccagggaccggggcttgcctctgcaaggaaaatgtagaaggcacagagtgtaatgtgtgtcgagaaggctcattccatttggacccagccaatctcaagggttgtaccagctgtttctgttttggagtaaataatcaatgtcacagctcacataagcgaaggactaagtttgtggatatgctgggctggcacctggagacagcagacagagtggacatccctgtctctttcaacccaggcagcaacagtatggtggcggatctccaggagctgcctgcaaccatccacagcgcgtcctgggtcgcaccc

SEQ ID NO: 86408 - DNA, 521 bp, Homo sapiens
  misc_feature (1)...(521): n = a,t,c or g
cgaggcccccatagaattcgattgcctgtggcggaattcctttggaagaacagtttagaagcatcactaaagctgaatatattcatgcctactccggaaatcctgagcccagtggctccctttgaagaactgccttggggttcatgttgcagcatcaaacagggatggaagatgcatcttgctttagcagcaggagcctggaaagcagctgaagccctggagggtgcctggcacacagaatcttgtgctgagcccggagcacaatgggagcgggctggcggggtgggttcacagctggactgggagcagcagacatacaggccgtaggcacagacatataaagacagtcatgcagattgcaggatgcctgagagcacagactctcacatgcacaaatacgtgcatgatcgccagtgtgcattcagacagccccacatgcatgcacacgcatgcacacatgtgatgtgtacatagaatgacacatgtctatgcccacaaacactgcagagacacagaagtgn

SEQ ID NO: 86409 - DNA, 1738 bp, Homo sapiens
ttttttttttttgagacggagtcttgctgttgcccaggctggagtggagtgcgtggtgtgatctcggctcactgcaaactccgcctcctgggttcaagcgattctcctggcccagcctcctgagtagctgggattacaggtgtgtgccaccatgcccagctaatttttgtgtttttaagtagagacggggtttcaccatgttggccgggctggtcttgaactcctgacctcaggctatatgcccacttccacctcccaaagtgctgggattacaggcatgagccactgtgcccagcctggtattgataatttatattcagataatttgttatggctctttaatatcccacaaggggctctaaaaagcaaacattcaagagtatgtagtttttagacattaagttaattattttaaacagtgacagcaaaacacaagtgattaaatatagtttatttgttccaatgactaaattttacctcatttattaatctggtcattaaggaatatatttaataatattatgtaattattctttttatgcatgatacacctagaaaaatgccttttgtttctattgatggctttgttgtttggagctacttttgattacttattgcagtttcccaatttagtctttactttatctaactcacaaagtaaaattaactgatcacatggcaactactgtatttaaatagttctggaaaaatgaaagtgctttttgctgcttggtaaatgggtaatgcccttgattccttgactgtaggacatagctgatctaaagtactctgtcagttttaccttcacccatgactgtcattagttgtcaaagttgaaaagtactttagctgtgagaaatccttgtatgtttttattataagaggtataatcatcctcaaagcctgtttttattacatgatgtggactgattattttttctatcacagtgttaacagatggattttattgtaaatacaaagaaaacatattgattattgtagtattcttatgtcacctggccttttgcgtgagattatttattatttctagcaaggctttcttcctttcttattgcccagagactgactgatacatcttttgttatttttacacataaattaaacatagcctttttggacaaattcactaaatattaatgtataaaatgtaattgagtaaatttttatcagaattttaaaaataaaagagcttagactcagtagaactcagtagaagcttcactatttactccagcgtgtgtaaattgtacttactctattctcagagtatatttactgtccttaccattgattctttccctttgctaattttttttttttgttaatggtagctgcgactttaggtggggtatattttcttctcctaagagaatagacagtttttccagattcatcatcattgactgtcaagaaaggacccttcagcaaggctgtaccctcaatgcagttgatggcctgtcttcacggatttacagacttggcctgatgcccatgtaaattcaagctttggcttgtggtaacaaccacaagaagacaagcatctgtggtgcggaggcaagcaggctaactaggagttgacacaactaagaaagtgaaactgttctttcttagttaactgtctttctctggagctctgttattttgagtataatatttccacgacacttagtaaatgcaagctaaaatgtaataataataaattgtattggagaaaaaa

SEQ ID NO: 86410 - DNA, 674 bp, Homo sapiens
  misc_feature (1)...(674): n = a,t,c or g
gggtcgacccacgcgtccgggcagctgctctgtggaggacctccaggactgagactgggctctgttttccaagggtcttcactaggccccctagctacacctggaagtttcagaacccactttggggggcctcctgcctgggcaggctcttcaagtgtggccctctttggagtcaaccctccttcccgaccccctccccctagcccagccccagtcactgtcagggtcgggccagcccctgcactgcctcgcagagtggcctgggctaggtcactccnnnnnnnnnnnnnnnnnnnnnncccccttgagtcccctagggcctggaagggtgggaggtatgtctagggggcagtgtctcttccagggggaattctcagctcttgggaacccccttgctcccaggggaggggaaacctttttcattcaacattgtagggggcaagctttggtgcgccccctgctgaggagcagccccaggaggggaccacaggggatgctgtgtcgctgcctgggatcttggggttggcctttgcatgggaggcaggtggggcttggatcagtaagtctggttcccgcctccctgtctgagagaggaggcaggagccccagggccggcttgtgtttgtacattgcacagaaacttgtgtgggtgctttagtaaaaaacgtgaatgg

SEQ ID NO: 86411 - DNA, 2185 bp, Homo sapiens
ttttttttttttaactggcaaaggcatatttttatttaaataaatcaatctcacaactgtaattcgaacttgaaattagcaaagtttctttcacttcttacacataaaaaccttaaattttaactgtaataaagtgtgaatcctttaataacctgggtttttaaaagggtgccacccaatgggggtaatggaaaagggggatgttaatgtactaggcttccctggaaaatattttaaacatttttcatacaatactagggaaaacttccccttcttccacgtttaggcttaatagaacaaatcacatggaaagtttcatagtgggttcttttatttataaaataatcacattcaagtcttaccagagagtagcaaagtcttcaattcctttcctttcctttgaagaaataatgtagagcaatcactcataaatccctctaattataaataaaatccaagatattatttgacaatgagatgctttatttaaacttgatacatttactatataagaattctgtgaaaaaatggggtatgaaattattttggatctgaatctttgcattataaaatctaacccaaaactatgtcatttcactgtattctgtgactattagcagatggatgaccaaaggcaactacttcctttcctggcaaaacaagacaagtttcagctgacttccccatggtgttacaagttctcctagtgaagtaaaaagtcccaacccctctttctatgcatgtcatctccaggaaggtaagctttgggaagcacctgcgccagccctatatctgtgcttggcatgaggttcacacaggttcggccttgagatggggatgttcctctcaaccaaacaactctacttgaattattccgagactccttggaggggtgaaacttcaggcctgggtgtctctgcagtgagatgtctgtggttggtaaacagttctgtagagtcttgttctactgatctttcttctaggtctgactctgggattgtagtacaaccacctggcaatgaccatggtctggtgggggctgcttgcatcggtacttaggcagagacggccacctttggataatctatcgcagagcaaggtgatatgtttcgttcagttggcttgtgtcctttgggtatgttcaagctggctgttgaaggttcaaaagcctgctcccttagaaactcttcgacaggcaagtcttccaacaggtgggaaatggcggcatccaccgtttcttcccagcccaattcttgagtgtcttcttgtagcggcagaaatgccgcttccagaatagcaacctggtcagcactaagcttctgccacagcgcgatcagcagaatcaccaaatgggtggcactcttcagcctggtgaatgactggaacagattgccttggttttcctccactgcatctgctagagcaattacctgcttgtaggttccatctaacaaggtgtccaggtgttgaagaggggcaggagttttatctttgaatcttgctagtagccggcgttgaatggcccgaaattgtacagctctctcagataagagttcttctaatttttcaccatttatccgtagctcaaaatgatgatcaatcaactcaaaatattcttgaaggggtatagatcccgaaaaagaacatgcaaaatctttgactccctgtttttcaaaatattcttgaaggcgaagaataagctcattggttaatgaagcccaaagatccttcaaattgttccactcctggaatgcgaatatccgttgaagaagttttggaagcaagaacagtaattccgagcacctccctaagaagtgaaaacccattacattcacctgatcatcatctgactgactggcaaaacctgggaagagactaagaagactgactggagatttgttggtatcaatagtaattttgtggcttgcagtttttgaaggctgacctggtaggcaaattaactttaggggaagtctaaatttacattggataactcgcggaatgccatcaggatttcgattcataaattcaaaggtgaactgatcacaagtcaattctaatggtggttgcacgtagactgataatttggctttttgcaatatcactctgttctgcagtgtgaccttcaccgtgacagaagggacaaggtcagttcccacctcaacatcggtcgcttgagaaactg

SEQ ID NO: 86412 - DNA, 1214 bp, Homo sapiens
tcccaaaattcccaggtaggttttaattcggctccctataaggaaaaagcttttcctctgcctgcccgcgtaaacttgggcccccccagggatcctttaaaacggcccccccttttttttttttttcattatttattttatttcctgattctttcccctgccaagtgaccctctgggaaagcgggagtttttgttttgctttctaccagggctgcaagagcctagaactgggtctggcatacagcaaaggctcatttattgctgaatgaatgcatagtttggggaaggggaggacaagctgaggccacatttgggacgggtgctggggtggggtggagaagggagctgctgcccagagggactcagtaagattcagggtgggggccaagaccagcagctggcagcagggttcctgagaggggctgggcctgcctgaacagggaaggggtccagcagccgtggtcaccttgctgggactggtgtgtggggccacaggcctgtgaggctgggcctctctgccacctgaggcccgcatggtgggggtgtctgccttgtcctaaggggagaagactctgagggtcactagtggaattggggtaaggcattgaggacagacagttgggagcccagccaactgcctgggaggcaggcctgaggccaccatcttgtccccagatatccagatcttgggggacttttgcatggaaaggggccagagcctgcctttcacaggcacatggcccaggccagcttgcttgaaggaacagaccgaaggcgggcgtgcattcaggggctgcacaaggacctgggcctgttacagtctcctgtccccctgccaggacacctgccccatgtgctgctgagtctttggctgagtccacctcatcggccccacagcccccaatggccttgtcctgctggtctcaggtgtgaggctcccagaggagggctggggccttgtcttctccctggctggcctggcccaggacccatcaggaagttggcaccagctggcagtagggggcagggtcggggtttagcaggtcctggtactggtggttctctggctccgcctgcaggtgtgggggtgtgggcaggggccgggctgggtttatggaccttgtgtcactgatgggggacaccaggaggactggagagggcatcacttcatagatgttgttgtcaccagcatcatgagcagggcccaattctgg

SEQ ID NO: 86413 - DNA, 432 bp, Homo sapiens
tgtagaagtatgcagaaggtacttgtggaaaatgactgtggacgcttcacaaaatgtacaatgctgcgtcatattcagtcactttccatttatctttaataatctgtcgaaaattaaactactacatacagacacacttttaaaaatagagagtaaaaaacataaagcttatcttaggtcggcagcaattgaggaagaaagagagtctgaattcgctttgaggcccacgtttgatctaacagtcagaaggaatcacttgattgaggatgttttgaatcagctaagtcaatttgagaatgaagacctgaggaaagagttatgggtttcatttagtggagaaattgggtatgacctcggagggagttcaagaaagagatcttctactgtctgtttgcagagatgatccagccggaatatgggatgttcatgtat

SEQ ID NO: 86414 - DNA, 347 bp, Homo sapiens
cggataccagccgtcttaaaaataatgactgcgaccggcccagccttgactattctgggccaccttgaaactccaatcataaatgctatgtatcataatagagcactctcttgactacttgctagcgcctgaccgataggcttgtctgaaatttagccgtactagttgctgcctacacatagatgaccaagggctatttggtgaagacatagttagagatatgacaaaagtggcacatgtgcccgtgcaagtgtggcatggatttgatcctggggccatgtttagaaaatggttcccagcgctaggaggatttaaaactcttataataagagttataatagtaataa

SEQ ID NO: 86415 - DNA, 726 bp, Homo sapiens
gcacgagctcggccccggacggcccggctgctgtgcagagaggaggccgagtcgtgaaaagagaatactgaagaataggatctcaagatgagtaaaaagcccccaaatcgccctggaatcacttttgagattggtgctcgtttggaggcactggactacttacaaaaatggtatccatcacgaattgaaaaaattgactatgaggagggcaagatgttggtccattttgagcgctggagtcatcgttatgatgagtgtatttactgggatagcaatagattgcgaccccttgagagaccggcactaagaaaagaagggctaaaagatgaggaagatttctttgattttaaagctggagaagaagttctggctcgttggacagactgtcgctattaccctgccaagattgaagcaattaacaaagaaggaacatttacagttcagttttatgatggagtaattcgttgtttaaaaagaatgcacattaaagccatgcccgaggatgctaaggggcaggattggatagctttagtcaaagcagctgctgcagctgcagccaagaacaaaacagggagtaaacctcgaaccagcgctaacagcaataaagataaggataaagatgagagaaagtggtttaaagtaccttcaaagaaggaggaaacttcaacttgtatagccacaccagacgtagagaagaaggaagatctgcctacatcttagtgaaac

SEQ ID NO: 86416 - DNA, 356 bp, Homo sapiens
ggcacgagcgcagccattcaaccgatgggagctctccaaccagggttgccatctccggccatgatcccaaaagaatggccgatggtaataattgatctaaaagattgtgttttttactattcctttggctcctcaggattttgagaaatttgcatttacaatacctgccatgaataacaaggaaccagctactatatatcgatggaaagttgtaccccaaggaatgttaaatagtcaaacttttgttggaaaggttattcagcttgtcagggatcagtttcctgattgctatattattcattatgttgatgacattttatgtgctgctgcaagcagggacagacggattgagtgtt

SEQ ID NO: 86417 - DNA, 375 bp, Homo sapiens
ggcacgagcggcacgagcttcgaattcctctggttctaaagacatgcatttgaaaataagaaatcaaagactaagcatttactaaatactaggattatgttgtatgataaatatacaggcaaagttgaagaattgctggaagatttaagagaaaagaagaggctgttgtggccctgatgatgacgatggtgatggtgatggtgatgatgaagatgacagctaaaacaagtactgctaactttgatcattaataattatagcttcgataatgatactgaatatcttgtaaagcgcttaataaataaaaacgtcaactgcagaaaagcatgtcaaaatgaatacagattaatgagatctagatgaatggtgtagctt

SEQ ID NO: 86418 - DNA, 1218 bp, Homo sapiens
ggagcaacatgctgttttaatgagcgcctgcatgcagacaggctgaggcctaaaatggcatcagccccaagtgaggatggggcaggggttttatagtcctctgtaaacaggaattgtcccagcctaacgtgactgctatgtagtaccagggcgacctccctcttgatcttcagggggtacgtgtcttccagccagctctcttcctgcctctgctatcttgctgctggtgcaagtttgtaccttgggactgggcctgaggaggaggagttattcatcccgcaagctttcaggccccgaggagaatcttccattcctgtctatttggttatagaaaaggggaaagggacgactttctcaataactacttcaggcgtgacataggggtggcgtgggccccttggaaaaagaaaaacttaatttttggggtattcttgagagacgggttgggtatcccatcgtgcccgctgtaagcaggagcatcatcctggattgtccaggaggttaaactgtagtttcaaacaagagttttaatgggatacccacaggggagaaacaggaggaccccagtgatgaaaatgactgtccccaccagcattttaaatcctcctaaattagagaaccaccctcctagaaggtttgctgggtcccatccctcccaggtttggactggtacacgggctacttttctgatgtttgaagcgatttccagaacctcttctccattattgcctatgttaagacagcaattggagatgttaaacttacccacagcccgcaaccctcttcctgcctaaataagtaagtctagggccagcctgttttgataaattgccgcgcgcatttggttttgttgttgcgcgagcatttctagggctgaggcagtttggttagtgaattatctcctaagaacagcttgtagtctaatcgctctatttggcatatatatgggagtgcgataaccccatgaaccatcctctgcccaagtggcaggaccatagtattcaatgatccgttgcagaggccactcgtcctctcacaatctttggctccctcctacctccaaggatcatttttctctggttatcatacacagggactctgagggtgttgcccgcctgcttcggaagtaaaaagaatccaggttgaattgtgcctaggaagcaagtaccttgccagtgataaggtagctgtgagtaagcctgggttccccctcgtgcc

SEQ ID NO: 86419 - DNA, 381 bp, Homo sapiens
ggcacgagcatgagcttcaataccctgctgcagcatgaggcttcccaggagcccaggagccaggcggctggaggagctgctctgggggggccctcctggcctgtggcccatgtcccagagtgccaagaaactacccagacactgggcaagacaaaccaggcactgcctgtggccctggtggcagagcccgggggcttcctgacctggtccttggggagagtcggagctgcccttccctggagagacaccgtgggtcctggagccagaggcttggcatccgctgagctggggtcgtgaagcgtcctaagcccacccacgcacctcatcccgaggaattaatacttctgaggagacgaaggaaaccacttacccttatatcgt

SEQ ID NO: 86420 - DNA, 1541 bp, Homo sapiens
ttttttttttttaaatttaaaatgtctttattcatttacatggtatatatcaccctctacaaaaaaaaatgacacttgtctttcaatctgtcaagcttagctaaaaaattcacgtatctcttttctatatcacatattgacatgatataggatgcaagatataaatatcaatttaatagacattattaaataattttacacttagtagaatcttggataaatggttaaaattatagattgacattaagtgtgggcacaggaatattctgtgtataccaatgggtttaacagaagatgtgtttgcactgatttctggtcatcaacttgctttccgtgaatctttaaatacccaattccaaatcttccagctcctggagaagggctgtttctttctgaattttctccaactgatttttttctagctgttttccagttgctgcttgttctttcagttgttcgattgctttcagtttcttctttaggttcttgatttttttgtctatctcagggtccccagaaattgactgagagacagtgtttcgtggtgtgctctgtggggcaggagtaggtgccaaatctggactcttgtcacttcttgcttcctgctttgcagctttcttagcttcatgcttcctttgatttttaagagctgtttttgataatggcttatcgtttcctgattgtggtttcatattctgaggtggttcctcttcatgcaatttggaattggtgattggtttatttcttaaagctgggggtctataagctgttgcaactttaggttcctcattgggtacttcacttggaactgcttggtaagttattgtttttgctggaaatattccatccaaaaatggctgccaagaaacctgccataattctgcatttgatggcacatcatacttgtgcaagatagagccagtataatgccaaattttgtatccattattaacccgtaacctgggagcacatgtagctgttaaaatatgctcaccatccgggcaccaagcaaaatatgtagaatcagaagccaccggtttagaaataagtttgtagtttttcacattccacactttcatttgtccgctcagatttgtaaaatcagatttccaaatccagctaatactaatatatgtccatgagggctatagtaggctgcattacgaggaccagttccaaagtcaaatacaggatcacatttcaagttgaaaattgtcgctttggcaggcataaaaccatatacagcacaaaactcagtagaactagaattccaaactacatcataaatggggccattttttggtaattgcactacagcactttctccatttgttgcaatgtagtgtagagtttgttctccatagtaggaagctcctgtcttgtcaacatctgtgctagctattaccaacacagcagtagcttttttattccacagcattgtaactttatctgccttaaagaaacttttattagctaaagctgcatgaggtccagcaaagttggggtactgatataatctaacaaatgaaggtgcaccttta

SEQ ID NO: 86421 - DNA, 2161 bp, Homo sapiens
tcatccggtctccggcagccaggtccccaggcctggagacgcccacttgcctcctgtttgtcatcgctgctattgccgctgtttttgtagacagtgctatccccagattgactcagcacagaccacaggacgggagtttcccgtacacaatccttgaccctcccctgtacctgccaggccagtgtgcccctcctcagcccctatctcaatgcgcccgccgtgtccatggagagaagctgaggcggccgaccttcggcccgaggcaccggggcgccgggacggcgaagatgtcggcttccttagtccgggcaactgtccgggctgtgagcaagaggaagctgcagcccacccgggcagccctcaccctgacaccttcagcagtaaacaagataaaacaacttcttaaagataagcctgagcatgtaggtgtaaaagttggtgtccgaaccaggggctgtaatggcctttcttatactctagaatatacaaagacaaaaggagattctgatgaagaagttattcaagatggagtcagagtattcatcgaaaagaaagcacagctaacacttttaggaacagaaatggactatgttgaagacaaattatccagtgagtttgtgttcaataacccaaacatcaaagggacttgtggctgtggagaaagctttaatatttgaaatctcaggactcttctggccgtaggttccaggaaagctcgtggaagctttggggctcactgcagaaatcatgtgactgtcacatgctggaaaataaagtgatacatcttgaaaatgaatccagtgtgttggattccagaagaaatgatatttatattctctataggggacagaaaatgagaagccatcactctttttggatcatttaggtctcttgtatcctttgttttagaaccagtttcattaaagttgccttcctgggcacctgtttatccatttcctgaactgtgtgcactccttagatcgctattgatggcttgatcatccctcagcatttctcccaaccagatcggtgactcctaaaatctgagacaggacatcgtgactgctggtagtaatatggtggtgcattgttttttccacccaaacttaacatagcctttttatacatttttatgaaaaatttcattgtcagctgcctcactgcatactctttaatagtaccaggcaaagattttcttcaactatagtacagattagttctgagtgatggtatcaaaaggtgagaaagacgtcatccgcctttttttaatccatttcttttgccaccctatatgtctgttcagagatgggctctcaagctgactttgattcttttagttgagaagtctcttaaagccatctagcccacctccctcaattccctatgtgaggaagcaaaaccccagggaagccaaagggctcctgtccaccctgacaccacaggccgggggagagtagggactctacccccctctccccttgtaggtgacacatgctctgccctctgaggcagtcagcgaaggcaaatggtctgacttctttatgtggtcaacattttgatagaatttctttataatttgatagagattatattatttttattttattttgagtgggaagaattttaaaacctttttatgtcaattaccatcttgtttctttcacctttgaaacaatgatttgtagcagagatgacattgtagcaacccagaattatgcttttggaatgtggtcctcactgtacaggagaatgtgtaatcttttgttaaaattcccagtgtgcatacattttctggttcctcggtccagttgctaaagttcttagtattttagcctaacatatttatcaccaacttttctttaaaagtgttccttttgtcacttagttactgattttcctgggtttgacataagtattctatgagatgatatatatgctttttttgaaagctgattctcatgaattcaagtagctgagttcctttatgtttcgtttattcactaaagtagctgacacaaaacacaccaaaacctagagcggtagttttatgtaaatgctcatgagtttgtatcaataatataattgttgatccacttataattcgtgcaatactgtatgtatgtagagattgagttgtcaattaaaaaaaatgtggcctctt

SEQ ID NO: 86422 - DNA, 3268 bp, Homo sapiens
  misc_feature (1)...(3268): n = a,t,c or g
gtgttaaaacccgggcccgggaatttatttttggggccccataaaaaaaatttttccttgccagcccgggggagttaaaattggttcctttaaaagggcccccccnnnnnnnnnnnnncaagtggtgattttctgtttattgctcaaaaacaagaattcagaagcaaaggtggagagactgtgggttggggagatggcaggaagggggcaaggccttgtcccagctctcccctttgtccttcttctgaccctcctggccggagtcaggcctagggccagggcatctgggaggctgttcccttcgtggccaagggaacagtagagctatcgggggcagtccttgaggggtgccctgggcagggaggggctgcaagatttgcagggtaggtcagagttcccctcccagaattccaaaagccggtagggcggggggcaggcccctcgtttgggcaactgagaagaggcggctttggggcggcaggatgctggtttatttactgtaggatctccagggccatcaaagccccctcgtgggatagggagactatttacacagccagggaggagggcagccaggaggcagagaccgggtcccgtatttccctctgcccgaatgaggaggggaggggcgtcctgggtcctgcagctgtagtcttggggttcagatggaaacttcatactcccgcgtatccccagcttcatacagcgggttgctgaagtccgactccacggtgatggggctgtaggagtgggagcccgagaagccgaaaagggactttccctgaagcttggtgtagtagatgtaaacgccactgccgaggacaatgaccaagcctagaggcagcaggatggccagggccaggttccccccttccagctgccgtgatggatctgtggtctgggtcactttgcagagtgggggctggctggtccactgggaggggtggccgggcacacaggtgatggtgacctcgccgataagctcaaagccctcatagcagaagaagcgcagagactcgcccgcctggtagtggtgcttgtacagcgtctggtagccattctcgggaacccccgggttcaggcacggctcgtacttcaaggcgcatttggggaccctatcgctccacttgggtgtgcctgtgtcccggctgtagcaggtgagcatggctgccccctcgaggctgtaccctggcaggcagcggtactggacgtgggagccaacggggaagccggcgtccgaggcggtgcggtgcccgttggcaatctcgccagggtcagcacaagtcatgatcttttggcaggcgggcggcgcggcgctccaagacaggtcccactggcaagtgagaatgtcggagcctagcagctcgtagccaggctcgcactggtaggtgagcaccgtgccccggatcaggtccccgtgggatgccgttctccagccccactccggaggtggcagctcggggcacgtgtcgttcctcgggacctctttgaagtgcaatacgaagccctggcccaggcctggatttgggggcccgggcggtgcctgaaactgcagtgtgaggtcgggcccagaggagagaaggcggcggcgcggctgaggtccccgcagctgggccaagactcgggcgctgggaccgtccccgtcgaacagcgtcagcatgtccccttcccgcacattcaatatctcaacttggagcaagatgcgcttctcttcctggacgtgcacgccccacacgcagtcttggcccgggctatagctctggggccagtcgggagagaggaccacgccagctggttccgacagctcccctccacacatggctttgcaggccggctctgtgtcgttccagtggggttctgtgggatccacacattcgatggcattggggggcccagggggctccagggcatatcctgggaggcacgagaaggttgccagtgcccctgggcgatactcagggtccgtggtagtgacatttccatgtgccaggaagggggcgaagcagcgatcctcctcaaaggcttcaaatcgaaggcttaacagcaggggattggcaggtgtctctgacagcagctccacgtagagggactgggcgtcactgatgagaccccgctcgggracatcgtccatgtccgaatcatagatcacgggggatagggggctgccccctgagcgcaccatcagccggtcattgtcctcatccagcgagaccctttcaaagtgcaggtgcagccggcgcccctcagctgcttcaatgacccaacggcaggtgaggttgggccctacggctcccccaggctctggggacacgatgcggcccagggtggcattgtggatggtgccaccacaggatgccatgcagctgggggtttcaccgttccaggatggccgggtgccattgaggcagatgagggtctcctctccctgcagctggtagcccgaatcacagtgaaaggtggcagtgcccccagggtgcaggtccgtcacactcacgtccccatgggccggccggggagggaagccacagctcaggaggtaggcctgatagtggatcctgaagccaccgccccttgggacccgtgggctctggaagtgcagaagcagccggttggttgggctccgaaggacttgtccttctccaagcatggatgagttggccaggagtcggggggccaggcctggggatcccccaccagccagcaccaggagctcctcttcctgtgacaggttcagcgtctgcacctggatctcaatgccgtagccagggtagacatggatgctgtaagtgcagtccaggagccccagggtgcggctgacggggctccccagatctggagactccacatacccttcgccctcggagatgttgttattacacagaactgggctggtcaccgtagtggtaacagttgtcgtggtgatgatggtggtcgtcgtctcctcctctcctccctcaggcccaaggggaggccctggcaggtagcccatctctgggcccctcctcagcagggccccatgaagcagttcagccagggcctcagaggccaccgtgggggtctcacttccaggctctggcaatatctcctcctccttcaggggcagaccctggatccagggacagctcagcagaattaggaacagcagctggggaggcggcgggtgctgggccctgggagtccccatggcgactcaccccgatctctctcctctgtgcctctctaagtaatctggctgccacctttcctccgtctccgacctgcccgggcg

SEQ ID NO: 86423 - DNA, 2179 bp, Homo sapiens
tttcgtgcgcagctgtgagggagtcgctgtgatccggggccccggaacccgagctggagctgaagcgcaggctgcggggcgcggagtcgggagtgcaggcctgagtgttccttccagcatgtcggagggggagtcccagacagtacttagcagtggctcagacccaaaggtagaatcctcatcttcagctcctggcctgacatcagtgtcacctcctgtgacctccacaacctcagctgcttccccagaggaagaagaagaaagtgaagatgagtctgagattttggaagagtcgccctgtgggcgctggcagaagaggcgagaagaggtgaatcaacggaatgtaccaggtattgacagtgcatacctggccatggatacagaggaaggtgtagaggttgtgtggaatgaggtacagttctctgaacgcaagaactacaagctgcaggaggaaaaggttcgtgctgtgtttgataatctgattcaattggagcatcttaacattgttaagtttcacaaatattgggctgacattaaagagaacaaggccagggtcatttttatcacagaatacatgtcatctgggagtctgaagcaatttctgaagaagaccaaaaagaaccacaagacgatgaatgaaaaggcatggaagcgttggtgcacacaaatcctctctgccctaagctacctgcactcctgtgacccccccatcatccatgggaacctgacctgtgacaccatcttcatccagcacaacggactcatcaagattggctctgtggctcctgacactatcaacaatcatgtgaagacttgtcgagaagagcagaagaatctacacttctttgcaccagagtatggagaagtcactaatgtgacaacagcagtggacatctactcctttggcatgtgtgcactggagatggcagtgctggagattcagggcaatggagagtcctcatatgtgccacaggaagccatcagcagtgccatccagcttctagaagacccattacagagggagttcattcaaaagtgcctgcagtctgagcctgctcgcagaccaacagccagagaacttctgttccacccagcattgtttgaagtgccctcgctcaaactccttgcggcccactgcattgtgggacaccaacacatgatcccagagaacgctctagaggagatcaccaaaaacatggatactagtgccgtactggctgaaatccctgcaggaccaggaagagaaccagttcagactttgtactctcagtcaccagctctggaattagataaattccttgaagatgtcaggaatgggatctatcctctgacagcctttgggctgcctcggccccagcagccacagcaggaggaggtgacatcacctgtcgtgcccccctctgtcaagactccgacacctgaaccagctgaggtggagactcgcaaggtggtgctgatgcagtgcaacattgagtcggtggaggagggagtcaaacaccacctgacacttctgctgaagttggaggacaaactgaaccggcacctgagctgtgacctgatgccaaatgagaatatccccgagttggcggctgagctggtgcagctgggcttcattagtgaggctgaccagagccggttgacttctctgctagaagagaccttgaacaagttcaattttgccaggaacagtaccctcaactcagccgctgtcaccgtctcctcttagagctcactcgggccaggccctgatctgcgctgtggctgtccctggacgtgctgcagccctcctgtcccttccccccagtcagtattaccctgtgaagccccttccctcctttattattcaggagggctgggggggctccctggttctgagcatcatcctttcccctcccctctcttcctcccctctgcactttgtttacttgttttgcacagacgtgggcctgggccttctcagcagccgccttctagttgggggctagtcgctgatctgccggctcccgcccagcctgtgtggaaaggaggcccacgggcactaggggagccgaattctacaatcccgctggggcggccggggcgggagagaaaggtggtgctgcagtggtggccctggggggccattcgattcgcctcagttgctgctgtaataaaagtctactttttgctaaaaaaaaaa

SEQ ID NO: 86424 - DNA, 423 bp, Homo sapiens
cccacgcgtccgaaagtttactagacaatttcaacaaaaaacgtgaatggacagagaaaatgaccaacatacttgaaggtaggccattgcaaattattaagtctaaagtgcaaaaagaaaaaacaatgaaaagtgaacagagctgaaaggacttacaggataccaccaagtgggtcaatatgtacattatgggagtcatagaagtgaaagatgtagagaaagggcaaaatcagttaatttaagaaatgttagctgaaaatcttccaaatttgaggaaaggcatggatatacaaactcacgaagctccatatactccaagtagaatgaaggaaaagagactgacactgagacacattataatcaagccgtagaaaaagacaaagaggaaatcttgaaagcattaagagaaaagcagtacccctt

SEQ ID NO: 86425 - DNA, 410 bp, Homo sapiens
ttcaaacgataaacaaaattgacaaatctttagctaaattaaaagaaagaagactcaaagtcataaaataaaaaatgagaaagggtatattacagctaataccacataaatacaaaagatcataagagatgggtattaacaatttatgccataattcagtctgagtattttttacatttctaagattttatccatttggataacctaaaagaaatggataaaatcttagaaatataaaatatactcagactgaattatgaagaaatagaaaatctcaacagatcaatagcatgtgcagagattaaatcagtaataaaaaaatctcagaaagaaaaaagacccctcagaaccttatgacttctactaacatttaaagaagaattggcgtcagtctttctcaaagtcttcca

SEQ ID NO: 86426 - DNA, 490 bp, Homo sapiens
agaaacattggacttaatctgcactatgaaccaaatggatctagtagatatttacagaacatgtcatccaatgaatacacattctttccttcagcacgtggattattctcaaggatagaccatgtgttaggtcacaaaacaagtcttaaaacattcaaaagaattgaaatatcaagcatcttctctgaccacaagaaataaaactacaaaccaataacaggaggaattttggaaactatacaaataaaaggaaattaaacaacctgctctagaatgaccactgggtcaatgaagaaattaagaaggaaattgaaaaattttttgaaacaaatgataatggaaacacaacataccaaaacctgtggaatgcagtaaaatcagtaccaaggaggaagtttatatctataaatgtctatatcaaaaaagaaaaaaaaacttcaaataaataacataatgaggaattttaaagaactggaaaagtgagagaaaa

SEQ ID NO: 86427 - DNA, 392 bp, Homo sapiens
ctcatttttcaggtttactttggaatccccttggtctagaggaggagtccattcagccgattgggaggcctaaaattttattgttggcttctattacctatagaggaaaaaggataaaaattacactggacttctcttcagaaaccatgtaagtaagaagagtgtggaatgaaataaggaaagtgttaaaagaaaaaaccaccaacctagaattctgtatccagcaaaattgccttcaaacaataaattttttacacacaaaaaatttgagagaattcattgaccctagtagaacattaagaaatgttaaaagaagttctgcttagagaataaaaatgatatagaaaatcaaacttatgtaaagaaaggaagagtgcttgagaaagaatact

SEQ ID NO: 86428 - DNA, 393 bp, Homo sapiens
ccgccccctgccagagtattactgggtgagctccaccccctgtcagcattactgtgtgagctccacccccgtcggcattactgtgtgagctccgccccctgccagagcattactgtgtgagctctgccccctgtcagagcattgctgtgtgagctccgccccctgccagagtattactgtgtgagctccaccccgtcagcattactgtgtgagctccacccccgtcagcattactgtgtgagctccgccccctgccagagcattactgtgtgagctccgccccctgccagagcattattgtgagctctgccccgtcatcattactgtgtgagctccgccccctgtcatcattactgtgtgagctccgccccctgccagaagattactgggtga

SEQ ID NO: 86429 - DNA, 5725 bp, Homo sapiens
  misc_feature (1)...(5725): n = a,t,c or g
ttttttttttttaaggactgcagtatttattttatttttatattatttatttattctttgttagtttttggagtgtgggttttgttttgttttttgaattttttattttgttctaactcggttttattcttattgctcaaggcttgagtgcaactggcctcttctcaagcntcaacctccgccttcttgggttcgggtaatgatggttccacgtcagcggccctccgccttcttgggtttgcgttaagggttccacggtcaccgaaccctccgccctccttgggtttcgggtgaatgaaggttcccacggtcagcggaccctccgccctccttgggtttgccgtgaacggttccacaatcaccgaaccctcccgccctcttggggttccgggtgaatgaagggttcccacgttccaacgggcccgtccgccctccttgggtttgccttgaacggttcccacggtcaccgaccctccgcctcttgggttccgggaggtggttccatctcagccgcccctctgcctcttggggtttgccgtggtttttctggcctcagcctcctgagtaagctaagggaaggtgtcttgagattatcatcggctgaagggtggaaagcggccccacgcagacgctcggcaggtgtcttgatattatcatcttgctgagggtggagctgaagggtggaaggggaagtgastgacgctcagaaggtgtcttgagattatcatccgctgagggtggaagcggcccccgcagacgctcagcaggtgtcttgatattatcatctgctgagggtggagctgagggtggaaggggagtgagctgacgctcggaaggtgtcttgagattatcatccgctgagggtggaagcggcccccgcagacgctcggcaggtgtcttgatattatcatctgctgagggtggagctgagggtggaaggggagtgagctgacgctcggaaggtgtcttgagattatcatccgctgagggtggaagcggcccccgcagacgctccccgcagacgctcggcaggtgtcttgatattatcatctgctgagggtggagctgagggtggaaagggagtgagctgacgctcggaaggtgtcttgatattatcatctgctgagggtggaagcggcccccgcagacgctcggcaggtgtcttgatattatcatctgctgagggtggagctgagggtggaagcggagtgagctgacgctcggaaggtgtcttgaaaatatcaaacgctgagggtggaagcggccctcgcatgacgctcggcaggtgtcttgttattatcatctgctgagggtggagctgagggtggaaggggagtgagctgatgctcggaaggtgtcttgagattatcatccgctgagggtggaagcggcccccgcagacgctcggcaggtgtcttgatattatcatctgctgagggtggagctgagggtggaaggggagtgagctgacgctcggaaggtgtcttgagattatcatcggctgatggtggaagcggaatccgcagacgctcagcaggtatcttgatattatcatctgctgagggtggagctgagggtggaaggggagtgagctgacgctcggaaggtgtcttgagattatcatccgctgagggtggaagcggcccccgcagacggctcgccaggtgtccttgatattatcatctgctaagggtgaagctaagggtggaaggggagtgagctgacgctcggaaggtgtcttgagattatcatccgctgagggtggaagcggcccccgcagacgctccccgcagacgctcggcaggtgtcttgatattatcatctgctgagggtggagctgagggtggaaagggagtgagctgacgctcggaaggtgtcttgagattatcatccgctaagggtggaaaacggccccccgcagacgctcggcaaggtgtccttgaatattatcatctgctgaggcgtggagctgagggtggaaaggggaagttgagcgcacgctcggaaggtgtcttgagattatcatctgctgagggtggaagcggcccccgcagacgctccccgcagacgctcggcaggtgtcttgatattatcatctgctgagggtggagctgagggtggaaagggagtcgagctgacgctcggaaggtgtcttgagattatcatccgctgagggtggaaggggagtgagcagacacactcaggaggtgtcttgagattatcatccgctgagggtggagctgagggtggaaggggagtgagctgatgctcggaaggtatcttgagattatcatccgctgagggtggaaggggatggagcagagtactcggcacgtgtcttgagattatcatccgctgagggtggggctgggggtggagctgagggtggaaggggagtgagcagacactcgggaggtgtcttgagattatcatccgctgagggtggaaggggagtgagcagacactcgggaggtgtcttgagattatcatccgctgagggtggagctgagggtggaaggggagtgagcagacactcaggaggtgtcttgagattatcatccgctgagggtggagctgagggtggaaggggagtgagcacacactcgggaggtgtcttgagattatcatccgctgagggtggaaggggagtgagcacacactcgggaggtgtcttgaggctcagggagttatcagttatagaatgttgttgagttggaggaggtggctggtggcccatcctgttttttaaagtttcagctgtgaggtagggccagtagggcaatcctgaagaatgacgatgctccgctgccgccattctgacccagttgcaaagagcctttcttgcagaaggggggattttgcatttgtggtagtcctctgctcgccgccgcaactcttgcgcacgttgaaacattttctgttttctggcggtcttcctctttccattgattttgtcatgacggttgattttcgttgtcaccttcctcttacggattttagctctaacttttgtttccacatgcctccgtagagtaatgacgtctttcaggccaattttatttcctcgaaaggaagaaactcttttctttgtgtgcatacaaatggacctcagccctttctgtctactgcggttggacctccaggctctctgctgtacatccatggatccatcatgtccatttcgagaccagaagatagtcttcaggagagacacccaaaggtaaactatccagagggtaatgacaactttataacttgtcggaaacgcaataatgacatgtaaccaaggacttccaccaaagtcagtcccacgatgatgatggtcagacagagtattgataaccttcctcaggtactcgcatgggcatgtcactgactttacatgctgctgcagctccttggtgagctggccctggtcatgggacaggaactgtggggtcaggacaatagagagcttcaccatttgcagaatgagaacaggggctcatgatgagtgccaacctcagttttcttctgtgtgaaacaggaacaatagtttcattcgtcattcagtttctctcaagatttcacgagatcatacctttaattttctccaacaactgattctggtacacagtataccttaatgcctgcatccacggcctcacgtcatgctgtttacatgaacgtaaagcttcgccgaagagtggaataagacagtcctctgttgaaagtctgttagaaactgtggtctccaaagcagacgagcaatacagctgcaaggtacttagaactggcaaagactgtgaaactgttaaagtagaaagtctcagaggtccaatagcgatgcgggatgtttgcttcaagtactttaccacattttcagttatagactgccacttctgatcttgttctatcgggtttaaagcagttgccaaacaaacagaacttcttaacaatggaacttcaatggatttctgaggttcccttggatctggacttcacatgttacgaagcagttttttcatgtctattttttcttttgatcctccagcaagtagattgatattttctcctggtaacaattctaattgctcggtacattcaacaaattttccagactcaaagctgcttaatgattttatatagttgaagtcagctttcaggttgagggaagtgctactggtactctttttcaagtcatggatagcgttctgccattcctgcacagcagcccaatcggcagttgagatgtagcactcacatgctttgtttcctaaataatttataacctcaggggaagagtcagtcggtttggacagcacactttttctggattcaccattcagacaatgtttcaggctggcactcttacacccagcactggctaaggtgagcaccgatttgtcaaagctggagatgcagcaatcaacacctgtcatggcacacaggtgttcctggtactccacagaggccttttcaaacctcccttcagcctgttgagccactgagttaatccacagaagatgttttccaacaatagatgatgaccagacagcaattccctgtatagcttcaggacaatgaagttcacatagtgcttctaccaccatcataatgcttacttccaattcattcccctgagataggctggttgttttcatctctgtaagcaagtcaaagccatgtctcactgtcactgcaggctggcctgccaacaatcctaccctcatgatggagagtcgaatccgcgttagccagtcctgacaagtttggcgattggtatacaaaaaagttctaatgaccttgggaggtgaagttaaggcattagcacatccctcgtatgcattatacattaatttctccagattttccagatactgcagaagaagaacaagtctaagttggttgttaccatggccttcatcattgtctgcagttgtccactgactaacatcctgatcagggtttaatgtgtgacctgcgagacttcgaatgataccttcaattgtctggaaggtgtcttgagctctgcccagtggggttctcagcttagaaagaacagtgaattgtgcagcttcccatatggcccactgccaaaggacagcatctgtcttcaggagattgcgtggaattgttgactggtcacgcttatccagtctctggcagctatagaacagtctttccaaccaattgtccttccctgttctatgagagttcccatacaaaataaaactaatacatcagagaaatcttgggggtggaatgtattacttggtgctttactcatgtgacttcttaatgctaaagaaatttcttgaatttctgtgtgattgttattgcttaggaaaacacctaaaggaattgatttcaacagttttccaaatgcttgtcgaatacaagttccacggtgcactagttggacacggcaaacatcaacacatctctgtaaaagatcatctggcaaggaagaggatagagcatgtagactgctgcatgcctgcagacagatattcacatcttcaacgagagtgtcggctaaaaggcctttgcaaaatttatggaaagacggaagacagaataaaggtgcatatgtttcggacttcttcattacaacagctacttccaaagcccaagtcattaacagtttcctcgtgtcctggttatctttcttaagtaacattcccagaagatttaatataattgagaaatgtttctttgtggccatagttacagtgctcgtgcc

SEQ ID NO: 86430 - DNA, 682 bp, Homo sapiens
gcgcttcaccccctttcctcctacaccccttccgtggccccaccccctgccctcagtcctccttcctcctcttccccacatcccacctctcctttccccctccttgtaggccctctttctcctcagccccgcctcctcacagccccctacttaccctactgcctccctcctggggccctttcctccccaagggcccctctgttttctcccattccagcccctgaccaggccctgctcctctgctggggtcggccccgcacagtaagctgcctgggagccctcattgccttcctgggcaacccggccaaaggccccccgagcagctgcagccctggaggtcagcctcaccctggcagaccgcaggggcccctcctcaccgccgacctctgcaccttcacccgtttgcctggtgtctgaggaagggcccgcaggaagagcattcctttcccagggtcttcctcaggagggatgagaggaagcaaaagcttggtctgcaaacgggctggtcctcccgacggccacatccgcaggaatgaccctcagaggggctccccaactggctgggagattcgtccagctgggcgctctgctacacagccccgtcaagggcaaacagatgacaaaactgagacacaaaagatgaatcagcttggcagtgttcacagagccagcgtgtggaaaa

SEQ ID NO: 86431 - DNA, 398 bp, Homo sapiens
cccaaacaagaatatgtcaagacatttattagtgagactctcaaaagtcaatgataaagaaaggattctaatagcagaaagagaaaagaaacaaataacatacaaaggagctgtaataaatctgagagtagacttctcagtgcaaatcttacaggccaggagggaggggcatgacatacttaaagtgctaaaggaaaaagtagtttattctagaataatatatccagttaaaacatcctttgaatgtgagggacaaataagttcccagacacacaaaacctgaggcattttatcaacaccagaatcaccctgtaagaaatgctaaagggaattcttcggtctgaaataaaagaatgctcatgagcaataagaaataatctgaaggtacaaaactcact

SEQ ID NO: 86432 - DNA, 2620 bp, Homo sapiens
  misc_feature (1)...(2620): n = a,t,c or g
ttttttttttttatagtcaaaggtatgtttctgccttttacataatgtgacaaaggaatatgttggtcaaggcaatggctgtttcagtgtttcagctttaacaagaatgctggattacaggtcctcactttctaccaaggcagtattcagtgtcaggtgagatgggttggcctcaggttggaacgctgctttgatgtctagtccctggtccgaaagtgctgcatagcgactggctgagggccgtactttttttggcttggtgctctgtgactgctgatgccactgggtgtaaacgtccagcctggcagtacaggacacaatccctgcttcattcttggctgacacagtataccacccagcatcttcttttgtggctccctgaatgagcaggcagatgtagccgtggttgtcctggtgcatgctcactcggtcagtgctgtgagtgagtgattcattttctttcttccaaaatatctgaggtggtggcactcccaatacacgacattccagccgcactgggtacccatcagcaactcctgtgttttggagcttctcaataaacacagggggtttgtgtgcttctttagcaagcaaccacaagctccaggctgaatgagttctgtccttgctcggttggtagctatacatgtgtagattccgggcgatcacgtgacgtgactggctctatgatcagagagtgcaccccgttctcacgcaccagcatcttgtgagcactgtcagggcgtacgggctttccatctagttgccagcttagatctggggttggtaacccactgactttgcagtccattctgcagagttttccttcttgaaccagtcagatctccaggagcctgcaagaagtgaggtctgaaagaatcgctcctaaattggttcaatttcgtctccactgtcccttgatctagaacgaggccttctgacatgaggatggcctgagggagaccggggacttcgacctctttggttgacagcctgtaccattagccgtccagtacaactgatgcggccctgagggtttgcagccataattgtataattcccatcatcatctaggggtggaggctgtggtatggagggagcaggtcccatcgagatctctttgaatggtgtagtgatcactctttggagagatctgcttcccatctttaaaccaatagatctttggctttggatttccagcaactctacatgtgaaagttactggcattccctcaaagatcttgtaatgtttcagcttcatctcaaagaatggtgccattccattttccacaggcacatctccatactgaacttcatcacctgattcatccacaggagacctttctagcctgtactctatttcactgatgagtctctgttcacagctggagactttgtattcctgattagctgtttcctcttctggctcctgaatattaaagacagttgcactgtcagcacctagcagtcgacgagccattctttcttcgtatgttaacctcggctggccattgttcaggaggtcctccttgaagcgaagttttcgttccaggtcttgaataacagcatcctttgtgccttgaatttcctcatcggaggctattctagcagttctactggccttctttggaaatcctgcgggggtgacacccttgggcagccccagggcgttgacggccgccggcggcggctgcgagggcagcagagcgctgaggaaggccgcgggcgtctggccgtggccgaagcgggtggcaggcgacgagcagtgggacgcctgtcccgggctcgggagcggcggtggtggcggcggcagtgggaacacgtcgggcaccgggaaggcagccgtggggctgaagaccgggggtggcgggggcgggggcgacggcgaggaggagccccacggggcctcgggctcagcgccgaagggctgcgcgaagggcggcacgggggcgcggccgaactgcctcggcgtcggggacatgggcgacgggaggctggacgagctggggctggaggccggcgtgccgtggcccgacgcgggcccgaggttctgcgcggcgatgaactgcttggggcgcgcgtagttgaaggagccggaggactgcatggcgggggcggagcgggaggccagcgcgctcatgggctccggggacgcgggcggcgtgcaggccgcgagctcggggaaggcgggcggcggcgggaaggggggcgagggcggcgcgctgcgcggggctggcggaggctgccgagcgccggcctcctgctccagtcggatttggttctggagttgctggagcttcagagggtccagttttggtttggcaagcagaggtggtggctccttagtgggtgaaagcaggacagctggtgttggaagagatttattactgttagctttgccgttaatcaggtcccatttaactccacggcctggngatggggactcnncgttcgtttcccctctcagncagncattggaattggcatttgaagggggctgccctgnnctcaggcctaacntcaggngttggttcacctgctgggatctcagatggtttctttgaagccaactccaagggaacttgtctccaagattggagggggaggtggaaagtgttgg

SEQ ID NO: 86433 - DNA, 409 bp, Homo sapiens
cccacgcgtccgtggatgatggagataacgacccagctcctctaccaaagttaatgcagcaatatttttaaaaggtcatttggtggtgtacccaccacaaaaatggccgtcctcctcccgaggatgatgcgaacaaagaaaacgaacagaggagatccctccttatgaccaacaattcctgaaagtcgatcaaggaatactttttgtactacttctgcctgcaaactacttagacatcaaaggtttgcttgatgttacacacaagactgttgccaatacaatcaaggagaaaagtcctgagaagattcgcaagacttccaatatcaaaaatgactttactgaagaagaggaaacccaggtatgccaagcgaaccagcggtgtgaacagaagtgaaacgtccttgacgct

SEQ ID NO: 86434 - DNA, 378 bp, Homo sapiens
aaaaaacaaataacacattaaattttatttggctttcatatcaattgtttcctttggctttgtatatacattttattgcatgtttgtctctatgaaatatgttgctgggattttgatataaattgccttaaatctaaagatcgttttggtgggaattgacatcttgttgagtcttgcagttcatgaatatggtacgtccctctgtttattgaggtcctcgttgatttatttcataagggttttgtaattttcagcttatagattatggacatattttaaaaatctagacagtttcttagagggccattatatgttgtattgagttttaaatttcagtttgcacttgatacttgcaattatagagaaatatatccattg

SEQ ID NO: 86435 - DNA, 421 bp, Homo sapiens
aaaaagatgttccatgcaaacaataaacatgagaaaactgggggctatattaaaatcagacaaagtggattttaagacaacaaatattaccagagataaggtgagtattttgtcattttttaaagatcaatttatgtagaagacctaatcattataaatgtatatatatatattcataacaaagtttccaaattcgaaaagaagaaattgacagaactaaagagaaaaatagagaaattcacattcatacttggagactataacacctctctctctcagcaaatgatataacaaataaaccccaaaaaaatcagtaaggatataaaaggattgaaataccacttttaaccaatttgacatttataaaaaactatagccaaaatctgcaaatactcattattttcaattgcacctaaaatat

SEQ ID NO: 86436 - DNA, 375 bp, Homo sapiens
atgaacttgagattcagattattttgcgcagcggagtggtttggtgtttcctctgaaaaagaaagacatcaagagccctcatttatttgtttgggacaggtcagaggttctaggagctgtttaaaggatggagttgggataattgagtcatcagatgccaactggccactttggccttggcagtctgactggatccagaaggcctgcagtgggttcttcctggctctgccccaaagttctgttctctttccccaggttggttttatgggccacgaagacccccatgtaacatcttgcccctattgactcaatggccttgacttgcttggagcacaggccaggtcccaggacacaaggcagtgctcgtcggctgag

SEQ ID NO: 86437 - DNA, 714 bp, Homo sapiens; identical to SEQ ID NO: 65772

SEQ ID NO: 86438 - DNA, 733 bp, Homo sapiens
gacaatggtgtttggtctggaggcagacataggggagtaggatgaagagagtcactgaactagacatgaggacccgaaaaaaatcatcattatcagatgagagacagcattataaaacgctagaggaagtctacagcctggtgaccaaacagcattagggtaaaggaggagtgcaagatgataccccaaaacacagctatcagtgtgggagcccagatttttacagagcaacctaatttcagtaagagacaaatcatggtaacagattaatccacagataactttgtataaaataatttttttacattggttcagcaaagcagggatcctattaaacatccacagggataaacattcattttttggaagtaacagtctggtgtaatgagtctgttattataataaatgtactaataatgcaaaaaacaatcttaatttgttctcagtagagataaaaattactaactgaagacaaagacaacaactttgcaatacagagaactcttacctcaaccgtttcaactgtccactcatctacctgctccttttcaccactggtgaactgtgtttctgccatgaactgtctatttacatactgcaaagcaaagtaaatgtttgagacatttgtttgaaaggcagcaaagtaaaggcagcattaaattaaaatcatacctctgttgattcaacttcactttgctcagtgtactcttctgctggctcaggttctaagagg

SEQ ID NO: 86439 - DNA, 794 bp, Homo sapiens
  misc_feature (1)...(794): n = a,t,c or g
ttttgatggggaggggatggagtattggaaagcaaatcctagatatattttcactcaaaatgcctcattatgtatctgtaatagataagaacttaaaaaaaactgcaatgccattatcatatctgaaaaagtgattaatttcttaatatcagatagtctacattttgtctcaaaaatgtcttttaaaaaaatcttatttattcaaatcaaatcctcacaagatctaaatattggatttagttgttactaacattttagaatgttatttattttagaagtcatttatttacatgcatttaacctttatattaaaccaacgcagaaggtatggtcccagctcagagaggttaagaaaccttaccaaggtctcattgctggcaggcaccggacacataatttgaattaaatcttcttaactccaaagcctccatgccactccttctgatgcaggctaacagaatttttcctgtgttgcagagaggcaaaagggccactatttaagagagagggtccgggcgtggtggctcatgcatgtaatcccagcactttttgaggccgaggcaggcaaatcgcttgagtccaggagttcgaaaccagtctgggcaagaatggtggacctcatctctacaaaaaatacaaaattagctgggggtagggcgtacacctgtagtcccagccactggggatgccgaggtgggaggatcacttgcgcctgggaggttgagccacagtgagctgacagctaaccctgattgctncatagactgtgcactgcttgcaatctggctgacagg

SEQ ID NO: 86440 - DNA, 712 bp, Homo sapiens
taatagtatatatctttaacttaccatggtctttccccaagtgctattatacctctttgtgtatagcattctagaacctacaatagtatacttccatttctcctgatctttgtgttattgttgcacattttaatttacatatattattaaccccttgctactttgtctttacttaaagtcaattgtcttttaaagagattcatacaacatatgaaaaaaacctttcagttcccatttttaatactgttctttcttttgagtagacacatagtttcttttggcatcactttctttttccctgaaggacttcctttaacatttcatttagtgaaggtctatgaatgatgaattctttctgtttttgtgtgtccaaaaaaatgcttattttacttaagtttttgaaagatactttctctgggtatataattctatgttggaagttttttcttcttttagaactttaaaaatgtgctggcacagtggttcttgcctgtaatcacagtactttgggaggccaaggttggtggattgcttgagcttaggagttcgagaccagcctgggcaacacggcaaaacctcatctctacaaaaaacataaaccttagccaggtgtggtggcatacgcctgtagtcccagctacttgggaggcgaggcaattctcatgcctcagcctcccgagtagctggaactacaggtgcatgccaccatgcc

SEQ ID NO: 86441 - DNA, 14680 bp, Homo sapiens
gaattccgcctctgcggagccgggctcgggtcgccggagccgcgccccaccccgccagctccagagccacgactaatggctgaaggataaatcaacatggcaactatgattccaccagtgaagctgaaatggcttgaacacttgaacagctcctggattacagaggacagtgaatctattgctacaagagagggagttgctgttctgtattctaaactggttagcaataaggaagtagtacctttgccccaacaagttttatgcctcaaaggaccacagttgccagactttgaacgtgagtctctttcaagtgatgagcaggaccactatttggatgcccttcttagcagccagctagcattggcaaagatggtatgttcagattccccatttgccggggcacttagaaaacgactgcttgtactccagcgtgtcttttatgcactttctaataaataccatgacaaaggcaaggtgaagcagcagcagcattctccggagagcagttctggttcagcagatgtccattctgttagtgaacgcccccggtcaagcactgatgcacttatagaaatgggtgttcgaactggtctaagtttattatttgcgcttctaagacaaagttggatgatgcctgtgtcaggacctggtctcagtctttgcaacgatgtcattcatactgcaattgaagttgtgagctctttgccaccattatcattagcaaatgaaagcaagattcctcctatgggcttggactgcttatcgcaagtaacaacatttcttaaaggagtcactattcctaattctggggcagacactttaggtcgtagattagcttctgagttgctgcttggtttggcagctcaacgaggctcattgcgatatcttcttgaatggatagaaatggctttgggggcttcggcagttgtacacaccatggagaaaggcaaactactctcaagccaggaaggaatgatcagctttgactgctttatgaccatattaatgcagatgaggcgttctttgggttcatctgctgatcggagtcagtggagagaaccaaccagaacatcggatggcttgtgctccctttacgaggcagcattatgtctctttgaagaggtttgcagaatggcttctgattattcgagaacatgtgctagcccagatagcattcagactggtgatgctcccattgtctccgaaacctgtgaggtttatgtttgggggagcaatagcagccatcagttggtagaaggtacacaggagaaaatactgcaacccaaactggctcctagtttctctgatgcacagaccattgaagctggacagtactgcacttttgtcatttctacggatggctcagttagagcttgcgggaaaggcagctatgggagactgggccttggagactccaataatcagtcaactttaaaaaagttaacattcgagcctcacagatccattaaaaaggtttcatcttctaaaggatctgatggtcacactttagcctttacgacagaaggagaagtcttcagttggggagatggtgattatgggaaactggggcatggaaatagttcaacacagaaatatcccaagcttattcagggacctctacaaggaaaggtagttgtttgtgtgtcagctggatacagacatagtgctgctgtcacagaggatggggaattatacacatggggtgaaggagactttggaagattaggtcatggtgacagcaatagtcgtaacattccaacattagtaaaagacatcagcaatgtaggagaggtttcttgtggcagttcacatactattgctctgtctaaagatgggagaactgtatggtcttttggaggaggagacaatggtaaacttggtcatggtgataccaacagagtgtataaacctaaagttattgaagctttacaaggaatgttcattcgcaaagtttgtgctgggagccagtcttcacttgctttgacatcaacagggcaggtctatgcttggggctgtggagcttgtctaggttgtggttcttcagaagctactgctttgagacccaagcttattgaagaactggctgccacaagaatagttgatgtttctattggagacagtcattgtttggctctttctcatgataatgaagtttatgcctggggcaataactcaatggggcaatgtggtcagggaaattccacaggtcctattactaaaccaaagaaagtgagtggcttagatggcatagctattcagcagatttcggctggaacatcacatagtctggcatggactgctcttcctagggacagacaagttgttgcatggcaccgaccttattgtgtagatcttgaagagagtaccttctcacacctgcgttcttttcttgagagatactgtgataaaataaacagtgagattcccccactccctttcccttcatcaagagaacaccacagttttctcaagctgtgcctgaagctactttcaaatcaccttgctcttgcacttgcgggaggggtagctaccagcattctcgggaggcaggcaggtccacttcgaaatttgctcttcagactgatggactcaactgtcccagatgaaatccaagaggtggtaattgaaactttatcagtgggagcaaccatgctgttacctccattacgagaacggatggaattacttcattctcttttacctcaaggacctgatagatgggaaagcttatctaaaggacagagaatgcaactggatattcatcctgacaagtttgcaagatcatacccacgtagcctccctacttggctatagttcaccctctgatgctgctgacctatcttctgtgtgtactggctacggaaatctgtcagatcaaccttacggcactcagagctgccatccagatacccacctggctgaaattttgatgaagaccctcttaagaaatttaggattttatacagatcaagcatttggagagctagaaaagaatagtgataaatttctacttggaacatcatcatcagaaaacagtcagcctgctcatcttcatgaactgctatgttcactacagaaacagctgctggcattttgccatatcaataacattagtgagaactcaagcagtgtggcattgcttcataaacatcttcagcttttgttgcctcatgccacagatatttattcacgttctgcaaatttgctcaaagaaagtccttggaatggcagtgttggagaaaaattaagagatgtgatatacgtctcagctgctggcagtatgctctgccagattgttaactccctgctgttactccctgtgtcagtggctcggcctttattgagttacctcctcgacttgttgccacctcttgattgccttaatagactcctgccagctgctgatcttttagaagaccaggagttacagtggcctcttcatggagggccagaactaattgatcctgctggtctgccattacctcagccagctcagtcctgggtatggcttgtggatctagaaagaacaattgctctccttattgggcggtgtcttggtggcatgcttcagggctcccctgtgtctccagaggaacaggacactgcatattggatgaaaacgccactgttcagtgacggtgtagaaatggacactcctcaattggataaatgtatgagttgcctgttagaagtagcactttctggaaatgaagaacagaagccttttgattataaattgcggcctgaaattgctgtctatgtagacttggcattgggttgttctaaagagcctgcccgaagcctttggatcagcatgcaggactatgctgttagtaaagattgggacagtgcaactttaagtaatgagtcactcttggacactgtgtctagatttgttcttgcagctcttctgaaacacacaaatttacttagtcaagcatgtggagaaagccgatatcaacctggtaaacacttatcagaagtgtaccgttgtgtatacaaagttcgaagtcgtttacttgcttgcaagaaccttgaacttattcaaacaaggtcatcatcacgggacagatggatatcagaaaaccaggactctgcagatgttgatcctcaggagcattcatttactcgaactattgatgaagaagctgaaatggaagaacaggctgagagagaccgggaagaggggcatccggagccagaggatgaagaggaggaacgggaacatgaagtgatgacagctggcaaaatctttcagtgtttcctctcagcccgtgaagtagctcgtagccgagaccgagatagaatgaacagtggggcagggtctggggctcgagctgatgatccacctcctcagtctcagcaagagcgaagggtcagcacagaccttcctgagggtcaggatgtgtacactgctgcatgcaactccgtgatccatcggtgtgccctgttaatattaggagtaagtcctgtgatagatgagcttcagaagcgaagagaagaaggacagttgcagcaaccttcaacaagtgcctctgaagggggtggacttatgaccaggagtgaaagtcttactgcagagagccggctagtccacacaagcccaaattatagactgatcaaatcgaggagtgaatctgatttgtctcagcctgaatcagatgaagagggttacgcactgagtggcagacaaaatgttgatttggatttggcagcatctcacagaaagagaggtcctatgcacagtcaattggaatccctgagtgactcttgggctcgcctgaaacatagcagagactggttatgcaactcctcctattcctttgagtcagattttgatcttaccaagtctttgggagttcacactttgattgaaaatgttgtaagctttgtgagtggagatgtggggaatgccccaggttttaaagagccagaggaaagtatgtctacaagtccccaggcctccatcattgcaatggaacagcagcagttaagggcagaacttcgtttagaggcacttcatcagatcctcgttctattgtctgggatggaagaaaaaggtagcatctcactggcaggaagcagattgagttcaggcttccagtcctccacactactcacgtctgtgaggctgcagttcctagcagggtgttttggtttaggcactgttggacacacaggagccaagggagagagtggccgattgcatcactatcaggatgggatcagagcagctaagagaaatattcagattgaaatccaggtagctgtgcataaaatttatcaacagttgtctgctaccctggaaagagccctgcaagcaaacaagcatcacattgaagcccagcaacgtctgcttctggttacagtttttgccctaagtgttcattatcaaccagtagatgtttctttggcaatttccactggtctgctaaacgtattgtcacagttgtgtggtacagacaccatgctaggacagcccctgcagttgttgccaaagacgggtgtttcccagcttagcacagctttgaaagtggccagtacaaggttgctccagattctagccatcactactgggacctatgctgataaactgagtcccaaagtagttcaatccttgttggatctactctgtagtcagttgaagaatttattgtcccaaactggtgtactacatatggcctctttcggagaaggggagcaagaagacggtgaagaagaagaaaaaaaagttgactccagtggagaaactgagaagaaagatttcagagctgctcttaggaaacaacatgcagccgaactccatctaggggattttttagtttttcttcgcagagttgtatcttcaaaagcaattcaatcaaaaatggcttccccaaagtggaccgaagtgcttctaaatatagcatctcagaaatgttcttcaggtatccctctggttggtaacttaagaacaaggctccttgcacttcatgtccttgaagctgtgctgccagcttgtgaatctggtgtagaagatgatcaaatggcccagattgttgagcgcttattttcccttctctctgattgtatgtgggagacacccattgctcaggccaaacatgctattcagataaaggaaaaagaacaagaaataaaactacagaagcagggcgagttggaagaagaagatgagaatcttcctatccaagaagtatcctttgacccggagaaagctcagtgttgcctagtggagaatggacagattttaactcacggcagtggagggaaaggatatggattggcatctacaggagtaacttctgggtgctatcagtggaagttttatattgtgaaggaaaacagaggtaatgaaggcacgtgtgttggagtttctcgctggccagtacatgactttaatcaccgcactacctcggatatgtggctctatagggcctacagtggtaacctctatcacaatggagaacagactctcacattgtccagctttactcaaggagatttcattacctgtgtgttagacatggaagccaggaccatttcttttgggaaaaatggagaggaacccaaattagcttttgaagatgtggatgcagcagagttgtacccatgtgtgatgttctatagtagcaatccaggggaaaaggtgaaaatttgtgatatgcagatgcgtggcacaccccgagacttacttccaggagaccctatttgtagtccagtagcagcagtgctggctgaggccactattcagctcgtccgtatccttcaccgaacagaccgttggacttactgcattaacaaaaaaatgatggaaaggcttcacaaaattaagatatgtattaaagagtcaggtcagaagctaaagaaaagccgctcggttcagagccgagaggaaaatgaaatgagagaggagaaggagagcaaagaggaagagaaaggtaaacatactaggcatggcctcgctgacctctcagagctgcagctgaggactctttgcatagaggtgtggcccgtgctggctgtgataggaggagttgatgctggtcttagagttggaggtcggtgtgttcacaagcaaactgggcgccatgccacgctgctgggagtggtcaaagagggcagcacgtctgccaaggtccaatgggatgaagcagaaattactatcagcttcccaactttttggtcgcctagtgatactccattgtataatctggaaccctgtgaaccattgccgtttgatgtggcgcgattccgaggcctgacggcttctgtgctgctggacctaacatatctcactggcgttcatgaagacatgggcaaacagagcaccaaacgacatgaaaagaaacaccgacatgaatccgaggagaaaggggatgttgagcagaaacctgagagtgaatccgctttagatatgcgaacaggcctaacatctgatgacgtcaaaagtcagagtaccacaagctccaaatcagaaaatgaaatcgcttcattttctttagatccaacactgccaagtgtggaatcccaacatcaaataacagaagggaaaagaaaaaatcatgaacacatgtccaaaaaccatgatgtagcccagtcagaaatcagagcagtccagctgtcctatctttacctcggtgctatgaagtcacttagtgcccttcttggctgtagtaaatatgctgagctgttgctgataccaaaagttctggctgaaaatggccacaactcagactgtgcaagttctccagttgttcatgaagacgtggagatgcgagcagccctgcagttcttgatgcgacacatggtgaagcgagcagtcatgcggtcacccataaagagagcattgggattagctgatctggaacgagcgcaagccatgatctataaattagtggttcatgggcttttggaagaccagtttgggggcaaaattaagcaagagattgatcaacaagctgaagaaagtgaccctgcccagcaggcacagacaccagttactactagcccatcagcctcaagcacgacctcctttatgagcagctctctggaggacaccacaactgccaccactccagtcactgacacagaaacagtgcctgcatccgagtccccgggagtgatgcctcttagtcttctcaggcaaatgttctctagttacccaactaccactgtacttcccacacgtcgggcacagactcctccaatatcttcgttaccaacctctccttctgatgaagtaggaaggaggcaaagtttaacttctcctgattcccagtcagcaaggccagctaaccgcacagccttgtcagacccaagcagtagactttcaacttctcctcctcctccagcaattgcagttcccttgctggaaatggggttctctcttcggcagattgccaaagccatggaagctacaggtgctaggggagaggctgatgcccagaatatcactgtccttgccatgtggatgatagagcaccctgggcatgaggatgaagaggagccccagtcgggcagcacagcagactctaggcctggagcagccgttctaggcagtggcgggaagtcaaatgatccctgttatttgcagtcacctggagacataccatcagctgatgctgctgaaatggaggaaggttttagtgaaagccctgataatttggatcatacagagaatgcagcttctggaagtggaccatcagctagaggtcgctcagcggtaacaagaagacacaagtttgacttagctgctcgcacactgctagcaagagcagcgggattataccgctctgtgcaggcccacaggaatcaaagtcggagagaaggaatatctttgcagcaagacccaggggcgttgtatgactttaatttagatgaggaattggaaattgatcttgatgatgaggcgatggaagctatgtttggacaagacctgaccagtgacaatgatattctgggaatgtggatcccagaggtactggattggcctacctggcatgtttgtgagtctgaagacagggaagaagtggtggtgtgtgaactgtgtgaatgcagcgtcgtcagcttcaatcagcacatgaagagaaaccatccaggctgtgggcgcagtgcaaaccgccagggctatcgcagcaatggttcctatgtggatggctggtttggcggtgaatgtgggagtggaaatccatactacctgttatgtggcacctgcagggagaagtacttagccatgaagaccaaatctaagtcaacaagttctgaaaggtacaagggacaagctccagatctaattggcaagcaagacagtgtgtatgaagaagactgggacatgttggatgttgatgaagatgaaaagctaactggtgaagaagaatttgaattacttgctggaccgcttggtttaaatgaccggcgcattgtaccagaaccagttcagttccctgacagcgatccactgggagcatcagtagcaatggtcacagccaccaacagtatggaagagactctgatgcaaataggttgccatggctccgtagaaaagagctcctctgggagaataacgttaggagagcaggcagctgccctagcaaaccctcatgaccgtgtggtggctttaaggagagtgactgctgctgctcaggttcttctggccagaaccatggtcatgagagcgctgtctcttctctcagtcagtggttccagttgtagcctggctgctggtcttgagtctctggggctaacagatatccgaacgctagttcgattaatgtgcttggcagcagcagggagagctggcctctccaccagcccttctgccatggctagcacctcagaacgatcacgaggtgggcatagcaaggctaacaagcctatctcttgcctggcctatttgagcacagcagtgggatgtctggcatcaaatgctcctagtgctgccaaactgcttgtacagttgtgtacacagaacttgatttctgctgcaacaggtgtaaatctaaccacagttgatgactcaattcagcgaaagtttctacccagctttctccgaggaattgctgaagagaacaagcttgtgacctccccaaactttgttgtaacacaggcccttgtggcattgctagcagacaaaggggccaaactaagacctaactatgataagtcagaagttgaaaagaaaggccctctggagttggctaatgccctggcagcctgctgcctctcctccaggctgtcctcacagcatcggcaatgggcagctcagcaactcgtgcgcactcttgctgcacacgaccgtgacaaccaaactactctgcagacacttgctgatatgggaggagatcttagaaaatgctcctttatcaaattggaggctcatcagaacagagtaatgacatgtgtttggtgtaataaaaaaggtcttttggctacaagtggcaatgatggcaccatccgcgtatggaatgttaccaagaagcaatattcactgcaacagacctgtgtgttcaacagattggaaggggatgctgaggaaagcctgggatcacccagtgatccaagtttctcaccagtttcctggagtatcagtggcaaatatctagcaggcgctttggaaaagatggtgaatatctggcaagttaatggaggaaaaggattagtagatattcagcctcattgggtatctgccctggcttggccagaagagggtccggctacagcctggtcaggagagtctccagaattgttgttggtgggacggatggatggatctctgggactgattgaagttgttgatgtgtccaccatgcaccgtcgagaattggagcattgctatcgaaaggatgtgtctgttacttgcattgcatggttcagtgaagacagaccatttgcagtgggatattttgatggaaaactgttactgggaacaaaggaaccacttgagaaaggaggcattgttctaattgatgcacataaggatactcttattagcatgaagtgggaccctacaggtcatattcttatgacatgtgccaaagaagacagtgtgaaactctggggctctatttcgggatgctggtgctgtctacattcactctgccatccatctattgtaaatggcattgcttggtgccgccttccagggaaaggatccaagttgcagttactgatggctactggctgtcagagtggcttagtatgtgtttggcgcattcctcaagatactacacagaccaatgtgactagtgcagaaggatggtgggaccaggaatcaaattgccaggatggatataggaaatcatcaggagccaagtgtgtttatcagctgcggggacacatcactcctgttcggactgttgcctttagttctgatgggttggccctggtgtctggtggactaggtgggctcatgaacatttggtctttaagggatggctctgtcttgcaaactgttgtgataggctctggagctattcagaccacagtatggattccagaagttggagtagctgcttgctcaaatagatcaaaggatgttttggtcgtgaattgtacagcagaatgggcagctgccaatcatgttttggcaacctgtaggacagcattgaaacagcagggtgttctgggattgaacatggctccctgcatgagagcatttttggagcggctccccatgatgcttcaggagcagtatgcctatgaaaagcctcatgtggtttgtggtgaccaacttgttcatagcccctatatgcaatgcttggcttcccttgctgtgggacttcatctggatcagctgttgtgtaaccctccagtgccaccacaccaccagaactgtctgcctgaccctgcatcctggaatccaaatgaatgggcctggttagaatgtttctcaaccactataaaagctgccgaagccctgaccaatggagcccagtttccagaatcttttaccgttccagatctagaacctgttccagaggatgaacttgtatttctaatggataacagtaaatggattaacggcatggatgaacaaattatgtcttgggcaacttccagacctgaggactggcacctgggaggtaaatgtgatgtctacttatggggtgctggtaggcatggacagctggcagaagctggaagaaatgtaatggtacctgcagcagctccctcattctcacaggcccaacaggtcatttgtggtcagaattgtacctttgtcatccaggccaatggcacagtgttggcttgtggggaaggaagttatggcagattaggacaaggaaattcagatgaccttcatgtgctgacagttatttcagccttacaaggctttgtggtgacccagctggtgacttcctgtggttctgatgggcactctatggccctaactgaaagtggtgaggtctttagctggggagatggtgactatggtaaacttggccatgggaacagcgacaggcagcggcggcccaggcagatcgaggccttacaaggagaagaagtggtgcagatgtcttgtggcttcaagcactcagcagtggtcacttcagatggcaaactgttcacctttgggaatggtgactatggtcgtctgggtcttggaaatacctctaacaaaaaacttccagagagagtgactgcactggagggatatcagattggacaggtggcctgtggattaaaccacactttggcagtgtcagcagatggttccatggtgtgggcttttggagatggagactatggaaaactaggcttaggaaattccactgcaaaatcttcacctcagaaaattgacgtcctttgtggaattggaataaaaaaggttgcttgtggaactcagttttctgttgctttgaccaaagatggtcatgtgtatacctttggtcaagatcgcctgataggcttgccagaggggcgtgctcgcaatcacaatcgaccgcaacaaatccctgtcctggctggagtaatcattgaagatgtggcagttggagctgaacacacacttgctttggcatcaaatggagatgtgtatgcctgggggagcaattcagaagggcagctcggcttaggccataccaaccatgttcgagaaccaaccctggtaacaggtctgcaagggaaaaatgttcggcagatctcggctggccgctgccacagtgctgcatggacagcaccacctgtcccaccaagagcaccaggtgtgtcagtacctctgcagctgggcctgcctgacacagtgcccccccagtatggggcgctgagagaagtcagcattcacacggtgcgggccaggctccggctgctctaccacttctctgacctcatgtactcatcctggagactgctgaaccttagccccaacaaccagaacagcacatcccattataatgctggaacttggggcattgtacagggacaacttcggcctttgttagccccaagagtctacactctgccaatggtgcgctccataggaaaaaccatggttcaaggcaaaaactatggacctcagataactgtaaagaggatatcaaccagaggacggaagtgtaagcctatttttgtccaaatagcgagacaagtagttaagctgaatgcttcagacctccgcctgccttcccgagcgtggaaggttaagctggttggagaaggggctgatgatgctggaggagtgtttgatgacaccatcacagagatgtgccaggaacttgaaactggtattgttgaccttcttataccctctcccaatgccaccgcagaagtgggttacaatagggacaggttcctttttaacccttctgcctgcctcgatgaacacttaatgcagtttaagtttttaggaattttaatgggggttgccattcgcacaaagaagcctctggacctccacttggcccctctggtgtggaagcagctgtgctgtgtcccactcaccctagaggacctggaggaggtggatctgctctacgtgcagactctcaacagcattcttcacattgaagacagtgggattaccgaggagagtttccatgagatgattcctcttgattcttttgttggccagagtgctgatggcaaaatggttcctataatccctggtggaaatagtatcccactcacattttccaacaggaaggaatatgtggagagggccattgaatatcgacttcatgagatggacagacaggtggctgcagtccgagaagggatgtcctggattgttcctgtgccgctgctgtccctcctcacagcaaaacaactggagcagatggtgtgtgggatgcccgagatctctgtggaagtcttgaagaaagtggtgcggtaccgtgaggtggatgagcagcatcagctggtgcagtggttctggcacacgctggaagagttctccaatgaggagcgggtgcttttcatgaggtttgtgtcaggaagatctcgactaccagccaacactgctgacatttctcagagatttcaaatcatgaaggttgataggccttacgacagtctgcctacctcacagacctgcttcttccagctgaggctgcccccgtactccagccagctggtcatggccgagcgcctgcgctatgccatcaacaactgccgctcaatcgacatggacaactacatgctctcgagaaacgtggacaacgccgagggctccgacactgactac

SEQ ID NO: 86442 - DNA, 352 bp, Homo sapiens
  misc_feature (1)...(352): n = a,t,c or g
caccttgatatgaacaaataaatgctgtaagggatcannctnnntnctgcaaacgctcagctgcaatacctttcagcttgtcacagattcaaatctaactaagaccactttcccttggccccagatttcaaaagcatctgcattcatactcgcacagtaatagatggccgtgtcctcgactctcaatctgttcatctgaagataaagggtgctcttgcaatctctctctttatataagcactcgaccctttgctaaaactacccattctgaattttcaccggcatacaaagttgagacccaatccagtcccttccctggagcctggcggacccaggtcatgtagttggtacc

SEQ ID NO: 86443 - DNA, 347 bp, Homo sapiens
  misc_feature (1)...(347): n = a,t,c or g
atatgagtcattttccagataggtgtatcagaaatatcttctctaattctgtggttttttcactcatgttggtatgttttgattaacataagtttttaattttaatatattctgacttttaatttttttcttttatggtagaattttttgcatcctatttaagctatctttgcccaccccaaggttataaagctcttctgtgttttcttctaaaagcattattgtttcagctttcacatttatatttgcaattcatctggaattgatatttgtgtgtggcgtgagatatggatgaaaatcttttgcccctgtaagggtatcctggcaccatttattgaacagaccan

SEQ ID NO: 86444 - DNA, 866 bp, Homo sapiens
gccttctgcgccttgacccctcttccttccctcttcttcgtccaaatttggaagggatttccctgggctatgtgggttatcagccgaacgttgtcactcatggcaaattgaatattacatcttttttgtttgaaatttgtttcgacacacgtatttgtttcgcagtctttattttgctccacttttaaaatccctaacccccatagcactcttggcgtttaactttcagagtcattaggatgctatgttttttcattaatttactacgtgtaagtgaagcaaaccttgtaaaacaattagcgtaatatgattcctaatatttatcgagctcctgcttactgtgttaaacactggggacagtggtttatccaaagacactaatgtccctgctttctacagagcttacagcatagggtgggaaggcagtacacaggccaataaataaacgaacacgatgatttcagttatacaacaaggtaatgggggagggagaagggagagaagggtgttcgagatttctcattgggaagacatctgtcatttcagcttctacttgaatgaagacaaaaatctaggccgggcatggtggctcacgcctgtaatcccagcactttgggaggccgaggtgggcggatcacctgaggtcaggagttcgagaccagcctggccaacatggcgaaaccccatctctactgaaaatacaaaaattagccaggcgtggtggcaggtgcctgtaatcccagctactcaggaggctgaggcaggagaattgcttgaacccggagatggaggttgcagttaagctgagatcacaccactgcactccagcctgggcagcagagcaagactccatctcaaaaaaaaaa

SEQ ID NO: 86445 - DNA, 350 bp, Homo sapiens
ttttgattactgttgctttgtagtaagttttgaattagagaactgtgcatcctccaaccttgtttccaggattgtttgggctattctgggctcctttaatcccatatgaattataagatcaacttgtctatatttgaaaaatatgcagatggaattgtctctttcgttcttgattttagtaatttgaatctttcttttcctttggcagtctagttaaaggtttgtcaaattttttttatcatttcaaagaaccaactttggtttcattaattttctctatcattcttctgttctctatatttttcaccctgctctaagctttattatttccaggcagtttgtgataaggc

SEQ ID NO: 86446 - DNA, 1018 bp, Homo sapiens
ctgcagctaattaacaaattcagcaaagttatagggaacaagatcaacacccaaaaatcagttgtttccatataccagcaaagaaatttttaaaaaaagaaaaaaaaaatagttcagtttgcaacatttagaaaagtaaaacacctaggaatatatttaaccaaaaaattgaaagatttatccactgaaaactaaaaaacattgctgagagaaattaaagaaaatctaataaatggaaagacatcccatattcatggattggaaaactttaagatagcaatattccccaaaacaatctacagattcaagtggtctgtttgcagaaataaaaagccaaccttcaaattgatacggaactgtaaggggcctcaaaaagccaaaacaatattgaaaaacaaaagcaaagctgagaggacttacactttccaaattcaaaagttactacaaagctacagtaatcaacaagcatagtgctggcaaaaagacagacatataaaccaatggaatagaattgagagcccataaataaatccaaatatctatggcaaattaatttttgacaggagtaccacgaccattcaatggagaaagaagagtaccttcaacaaatcatactagaacatttgtataatgacatgtaaaaaaaaatgaagtgggactccatataaaataattaactcatatataataattaactcatggatcaaggacctcaatgtaaggggtaagattgcaaaattcttagaagcaaacatagaagtagatctgcatttcctcagatttgacaatggattgttagatttgacaccaaaagcactagtaacaaaatttaaaaatagattagattctgcaaaaatgtaaagcttttttgcattaaaaaacattttcagccaggtgcagtggctcatgcctgtaatcccagaactttgggaggccacagcataaggcttgcttgagcccaggaatttgagaccagcatgggcaatatagtgagaccttgtctctagaaaaaaaaaaa

SEQ ID NO: 86447 - DNA, 334 bp, Homo sapiens
tgacgccctgcttccctgcctcccagagcccatctactccccccactcccattcccagcctcaggcctttgctcaggctgctccctccccttggaatgcctcccccaccttccccaccatgtgcaagtcacccatcctcagaggctcagccaaagctgcctggaccctgcagcgtcccccagccctccccaggctccctgagcactctgctttccgggggcagctctacctctgtgtggctctttgggcctctgtctccccgttaaactctgagcatccggcagggaccctgcggtgttcccagctgcatcccctatgactgacctgggtggcg

SEQ ID NO: 86448 - DNA, 332 bp, Homo sapiens
ttagacggataccatacccccatttacatgctcaatcgaattatacggctgccagctgctttataaatcatatctgatcaaaccggtcacgccttgactattctgacccggctagaaactcaaatgataaacgctgactatcagaataaattgactctcgactacttgctaacaactgacagagaggtctatgaaccatttaaccttactaattactgtctacacatacataatcaaaggcttggagcttatgacctaggttaagtatgacagaactggcacatgtgcccgtacaagtgtagcatggattcgaccctgaggccatgtttaga

SEQ ID NO: 86449 - DNA, 372 bp, Homo sapiens
gggccggtgccatgaccaaaataaaggcaaatcccgacgggcccgacgctcaagcggaggcgtgtggcggggagagcacctaccaagagctgctggtcaaccagaaccccatcgggcagcccctggcttgtcggcggctcacgcggaagatctatgaaggcatcaagaaagcggtgaaacccaatcatagtccgcgcggggtgaaaaaggttcataaatttgtcaacaaaggagaaaaagggatcatggttttggcaggagacacactcggcattggggtgtactgccttctaccctgcatgtgttaggaccgaaaattgacatatgcccatatcccctctacgacggacctgggtgcaggcgcaggctacc

SEQ ID NO: 86450 - DNA, 665 bp, Homo sapiens
gggcaaaattatgtgatatgctacaaataatgttacaaataatagaagtttgtacataaccatctctctatgggtttggggcaaaagagtcttcttcattatcaatccttaattactcatttgaataatttttgcttctggttcctacaaccttgggctggatgattttgaagaaactaatccctgagggaagaatgcttctatcaggggcatagtcatggttctgatcaactggcctaagagtacaccctatgtggggcttcacgtactgctacactcacaggcagaattgggattgtttttctgtccagagtgattgatcctgattacaagaggacaaatgggtttcttctacataaaggagagttttgtcaagaacccaggagattcactgagaccttttttagtacttccttgtctaatattctgctgttggaaaactctgggaacccaacaaagacaaggaaggaaggaaggtttgggctatccttctaggtaaagaatctaatctagcgaggtcctgacaaaggctaagggtaacttgaaaaggtgctaggagaacagagttatgcaatattagctacctaatttgcagattacatatatatgtatacacatatacatatgtgtgtgggtgtgggggtgggtggatatatatataaccg

SEQ ID NO: 86451 - DNA, 1578 bp, Homo sapiens
gatggctcactatattacatttctctgcatggttttggtgctgcttcttcagaattctgtgttagctgaagatggggaagtaagatcaagttgtcgtactgctccgacagatttagttttcatcttagatggctcttatagtgttggcccagaaaactttgaaatagtgaaaaagtggcttgtcaatatcacaaaaaactttgacatagggccgaagtttattcaagttggagtggttcaatatagtgactaccctgtgctggagattcctctcggaagctatgattcaggagaacatttgacggcagcagtggaatccatactctacttaggaggaaacacaaagacagggaaggccatccagtttgcgctcgattacctttttgccaagtcctcacgatttctgactaagatagcagtggtacttacggatggcaaatcccaagatgacgtcaaggatgcagctcaagcagcaagagatagtaagataacattatttgctattggtgttggttcagaaacagaagatgccgaacttagagctattgccaacaagccttcgtctacttatgtgttttatgtggaagactatattgcaatatccaaaataagggaagtgatgaagcagaaactttgtgaagaatctgtctgtccaacacgaattccagtggcagctcgtgatgaaaggggatttgatattcttttaggtttagatgtaaataaaaaggttaagaaaagaatacagctttcaccaaaaaagataaaaggatatgaagtaacatcaaaagttgatttatcagaactcacaagcaatgttttcccagaaggtcttcctccatcatatgtatttgtgtctactcaaagatttaaagtcaagaaaatttgggatttatggagaatattaactattgatggatgccacaaatagcagttaccttaaatggtgtggacaaaatcttattatttacaacaaccagcgtaattaatggctcacaagtggttacctttgctaaccctcaagttaagacgttgtttgatgaaggctggcaccaaattcgtctcttagtaacagaacaagatgtgactttgtatattgatgaccaacaaattgaaaacaagcccttacatccagttttagggatcttgatcaatgggcaaacccaaattggaaaatattctggaaaagaagaaactgttcagtttgatgtccaaaagttgcgaatctactgtgacccagaacagaacaaccgggagacagcatgtgagattcctggattttgccttaatggtcccagtgatgtaggttcaactccagctccctgtatttgtcctccgggaaaaccaggacttcaaggccccaaaggtgaccctggactgcctgggaaccctggctaccctggacaacctggtcaagatggtaagcctgtgagtactgaaagcttagtcatctccggtatatctgggattacaggatatcagggaattgcagggacaccaggtgttccaggatctccaggaatacaaggagctcgaggactaccaggttacaaaggagaaccagggcgagatggtgacaag

SEQ ID NO: 86452 - DNA, 709 bp, Homo sapiens
  misc_feature (1)...(709): n = a,t,c or g
ttttttcaggaaatgcttgatataatgaaagcaatatccgatatgatgggtaaatgtacatatcctgtcctcaaagaagatgctcccagacaacacgttgaaacattttttcaggtaggaattaaccagaagtcaagagggcatgaagttaggagaaaatttcctgatgtttgccatgccccccgatgattcaaaagagagcaaaggaaaataatttttactgaaacaaaacagtatttagcatcctattaatttaatagctttggttttgaatttacaatgctgataactgcatttattgaacattcactaaatccaagatacaacactaaacagttctcatgtttcacaagttttgttttcattcagttttacaagaatcctataaatcctcattaatctcattttacagatgagacaaaaagcaagccctgaaagtttcagcaaattgcgcaagtcctgtcacatctaggaaggtggggattttacctaggacagagtgactctacatcttcaccacattataggtggaaaggggaaaagccaggaaggcatttgggcccctatccatttttatctcttaaaaaactgctggggttccctgctctggaaacaggttccctccccggngggaaataaataggccggctgggggnttttccttttttatcnggcttcagntccatttgggtccggggggntttagggg

SEQ ID NO: 86453 - DNA, 472 bp, Homo sapiens
ccttcgacccgtttgacattagaacgcatagctaggcacgagggttccctgagggatacagatggagtgtgagctccttgagggatacagatggagtgtgagtttcctgaggtgactgagggggagtgtgagctccctgagggatacagatggagtgtgagctccctgagggatacagatggagtgtgagctccctgagggatactgatagagtgtgagctccctgagggatacagatggagtgtgagctccctgagggatactgatagagtgtgagctccctgagggatacagatggagtgtgagctccctgagggttacagatggagtgtgagctccctgagggatacagatggagtgtgagctccctgagggatactggtagagtgtgagctccctgagggatacagatggagtgtgagctccctgagggttacagatggagtgtgagctccctgagggatacagatgg

SEQ ID NO: 86454 - DNA, 627 bp, Homo sapiens
actgtcgtgaccatttgacgccatgcttggcaccaggactggaagaaacataaaaataattttcaaacctttaaacaggtcttttaaaataatacactcagacaaaaataaggagaaaagaataaaaaagaatgaagactttgtttccaactacatgaagtaactaaactttaaaattatcagtgtttctgaggaagaaaaaacatcaaaaagtttagaaaacctatttaagaaaacaattgatgaaaactttccaactctagcaatagaattagacatacatacacaggaagctcagcaaacaaaatacaacaaaatataaagaaaatatattgcaaaacagacatcataatggcacatgataatcagaatatctaaagtcaaagtgaaggaagtaattctaaaataagcaaaagaaaagcatctagtaatttataaagaaacccacattagattaaaagcagacttctcagcagaaactttactgaccagaagagaatgggatggcgcttttagagtgttgaaaaaaaagaaaactgccagccaaaaattttatatcaagctagaataaccttcgcaaatgaagaatataaagtcttaccctgacaaataaatgctggggaaact

SEQ ID NO: 86455 - DNA, 1605 bp, Homo sapiens
cagcggcggacctgtgaggggatccgacttgccggcagaacttacgctgcgggaccccgggcactgttgctgctgcgggagggagaaggctgagcagaccatctggaaccgtttacatcagcttaaagccttgaagacaaggcggccccgctcccgggttcctctgaggattggaattctaggtcaatcatgcgaggctgtgacaacatgtgtagctactgcattgttcctttcacccggggcagggagaggagtcggcctattgcctccattctagaggaagtgaagaagctttctgagcaggaaagttgcaaagagagtttcctcgagcattgccatctttctttggtacattttttggtgctgtaatcccagcactttgggaggccaaggcaggagggtgccttgagcgtaggagttcaagaccagcctgggcaacactgggagctgctgtctctattacaaaacaaacaaagcaaaaactaagagattaatattggggctgaaagaagtgacacttcttggtcagaatgttaatagttttcgggacaattcggaggtccagttcaacagtgcagtgcctaccaatctcagtcgtggctttaccaccaactataaaaccaagcaaggaggacttcgttttgctcatcttctggatcaggtctccagagtagatcctgaaatgaggatccgttttacctctccccaccccaaggattttcctgatgaggttctgcagctgattcatgagagagataacatctgtaaacagatccacctgccagcccagagtggaagcagccgtgtgttggaggccatgcggaggggatattcaagagaagcttatgtggagttagttcaccatattagagaatctattccaggtgtgagcctcagcagcgatttcattgctggcttttgtggtgagacggaggaagatcacgtccagacagtctctttgctccgggaagttcagtacaacatgggcttcctctttgcctacagcatgagacagaagacacgggcatatcataggctgaaggatgatgtcccggaagaggtaaaattaaggcgtttggaggaactcatcactatcttccgagaagaagcaacaaaagccaatcagacctctgtgggctgtacccagttggtgctagtggaagggctcagtaaacgctctgccactgacctgtgtggcaggaatgatggaaaccttaaggtgatcttccctgatgcagagatggaggatgtcaataaccctgggctcagggtcagagcccagcctggggactatgtgctggtgaagatcacctcagccagttctcagacacttaggggacatgttctctgcaggaccactctgagggactcttctgcatattgctgacctgagaggatggcctcagagctgacttgggcaatcctccccaacaggaaggggagacattgcctgccactgaggaaacaggtcatgaaggtggagataagctgcaaggggcgaagcaactttatgtcagtggaaaacgtgtctctttaaagctgctatgtgaacagcttttacagtcattaaatttacctaaactaaggttaaaaaaaaaaaaaagg

SEQ ID NO: 86456 - DNA, 393 bp, Homo sapiens
  misc_feature (1)...(393): n = a,t,c or g
aagttttaaagccttgtgtatacacaatcacattcacatataccacacatacacgtgcatatacacagttacatccgtacagatacatacatgcacatgtatacacagatacacatacatgcacaaatatagacacatacacagacacacattcacatgtatgcggacacacacacatatacacatatacctatgcacagaaaccatacagatatacacatacataacatacatgcacaggtatacatacaaacatacacagatatgtgcatacacatatacacacataacacatgcatgcacacatatncacaagcctgcagatatacacacgtacacacagatatgcatattcatacataccanacatgtcgacgcggccgcgatttcaaa

SEQ ID NO: 86457 - DNA, 5048 bp, Homo sapiens
ttttttttttttaagatggagtctcactctgttgcccaggctggagtggagtgattggagtgatgcggtctcggctcactgcaacgtccgcctctcaggttcaagcaattctcctgtctcagtctcctgagaagctgcgattacaggcgcctgccaccacgctcggctattttttcgtatttttagtagagatggggtttcaccatgttggccagcctggtctcaaactcctgacctcaagtcatctgcccaccttggcctccccaagcgctgggattacaggcgtgagccaccgcgcctggcctgattcatatatattactaactgaaatgcagtatcactgcacttccccaattagtaaattcaatacatcctgtatgtaaaaaaacccaccaatccccacaaaaaaccaatcaaacaaaaaccccaaaaaaatcaccaaaccatactgtcaagcgaaatagttttaattagtaggctgatcataaataaatctacataaaagatttaacagaattacaaagagttttgtgttcctttgtggactcaattcataatatgcattagtcaacctcattctctaactgtgacaaaaagagttgtcatccaacaatgcagcacagtttaagcaattcatatgctatagttacatttttacattttctttacaaatgtaacatttatgtacattatatatagatttttttctatagttcatgtactgaaactctattgtttttacagagaaaatgttgaattcatttaatgaataagaaacattccttgttaaaaagtaattcatataaacaaataacacggtaccaatgccttttggcatctcttgccagagttcaagtccagaaatgttatattaattataagaaaaaagaatttatctaattttacattatgacatatcattccacatagctacataaatttgccagcttgcaatgaacagagcactgtactgccatactactggaaatgtgtagaaaccaattcaaaatatacttggtgaaacagcatcatcgttaccattaatttgagttgaaaaagatctgtcaagttctttcttcccctttactttttaccaaagcctcagacagagtgctgtgcgttgcatcttgtattaacaaatgccttcatttcaaatttctcacgcgcttctctgacagattatgctttacctaggttatagatctttttcttattcaattttattctacttcacttacaaatctgctgctgaacatgaagcaaaaattcatagtaagaaaatgcagcctctgtccggtcttcaatcaaatgctgaaaaaattctgctttggcaggactctcatcttttactatgtgaaggattggacttaatggtctgctgtctctaagccaagttatgaaggatctggctctttctgatgaaagtgtatctagctctggaagatgtgtcattttctgtggtattgatgcaaaattagtatatccaagcacatcctctatgaagttattgtcacagcctttcccaacccaaatgtaaaaaacagagccacagtccataaggaaagcaccttctcttgtcagcttctctgcagacaatttttgaagaggtggctgtggtacaatcctgtcattaacatgtactgcaccctcatctgtcaatctgtctatcctgtataagttgggatgaatcattttcattagatgaacaagtggctgagactttatctgacacatggcatatacacgatcatccagccgtgtgcttgtacccgttctaaatgctttctgtttgagaagggccaaaacatagagaggaaacaacttgagggagctgggcgccatcaatgcagagtgctgtaaatttgagacagttgagccatatgcagacaatgagtccactacagcattcactaaggcatctcttgcatctgacagacttgatgaaacggaccgatccacagccatgtttgccagaaggcagatggcagcttgtacatccactcccgcatatacatctgatagtgaacttaccactggcaaacaaagtgtatgtactctaattctccgctcacctttgcttgatgtatataatagggctgtttgaaaacatactaaggaagtatctgttaaactttcttcaattgacaactgcaccgcaaatccagcatcaggattgatgttggcaagggataacaaatcagtagaacggacaaagaagttaccgtgaaaagtgtgcattgaaagacctttagtacaccttattctcataacagcttcaaacccaatttttcttgtgagataccgttttaggtctttttgtaacttttctgcttgtgaaggattgtgagtatagtggaatgatggataataatagatgcaccctgcagaatacttggacatgcaagctagagaagcaagatcagaatactgtgaacttaaaaggaacaaatccactgcagtttgctgtcccgagcaatctaatgcaagtttcttataaaaatcagttgcagggccaagatgttgtaccacctttgtacttgatctctgattaggatcttctctggattgcagaagtcctgcacccaaggaaggtaactgtgtctgaaatacagacacacggccacctgttggagacattaatttaaaggcagcctgaagtgcaggaccaagggcactgtgtgtttctcttgtattggtgaacatgtttggtaatgcattcagtaagtcttttataagctctttactttcatatagattcacaagtaaactatccggtgtaggtagaaaaacatcatctatatcagacacaatcaacatttgaggctgtgataatccttcctgggtaaattgtagaaatgaataggtgcttatcaaaggtcatgaatcctattcttggttcgtgaattctccaggaagcttgtctagatttttctaggagtgactggcaccaaaaattgtcaaatatccagcttccactgcattatgagacacatctaaaacaaacaagtaaactgcaggttgaggaggacgcagcatgtaatctgaagaagcaatgaactccacagttggaattctgaacttctggtcgtttatgaggctctccataagatcgggtaagggggttatacataaattcttcaggaacatcgtttactctatagcacaaattgcattttcatctacgttgatcaatgaaggatacaaacggggttaatatacgttcgacaggatcggcacctcacaatggtatttgatgttatcactggtaattgcgttaggtctctgaagggatgtaacaacaatcctaaaggaagcttagctttattcagtaaagcctgtgtctgtggaatatttgtcaaagtacaccgaaatgaatctgggctacagtttaattttttgaggtctgcattcaagttaggtacaggagcccaaacaggagtcataggtaaaatattcctctcctgagtaaggtttacaggtctcaggctttctggttgtggagaactctgaagactcaatcctcctatactggaggatagctggttcacaccaggatactgttgaggatactgctggaatccagaatataccgggttactggggctgtactccagaaataagtggtgctgtagcattctgataaccaggctgaagtgttggatagccatagccaaaggcttagccatttttgaaggctgagggacgacaggagctggagctgaagctggagctggagcagaagcaggatcaggttcaggggcgggatcaggagcaggactgcttgctgatgaagaaagcatatctgggtaactgcctccttccagggcatcataactgttgggcattggagaagcactgcttgtggtagaagagctgtcaacacctgcttcctcatcctcctcctcctcttcctcatcatcggaagttgatgacaagggagttggtgcggagctagcttggttattaacatattcaccatactgcacgcctttttgttgtaatagctctgatggctgtgtaactgaggtcacaggctcaactgggtgatttgcagtgggaggtgttcttgttgatgaggatcctgaggatcctgataaaacagtggataccactgggctggacttgggaggctgaacattttgcataacaggacaggataaagaatctgcaacagtaatggttgggttgttgttcgctacagccagggatcctgtgtggtttcggatgagattgtcttgagtcgatggaaggcctggagatgaccacgttagagtactgtatcctgaaagactttgctgctggtggtgctgttgtgatggtagaggtggaagtggcgatggatggctgatagctgtattttgaccagagaatgaattatctttaactggcctaacagtcggagcattctgtgaggtaaacatttgcccatatgtatcaccagcaggcagagagggatatgaaacactaggatacgcggcattagaaacagttgacatagcataatgaccacaagtagagggaaatccctgagacgcaacagaagagctggcagagtacatggctggactattgtagtgattcacaaaagaggagtatggttgggaggcactcgtatgcaaatgggatgctgacgatgcagcaccttggaaagatcctagagtggatcccacaatatgaggggcaggaggacccctgctgtacaactgctgtgctcctggttgctggttcactgtgttaggagtcacattttgtgttggtactgtatagagagcagagtagtaatcaccacactgggtatccaatggcaatgaggtcattttcccaggtccttgagagtaatgtcctgagggagcaatatagttttgatgatgcaatccatatccagatggaacctgcatttgattctgggctggaccgttctgctggtgcggcgccgggcccgcacccgggcccgcgggcgctgcggctcctgagacggccgatccgccgaacttgggcgggatccgggcgctggcggccgggtgagaggacccggcgggggccgacat

SEQ ID NO: 86458 - DNA, 355 bp, Homo sapiens
ctatttcttcctgaataaacttttgtagtttgtgtctttcaaggaatttgtcattccatctaagttgtcaaatttattggcataaagttgttcataatattctattactatccatttagtgtctttagaatatgtagtgatgtcacctctctaattctgatatcagtaatttgtatcttctcttttatgtctgatcagcctggttagaagtttaaccattttaaaaatcacatttggtttcattgatttttctcttgcttttctgtttcatatttctttgaattttactttgatctttattattttcttttctctgcttatgcacaggttaatttgctcttctttttcaagtttt

SEQ ID NO: 86459 - DNA, 872 bp, Homo sapiens
tttaacataggatttttaatgtggaaatgtaaggaacatttacatccccagtaatgaaagagactcaagagtagaggcttcttagaagtcaatgagagaagaatccggacaagaaacagcttaatcctttctacggcagagaaacatatgctcagaattctttggtttcattttcatgtaataatttcagttcagaatatagtttatgttctaaaaaagtcttatttgcatttttagtgaggtgctttgatcatcttcaagaagactgctgggaaacatcagattcctggaaccataccacaaaggatccgagactttcacagggaggttctgcaggcaggaagtgtgctgggatgccacacaagcaaacagccctgaggagctctgtggctccattttcagctgcagggagaacaggcacagtcagttctcagatgtgctgctggtgggcagggcccactcacctgcaactttcagtgtcaccatctcactgcgctgggcctccagaccattgtctgcctcacaggagtagtttccagagtgctctgcagtcagagagaggtttaaggacgctcctccagagggggacgacctatttcctagggtgacatcctcatgaaaaaaaccggtacaggatcaggggagagcctctcagggcctcacagtgaagctccagcaggtcccccaccgcagcatgggtcccgggagccctgagggtgaggaccgggcgagacaccggaactgcaactttcagtgtcaccatctcactgcgctgggcctccagaccattgtctgcctcacaggagtagattccagaatgttctgtagtcagagagaggttgaaggaggcccctcctccgtcgacgcggccg

SEQ ID NO: 86460 - DNA, 900 bp, Homo sapiens
ctaatacgttgcatgcccgcgtaaacttgggcccccccagggatcctttaaaacggccgccccttttttttttttttttttctcaaatgtcatttattagaaaatacaattcccgagaaaggagatacaagggattctgggaagtgggaagtaaacagtacacagatctctttaaatcaggagcatataggtcataataaaatgagctacaggcacaaagccagtaacacatttatggtccgttcatctggaaaagtttcaccgcccactccccactcctcttccccctcctggaagcagccagctttatccttggcattttaattttagagaaaatttaaacttccatgctgccctgtggcttcggtcaatggagcttctttctccagttatggaatgagtcagcaaaacggggagtttctgatccttggaattagggagggacagtttacagaatgtcctcatttcactcttttcccaatcatgggaaatatccagccaattctggttttaaagattcatatcaaattcaaagtccctccctccttttggcgaggaagacaaccctttagagcgaaacacaaaagagcaaatgtaaaatccatctggggcggggcatggtggctcacgcctgtaatcccagcactttgggaggccaaggcaggcagatcacgaggtcaagagatcgagaccatcctggccaacatggtgaaaccccgtctctactaaaaatacaaaaattagcttggcgtggtagcacatgcctgtaatccccagctactcgggaggctgaggtaggagaatcgcttgaacccgggaggcagattttgcagtgagtcgagatcatgccactacactccagcctggcgacagggcgagactccgtctccaaaaaaaaaa

SEQ ID NO: 86461 - DNA, 1054 bp, Homo sapiens; identical to SEQ ID NO: 63076
  misc_feature (1)...(1054): n = a,t,c or g

SEQ ID NO: 86462 - DNA, 383 bp, Homo sapiens
cccacgcgtccggatggcaacatagcggtcataggccatcacagcaagcagggaggattcagtgcccccagtggcaaacacaaagaagacctaagccatgcagccctctactgagatggttttcttctcagacaggaggttctccaacagcttaggtgcagtgacagaggaatggcagagatccaagaaggacaattgtcccaggaagaagtacatgggtgtgtggaggcaagaatcagcattaatcaccaccagcagcagcaggtttcccatcacagtcaggaggcaaatcaccacgaacagcacaaagagcagagtctgggtctgggggccagctgacagcccgaggaggacaaactcagggacaacactgcggtttctca

SEQ ID NO: 86463 - DNA, 1345 bp, Homo sapiens
gcggccgccccggcggctcctggaaccccggttcgcggcgatgccagccaccccagcgaagccgccgcagttcagtgcttggataatttgaaagtacaatagttggtttccctgtccacccgccccacttcgcttgccatcacagcacgcctatcggatgtgagaggagaagtcccgctgctcgggcactgtctatatacgcctaacacctacatatattttaaaaacattaaatataattaacaatcaaaagaaagaggagaaaggaagggaagcattactgggttactatgcacttgcgactgatttcttggctttttatcattttgaactttatggaatacatcggcagccaaaacgcctcccggggaaggcgccagcgaagaatgcatcctaacgttagtcaaggctgccaaggaggctgtgcaacatgctcagattacaatggatgtttgtcatgtaagcccagactattttttgctctggaaagaattggcatgaagcagattggagtatgtctcatcttcatgtccaagtggatattatggaactcgatatccagatataaataatgtgtacaaaatgcaaagctgactgtgatacctgtttcaacaaaaatttctgcacaaaatgtaaaagtggattttacttacaccttggaaagtgccttgacaattgcccagaagggttggaagccaacaaccatactatggagtgtgtcagtattgtgcactgtgaggtcagtgaatggaatccttggagtccatgcacgaagaagggaaaaacatgtggcttcaaaagagggactgaaacacgggtccgagaaataatacagcatccttcagcaaagggtaacctatgtcccccaacaaatgagacaagaaagtgtacagtgcaaaggaagaagtgtcagaagggagaacgaggaaaaaaaggaagggagaggaaaagaaaaaaacctaataaaggagaaagtaaagaagcaatacctgacagcaaaagtctggaatccagcaaagaaatcccagagcaacgagaaaacaaacagcagcagaagaagcgaaaagtccaagataaacagaaatcggtatcagtcagcactgtacactagagggttccatgagattattgtagactcatgatgctgctatctcaaccagatgcccaggacaggtgctctagccattaggaccacaaatggacatgtcagttattgctctgtctaaacaacattcccagtagttgctatattcttcatacaagcatagttaacaacaaagagccaaaagatcaaagaagggatactttcagatggttgtcttgtgtgcttctctgcatttttaaa

SEQ ID NO: 86464 - DNA, 668 bp, Homo sapiens
  misc_feature (1)...(668): n = a,t,c or g
ctgggcaggcgccacgttgatgcccctcgaaccccccagcagggcactcggccatattgagcctccccagaggctgcccctcccagggctccatggccagtcacggccccctgcccacttgaggttgtaaactgacggagaagttggcaggcgcctgagtgccggtccagcacgtgcagtgcatgtagatgccacacagcctaggcctgtgtcttcctcccgttgatttcccccttgcagactttaggggctcccccttaccctgggcaggctcacggcagcccagacaggnggcagcactttcctctctggtgtttgccagatgccggaggtttctgtcttggggacccaggaggggccacagcaagaatgaatggggttccaataaggctcccagcgcagggtcccccatccggcactctgacagccagagaggccaggccgaggcactgtgctgggcctgctgtcattgcaggagaatcaggtcctggctgagccctctgcctctctccctgagcccttcagcctggtcctgtctggggacctcaccctcggtgtgtgcgcacaacctggtctggtctcgcctccacccacacgccgccctcacgtctccttgggcacccagccttcagcatggcagcgatttggctgcccagagagtgtgccgg

SEQ ID NO: 86465 - DNA, 340 bp, Homo sapiens
cgagtattatatgttcccagcatggggttctgtattttggtagcccatggatggcagaaaatatcaacaaaaagtgtatttaaaaagctatcctggatttgtctgtctatggtgatactcactcattccttaaaaacattccacagaaattgggattgggagtctgaatatacattgtttatgtcagccttgaaggtaaataaaaataatgccaaactttggaataatgtgggtcatgctctggaaaatgaaaagaactttgagagagctttgaaatacttcttacaggctacccatgttcagccagatgatattggtgcccatatgaatgtaggaagaa

SEQ ID NO: 86466 - DNA, 542 bp, Homo sapiens
aggatgctgagacttggataggctgggtttcttgcccaagatcaggtaaggattaattcaaatccaggtctttctctcttctaccccacactgcttctttagcaataggagctgaattggtgaattgttggatttgtgaataggagctgaattggtgaattggtggatttgtgaataggaggtgaattggtgaattagcggagtggtgaacaggaggtgaactggtgaattagcggagtggtgaacaggaggtgaactggtgaattagcggagtggtgaataggaggtgaactggtgcattagcggagtggtgaataggaggtgaactggtgaagtagcggagtggtgaataggaggtgaactggtgcattagcggagtggtgaataggaggtgaactggtgcattagcggagtggtgaataggaggtgaactggtgcattagcggagtggtgaataggaggtgaactggtgcattatcggagtggtgaataggaggtgaactggtgaattagcggagtggtgaataggaggtgaactggtg

SEQ ID NO: 86467 - DNA, 830 bp, Homo sapiens
cccacgcgtccgcggacgcgtgggataaaaaggattgttttattttgttgttgttgttggggtttttgaggcagagtcttgctgtgtcgcccaggctggagtgcagtggcatgatctcagctcagtgcaacctttgccttccaggttcaagcaattctcctgcctcagcctcccaagtagctgggattacaggtgtacacaccatgcctggctaatttttgtatttttagtagagacggggttttgccatgttggccaggctggtctcgaactcctgacctcaggtgatccaccctcctcagcctcccagagtgctgggattacaggcatgagccaccacgcccggcctcctcacgttaactatcttttgccatgcaagattgggcagaggaccctggtctcttgaggttatgaatggagctggcaggacccagcacagcaacccacagtgagagaagcccttgctgccaagggtaattccccgagtgcagacatcctgagaaaagtttactctcttcacacacattttcagtcaccagaattctctcccaaagcattcagcagtctttggttaatgtgtctttctggatgccctgaaataactgaggcaagccacctgctgtaagacttttctagacgatggtcctgagccattggcaaaatcagagaggatgggcttttttcattcactcaacatatattcattgaatatttaccatgtgccaggttctgagtagtgtctactaatggacagggtattcataaaagttctgtactgttttaaacgtttcactcaaactttagacagttgatatattacaaaaatcttt

SEQ ID NO: 86468 - DNA, 1860 bp, Homo sapiens
attgacctgcctgtacgaattcggcacgagaagccgctttgggccctgcgccaccctctgggcttcactggaccctgtctcagtggacacggcccgactggaacacctctttgagtctcgtgccaaagaggtgctgccctccaagaaagctggagagggccgccggacaatgaccacagtgctggaccccaagcgcagcaacgccatcaacatcggcctaaccacactgccacctgtgcatgtcattaaggctgctctgctcaactttgatgagtttgctgtcagcaaggatggcattgagaagctactgaccatgatgcccacggaggaagagcggcagaagattgaggaagcccagctggccaaccctgacatacccctgggcccagccgagaacttcctgatgactcttgcctccattggcggcctcgctgctcgtctacaactctgggccttcaagctggactatgacagcatggagcgggaaattgctgagccactgtttgacctgaaagtgggtatggaacagctggtacagaatgccaccttccgctgcatcctggctaccctcctagcggtgggcaacttcctcaatggctcccagagcagcggctttgagctgagctacctggagaaggtgtcagaggtgaaggacacggtgcgtcgacagtcactgctacaccatctctgctccctagtgctccagacccggcctgagtcctctgacctctattcagaaatccctgccctgacccgctgtgccaaggtggactttgaacagctgactgagaacctggggcagctggagcgccggagccgggcagccgaggagagcctgcggagcttggccaaacatgagctggccccagccctgcagtgcccgcctcacccactttctggaccagtgtgcccgccgtgttgccatgctaaggatagtgcaccgccgtgtctgcaataggttccatgccttcctgctctacctgggctacaccccgcaggcggcccgtgaagtgcgcatcatgcagttctgccacacgctgcgggaatttgcgcttgagtatcggacttgccgggaacgagtgctacagcagcagcagaagcaggccacataccgtgagcgcaacaagacccggggacgcatgatcaccgagacagagaagttctcaggtgtggctggggaagcccccagcaacccctctgtcccagtagcagtgagcagcgggccaggccggggagatgctgacagtcatgctagtatgaagagtctgctgaccagcaggcctgaggacaccacacacaatcgccgcagcagaggcatggtccagagcagctccccaatcatgcccacagtggggccctccactgcatccccagaagaacccccaggctccagtttacccagtgatacatcagatgagatcatggaccttctggtgcagtcagtgaccaagagcagtcctcgtgccttagctgctagggaacgcaagcgttcccgcggcaaccgcaagtctttgagaaggacgttgaagagtgggctcggagatgacctgggtgcaggcactggggacttaagcaagggtccctggccctggaggtgtgaaggtgctgtatcccggaaatctatctggaccctggactgcagtgcaggagatgacagagtgaggagggcccagagcagaattctggccccagaactctgtgcccaggagccatgccttgagcagtattagccgtgtgtgtatgcatgtgagtgtgtgtgtatgtgtgtgtgtgcatgcatatgcatgttgcatgtgtgtgagctccttgaacgcacggagcaaaataaaattttcttagctaatccaaaaaaaaaaaaaa

SEQ ID NO: 86469 - DNA, 409 bp, Homo sapiens
  misc_feature (1)...(409): n = a,t,c or g
tttcgtcctgctactgactgtcccgtcctgggtcttatcccaggtcaccttgaaggagtctggtcctgcgctagtgaaccccactcagaccctcacactgacctgcaccctctctgggttctcactctccacccgtggaatgcgtgtcagttggctccggcagccccccgggaaggccctggaatggcttgcacgcattgattgggatgatgataagtactacaattcatctctgaagaccaggctcaccatctccaaggacggtgccaacaaccaggtggtccttacagtggccgatgtgggccctgtggacacagccacctattactgtgcacggattccagcgtcaggcaggtccttctactttgactcttggggccagggagtcctggtcaccgtctcctcagcn

SEQ ID NO: 86470 - DNA, 1014 bp, Homo sapiens
  misc_feature (1)...(1014): n = a,t,c or g
ttttttttttttctgattgacaatgaagaatatttattgagggtttattgagtgcagggagaagggtcttgatgccttggggtgggaagagagaacccctcccctgggattctggaagtctaagtttcccgtggtgggggggtgagggttgagaaacctatggaacattctgtaggggccactgtcttctccaacggtgctcccttcatgcgtgacctgggcagctgtaagcttctgtgggaacttccactgctcaggcgtcaggctcagatagcatgctgggccgcgtacttgttgttgctttgtttgggagggtgtgggggggtctccacgtcccgcctttacggggcctgctatctgcgctttccaggccacttgtcacgggctcccggggtagaaagtcacttatggagacacaccagtgtggccattgttgggcttgaaagctcctcagaggagggctgggaacagagttgacccgaggggagcagccttgggctgaccttaggacgggtcaacttgggtccctccgccgaataccccgaaagtgtagctgcctgcatatgagcagcagtaataatcagcctcatcctcagcctggagcccagagatggtcagggaggccgtgttgccagacttggagccagagaagcgatcagggacccctgagggccgcttactgacagcataaatcatcaatttgggggctgtgcccgggtgttgttggtaccaggagacatagttataaccaccaatatcgctgctggttccagcgcaggagatggtgactgactgtccaggagacccggacactgagcgaggctgagtcagggcagactgagcccaggatcctgtgccctgagtgagcaggctgaggaggagcagagcccaggccatggtggagacgtcccgagagtgaaaccgtcgacgcggccaagatttcggttcctcgagggatctcttttttgggtttggggggtgtttctcgaggatctcatntttcggcagcctctt

SEQ ID NO: 86471 - DNA, 398 bp, Homo sapiens
tttcgtaaataccacctctgtacgagtactagctcatgaaagtgttgggaagagctaatacttttcgctcccatgttatatggagggtgcagaccaccccttgccggaggtggaccatgtcaagcacccgtttgccagccaaaaggcactgaatgacataggataaagactactggagcaacctttccatgaatgagaaagtcgagtaggatcgcattaacttcaaggagggctttgctgagatgatcaggggctcgtacgattggaagacggttgtgggcggcgccatgttcttcatcggattcaccgtagctcgctatcatggggcagaagcactatgtgcacggccccctcccgcaaagctttgacaaagagcgggtggccaagcagaccaagag

SEQ ID NO: 86472 - DNA, 430 bp, Homo sapiens
ggatttcgtgcggtggtgatgacggtgaaaactgaggctgctaagggcaccctcacttactccaggatgaggggcatggtggcaattctcatcgctttcatgaagcagaggaggatgggtctgaacgactttattcagaagattgccaataactcctatgcatgcaaacagtaagtttgaccggatttgaggaaataactagtatagtttgaatttgccagaggtaaacattctcatcacggcgtttatcgggaaggcgaagacttcttctgggggggggatctcatttctccttaaattctagtatatttgacacattttaaacattaaagttaatttgctgatttggcttgaactggagatgtaagataaatggttcgtgttggccgaattcacggcctttctccatgagcaacaatccttatttctg

SEQ ID NO: 86473 - DNA, 404 bp, Homo sapiens
  misc_feature (1)...(404): n = a,t,c or g
tcccaggtgggtcctgtcccaggtgcagctgcaggtgtcgggcccagaagtggtgaagccttgggagaccctgtccctcacctgcactgtctctaatgacgccatcagtaattattactggaactggatccggcagtccccagaaaagggactggagtggattggatatatttattacaataggaacaccaactacaacccgtccctccagggtcgagtcaccatatcaatagatacgtccacgaaccagatctccctggagctggcatctgtgaccggngcggacacggccgtatattattgtgtgagagggggaatttggtacagtaaactccactggctcgccccctggggccagggaaccctgggcactgtgtnctcagcatccccgaccagccccaagg

SEQ ID NO: 86474 - DNA, 401 bp, Homo sapiens
tttcgtcctgagcagagccagcctgcggggccagcagctgtacgcctccgtccttgaggtccagctccagccagtctgtgggacccctgaggccaggtcgccctctgtggtctgaagcctgtgcctttctctgagcagcagctccccaaggcccagcatccccatgctgtggtctgccctcaggtttcccgagggtctgggctcaatgctgtcccccaggaggtgccctcaggtttcccgagggtctgggctcagtgctgtcccccaggaggtgccctcaggtttcccgagggtctgggctcagtgctgtcccccaggaggtaccctcaggtttcctagggcctgggctcagagcctgcccccaggaggcgccctcaaggttcctaagggctgggctcact

SEQ ID NO: 86475 - DNA, 1164 bp, Homo sapiens; identical to SEQ ID NO: 63344

SEQ ID NO: 86476 - DNA, 423 bp, Homo sapiens
  misc_feature (1)...(423): n = a,t,c or g
gctgcgagaagacgacagaaggggggagagacagagatttaagaagacagagagaaagagacacagagatacgaagccagggagagacagagagatggggagaaaagggagagtaagaaagagaaacagggggtgctgagggagactgagagaaagttggggggaggagacagagacacagaaaagaggtgggaggaagagacagatgagacagatggagagacagagagaaacagacgagaaggaggagagagagatggagagaacgatagggagaatgagagacagagacagtgaggagagggagatgaggcaggagaggagataaacagaactggggagagggagacagagagagacagacagactgacaggctggctggcngagaaagagagtaagacagatgataggcacagagagag

SEQ ID NO: 86477 - DNA, 446 bp, Homo sapiens
aatacatggctgctggaataattggagacaggaaaaaaatagaatctctacctgagtctcataccttatgcaaaaattaactcaaaattagatcatcgatgagaaacataaaactataaaacatttagaagaaaacataagagaaaatattctagaccaagagcttggcaaagagttcttaggcatggggcaaaaaaagcacaatccataaaagaaaaataccagtaaattttacttcatcaaaattaaaaacttctgtttttttgaaagactgttgagagggagaaaatgatgagctacaaaccaggagaaaacatttgcaaaccatatatctgacaaaagacccatatctaaaattgataaagaattttcgaaattcagcattttttataaagcccatttagaagataggcaaacgacatgaaaagacattcaacttttagaag

SEQ ID NO: 86478 - DNA, 444 bp, Homo sapiens
ttcgccattcgtgctgcccggctctttcataacaaatgactacatcttcccacatttctagcttttcaaatatcggaagggctgaactggtacatcccaactcacagagcaaacttgcaagttggcgctgaatgcgcccactgaggtggcacttgacagcaatagaaaatcttcaggcgttccactacagaagtcattttatcttcaaattggactgcaagagcctgtgaatgcctcattgcccgttccactcggcgagaacttcctttctcaagttttgtccggaggatcaaggctgaaggctgaatggcccaaaactttgactgagacagcatatatgatgtcaccgcccgaagctccacttcaggtactgtgcgcactgccgtattcttttgaacagtaatgccgactccaatgataagagcgagcacttcacacacaaat

SEQ ID NO: 86479 - DNA, 2987 bp, Homo sapiens
attggctcatgtaacaattttattttattaaggattatggattacctcttgtgagggaatttttaatgtcaaggctgtcttcttggcaaattccgttaataagttgcatttgtgaccttggttttatacaaggcatgccaaaggcatataatagaatcacatggaacaaagaatttaaaaattaaatgaggcaaaggaatagcaatttttgctgatattttgcttatttccatagatactccttttattgattttatgaacatacctatttatgcactatactcaaatactgtacaaaactgcaataaatgttactatttgactacttatgtttctacaaaaacaccatcgtaaaggtgcatgttttagtaaaagtcaactaataactgctaatgtacatgtcaatcaaaagtatttgaagtttgccaaaaactttgaatctaggcataatacacaatctttaacttttattagcatatttcggggcataaataatattttagatattaaaagaaaaatgaattttacccattaataactagtaattatataaaatttaaaattgtgttttctaatttagctgtgtatgtgtgtgcatataattatttataaaaatttagtatctgtgctataattaaatagtgctttggtgaaatgtttccctaaaaattgataatgaaaaccaatggtaactatcatttattatctatatgttatgttcaaattgagaagttactgttttaataagggtaaccaatttttttaacaatactatttgcttcatttcattcatttattgctcacatttcagaagtactaggacttagattggcagtgagacaaaacagaattcaagaagctggaagctgagatattgagacagaaaactgtaaataataatgattccaattaattttcagagaggtttttctaaggggtcaagtgaatggataaaaatattttatcacctcagtgcacaaagtgagctcagagcttccccccgaaagccaaaagtttcaacctgaggtaggtcggcaaactcttgaatcttagatgtgtgatgtttcagagctgaaagagagtataaagtaaggactaagatatcttaagtgctataacaacaaatatacatgatatctagtaactggctttaaaaaactgtttttgtgtttcccaagacagtgttactcaaaattctaagacatgtggcccaattattttataataggattagaaaaagttaacttacttaagccttcgaagttttcttcttctaccccacatccattgcctgaaacttcaatgagatccactccatagtcctttagctttaggatcaatattagtggcaccagcatccagactgttttctaccatcttcttcaccgcagtgcttagactcagtactaccggcccagagcaaatctgatggactgacttccgatcaataggtttgatggccttagcaggttctgtacggactgcgttttttttccgaacgcccgcaccagggtcagaagggaggtggtcgccctccgtcgtggtctggcgtgtattccgagccttggtgtctggcggtttccgagcgttggtgtctggcggtttccgagcgttggtgtcttggcggtttccgaccgttggtgtctggcggtttccgaccgttggtgtctggcacgcgccaccctctcttgctttggttgcgccatgccgatgtaccaggtaaagccctatcaccgggtctgcgcccctctccgtgtggagcccacctgcatgtactggctccccaacatgcacggcaggagcggcggcccagcacttggcactggccacttgcagacaagaagacaagaaaatgatttgaggacagcttcaatcgcggtgtgaagaagaaagcagcaaaacgaccactgaaaacaacgccggtggcaaaatatccaaagaaagggtcccaagcggtacatcgtcatagccggaaacagtcagagccaccagccaatgatcttttcaatgctgcgaaagctgccaaaagtgacatgcagggatgtccttcctgagatccgtgctatctgcattgaggaaattgggtgttggatgcaaagctacagcacgtctttcctcaccgacagctatttaaaatatattggttggactctgcatgataagcaccgagaagtccgcgtgaagtgcgtgaaggctctgaaagggctgtacggtaaccgggacctgaccgcacgcctggagctcttcactggccgcttcaaggactggatggtttccatgatcgtggacagagagtacagtgtggcagtggaggccgtcagattactgatacttatccttaagaacatggaaggggtgctgatggacgtggactgtgagagcgtctaccccattgtgtaggcctctaattgaggcctggcctctgctgtgggtgaatttctgtactggaaacttttctaccctgagtgcgagataagaacgatgggtggaagagagcaacgccagagcccaggcgcccagaggactttcttccagcttctgctgtccttctttgtggagagcaagtctcattctgtcacccaggctggagtgcagtggcagttctcagctcaccgggacctctgcctcccgggctcaagcaattctcatgtctcagcctcccgagtagctgggattgcgggtgcacaccgccacacctggctgatttatgtatttttttcgtggagacagggttttgccgtgttggccgggctggtctcgaactcctgacctcgggtgatccacccacctcggcctcccaaagtgctgggattgcaggtgtgagccaccgtgcccggccttgactaccatattttaaatttactggaggacttttttgttctcttcttttttctttttttaatagcatcccgctcttatttcagaataaaaaaaattttaaggtatgttgagtaagaatctatagagcaatgaaaatgcaagagcaa

SEQ ID NO: 86480 - DNA, 2789 bp, Homo sapiens; identical to SEQ ID NO: 74793

SEQ ID NO: 86481 - DNA, 437 bp, Homo sapiens
aatacagttggttcacaaatatatatatctccaaaacaagtccaaatacatataagaaatctgtaagaataatatttttaaggaaacatttaagtttggctcatatttcctttcttaatcacaatgctaaagtttaatgcatattcatttgaaaaattaatgttacagtaagttatttaataatggaatactgtatgttttaaaaacaatgatgatataattaccttagataaatgtttgtagctaaaacatatgaaatatcacgaacagtctttttaaaaaataaacatgtaatcaccataacaactggaagccataaatggctttgtgtatctcagcggagtccctttttccatgaaagccaaatcgggagcacaggtatatattaaaggatcaaaatctggataccttaagattctggcttgtataagatcctt

SEQ ID NO: 86482 - DNA, 453 bp, Homo sapiens
tacgcactggaggcacagttccggggttcccgggtcgacgactgcgagaagacgacggagggaactggaaattgccacatctgacaaccaagagtattacaacagactctgccaggaggtgacaaatcgtgagaggaatgaccagaagatgcttgctgacctggatgacctcaacagaaccaagaagtatctcgaggagcggctgatagagctgctcagggacaaggatgctctctggcagaagtcagatgccctggaattccagcagaagctcagtgctgaggagagatggctcggagacacagaggcaaaccactgcctcgactgtaagcgggagttcagctggatggtgcggcggcaccactgcaggatatgtggccgcatcttctgttactactgctgcaacaactacgtcctgagcaagcacggtggcaaaaaggagcgctgctgccc

SEQ ID NO: 86483 - DNA, 702 bp, Homo sapiens
atggcaccacagcactccagcctggatgacaaggtaccacagcaagccagcactgtgtgcttcgaattccaggatatcttgcagcacagccagtgcactgagcacaaggactctctgtggggcccaggagcaaggagtcaaccctttggagcccacaacacccggctatccccagactcgtgtccagagaagatcgtgttgagggccctgaaggacagcagggcagggatgcctgagcaggacaaggaccccggagtccaagagaatcctgatgatcagagaagggttccccagggcaccggggatgcaccgtctgcatttcggcccctgtgggacaatggaggcctctctcccttcgtgtccaggcccgggcctctggagagagacctccatgcccagaggtcagaagtcacatataaccagagatcccagtcctcctggatgagctccttccccaaacgaaatgccttcgtaagcccctacagttccatggggcaggctcagcctgtctacccaaaaccaaccccataggtgaatcctgctgttgggaggggctcagcctgtccacccaaattctgggctagcagaaaccttccaaatacatccccagcttatgcaaaagataaacacatctccaccttaggtgcatgcagtacctcttggactttcacttaatccccccttctgtcgtcttctcgcagc

SEQ ID NO: 86484 - DNA, 1678 bp, Homo sapiens
ttttttttttttgaatgaaaacccatgaaatttaaatgtgacattgggggagcctcatccttccctttttaaccaccccacccatcccagcctgttgtgagttgggtgagggctgcccccagtctccggtcctgcgggctctcgggtgccatccatgttcctttcgagctcagtccagccctcctggggctcgtctctctgtgaatctccttcttgcgtattcatatagtgccttgcttgcgctcctgcagggctcgtcctgcccgggcccagggaagacttgggcaaatgttaggggctgttgggctgatgggtgttacaaaaccccccccctggctgggccatagctggggaaacttgggaggccagaggcttgttgggtagggacttaggttccccttgggtgaatgtctttcagggcatgaaaagcttacgggcccccctcaaagcaagattaagtgaatagtcaaagttttacaacagccagtttttggccaaggtctctctggaatgaacaccccaatggccacatgggggcaaaaactttccttgaactctctgaagcccagagtttgcccagtttgcacatccaggaagaaaggacccagggggagggagggaaagaagactgggctgactgggggcgcaaatctggggtgtctttgtcgcttcatgtgctctgctttgtcaggctggagtgagccgtgtccctgtctggccccaattccttggccaccagcctgttggacacggagtgcaaactcctcattcgcttcccctagttggcgatgaacaggacgaagccaccttacttgatacaccgtgaaagggacgaaaagtgaccaacagcagttctgagacccaggaggcatctgacaccgtcacagagaccagggttctctgaacttgcagggtaagaggttgtaccacatcttggatagaaaatggccaggaactgaagcgcaggagcccctcccggccattggtggcctcttcctcagggaatagcagcagaggagtggggggaagcctcgtggaagcacagaatctcttgagtgactccaccaactccccccgcccattcatctccatgaagccccgagaccagcacacaaagctggggggactattgagtagaggctgggaaccaggagaagagaaagcaagaagaaaaatattgaggaaaatgaaaaaaaaaaaactgacatgttgggtagaggatcggggttaggggtaaggcctcagtatcctccatgcggaacgcgagtggggacaggggggccttcagctgggccccagggaaccgccccgtggcgctctcggcctcgctctcactcacggtgctacaggtggtaagcaaattgactatgttgtggtcgaaaggtgtcacatggttggaaatgaggaccctgacactgtgatcccggagtccggagtcctcctgccgggccacgagccctagcaccgcacacatggtccgcactacgaatctgcgaaggacgctgtctggcagcgcgcagctgaccaggaagacgtggatcccgagaaagaggcgcaggacgaggaggcagaacccgactggcgcgtagagcagcagcacgagcagtaggaagcagtcacccggaagccggtgcgagtcaaagagccgctccggccccggccctgagggaagctccat

SEQ ID NO: 86485 - DNA, 851 bp, Homo sapiens
gcggccgcgccagtctcgcttcaagacgcagccggtgaccttcgacgagatccaggaggtggaggaggagggggtgtcccccatggaggaggagaaggccaagaagtcgttcctgcagagcctggagtgcctgcgccgcagcacgcagagcctgtcgctgcagcgggagcagctcagcagctgcaaactgaggaacagcctggactccagcgactccgactcggccctgtaaggggcgccgcccgcgggggggacgcgcgcgtccgcggtccgcgcggggaccggcgtgtgaaccccgagagtgcctgcgccctgctcccgggggacccgcaaggacccgggaccggccgctcctcgcgcgctcggactcccgccccgctgcgaaccgggtcggtgctgcccctcgccgcgctcgccctggcccgggagcgccgggagcggagccgctttcctcgtccttgtaaatgtttattttttaactcttcccagtgcgaactctgctgtgagtgtgtgcggggaggcgcgcccgcgctgagtcggcggcgggtagccactccatgcccttgtccgatggtttgcaactccgattttgcacaccgctccaccgtgccccccagcgcacacccattcacactcacgccaacactctcgctgaacacttttataattgttaggcgtggccgttgggactttgggcgcagcgcggctgctactgcgtctggaggattgatatttatttttgcattgcgatggctgaaggcatttatttaacgatctttttacctggatatgtctgtgaggctcctgaaaggagacaaataaagtcaatatatttgcacagaaaaaaaaaa

SEQ ID NO: 86486 - DNA, 447 bp, Homo sapiens
  misc_feature (1)...(447): n = a,t,c or g
gacgacttcgtccgggacctggacggcgcgggccggggcctgagacccctcgccctcgctcctagccgtggccctggggctgcgtgcaggggagaggacccggagcggccccggctccagcagtccgagcgggggcatcagcggaggcgcttccgcgggcctggccagcagccccgagtgtgcttgtggtcggagccacttcacatgtgcagtgagtgctcttggagagtgtacctgcatccctgcccagtggcagtgtgatggagacaatgactgcggggaccacagcgatgaggatggatgtatactacctacctgttcccctcttgactttcactgtgacaatggcaagtgcatccgccgctcctgggtgtgtgacggngacaacgactgtgaggatgactcggatgagcaggactgtcccccccgggagtgtgaggaggacag

SEQ ID NO: 86487 - DNA, 3450 bp, Homo sapiens
  misc_feature (1)...(3450): n = a,t,c or g
gcatgccggcaaccgcgtctgcaggggtgccggcgaccgtgtcagaaaagcaagagttttaccagcttctgaagaacctgatcaatccaagctgtatggtgcggaggcaagcagaggaaatctatgaaaatatcccaggtctgtgtaagactaccttcctcttagatgccgtcagaaatagaagagcaggttatgaggtgagacaaatggctgccgcactgctacgacggcttttgtcctctgggtttgaggaggtttatccaaatctgcctgctgatgttcagagagatgtcaagattgaactgattctggctgttaagttagaaacacatgctagcatgaggaaaaaactttgtgatatttttgcagtgctggcgcaggaatttgatagatgaggatggcactaaccactggccggaaggtctgaagtttcttattgattcaatctactccaaaaatgtggttctatgggaagttgcacttcacgttttctggcactttcctgggatttttgggacccaagagcggcatgatttggatatcatcaaacggttgttggaccagtgtattcaagatcaagaacatccagcaatcaggacattatccgctagagctgcagctgcatttgtacttgctaatgagaataatattgctcttttcaaagactttgcagacttgcttcctggaatcttacaggctgtgaatgactcatgctaccaggatgatgattcagtgctagaatcccttgttgagattgcagataccgtacctaagtacttgggtccttatttagaagatactctacagttgagtttgaagttatgtggagactctaggcttagtaatctgcagcgccagctggccctcgaagttatagtgaccttgtctgaaactgccactccgatgttgaaaaaacatacaaatattattgcacaggcagttcctcatatattagcaatgatggttgatctacaagatgatgaggactgggtaaatgctgatgaaatggaagaagatgattttgacagcaatgcagttgctgcggagagtgcactagacagactggcttgtgggcttggtggaaaagttgttttaccaatgaccaaggagcatatcatgcagatgcttcagagccctgactggaagtatcgacatgctggattaatggccttatctgccattggagaaggatgccatcaacaaatggaatcaattctagatgaaacagttaactccgttttgctttttcttcaggatcctcatccaagggtgagggctgcagcctgtactacacttggacagatggctacagattttgcacctaatttccaaaagaaatttcatgaaacagtgattgcagctctgttacgtaccatggaaaatcaaggtaatcagcgtgtgcaatcacatgcagcttctgctcttattatttttattgaagactgccctaaatcattgctagttctatatgtggatagtatggtgaaaaatctacattccgtcttggtgattaaacttcaagagttgattcggaatggaactaagttggctttggaacaacttgtgacaaccattgcatcagttgcagatacaatagaagaaaaatttgtcccatattatgatatattcatgccctcactaaagcacattgttgagcttgctgttcagaaggaactcaagcttctgagaggaaaaactatcgagtgcattagccatattggtcttgctgttgggaaggaaaaatttatgcaagatgcatcaaatgtgatgcagctgttgttgaagacacaatcagacttaaataatatggaagatgatgaccctcagacctcttacatggtttcagcatgggctagaatgtgtaaaattcttggaaaagattttcaacagtaccttccactggttatcgagcctcttattaagactgcttcagctaaacctgatgttgctctcttagacacacaggatgtggaaaatatgagtgacgatgatggctggcaatttgtaaatcttggagaccagcagagttttggaattaaaacttcaggacttgaagcaaaagcaactgcttgccaaatgttggtttactatgctaaggagttaagggaagggtttgtggaatatacagaacaagttgtgaagctgatggttcctttactgaaattttatttccatgacaatgttcgagtggcagcagcagagtccatgccttttctcctggaatgtgcaagaattcgtggcccagagtatcttgcacagatgtggcaattcatatgtgaccccttaatcaaggctattggtactgaaccagatacagatgtgctctcagaaataatgaattcttttgcaaagtccattgaagttatgggagatggttgccttaatgatgaacacttggaagaactgggaggaatactgaaagcaaaacttgaagggcactttaaaaaccaagaattgagacaggtgaaaagacaggaagaaaactatgatcaacaggttgagatgtctctgcaagatgaggatgaatgtgatgtttatattctgaccaaagtatcagatattttgcactcattatttagtacttataaggaaaagattttaccatggtttgaacaactacttccattaattgtaaatctaatttgttcaagtaggccatggccagacagacagtggggattgtgcatatttgatgacatcatagagcactgcagtccaacttcatttaaatatgtagaatattttcggtggccaatgctactaaatatgcgagataacaaccctgaagtcaggcaagctgctgcttatggcctgggtgtcatggcacagtttggtggagatgattatcgttctttatgttcagaagctgttccactgctggtaaaagttattaagtgtgcaaattccaaaaccaaaaaaaatgtcattgctacagagaactgtatctcagcaatagggaagattttgaagtttaagcctaactgtgtaaatgtagatgaagttcttccacactggttatcatggcttccactgcatgaagataaagaggaagctattcagactttgagttttctctgtgacctaattgaaagtaaccacccagttgtaattggtccaaataattccaatcttcccaaaataatcagtataattgcagaaggaaaaattaatgagactattaactatgaggatccttgtgccaaacgcctagctaatgtcgtgcgtcaggtacagacttctgaagatttatgggttgggaatgtgtatccacaacttggatggatggaacagcagggaagcctttacagggagttggctaaattttgcttgaagcactttaatataacttggaatattatctattataaaagtaactacaaataagtgttgtgaatagattttattatanatcagagnactgttttctccctgctaagcagtttaatagtt

SEQ ID NO: 86488 - DNA, 445 bp, Homo sapiens
atcctgcgtcgacgatttcgtgcggctgccagcacccctgagccgccgccggacccttcgtcgccccgggccgccccccgccccctgcggtccccggtgtgtccgtctcgggacggttcgattccctccagagccggggaagggacggggggggcccagaggagggggcctcgggcgccccgcctgcgcctgctgcccccgccccggcggtgatgcgctcctggccgtgacccccgctgggggcgggggccggggtccatgctcggagtccccacccggcccggcgcctgacgctgacggcggtggaggtgggggggcgcctccctgtactcctgcgctccccagggcggcaacaccgtaggctcgtaaggtgcttttcatcccggctggcccctcaccctctgtgtagacttggagggattctataacatacggggcctgcttc

SEQ ID NO: 86489 - DNA, 397 bp, Homo sapiens
ttcgccattcgtgcgactgcaggtgccgctttagtttgtaggacgttgtgaaggcccaaccacaggcctccagtgggcacttgaagggccgccggccctgaccgccgccgtgcgtgagcaggtgcaccttgagctggtgcttcttggcgaaggccagcgcgcactgcggctcggggcagcggtagccgggcgtgctggggccggaggcctggggcgcgcggcggtgagcggtggcgcccgcggttgcggggccgggcggcgcatacagcgtgaggacgccgtggtcgatacgcaccaataggtcctggctgtttatgtagacggcgcccgccgggtctacgccagggccgagtgcggcgtgacggccgctgtggtcctggcctgggcggtttgtcat

SEQ ID NO: 86490 - DNA, 409 bp, Homo sapiens
ttcgccattcgcgctctcttttctctttctcaatttttgcaaactttgtctcatagtctttccaggctttgtcaaatggcttcttgagatctcctttgactccctttaggtctccttttaacaaagaatccaacgtgaagatcacattgcggctcaaaccctggagcagatttttcagcagcgcggacagttactttgtaagagtagaaaacttgacaaacgcggtgccaaggtcggcgttgtctcgacttaaaaaattactcccaaacttatcaagaactcgcgcatagatctcttcattctgcacatgatcttgaccaggaatatatattgcttttacagacttcttcactttctgaaggcgtggtctatctcgccctagaacccttcttccccaaccgtgacgggg

SEQ ID NO: 86491 - DNA, 441 bp, Homo sapiens
acatcggctgccgtaaatcccgggacgacgacttcgtcggtggcctcggaggggagactgagcggtggcgttttgtcatcggcagggaggcaggcccagccgggggctggagccggggactggagccgggtcctcacacgggaccaggagtgtgtcgccaggccctcccactgaggcccagcaccgggagcccctgggacaccccaccctcctccgcctttcttttccacctgctcctctccatcctcctctccctcctccctatctctccacctcatttgcccccttcttggcctctccgggtctcccagctctccatcctccccagctctccactcccgggctctccccggccccagcatgcttttaccgagggggctgacggcttgaggactccgggcccttgcctcaatcagggcatgggccaggcttcacggggag

SEQ ID NO: 86492 - DNA, 1476 bp, Homo sapiens
acccacgcgtccgaaaagagcagagctaccatgtcctcttggagcagacagcgaccaaaaagcccagggggcattcaaccccatgtttctagaactctgttcctgctgctgctgttggcagcctcagcctggggggtcaccctgagccccaaagactgccaggtgttccgctcagaccatggcagctccatctcctgtcaaccacctgccgaaatccccggctacctgccagccgacaccgtgcacctggccgtggaattcttcaacctgacccacctgccagccaacctcctccagggcgcctctaagctccaagaattgcacctctccagcaatgggctggaaagcctctcgcccgaattcctgcggccagtgccgcagctgagggtgctggatctaacccgaaacgccctgaccgggctgcccccgggcctcttccaggcctcagccaccctggacaccctggtattgaaagaaaaccagctggaggtcctggaggtctcgtggctacacggactgaaagctctggggcatctggacctgtctgggaaccgcctccggaaactgccccccgggctgctggccaacttcaccctcctgcgcacccttgaccttggggagaaccagttggagaccttgccacctgacctcctgaggggtccgctgcaattagaacggctacatctagaaggcaacaaattgcaagtactgggaaaagatctcctcttgccgcagccggacctgcgctacctcttcctgaacggcaacaagctggccagggtggcagccggtgccttccagggcctgcggcagctggacatgctggacctctccaataactcactggccagcggtgcccgaggggctctgggcatccctagggcagccaaactgggacatgcgggatggcttcgacatctccggcaacccctggatctgtgaccagaacctgagcgacctctatcgttggcttcaggcccaaaaagacaagatgttttcccagaatgacacgcgctgtgctgggcctgaagccgtgaagggccagacgctcctggcagtggccaagtcccagtgagaccaggggcttgggttgagggtggggggtctggtagaacactgcaacccgcttaacaaataatcctgcctttggccgggtgcgggggctcacgcctgtaatcccagcactttgggaggcccaggtgggcggatcacgaggtcaggagatcgagaccatcttggctaacatggtgaaaccctgtctctactaaaaatataaaaaattagccaggcgtggtggtgggcacctgtagtcccagcaactcgggaggctgaggcaggagaatggcgtgaacttgggaggcggagcttgcggtgagccaagatcgtgccactgcactctagcctgggcgacagagcaagactgtctcaaaaaaattaaaattaaaattaaaaacaaataatcctgccttttacagg

SEQ ID NO: 86493 - DNA, 395 bp, Homo sapiens
  misc_feature (1)...(395): n = a,t,c or g
cccacgcgtccgaacggaccgcctgaggcagagccacggcctccccagtcccctgcctcaacggccagtttcatcttctccaagggctctaggaagctgcagctggagcggcccgtgtcccctgagacccaggctgacctccagcggaatctggtggcagaactccggagcatctcagagcagcggccaccccaggccccaaagaagtcacctaaggctcccccacctgtggcccgcaagccgtctgtgggagtccccccacccgcctcccccagttaccctcgagctgagccccttactgctcctcccaccaatgggctccctcacacccaggacaggactaagagggagctggcggagaatggaggtgtcctgcagctggtgggcccagaggn

SEQ ID NO: 86494 - DNA, 361 bp, Homo sapiens
ctgtccgagggccactttgccgccgggggccttctgcgcccgggtaaggggctcgcactgccgtccgggtagctgctgtcagggctccctgactggcttgggactgagagacagaggttgtggggcaggaggagggttggatgggggcacgaggggcaatgggagagtgagtggggctgaaagaggcaggaggaacgggacaggaggagcggcggttggggcacgcacagagtgcaagacgctgagcaatgcaggtactgaagaattcaactgggggccgagcatggctgggggcccaagagacaggatgagggaggagggccgaagggggcccagactggagaagaggccggcttgttcc

SEQ ID NO: 86495 - DNA, 382 bp, Homo sapiens
atagactcaaaggtggtccacgtgagtgaactggagatggtggacatgtcttggtttaatgtggaggaagggattcaaagacttaagggactggcagttacagtgcaattgtcatttgaggcctactcacccaccctgggagggtctagaaggcatacatttcatcaagaatgtgagaaataaatatatgaggggtgccctggcatccttgaagagctctgtgattgctcttgtctataggccagaccttgtggtgtgcacttcagtcagtgaactgggaagcataaaggcagtgggtgtagctggatcccagggtggcaggcgccaagggggtggcaaagctgtcacacaacccagattattgacattgatgcagagtggg

SEQ ID NO: 86496 - DNA, 409 bp, Homo sapiens
  misc_feature (1)...(409): n = a,t,c or g
tgagggatggatctgctttagccgatcccagaaggaacacttgatcctgcctgtacccgatctataccctttggacttactcccagttgcatcttaattcacgccttgacaccctagaattaagtcttgggagtacttgtgcacgccgcacgggcagaatgatgcgggagaccatccaaaaggcaaaatgtggaactgaaggcagaagggggtcccgttattggaaattgtgatgccaaggatttccccatcaaatataaagagaggcatcctctggagtacctgcgacaatatcctcactttaggtgtatgactaacgaactgggttctatattgaggattcacagtgaagcgacagctgctattcattctttctttaaggacagaggctntgtacatattcatactc

SEQ ID NO: 86497 - DNA, 4904 bp, Homo sapiens
gacattaatcgtgccgatacccaggttaggcgcgctgtcaataactatgacatcatagtcatgagcaacagtttcaatggccagtcggagcatcaggtgtggatcggtgggcagtttaccttcatcaaatttgcccattaactcagtttcaatacggtgcagagccagacaggaaggaataatgtcaagccccggccagcaagtgggctttattgcataagtgacatcgtccttttccccaagatagaaaggcaggagagtgtcttctgcatgaatatgaagatctggtacccatccgtgatacattgaggctgttccctgggggtcgttaccttccacgagcaaaacacgtagccccttcagagccagatcctgagcaagatgaacagaaactgaggttttgtaaacgccacctttatgggcagcaaccccgatcaccggtggaaatacgtcttcagcacgtcgcaatcgcgtaccaaacacatcacgcatatgattaatttgttcaattgtataaccaacacgttgctcaacccgtcctcgaatttccatatccgggtgcggtagtcgccctgctttctcggcatctctgatagcctgatgctccgactggccattgaaactgttgctcatgactatgatgtcatagttattgacagcgcgcctaacctgggtatcggcacgattaatgtcgtatgtgctgctgatgtgctgattgttcccacgcctgctgagttgtttgactacacctccgcactgcagtttttcgatatgcttcgtgatctgctcaagaacgttgatcttaaagggttcgagcctgatgtacgtattttgcttaccaaatacagcaatagtaatggctctcagtccccgtggatggaggagcaaattcgggatgcctggggaagcatggttctaaaaaatgttgtacgtgaaacggatgaagttggtaaaggtcagatccggatgagaactgtttttgaacaggccattgatcaacgctcttcaactgatacttcgttatcgacaccagctgccccgatggtggattcgttaattgcgcgcgtaggagtaatggctcgcggtaatgccattactttgcctgtatgtggtcgggatgtgaagtttactcttgaagtgctccggggtgatagtgttgagaagacctctcgggtatggtcaggtaatgaacgtgaccaggagctgcttactgaggacgcactggatgatctcatcccttcttttctactgactggtcaacagacaccggcgttcggtcgaagagtttccttgtaccctctggcaggaggagcgactcaagccttcgcgaaagaaaataaccaaaaagcatacaaagaaacgtacggcgtctctcatattacacgccatgatatgctgcagatccctaaacagcagcaaaacgaaaaataccaagtgcctcaattcgatcaatcaacgattaaaaatattgagtctgcaaaaggacttgatgtgtggggacagctggccgctgcaaaacgctgacggaacagtagctgaatacaacggctatcacgttgtgtttgctcttgcgggaagcccgaaagacgctgatgacacatcaatctacatgttttatcaaaaggtcggcgacaactcaatcgacagctggaaaaacgcgggccgtgtctttaaagacagcgataagttcgacgccaacgatccgatcctgaaagatcagacgcaagaatggtccggttctgcaacctttacatctgacggaaaaatccgtttattctacactgactattccggtaaacattacggcaaacaaagcctgacaacagcgcaggtaaatgtgtcaaaatctgatgacacactcaaaatcaacggagtggaagatcacaaaacgatttttgacggagacggaaaaacatatcagaacgttcagcagtttatcgatgaaggcaattatacatccggcgacaaccatacgctgagagaccctcactacgttgaagacaaaggccataaataccttgtattcgaagccaacacgggaacagaaaacggataccaaggcgaagaatctttatttaacaaagcgtactacggcggcggcacgaacttcttccgtaaagaaagccagaagcttcagcagagcgctaaaaaacgcgatgctgagttagcgaacggcgccctcggtatcatagagttaaataatgattacacattgaaaaaagtaatgaagccgctgatcacttcaaacacggtaactgatgaaatcgagcgcgcgaatgttttcaaaatgaacggcaaatggtacttgttcactgattcacgcggttcaaaaatgacgatcgatggtattaactcaaacgatatttacatgcttggttatgtatcaaactctttaaccggcccttacaagccgctgaacaaaacagggcttgtgctgcaaatgggtcttgatccaaacgatgtgacattcacttactctcacttcgcaaggccgcaagccaaaagcaacaatgctatcagagatgccgagaaagcaggggggactaccgcacccggaatatggaaaattcgggcccgggcttgagcaacgtgttggttatacaattgaccaaaattaatcatatcgcgtgatgtgtttggtactcttattgcgacgtgctgaagacgtatgtccaccggtgatcggggttgctgcccataaaggtggcgtttacaaaacctcagtttctggttcatcttgctcaggatctggtttgaagggggattacgtgttttggttcgtgaaagggtaaccacccccaagggaacaggcctcaatgtgatcacggaattggtacaagatcttcataatcagtgcagaacacagctctcctgcctttctatcttaggggaaaaggacgatgttcctttatgcaataaaacccacttgctgggccggggcttggcattttttccttccctgtcgggctttgcaccgtattgaaactgagttaaatgggcaaatttgatgaaggtaaccgtgcccaccgatccacacctgatgctccgactggccattgaaactggggctcatgctcatgactatgatgtcatagttattggacagcgcccataaccgggggtatcgggccgattaaatgtcgaatgtgctgctgatgtgcctgacccgttcccacgcctgttgagctatgtttgattacgcctccgcactggcagttttttcactattcttcgtgatctgctcaagaacgcgtgatcttaaagggttcgagccctgatgtacgtattttgcttacccgacatcggcaataataatggctctcagtcccccggggatggaggagcaaaatccgggatgcctgggggaagcatggttctaaaaaatgttgtacgtgaaaacggatgaagttgggtaaaggtcaaaatccggatgagaacctgtttttgaccaggccattgatcaacgctcttcaactggtgcctggagagatacttcgttatcgacaccaagctgccccgaatggtggattcgttaatggcgcgcgtaagaagtaatggctcgcggtaatgccattactttgcctgtatgtggtcgggatgtgaagtttactctttgaagtgctccggggtgatagtgttgagaaaaacctctcgggtatgggtcaggtaatgaacgtgacccaggagctgcttactgaggacgcactggatgatctcatcccttctttttctactgactggtcaaaaaaacaccggcgtttcggtccaaaaagatcctggtgtcataaaaaattgcccatgggaagtgccccgccgtaaaactggttgcacttaccgcaccactcgattatcgtgtttctgcgctggccgagctggatgatgagccagatggcttgcattatccaagatggggttaacgattatttgcccaacaaagtgcttatgaacgtggtcagcgttattgcaagccgactgcgcaatgttatttgctgggaaatatttcttgcgctggctgatgcggaaaatatttcacgtaagattattacccggctgtatcaacaccggcacaattggctaaatcagttgttggtcttttttctccaccccggtgaactatctgcccggtcaggtgatgcacttcaaaaagcctttacagataaaggaggatttacttaagcagcaggcatctaaccttcatggagcagaaaaaagctggggttgttattttgaagcctgaagaaagttataactctttttaccttctgtggtttaaaaacgtcattttgcgtcaaagaactagtttaagctcacgacatcagtttgctcctggagcgacagtattgtataagggcgataaaatggtgcttaacctggacaggccaaaagtagataaaaccacaaagatggggaaaaaacagagaagaaaaactggaaactctaaaaagcagagcgcctctcctcctccaaatgaatgcagctcctcaccagcaacggaacaaagctggatggagaatgactttgacgagctgagagaagaaggcttcagacgatcaaattactccgagctatgggaggacattcaaaacaaaggcaaacaagttgaaaactttggaaaaaatttagaagaatgtataactagaataaccaatacagagaagtgcttaaaggagctgttggagctgaaaaccaaggctcgagaactacatgaagaatgcagaagcctcaggagccgatgtgatcaactgatagaaagggtatcagtgatggaagacccactgaatgaaatgaagcaagacgggaagtttagagaaaaaagaataaaaagaaatgagcaaagcctccaagaaatatgggactatgtgaaaagaccaaatctacgtctgattggtgtacctgaaagctga

SEQ ID NO: 86498 - DNA, 2762 bp, Homo sapiens
gacgcgccggagccggttttccagataacagaaagtaacgtgaaggaattcaggtgactcagacatggaggagagaagacctcatctggatgccaggcccaggaattcccataccaaccacagaggccctgtggatggagagttaccaccaagagctagaaatcaggccaataacccaccagccaatgctctccgaggaggagccagccaccctggaaggcatcctagggccaacaaccatcctgctgcttactggcagagggaagagagatttagggccatgggcaggaacccacatcaaggaaggaggaaccaggaggggcatgccagcgacgaagctagagaccaaagacatgaccaggagaatgacaccaggtggagaaatggcaaccaggactgtaggaaccgcagaccaccatggtccaatgacaacttccagcagtggcggactccccaccataagcctacagaacagccacagcaggcgaagaaactgggctacaagttcttagaaagtcttctgcagaaagacccttctgaggtggtcatcacacttgccacaagtttagggctgaaagagctcctttctcattcttccatgaaatctaacttccttgagctcatctgtcaggttcttcggaaggcttgtagctccaaaatggatcgccagagtgttctccatgtactgggcatattgaaaaactccaaatttctcaaagtctgcctgcctgcttatgtggtagggatgatcactgaacccatccctgacatccgaaaccagtatccagagcacataagcaacatcatctccctcctccaggaccttgtaagtgtcttccctgccagctctgtgcaggaaacttccatgctggtttccctcctgccaacctctcttaatgctctgagagcctctggtgttgacatagaagaggaaacggagaagaacctggaaaaggtacagactatcattgaacatctgcaggaaaagaggcgagagggcactttgagagtggatacctacactctagtgcagcctgaggcagaagaccatgttgagagctaccgaaccatgcccatttaccctacctacaatgaagtgcacttggatgagaggcccttccttcgccccaatatcatttctggaaaatacgacagcactgctatctatctggatacccacttccggctcctgcgagaagatttcgtcagacctttacgggaaggtattttggaacttctccaaagctttgaagaccagggcctgaggaagagaaagtttgatgacatccgaatctactttgacaccaggattatcacccccatgtgttcatcatcaggcatagtctacaaggtgcagtttgacacaaaaccactgaagtttgttcgctggcagaattccaaacgattgctctatgggtctttggtatgcatgtccaaggacaacttcgagacatttctttttgccaccgtatctaacagggagcaggaagatctctgccgaggaattgtccagctctgcttcaatgagcaaagccaacagctgctagcagaggtccagccctctgactctttcctcatggtagagacaactgcatactttgaggcctacaggcacgtcctggaaggactccaggaggtccaggaggaagatgttcccttccagaggaatatcgtggagtgtaactctcatgtgaaggagccaaggtacttgctaatggggggcagatatgactttacccccttaatagagaatccttcagccactggggaatttctaagaaatgtcgagggtttgagacatcccagaattaatgtcttagatcctggccagtggccctcaaaagaagccctgaagctggatgactcccagatggaagccttgcagtttgctctcacaagggaactggctattattcaaggacctcctggaacaggcaaaacctatgtgggtctaaaaattgttcaggccctcctaaccaacgagtctgtttggcaaattagcctccagaagttccccatcttggttgtgtgttatactaatcatgctttggaccagtttctggaaggcatctacaattgtcagaagaccagcattgtgcgggtgggtggaaggagcaacagtgaaatcctgaagcagttcaccctaagggagctgaggaacaagcgggaattccgccgcaacctccccatgcacctccgaagggcctacatgagtatcatgacacagatgaaggagtcagagcaagagcttcatgaaggagccaagaccctggagtgcaccatgcgtggtgtcctacgggaacagtacctgcagaagtacatctcacccccagcactgggaaagtctcatgaatggccccagtgcaggatagtgaatggattttcttcccagcactggaagcattccatgatgctggagtggctaggtcttggtgtcggttctttcacgcaaagtgtttctccagcaggacctgagaatacagcccaggcagaaggggatgaggaggaagaaggggaggaggagagttcgctgatagagatcgcagaggaagctgacctgattcaagcagaccgggtgattgaggaggaagaggtggtgaggccccagcggcggaagaaggaagagagtggagcagaccaggagttggctaaaatgcttctggccatgaggctagaccattgtggcactgggacagcagctggacaggagcaagccacaggagagtggcagacccagcgcaaccagaaaaagaaaaaaaaaa

SEQ ID NO: 86499 - DNA, 420 bp, Homo sapiens
aaacctcctggggagaaaggcacgcggtgggtgccggggccaggccctccccgcagcggccccaggggcgggcaggagtcccacctgttggcggcctcctggagccgcagccggcgctcctccatctttctctggagctgggtgcagagtcaaggggccgagcgtgggatctgagcgggccctcggttcccaaccccgtcccacacccggagaggccgggacgtcccagggacctcctctcggtgaggggctgtccccagggaggcctcctccagtggcgtcagctctctggaaatgtgacaagctgctgtctagaccccaggaagcccagtggtgtctggacaccagaggagtctctctcatcctcccggattgctctgaggccaggagctttgtgactctgccccctgaagcttctgg

SEQ ID NO: 86500 - DNA, 540 bp, Homo sapiens
  misc_feature (1)...(540): n = a,t,c or g
aactttctataaccttgtgcctatatacttgattaactcattattcatcaatccccccaagggaaagcggngnnncnttttgatacctattgaacgccccggaanacccgggncgacccacgcgnccgaatatctgcagctcgaccaaattcattaatagatgctgaaaaagcattccataaaattcaatattccttcatgataaaactcaacaagctaaatatggaaggaacataatacagtaaaggccatctgtgtcaaacccatagcatcatacttaatgagaaaaaattgagtttttcctccaaggcttggaacaagacaaggatgcccattttcaccacttttattcaacacatcacactagaagttctattcagagcaataagacaagagaaggaagtaaaaggcatctaaatgggaaaggaggaagtcagattgtccacgtttgcacatagcatgatcatctatgtagaaaatcctgacgactccacaaaaaaagtggtagaatcatttgctctttcactgcagctcctgcct

SEQ ID NO: 86501 - DNA, 458 bp, Homo sapiens
  misc_feature (1)...(458): n = a,t,c or g
ntttgatcngcgctgcggtaccggtcgagaacccctgggacgacccacgcgtccgcccacgcgtccggatatttacttgggaagattgtattgcagggcaagcaaaggtgttgtgtaatgattcatatggagtcactattgattggtcccctaaaggggcatttataaggctcacttctcaatctgtaggtaatggtcaccctgcatctaaagaaaatgatcagatggtagacactataaaaaatacaacaaaagttcctattatttggacatatggtgatatggtggaacctcgaccccaaatgatacgacctgctgtaggagctaaacataaggaattgtggaaaatattaatggcactgaaaaagataaaagatttgggaagggaaatatactaagccatcccaatataatcctaattacatgttagaattggctcacaatgattcagtctggat

SEQ ID NO: 86502 - DNA, 2843 bp, Homo sapiens
ttttttttttttcctttcacaaaatggatttttattgtggtcatacatggtttctcagtgccacagaaaattgctatgtagggacaaaaaatttttggatggctctgtaaagaaacatggtaggttttcagaaatgagttgtgcaggaatgtggttaatgaaaagcagaaagggttaagggaagagaaaggaagccaaggagtgtggtatgtacatcaaatgattactttttaagcccctctaggctctgataaccctttccccaagtcagatcccaacaaaattcatcagtaactgaagtgattgtgctaacagatacataaagactaccggagaaaagtgggttgagatgggctcagacttattgttaggacaactctgggagtcttgtgtctgtgccaaccacgtatccgtgggctacctggagatgagttctaacaaccagcccagaacccaaagctgctctccaacacctttgtttagtagggaaaacccgtagtggggacaagagaggaagctgtgcccttcccccaaccaccgtttcatcttctgctcgctgaccttgatgtgacttgagagctctccttgcttcggctgtgcagtccagaagccagaacttcctctaggaaacttttcgtgttgtgcactgtggtgcctcccaggacaatcctcactccaggagtggtgcggttcaggttataaactgttagagcctcttcataggtggctcctccaattacaaacacaatgatatcctgaggtctgtctctgagtgtgctggggcctaaataaggatataggttttccttaagccttcctttgatgagatgatccagggtttcatgtaggaaaggttgatgctgtgtatatacattttctactcccttcagtcctttgaggaattgtttggtgatagccacagcatctttggggctgaagaggtcacttcctctgactcgtttaccaccatattcaacaactgcagacacgagctttcgatacttctcagaaacacctttattcctgaggtccatcattagtcctggcaggctattgctgctgtgtcgctcataatgtaaagcataaagcatcaccaggcgggcagcatcaaactctgtcactttggggttctgcagaagcctttttatattctggagagcactagaatggtcattttgacaggccagttcttgctcaacctctgaaacctccagcagattccgttcactgaccaatcgagacagttctccaaccactgtcacatgctttgaaacagtcccagacattttcttgaactgtggataattctcaacaaacgccttcatgtctgctattgattctagtttttgctgttcttttggtttcttcttctgaaaatcttccatgagattctttatattgctaccaatctcagcaaagttcaggtacatattattagcatagaattcatcattttcagcagatgagacccacttctcttaagtctttactgattcccggcactctggaaagatcaatccgattgttgtttatgcctagtagttcgtggaccatggcctgatatgtccactggtttagcaatggggtgatggcatcatcacagcgatctaaaataaggagcaatggaggaacctctgtccgacggaatttcaaacagttcatattctttagttatcacttgcttaacgcactctgcaagtctctttgctgcctctgatgagagctgataacgaatcatgggacacttcttcagagataaaaggagagctgtaagcccttgagtggttcctagatagctgggctggatcccaatttcgaccctggcagcaaccccaaattattgagggaaaacaaatgtgggttcacagcaatgtaatcaccataaaattcctgaaacctcagccacaacttcctgttcatcagcttcagccaatgacttcacgtcactcttgctgatcacattactgaaataaatgaaatatatagtgtatttgggtcttcggagctcctgaataatataatccacattctcctttgtaggtcgaagaaaacaaattgccttcaggtgtttcatgatctctcgattttgagaatcaatgcgttcaaagaggtacacttccttctgtagaatctccgattgtgtgtataccatactcactatgccagtcgtctctttatccatgagaagtactttcataccaggcccgctgtcctctatcattttggaaatgtactgcttcacagcaaaaaccacgttcatggcggcgaattgacaagtaccctacagcccttcccgcccccttttctggctaaattaacccccagtctgttggccgggtctcagctgcttcctcccagccgggattcggcttccgggagtccgggcagccacggtgctgggagttgtagttccgctggagtgtacaggggaccaagcctaccccggggatggaaaaatccggctgagacggcctgggccgctgccacgcgcgggcgttattctccacccacctgcggcctgaagatgcctgaggcccggactctcagacccctattgccctttggtgctggaggcccagcggcagcctgaagcccaagagagtggagcctcgcgaaatgaggaacctggcacaaggtttgcttggaagcaggaacgacggagtgtggctacgtgccctatttgccattaacgctttcttgcatggcagtgagagatgagggcaagggaggtggcataatgctcccggccgcttgggactcggagagacggcatttaataaatcacacgcggtatttgcgaaacagtggtcgagattcgtcttcccgggttcattgcgtcatta

SEQ ID NO: 86503 - DNA, 426 bp, Homo sapiens
  misc_feature (1)...(426): n = a,t,c or g
ctgagcatgctgagcaccatcagcaccgagcaccgcctgtccgtcctgtggcccatctggtactgctgccactgccccacacacctgtcagcggtcatgtgtgtcctgctctgggccctgtccctgttgcagagcatcctggagtggatgttctgtagcttcctgtttagtgatgttgactctgataattggtgtcaaatattagatttcctcactgctgtgtggctgatttttttaatctgtggttctctgtgggttcaccctggtcctgcttgtcaggatcatatgtggatcccagaagatgccgctgaccaggctgtatgtgaccatcctgctcacagggctggtcttcctcttctgcagcctgcccctcagcattcagtgattcctattatactggatcgagaaggatttggatgacttacn

SEQ ID NO: 86504 - DNA, 489 bp, Homo sapiens
  misc_feature (1)...(489): n = a,t,c or g
aggggcgggggnctttttaccgaaacgtctcgatactcctngcaannncncnnnaaannnngggnggaccgacgcgtgcgggctcaacattgatctctgtcgcaggcatgttggacattccacagcagaggtggctacccaggggcgtgagggggagccccttcggtcaggcccacgcacagcctccatccctgccaccacggctgctgtgttcatgagccctgtgccatgtacaggtgaccagtggcagaggctggctgacatccactggctgtgtcatcatgtctccctggctgtctgctgactatgatacatgctctcagtgggagttaatatgggatgcagaaatctccacgctccagctactccctcaggtccatccttcttcccaaacgaccttgtacctaaccttccagtcttccttccccagggcccctgaccaccaggcttgtcactaacccctgcctgggatcccacagctggcctgag

SEQ ID NO: 86505 - DNA, 492 bp, Homo sapiens
  misc_feature (1)...(492): n = a,t,c or g
cggggcggggggttttatacggaaactcncgaatacccctccgaanncccggnncgacccacgcgtgcgaaaaccgaaacagaatattcaagaactgtggggaaactacacaaggtgtaagataggtataatatgaatactagaaaaagaagagagaaaggaacagaagaaatatttggaagaaatatttgaaaaataatgactgataatttccccaaattaatgtcagataccaaactacaggtatgggaagctcaaagaataccaagaaggataaatgccaaaatctacactaggcctatcatattcaaactgcagaaaaccaaagataaagaaaaaaaattctgaaagaagccagaggaaaaaatacttagcctatagaggaacatagatatggatatttgaggaaaaaaaagaaatgttagagataaaaacactgtaacatgtgaggagtgtttgatgggcttaatagtagactggatgaggctgagg

SEQ ID NO: 86506 - DNA, 1473 bp, Homo sapiens
  misc_feature (1)...(1473): n = a,t,c or g
ctcagttccagcaggcttggatgcaaaataaagttccaattcctgctccaaatgaggtgctgaatgacagaaaagaagacattaaattggaagagaagaaaaaaacacaagcagaaattgagcaagaaatggctacattacaatatactaacccacaacttctggagcaacttaaaattgaaagacttgcacagaaacaagttgagcaaattcagcctcctccctcatctggcacccctctcctcggaccccagccttttccaggacaaggtccaatgtctcagattcctcaaggttttcaacagccccatccatctcagcagatgccaatgaacatggctcaaatggggcctccaggtccacagggacagtttaggcctcctggaccccagggacaaatgggaccacaaggtcctccactgcatcagggaggtggggggccacaaggattcatgggaccacaggggccccagggcccgccccaggggttgccacggcctcaggacatgcatgggccccaaggaatgcagaggcatcctggacctcatggccctttgggacctcaagggccacctggaccacaaggtagttctggtcctcaaggtcatatgggtcctcagggtccacctggcccacagggtcacataggcccccaaggcccgcctggccctcagggtcacttgggcccacaggggcctccgggtactcaaggtatgcagggaccacctggtcccagaggaatgcaagggcctcctcatcctcatgggatccaaggcggaccagggtctcaagggatccaaggtcctgtgtctcagggacctctgatgggattgaatccaaaaggaatgcaggggcctccaggcccccgggagaaccagggtcctgctccccaagggatgattatgggccacccgcctcaagagatgagaggacctcaccctccaggtggactactgggacacggccctcaggaaatgagaggtcctcaggagatccgaggcatgcaggggcctccaccccaaggatcaatgctgggacctccccaggaattgcgagggcctccaggctcacaaagtcagcaggggccgccccagggctctttaggacctccaccccagggtggcatgcaaggaccccccggacctcagggacagcagaacccagcaagagggccacatccatctcaagggccaataccattccagcaacagaaaacgcctttgctaggtgatgggccccgggcccccttcaaccaggaaggacagagcacaggccccccacccctgataccaggcctagggcagcagggagcacaaggtcgcattccccctctgaaccccggacaaggacctggccccaacaaagtttcagaagaggagccccgccgaggcatgagggccgtgctccccccagaggaagggatggttttcctggtcctatgaagactttagtccnagaggagaatttttgatg

SEQ ID NO: 86507 - DNA, 2214 bp, Homo sapiens
tgggaacacaagttgacgctttttgtgttccttgagtccagtcgggaagggcccttgtgactgggtctcatgccaaacaacttgttacaataagagctagggtcccagaccatgcggaaacttcatgagaatcctctgtagtctggtgagtgtagtgtccgactctggagcccaggctgttgcttcccggtctggtggtgaatcctccatagtctggagatctcagccctgctgagctgatgatgctgactataggagatgttattaaacaactgattgaagcccacgagcaggggaaagacatcgatctaaataaggtgaaaaccaagacagctgccaaatatggcctttctgcccagccccgcctggtggatatcattgctgccgtccctcctcagtatcgcaaggtcttgatgcccaagttaaaggcgaaacccatcagaactgctagtgggattgctgtcgtggctgtgatgtgcaaaccccacagatgtccacacatcagttttacaggaaatatatgtgtatactgccctggtggacctgattctgattttgagtattccacccagtcttacactggctatgagccaacctccatgagagctatccgtgccagatatgaccctttcctacagacaagacaccgaatagaacagttaaaacaacttggtcatagtgtggataaagtggagtttattgtgatgggtggaacgtttatggcccttccagaagaatacagagattattttattcgaaatttacatgatgccttatcaggacatacttccaacaatatttacgaggcagtcaagtattctgagagaagcctcacaaagtgtattggaattactattgaaaccagaccagattactgcatgaagcgacatttaagtgacatgttgacctatggctgcacaaggctggagattggggtgcagagtgtttatgaagatgtggctagagacaccaacaggggccacactgtgaaggcagtgtgtgagtcatttcacctggccaaagattccggttttaaagtggtggcccatatgatgcctgacctgccaaacgtgggactagaaagagacattgaacagttcacagagttttttgagaaccctgcttttcgtcccgatgggctgaaactctatcctaccctggtgattcgtgggaccgggctttatgagctttggaaatcaggaagatataagagttactctcctagtgacctggttgaattggtggctcggatcctagccctcgtgcctccatggactcgagtgtaccgagtacagagggatattccaatgcctttagttagctcaggagtagagcatggtaacctgagagagctggcacttgcaagaatgaaagacctcggaatacagtgtcgagatgtgagaaccagagaagttggaatccaagaaattcatcacaaagtacggccataccaggttgaattggtaaggagagattatgttgcaaatggtggctgggaaacattcttgtcatacgaagacccagatcaagacattttgattggcctcctacgattacgcaagtgttcagaagaaactttccgtttcgaattgggtggaggtgtctccatagtacgagagctgcatgtgtatgggagtgtggtccctgtgagcagccgggatcctactaaatttcagcatcagggatttggcatgctgctgatggaggaagcagaaagaatagctagagaagaacatgggtctgggaaaatcgctgtgatatcaggggtcggcaccaggaattattatagaaagatcggctacagattacaaggcccgtacatggtgaagatgctgaaataatggccacaccagtccactcttctgcagtatcctccctggcagaacacggagaatcaggatttcttaaatactcaacagagaggctgagcagagcaaatggggggcttcaccctcatcccgcagctgcagagactggaaactgccttcaaggccacggctggtcatctgctgaccacaccccagatccgccctctcctgcgtgcaccccaaaaaatcacttgcgtttttgaggcttaaatcatctatccagtttctacattttgcatgaggcctgcaggtggcctattttgactcagacggtgaaaaaagcaaattaactcatttggacaccataactcatgcaataaaactgattgtcattcgaaaaaaaaaa

SEQ ID NO: 86508 - DNA, 499 bp, Homo sapiens
  misc_feature (1)...(499): n = a,t,c or g
cgaggccgggggggatttgaattgaactctgtattgaccggccctgagaaaccggcncgacccacgcgtccgcccacgcgtgcgcccacgcgtncgcttccaaatgtttggggattttctaaaaatatgtatctgttcctgatttctaagttagttgtttctgtggtcagataacatattttataagatttccattgtttgaaacatataaagatgttttgtggctcaaaatatggcttatcttgataaatgttccatgtacacttgaaaagaatatgtattctgctgtggttgggtatagtgttctgattagtgttaagcaaaggtatgtagctttgttaaaatcttctaaactttactgatttcttgtctaattgttctatgctattgaaaagaaggtgttaagtcttcaactttggagatttgtttacttctttttttgttagttttgctttgtgaattttgaagctcagttattaggggcataaatggataagac

SEQ ID NO: 86509 - DNA, 963 bp, Homo sapiens
  misc_feature (1)...(963): n = a,t,c or g
acccggctcgacccacgcgtgcgcacacgcagattggggcgcgccaggaccgctcctgcaccgatggtgcccgccgcgctatggaggccttccagagggccgctggggccttcagcctcctgagggagaacttctcccatgcgccgagcccagacatgagcgctgcgtccctctgcgcactggagcagctcatgatggcccaggcccaggaatgtgtgtttgagggcctctcaccacctgcctccatggccccccaagactgcctggcccagctgcgcctggcgcaggaggccgcccaggtgagctcgggcacccgtgtcaggatgcagggggtggggccgagctggggtcagagcccaggtccaggcatgcgtgagctctcccacctccttccttgtgtgtcagccccgagccagctgttgtcctgctccctgggggggctggtcaggaacctggggacccgagcctctgcctccaggggatggcacaaagcagcaggaactgaggtgccagggaggctgctgggatggtggtcggagcaggtggaggctgggtagggagaagcaggcaccacctggagagtgggaggccctcgcgtgcctgccacatccaccggcaggtggcagccgagtacaggctagtgcaccggaccatggcccagccacccgtccacgactacgtgcctgtctcctggactgccctggtgcatgtcaaggccgagtacttccgctccctggcccactaccacgtagccatggccctctgcgacggctcccgtgagtgcccaccgcacttgcccatggtactgccaaggcccccccgcgcagggctcacagcctctctgtcccccagcagcgaccgagggagagctccccacgcacgagcaggtcttcctgcagccccccacctcctctaagccccgaggccctgtgctgccgcangagctggaggagcgcangcagc

SEQ ID NO: 86510 - DNA, 773 bp, Homo sapiens
agccgtttaagcggtccgtccgcctcggccgccatattgcaaagctagcttccgccagtctctccagaccgccattgactttcgttgcgcgtgcgcgctgcggacactccgcctcccgttcttttcccgcggcgaagctggcccgccccgtgccccgctctttctgacgctacccaccctcactctagtggcgtaaaataagtctcagtcagggaccacgttttggacgcgctgttggaattgtaaagcttgccgaagctgcacgcctgcgcggttagacctcccacgcctttgttgacgcttccagtttggaagccagatttacacccctgcctttctccgctcctcctggctgggcgccatcttgtcttcttcctaggcacactttgtattgttcgaagttgagagagaaggagccggagtctccgaggtggcgttgggtgggggcgctactagctcccgttctctcagcgtctctagagggaagggcgccggtgggagcaggagagtctgcaccgggcaggcctccttaggtgccgggttgcgcgcagggccctgtgcttgtctcgcctccggttggctcaggcctcggagcatgagtgcgccggcaactgctgggcccgggacagtgaagcataggaggaggtgggggaggcgagcccaggtcggggaagggcagcacctgaatcacccttggggcccagacccccaagagtctccggggagccgaggcctggcgaggcagtcccgggattcgccccctccccgctggc

SEQ ID NO: 86511 - DNA, 465 bp, Homo sapiens
  misc_feature (1)...(465): n = a,t,c or g
nagcggggtnnnccttgactacgatagccatcggcnnacgccaagcttggcacgaggcgggcccgtctgcccgtagccggacagacgcaccatcacgaggccaggattgtcggcggacagcacgtcgtagccgagcccgagtttttcgagcagccccggacggaagttctcgatcacgatgtcggcctcgctcgcgagctgccgcgcgatcgccttgccggcatcggctttcaggttgagcgtgaccgatttcttgttgcgcgcctggacggaccaccacagcgacgtgccgccctgctccggatggagcttgcgccacttgcgcagcgggtcgccgccgttcggatcctcgatcttgatcacttccgcgccgaattcggcgaacagccgcgacgcgaacgaccccgcgatcagcgttccgaattcgagcactttgacgcccgcgagcgggccctgactggtgct

SEQ ID NO: 86512 - DNA, 454 bp, Homo sapiens
  misc_feature (1)...(454): n = a,t,c or g
ggagaagcggccnnnnnaactgtnactgggacatcgcgacctcattacgccagcttggcacgaggcctttttctagcagaatagccccatactttaagatttttgagttagtaagctccctttttgctttttgacttaggatagttctgaactggtgaggtgtgctcacaatgaggtttcctctaaaggttatttttctgctttcttctgttagcaaagcagttgctgctacagattgaatgcatttgggccatccacgggttcctgggttaaggatttttgatagaaaggctactggttgtcagtggcttcagtgctttcgggctaggcctttgtttacactgacaacaaaatggtattggagtgttatggggtcacagagaagaccttcaattatcaattataggttttaaatttaccctggcttttaaagaaatagggtacacttttttct

SEQ ID NO: 86513 - DNA, 1629 bp, Homo sapiens
gatttcagttgcctgaaagctgtaagtctgcttttttaaaagagaaattggagttaagcagacttttcattttttgatcatgaccctggaaagagaaatatatttgacatcaaaactcagcacatatccttggtctatatatacacatgaaagtttcataaaacaatacactgatattttccatgctgtattctatttcattttttaaaatgctggttgtatcccattaaactggtttcaaaataaatataacatgtacacaacaacaacaaaaaaaaacactgggttagagggccagtaagctcagcgagtatcagcaactgagacttcatccttgtctcacaaggactaaaaagagaataatgttctcattatgtggttcaatgccacacccatgtatctgagatatacatgtcacaatctgggagaagcctgtcctcaatttactttaaatacccaattctgcctagaacatgaattagacacatagtaagctcttgagtgaagtgcagatgataatgacacgatcacataccacttaaaaatatcttaacacctttacttagatctcatctcatacttgtagcatttcttcaaatttactttgaaaaaagagcttcactgtgtgtggttgtcatacacattcttctacccaaccatggacctcttttttcctctcaggcgcacttcatctaatttttttagcactggcctggcctttttggaggaggtggagtagctcttcagaaaggcttcaaacacagtttcagtgttgggatgggtactgaggaaggccttctccaggacatagaggtctactcccttatcctctggaagtgctgaaatgaaactcagcccaaagtctatgagcacaatgttcagctgttccagggggggtttcaggagcatgttggaggtggtgagatcaccatgaatgaggtcttcatcgtgcattcgagccaaaacctgcccaattgtcttggctaagttggagagaccctggggagtttttttcagtctccatagtggactgaatataatctcgaacagtcactgagccttcaatttcttccatatataagcagttggaagcatagtccacaaaaaagacaactggggcagatattccagcgcggcgacagcggaggagcgcccgggcctcctgcaccgtccgccgtctgccaagccgcgcctccagcgccgggtgccggtagcccttggggaagcggtgcttgatcaccgccgcgcggccctggaagcggccacggaacacgcgcgcctcggcaccctgcttcaccagctccaggccgctcaagaagcggctgctccgctcccgggctgcggccagagcctcagcctccggggcgggctcctcgccatcggccggcgtagtagctctggccgccgccatgactgctcggcgcaacagctccaaccgatcagctgtctctgaaaactgtcgcgatgcttcggctcgcttcggaaatcctgggacttcttcggcaatcctgggacttcttcggctacccgaatgcgtccaccccggacacttccggcctgtaagtggttacgcctcccaacttttcggctctctgaagcctgaggttccctgcaggaagggctcttgtg

SEQ ID NO: 86514 - DNA, 467 bp, Homo sapiens
  misc_feature (1)...(467): n = a,t,c or g
ccgccattgcatcgcctcgcgctgcaggaattcggcacgagctgaccagcaccatggcggctggcaagaacaagcgccttacgaaaggcggcaaaaagggagccaagaagaaagcggttgcaatataataaatattggaaagacgctcgtcaccaggacccaaagaaccaaaattgcatctgatggtctcaagggtcgcgtgtttgaagagagtcttgctgatttgcagaatgatgaccgatggttacttgcttcgtgtgatctgagttgcttttactactgaacgcaccaatcagataaagaagtgttcaataaattgattccagacagcattggaaaagacatagaaaaggcttgccaatctatttatcctctccatgatgacttcgctagaaaagtaaaaatgctgaagaagcccaagtttgaattgagaaagctcatggagcttcatggtgaaggcagtagtn

SEQ ID NO: 86515 - DNA, 489 bp, Homo sapiens
gcccggctttgaaggaccagctctccctgggaaatgctgcacttcagatcacagatgtgaaattgcaggatgcaggggtgtaccgctgcatgatcagctatggtggtgccgactacaagcgaattactgtgaaagtcaatgccccatacaacaaaatcaaccaaagaattttggttgtggatccagtcacctctgaacatgaactgacatgtcaggctgagggctaccccaaggccgaagtcatctggacaagcagtgaccatcaagtcctgagtggtaagaccaccaccaccaattccaagagagaggagaagcttttcaatgtgaccagcacactgagaatcaacacaacaactaatgagattttctactgcacttttaggagattagatcctgaggaaaaccatacagctgaattggtcatcccagaactacctctggcacatcctccaaatgaaaggactcacttggtaattctgggagccatct

SEQ ID NO: 86516 - DNA, 477 bp, Homo sapiens
  misc_feature (1)...(477): n = a,t,c or g
gcgggatttttatgacgcatggagaactctcacgagggattangtgatcggagcttgaaaagaaaaaaagccaaacaaataaacaaaacccacccaccctaacaaatatgaggctgctggagagaatgaggaaagactggttcatggtcggaatagtgctggcgatcgctggagctaaactggagccgtccataggggtgaatgggggaccactgaagccagaataactgtatcctacattgctgttgcaacaatattctttaacagtggactatcattgaaaacagaggagctgaccagtgctttggtgcatctaaaactgcatctttttattcagatctttactcttgcattcttcccagcaacaatatggctttttcttcagcttttatcaatcacacccatcaacgaatggcttttaaaaggtttgcagacagtangttgcatgcctccgcctgtgtcttctgcagtgatttt

SEQ ID NO: 86517 - DNA, 1339 bp, Homo sapiens
ttttgaccgcgctggaggaactctgcacgagatgaaatcctgctttcttttcctcagaactactatattcagtggctaaatggctccctgattcatggtttgtggaatcttgcttcccttttttccaacctttgtttatttgtattgatgccctttgcctttttctttctggaatcagaaggctttgctggcctgaaaaagggaatccgagcccgcattttagagactttgggcatgcttcttcttcttgcgttactcattcttgggatagtgtgggtagcttcagcactcattgacaacgatgccgcaagcatggaatctttatatgatctctgggagttctatctaccctatttatattcctgtatatcattgatgggatgtttgttacttctcttgtgtacaccagttggccttttctcgtatgttcacagtgatgggtcagttgctagtgaagccaacaattcttgaagacctggatgaacaaatttatatcattaccttagaggaagaagcactccagagaccgactaaatgggctgtcttcatccggtggaatacaacataatggagttggaacaagaacttgaaaatgtaaagactcttaagacaaaattagagaggcgaaaaaaggcttcagcatgggaaagaaatttggtgtatcccgctgttatggttctccttcttattgagacatccatctcggtcctcttggtggcttgtaatattctttgcctattggttgatgaaacagcaatgccaaaaggaacaagggggcctggaataggaaatgcctctctttctacgtttggttttgtgggagctgcgcttgaaatcattttgattttctatcttatggtgtcctctgttgtcggcttctatagccttcgattttttggaaactttactcccaagaaagatgacacaactatgacaaagatcattggaaattgtgtgtccatcttggttttgagctctgctctgcctgtgatgtcgagaacactgggaatcactagatttgatctacttggcgactttggaaggtttaattggctgggaaatttctatattgtattatcctacaatttgctttttgctattgtgacaacattgtgtctggtccgaaaattcacctctgcagttcgagaagaacttttcaaggccctagggcttcataaacttcacttaccaaatacttcaagggattcagaaacagccaagccttctgtaaatgggcatcagaaagcactgtgagacgcacagacggcgtcttctgccaccaagagacccgagaactccagattcacgacattcctgtcccatgtagaagcatttccat

SEQ ID NO: 86518 - DNA, 1475 bp, Homo sapiens
attcccgggtcgacgatttcgtggccgtccggcctccctgacatgcagatttccacccagaagacagagaaggagccagtggtcatggaatgggctggggtcaaagactgggtgcctgggagctgaggcagccaccgtttcagcctggccagccctctggaccccgaggttggaccctactgtgacacacctaccatgcggacactcttcaacctcctctggcttgccctggcctgcagccctgttcacactaccctgtcaaagtcagatgccaaaaaagccgcctcaaagacgctgctggagaagagtcagttttcagataagccggtgcaagaccggggtttggtggtgacggacctcaaagctgagagtgtggttcttgagcatcgcagctactgctcggcaaaggcccgggacagacactttgctggggatgtactgggctatgtcactccatggaacagccatggctacgatgtcaccaaggtctttgggagcaagttcacacagatctcacccgtctggctgcagctgaagagacgtggccgtgagatgtttgaggtcacgggcctccacgacgtggaccaagggtggatgcgagctgtcaggaagcatgccaagggcctgcacatagtgcctcggctcctgtttgaggactggacttacgatgatttccggaacgtcttagacagtgaggatgagatagaggagctgagcaagaccgtggtccaggtggcaaagaaccagcatttcgatggcttcgtggtggaggtctggaaccagctgctaagccagaagcgcgtgggcctcatccacatgctcacccacttggccgaggctctgcaccaggcccggctgctggccctcctggtcatcccgcctgccatcacccccgggaccgaccagctgggcatgttcacgcacaaggagtttgagcagctggcccccgtgctggatggtttcagcctcatgacctacgactactctacagcgcatcagcctggccctaatgcacccctgtcctgggttcgagcctgcgtccaggtcctggacccgaagtccaagtggcgaagcaaaatcctcctggggctcaacttctatggtatggactacgcgacctccaaggatgcccgtgagcctgttgtcggggccaggtacatccagacactgaaggaccacaggccccggatggtgtgggacagccaggtctcagagcacttcttcgagtacaagaagagccgcagtgggaggcacgtcgtcttctacccaaccctgaagtccctgcaggtgcggctggagctggcccgggagctgggcgttggggtctctatctgggagctgggccagggcctggactacttctacgacctgctctaggtgggcattgcggcctccgcggtggacgtgttcttttctaagccatggagtgagtgagcaggtgtgaaatacaggcctccactccgtttgctgtgaaa

SEQ ID NO: 86519 - DNA, 810 bp, Homo sapiens
gcaacatggtgaaacctgtctctataaaaatacaaaaaattagccaggcatggtggcacatgcctgtagtgccatctactcaggaggctggggtgggaggatcacttgagcctggggaggtggagattgcagtgaaccaagattgtgccactgcattccagcctgggtgacattaaaaaaaaaagagagatcatcagtgtaaaagatacacaattataaaatcaagtaagtaaaaactctaatattacatttaattgggaatatcagaattaactcttatttttaaagtgcaaaagttttaaattttcattaagtctgaccaatttttgttcttttattgcttgtacttttggtgttgaatctaataaatcattgattaacctcaggtcctaaaggtttacttttgttttcttctcaggattttctaattagaaaattaggtctgtcattttgagttaaattttgtgtatggtgtgaggtaggggtccaaattcatccttttgcacatggatattcatttgcttcagcaccacttgttgaacagactttttttcctattgaagtgtcttgtcactttttttcaaaaatcagtatttcatggatgtttgggtttatttctggactttctatttcattgatctacttgtcacttcttatgccagtacgacactgtctcaattactatagctttgtagtgagttttgaaatcaggaagtgtgagaccttcaactttgtttttttcccaaggttatttggctgcgtcttttgtatttccataagaattttaggatcagcttgtcaattgttgcc

SEQ ID NO: 86520 - DNA, 3560 bp, Homo sapiens
cctttttttttttttttaggaggaaatcttgtcatttatgaaaacatgggtgaacccggtgcacattatgctgagtgaaataagccaggcacagaaagacaaacactgcatgatctcacttacatgtggaacctataaaagctgcccttatacaagtaaagagtcaaatgctggttaccatgggctgggaggagagggactgggcagatgtgtcaaagaatacaaaatttcagttaggaggcataagttcagggatcttgtacagcatggtgactatagttaacaacaacgtattgtattcttgaaaaaaaggagtgatataggggtaccagagatgggcaggatgattgaagatcacagtccagccttgcaggaccccgggggacagggcgggcactcagaggtggacctccagcaggtagcgcaggcgacactggctctcctggtagatgaggtactcgctctgggagaatgtggagctgctgaactctgggcagggcacaggctggccctggggcaccaccacttgctggccatccagctccaactcagtgtcctgggtcggatcaggctcggtgtggcctcgggcaatgacactgtcgaagccaggaggtgggctcttcaagctggggttgtccgtgttgatatggtgctctctgcccagggccacctcacccaggaacatgtagccgacatggtgggccccacacttcatgccaataacatatccagctgacttgctgttctctgaggcaaagtagatgcccttgccaacacgcccaccagaatgtggcatgatgcggagcccactagtgaggatggcggccaccacggccatgttggtgccatgccacagcagcttccgattacccagtttggagtgggcctggaatctgtcttcctccccttcttggtttactttccagatgtgttgaagtgtagggcacctgtggttgctgccagtctgttctaagtaggtctgtatcaccttgtactcaggtgctccagagtctagcagctgcagctggcacttgagaagctggtagtctcggtccagggggtgtggcacctcctccaccgtcttctcctgctcagagactgcctgcagggcctgggccagctcgatgtccgccagcaccagcagcatgtccttcttggcctgcagaagctcaggggaattgatgggcgggggctggctgtggccgaagttgtgcgggatgacggtgtaaaagtgtgaggacagctcctccaggctttggccaccatccgtggggcctttcagggcctcctccagcgcctccaaggcctcgaaaccccgtgcaatctgttgcttgctcagctttcccaggggcatcttcttcacatccaggtccatgagggccatggtgttcttgaacatctccttgctgaagatgttagtgatgagcttctgcgtggctgggtccagggagcagggctgcacccgcttagtcacagtcctcactgggcctctgtccaccttcaccacagcttcctgggcctcatcctctgcctgtacttcgataagtgtgtacttgcccgggtgagacacaaagtggtcccgctctgcccagttgttcttggtcttttcccgaaatttcttctcaaagtccttctttgcatcttctagccttgtgaagtggttgatctttgactggccgacctctcccacacggccccagcggttccagcaggtgaagaagcggttgctgtcttggagcagctggatgatgtagaacttgttgttgttgttctcgatgttggtctggttcagggtgcagttgtagtcctcatacacctgggtcccggggttgctgctgagtggacatgttggatccacgcggattatgcgcttctctgcgggtatggccttgagggcctcagcggtggagcggaaggggtcctcctcccttcctgcctgccggcccttcttcttctcagggccctcagtctgtacccagggcttcggctttggagccatggctgtcgtgagttctgcggccgctgctacacgcctggtgggcagcatgtcggcaacagcggctgctcgtaagcggggaaagccggcctctggggccggggctggcgcgggggccggcaagcggcggcgaaaggccgactctgcgggggacaggggcaaatccaagggtggcggcaagatgaatgaggagatctccagcgactctgagagcgagagcctagctccaaggaagcctgaggaggaggaggaggaggagctggaggaaactgcacaggaaaagaagctgcgcttggccaagctctacctagagcagctccgtcagcaagaggaggagaaggctgaggcccgtgcatttgaggaggaccaggtggcggggcgcctgaaggaggatgtgcttgagcagaggggcaggctgcagaagttggtggcaaaagagatccaggccccagcctcagctgacattcgcgttttacgggggcaccagctctctatcacatgtttggtcgtcacccccgatgactcagccatcttctctgctgccaaagactgcagcatcattaagtggagcgtggagagtggacggaagctgcatgtgattcctcgagccaagaagggtgccgagggaaagccccctggccacagcagccacgtcctctgcatggccatctcctccgacggcaagtaccttgcctctggtgaccgcagcaagctcattctcatttgggaggcccagagctgccagcacttgtacaccttcacaggacaccgggatgcagtgtcgggtctggcattccgcagaggcacccaccagctctacagcacatcccacgatcgctccgtgaaggtgtggaatgtggcagagaactcctacgtggagacgctcttcggacaccaggacgctgtggctgcactggatgccttgagccgggagtgctgtgtgacggctgggggccgggatgggactgtacgtgtgtggaagatccccgaggagtcccagcttgtcttctatggccaccagggctccatcgactgcatccacctaatcaatgaggagcacatggtgtccggcgcggacgatggctctgtggccttgtggggtctctccaagaagcgaccacttgccctgcagcgtgaagctcacgggctgcggggagagccaggcctggagcagcccttctggatatcgtcggtggcagccctcctcaacacagaccttgtggccacaggctcccacagctcctgtgtgcggctttggcagtgtggggaaggcttccggcagcttgaccttctctgtgacatccccctggtgggttttatcaacagcctcaagttctccagctctggggacttcctggtggctggggtagggcaggagcacaggcttggccgatggtggagaatcaaagaggctcggaattctgtctgcatcatcccactccgcagggtccctgtacccccagctgctggttcctgacactcttatcctccttatttaagtccttcccaggctatgccccaccctctttgtattaaaagcctcctcttttgggcaaaaaaaaaa

SEQ ID NO: 86521 - DNA, 3092 bp, Homo sapiens
cggacgcgtggggtaagagaaaggggaaggggaggtgggagaggcacctcaactttgatgtcccgagccttgagtggccactcgcaagctggccaagggcttcacacaatttgccaagatgacagaggggaccaagaagaccagcaaaaagttcaagttcttcaagttcaagggctttgggagtttctccaacctccctcggtccttcactctgagacgatcctcagcttccatcagtaggcagtcccatttggagcctgacacctttgaagccacgcaggatgacatggtgacggtgcccaagagtcccccagcctatgcccgctccagtgacatgtacagccacatgggcaccatgcctcgccccagcatcaagaaagcacagaactcacaggctgcccggcaggcccaggaggcgggtcccaagcccaacttggtacccggaggtgtacccgaccccccaggcttggaggcagccaaagaggtgatggtgaaggccactggccctctagaggacaccccagcaatggaacccaacccttcagcagtggaggtagaccccatcagaaagcctgaggtccccacaggagacgtagaagaggagagacctcccagggacgtgcactcagaaagggctgctggagagccagaggctggcagcgactatgtgaagttctccaaggagaagtacatcctggactcatcgccagagaaactccacaaggaattggaggaggagctcaaactcagcagcacggatctccgcagccatgcctggtaccatggccgcatcccccgagaggtctcggagaccttggtacaacgcaacggcgacttcctcatccgggactcactcaccagcctgggcgactatgtgctcacgtgccgctggcgcaaccaggccttgcacttcaagatcaacaaggtggtggtgaaggcaggcgagagctacacacacatccagtacctgtttgagcaggagagctttgaccacgtgcccgccctcgtgcgctatcatgtgggcagccgcaaggctgtgtcagagcagagtggtgccatcatctactgcccggtgaaccgcaccttcccactgcgctacctcgaggccagctatggcctgggacaggggagtagcaagcctgctagccccgtcagcccctcaggccccaagggcagccacatgaagcggcgcagcgtcaccatgaccgatgggctcactgctgacaaggtcacccgcagcgatggctgccccaccagtacgtcgctgccccgccctcgggactccatccgcagctgtgccctcagcatggaccagatcccagacctgcactcacccatgtcgcccatctccgagagccctagctcccctgcctacagcactgtaacccgtgtccatgccgcccctgcagccccttctgccacagcattgcctgcctcccctgtcgcccgccgttccagtgagccccagctgtgtcccggaagtgccccaaagacccatggggagtcagacaagggcccccacaccagcccctcccacacccttggcaaggcctccccgtcaccatcactcagcagctacagtgacccggactctggccactactgccagctccagcctcccgtgcgtggcagccgagagtgggcagcgactgagacctccagccagcaggccaggagctatggggagaggctaaaggaactgtcagaaaatggggcccctgaaggggactggggcaagaccttcacagtccccatcgtggaagtcacttcttccttcaacccggccaccttccagtcactactgatccccagggataaccggccactggaggtgggccttctgcgcaaggtcaaggagctgctggcagaagtggatgcccggacgctggcccggcatgtcaccaaggtggactgcctggttgctaggatactgggcgttaccaaggagatgcagaccctaatgggagtccgctggggcatggaactgctcaccctcccccatggcccggaagctacgcctagacctgctggaaaggttccacaccatgtccatcatgctggccgtggacatcctgggctgcaccggctctgcggaggagcgggcagcgctgctgcacaagaccattcagctggcggccgagctgcgggggactatgggcaacatgttcagcttcgcggcggtcatgggtgccctggacatggcccagatttctcggctggagcagacatgggtgaccctgcggcagcgacacacagagggtgccatcctgtacgagaagaagctcaagccttttctcaagagcctcaacgagggcaaagaaggcccgccgctgagcaacaccacgtttcctcatgtgctgcccctcatcaccctgctggagtgtgactcggccccaccagagggccctgagccctggggcagcacggagcacggcgtggaggtggtgctggctcacctggaggccgcccgcacagtggcacaccacggaggcctgtaccacaccaatgctgaagtcaagctgcaggggttccaggcccggccggagctcctggaggtgttcagcacggagttccagatgcgccttctctggggcagtcagggtgccagcagcagccaggcccggcgctatgagaagttcgacaaggtcctcactgccctgtcccacaagctggaacctgctgtccgctccagcgagctgtgaccccagggacatttcccctctgcagctgcggacagcgtcaggggcagaggggcacacaactttccccagagcaccccaaggacactgtgatcaacccgagaatgttctgggttcaactcaagcatctcccttgcacctccagggtcctgcgtggactctgggttccatcccacctgctacatgctcaccaggtctccattgaggaagaacaggaacgccggttcccccaccagcttttgctgctccccttcctgctggggttccctgttttcgagccatgggaggcaggctgctcacgcctcctcactctctgtctgtccctcaccaacaccaaggcctccatctcactgtaaataagtctcttgttcttgtaaataagatgtacagaag

SEQ ID NO: 86522 - DNA, 497 bp, Homo sapiens
  misc_feature (1)...(497): n = a,t,c or g
cgcgtgaagntttaacctcgaaggatcgaccgaccgtacgaattaggcacgagacaattcggatactatacagaacatgcgcgaacgctaagacagtagggcatcctgtgtttactgactggaagacttaatcgccttaagatggtagccctccccaaattggtctgccagttcaacacaattcttatcgtaatctgaactgtgttatgttgcagaaaagggcaggctgatcctaaaatccatatggtattgcaagagtcccaaaatagcctaagcaatcttgaaaaataacaaagtctcacactgtttgactaatcttaaaatttgtaagcaagggtaataagacactgtagtgctagcctgactgtatcagtggaatagaattgagagtccaaaatcactcctcctattatctgcgcttgaacccttgcattttggttaaaggtgctgagacggatccgtgaacgaaagagctttctcagcatatggtgcaggga

SEQ ID NO: 86523 - DNA, 492 bp, Homo sapiens
  misc_feature (1)...(492): n = a,t,c or g
agcgggtnnnaattgacncccgtgcggcatgtcggcacgagcaggagtcccacctgttggcggcctcctggagccgcagccggcgctcctccatctttctctggagctgggtgcagagtcaaggggccgagcgtgggatctgagcgggccctcggttcccaaccccgtcccacacccggagaggccgggacgtcccagggacctcctctcggtgaggggctgtccccagcttctgattctgcagggaggcctcctccagtggcgtcagctctctggaaatgtgacaagctgctgtctagaccccaggaagcccagtggtgtctggacaccagaggagtctctctcatcctcccggattgctctgaggccagnnnnnnnnnnnnnnnnnnnnnnnnnnnnnnnnnnnnnnnnnnnnnnnnnnnnnnnnnnnnnnnnnnnnnnnnnnnnnnnnnnnnnnnnnnnnnnnnnnnnnnnnnnnnnnnnnnnnnnnna

SEQ ID NO: 86524 - DNA, 670 bp, Homo sapiens
attcgaacccgcctccgttttcctgagcctttgcctgctaagagggagaccaggtcatggcagccatgcctctgaaagctcaataccaggactttccctcaagtccctacctgtcccctctgccccacactctggcccggagccagaggattggctctggggcagcaggaacctgttgttttaggagatggtgaccttcgaggatgtggctgtgcacttcaccaagacagaatggactggcctttctcctgcccagagggccctgtacagaagtgtgatgttggagaattttgggaacctgactgctttggggtacccagttcccaaacctgcactgatctcacttttggagagaggggacatggcttggggcctggaagcacaggatgatcccccagcagagaggaccaaaaacgtctgtaaagatgttgagaccaacattgacagtgagtccacattaatccagggaatttctgaagaaagagatgggatgatgtcacatggtcagctgaagagtgtccctcagagaactgacttcccagaaacacgtaatgtggaaaagcaccaggacatccccacagtgaaaaatatccaaggaaaggttccaagaatcccctgtgcaaggaaacctttcatatgtgaggagtgtgggaaatccttcagctacttt

SEQ ID NO: 86525 - DNA, 1133 bp, Homo sapiens
aattggaccatagagatccctaggcagtgtggtggaattccaagagccgaagagccagtcctcactggggtgcagagggctctttgggggcagagcgggcactgcatggaccctgcaccctggagctgatgttcaggtcacaaagctggtgaagaactaccggtcccacgaggccctgctgatgctgccctcacggctgttctaccacagggaactcgaggtctgtgcggaccccacagtggtgacctccttgctgggctgggagaagttgcctaagaaaggcttccctctcatcttccatggtgtgcggggcagcgaggcacgggagggaaaaagcccatcgtggttcaacccggccgaggccgtccaggtcctgcgctactgctgcctcctggcccacagcatctccagtcaggtgtctgccagcgacattggcgtcatcacgccctaccggaagcaggtggagaaaatcagaattcttttgcgtaatgttgatctgatggatataaaggttggatcagtagaggagtttcaaggacaagagtatctggtcatcatcatttcgaccgtacggtcaaatgaagatagatttgaagatgatcgatatttttttgggtttcttgtccaactcaaaaagatttaatgttgcaatcaccagacccaaagctttgctgatagtgctgggaaacccccatgttctcgttcgagacccctgttttggtgctttgctggaatacagtattacaaaacggtgtttacatgggatgcgatttaccctcctgcactgcagtctctgcaaaaactgtggcgagggggtggcagacccctcctacccagtggtgccagaatccacaggaccagagaagcatcaggaagcccagctgatctgcagtggctgacagcagggaggccatgtgctcagcctggccacgttgccgttacagtctgctccgtggctcctgtggcctgcccttgtctcgcagccaggcaggggtcgtgtgtgggtgtggggctgccaggttggacgcagctgctgctgccctgactttggcatatgccagcctgttcctgccacagggcagtcactgccgcctaccctgaaataaaccctcgagtgacccccaaaaaaaaaa

SEQ ID NO: 86526 - DNA, 1468 bp, Homo sapiens
atcgaccgcgctgccgaatgtcgtactaagcccctgcctatggcagtatccatccgcgggaatgcggactctattgtcgcctgcctggtcctgatggtcctctacttgataaagaaaagactcgtcgcgtgtgcagctgtattctatggtttcgcggtgcatatgaagatatatccagagacttacatccttcccataaccctccacctgcttccagatcgcgacaatgacaaaagcctccgtcaattccggtacactttccaggcttgtttgtaagagctcctgaaaaggctgtgtaatcggactgcgctgatgtttgtagcagttgctggactcacgttttttgccctgagctttggtttttactatgagtacggctgggaatttttggaacacacctacttttatcacctgactaggcgggatatccgtcacaacttttctccgtacttctacatgctgtatttgactgcagagagcaagtggagtttttccctgggaattgctgcattcctgccacagctcatcttgctttcagctgtgtctttcgcctattacagagacctcgttttttgttgttttcttcatacgtccatttttgtgacttttaacaaagtctgcacctcccagtactttctttggtacctctgcttactgcctcttgtgatgccactagtcagaatgccttggaaaagagctgtagttctcctaatgttatggtttatagggcaggccatgtggctggctcctgcctatgttctagagtttcaaggaaagaacacctttctgtttatttggttagctggtttgttctttcttcttatcaattgttccatcctgattcaaattatttcccattacaaagaagaacccctgacagagagaatcaaatatgactagtgtatgttccacaccctctgctactgtgttacattctgattgtcttgtatggaccagaagagagctttgggacattttttctgaacattctaagcattctagtgaaagttcccatgttccaacagaacttaaaagcaatgtttgccttatatataaaagggacacaataattgaggtccaccttctaggaaatcctaggactcgtttatttgggacatggtgggaataaaggtcacatattggaaaatggaaaggctgatgaaactatcagatactaaaacattcttaaaatagaggaatatagttagagacatcaggtttaagccagtatttgttcctgttttacaatgcttctgtcttaagctgtgtcttaacttttaacacccatcttttctttctaaagctttcctgacagctgtgaaaatccaaaaaatattcttaaactgtgtatggtggcccttgcctgtagtctcagcactttgggaggctgaggtgggagggtcgcttgagttcaggagttctagacccacctggggcaagatggtgagacctagtctcaaaaaaaaaa

SEQ ID NO: 86527 - DNA, 885 bp, Homo sapiens
gaaatacagaagcacagtcagcaaaagcaaagacccctcggggctgctcatctctgtgatcaggtgagggaggcaggaggcagggtctggggactgggggcagcggctcgacctccgctttggaagggagaagggttagctgggtcccaccctgctctcccttccctttcctccttgcctcccgcagcccctccccagggctctaacccctccccagggccccagcaattccccctccaccttttttttctggggttagctatagagagaggagccccgcctcagtcttttctttaggggcagcaccttctattacagtctcgggaccccaaagcacgctatttgggtttggtagagaaaaccaggtgtaaaggtgtgtttattgattcctaaaatgcttgtttattgtttgcctgtagcagcactcactgagaaaggcgtcttgtttcctggactttggggtgtaaggccttggagtccggagattcctgtcacgagttgcagatttgtgttttcacactctggatactttcaaccacctgtgcgtgggccacagccacaaatacaagaatctgcagtgagctggtaggaggactgggtttgaaggcacacatcggttttcaattttttgccctgccttccgcattctgggtccattccttaaaaaacagaaccaaaccaatttcaaattatcctccatgcactgcccctctgcacctcccagaagattagggtgggggtggagtgggagcggtggatcttttaggagcttttttttaaaaaagcgaaatatattgaggatgggggaaccctttcaagaatcttggatatgatgcaggtactgactaaaaccaatctaaataaaatttattatggcacgtttaa

SEQ ID NO: 86528 - DNA, 970 bp, Homo sapiens
tttgcaccgtcctgcagaattcggcacgagcctgactctggaatcttcaacctcaagtgattcgaggttggggagagctagggatgaggaagggcttttggaaatgcagaaaggtaaagtgacaccggagacagacctccacaaggagacccatcttgggaaagtgagccttgaaggtgaaggtttggggacagatgatggtctgcactccagggcattacaagagtggttatcagcagatgttctccatgaatgtgactcacagcaaccagggaaagacgccttgattcatgcagggacaaacccctacaaatgcaagcagtgtgggaaaggttttaacaggaagtggtatctcgttcgacatcagagggttcacactggaatgaaaccctatgaatgcaatgcatgtgggaaagcctttagccagagctcaactctcattcggcactacctcatccacaccggggagaaaccacacaagtgccttgagtgtgggaaggccttcaaacgcaggtcgtacctcatgcagcaccatccaatccacactggagagaaaccctatgagtgtagtcaatgtcgaaaggccttcacccaccggtctacttttattcgccataataggacccacactggagaaaagccctttgagtgcaaagaatgtgagaaagcctttagcaatagagcccacctaattcaacattacatcatccacactggagagaagccctatgattgcatggcatgtggaaaggccttcagatgcagctcagaactcatacagcaccagcggattcacactggggagaagccctatgaatgcacccagtgtgggaaagcctttcaccggagcacgtacctcattcagcactctgtcatccacactggggagatgccctacaagtgtatcgagtgtgggaaggccttcaaacgcaggtcacaccttctgcagcaccaaagggtccatacatga

SEQ ID NO: 86529 - DNA, 1588 bp, Homo sapiens
  misc_feature (1)...(1588): n = a,t,c or g
cgtggtttccggaacttcgcccgcgtctctgggcttttgctctgtcaggctggtggcgttttggtgtcttcgtttgttatggccgctgctgtcgctatggagacagatgatgctggaaatcgacttcggtttcagttggagttggaatttgtgcaatgtttagccaacccaaattaccttaattttcttgcccaaagaggttacttcaaagacaaagcttttgttaattatcttaaatacttgctttactggaaagacccagaatatgccaagtatctaaagtaccctcagtgtttacacatgttagagctgctccaatatgaacacttccgaaaggagctggtgaatgctcagtgtgcgaaatttattgatgaacagcagattctacattggcagcactattcccggaagcggatgcgccttcagcaagccttggcagagcagcaacagcaaaataacacatcgggaaaatgaaaaactggatacaaacgaggcacttaatacatgtatataatgtatttcttttgtacagtgaagacaaaaaaaatgaaaactcttcctatctacctttattatgggagcccctagaacctttagtgtgctttttcatccaactttttattgttaatagactatttctgttaaacctgaattgttctttgatttccctgtggatttgtaaggtgtttttcttttttacgcatttagcataatcagctgattaagaatggaaaagttaggtgctttagaccaaataaggcactggggcatggggtaggggtgggccaccaagtatactgaattctaaggctagctgttcctgacatatagtagggcaagaccatctcctggaaccttactgtctcagatcaactactctaccactctactctaagatgtagtgagagtagcggagtcactgacctctttaaatcataggacaggaactgcataaaggttcttgaattctgcaggacaggaaataactgtattacctgctttgcaaggtggctttaagaatcactgaatcactgtggcctcacttgacctagtcatggcaggacaactagtggttagttactaactggactcttgactttagaacaaacatgaggagcctcaaatacttgtgttcatttgggaaagctaccattgatttgggaggtaccacaaaccaggtgctatgttaagtgcttccttgaattctcattttattctaagaaccttgnnnnnnnnnnnnnnnnnnnnnnnnnnnnnnnnnnnnnnnnnnnnnnnnnnnnnnnnnnnnnnnnnnnnnnnnnnntcagtgtgactgactcccagcttggagttcttcccagaactgggttatagagtctttccggccgctttccgccacctgcctcatcccaagtaaagcacattgagacagctgcaaaacaaactgcttctagtgctcaggagtctgttttttattaaacaaaacaaaactgcctgaattaagcagaggctagattagaggtcatgtgctttccttcagtggtgaggttaggttctacattccaaaatcaaagaaggggtttcaggaatatcatcagttgctttgcag

SEQ ID NO: 86530 - DNA, 468 bp, Homo sapiens
  misc_feature (1)...(468): n = a,t,c or g
gggaaaannnaactgagaccactgaccaccgtgtggaattctcttattcttcttcctcttatttttattccatggatttctgctcttatatgtattttctattttctctcttgtacagctattctgttactagtttttgaggtggaaacttagatgactggtttttagcctttcttctttcctaacatatgcattccaggctctacattcccctcgaaatgctgcttgagctgaattatgtaaggtttggtatgttatattttcattaccattcagtctgaaatattttacaatttttgatgtatttcttctttgatccacagattatttaaaagtatattgcttaatttccaggcaattggaaatattacgaattatctttttgctatggatttttaaagcttactccactatagttagaaaatatgctctgaatggtttaagtcttttgaaatatattggagaatn

SEQ ID NO: 86531 - DNA, 438 bp, Homo sapiens
  misc_feature (1)...(438): n = a,t,c or g
actgagacatatgaagncgtgggaattccttaacataataaaggtcaaatatgaaaagaccacagctaacatcatacggaatgatataaaatagaaagcatttcaggaaaaggcacagatgcctgcttttgctacttgtattcaacacagtactggaagtcctagctagagccattggcaagttaaagccatccaaattaggaagaaggaaaaattatctatttgcagatgccataatcttatatttaaaaatcccaaaaatttcacaagaaactattatgactaataaacaaattcagcaaagttgcaagatacaaaatcaacactcaaaactcagttatgcttcactaacaaagacccatttacaacagcatcaaaaacataaaatactcaagaataaacttgaccaaggaggcaaaagacttgtacaatgacaac

SEQ ID NO: 86532 - DNA, 2762 bp, Homo sapiens
catatattatattatatatatacacacatatataacatatatatggagaaccaatcctttttatagcccaatataaaatgagaatgaaagatgccatagaaagcatagtgcactgctgttgggtgttcagtcccatggataaaaccagcaggatgataaaggcaaccaactttccaggttacaagaggggagctgagttatccaccaaaagcaaaggctcaaattgagacatcctaactggcaaaccatctatgcccaggtcattctcagcctccgtgccaaactcttcatatgatcttggctaggacagacatgttttccgtggatcccagcagtaaagacctctctgcgttccaggcttgggggtttctctttttttgttctttttgttttctaagtgccagaagccgtcacccttcctctctccctttgcctgccattaggattccagaggatggcatcctttagtatttgctttcacagaagagcaatgcagggggatggagggtgctctggctgatgaaggctagggagggagtggccctgaggccgctggcctctgaactctaactgctttgctctcctgtttcaaaaaaggaacgaaagaaaaaaaagaaaggaagaaaaaaaagaaagtatatcacctctggaagaaaacataccaaaaacaaaacaaaacacaaacccccaaacaaaacaaaaaaccaccaactcaaatatactttcacaaaagatggagaacatggatttccttcctgtttatttccttggtgacttggtcatacaagcaaacatggcaaaaccctctcagaacccaaaagaacagcacacggatgaaccaaatgtgaggaaagcagctgtgatattttgggtggagagaaacacaagggcaatttggcacaacgctgctagatactgtgggtttacaatcaaccttttcattcccaagctgtacacaaaactctctgtttcttgttacacgcctgcctgctccatgctgaaggagacttcggggtgcttgtagctgagcagaatgtctgtaatacacgtagatggatagcaagaggagtttaaatgctggctgccatcactcaggtctgggtgctcatgacctcccaggcttgccccacattcctcattttccccatcctgaaactgctggctgcccatgagcgaagactgactgagaactgcatccgacatccgggcagagttaagtgctttcccagccacgagactcattcctggcaagttatccagctgtacataagcatcgtcgctgttctggatcgtgtggtgtctctggagggcccggggcctgtggtgctcatggacggaggggcgtgctgggtacccgagcccattgtgatccggcagctccactgcttgtcctggagaacttctatccatgcagttccctatgacaggctctctgctgggcaccttatttttactgaatgcagcagttggctgatgaccatagggatgtatccccaattcttgggcatgactcacagttcctagcaaagattcagggtccccaggtccaccggtactcaagagcagagggctgtcatggcaacctttggtcaatgtacttgaactcttactgtcttggaagccatccttggccccctcacacgagcagtcctcctccatgctctctgaatgcatcagtgccggctggtgagcatacccgtggggcggggtgggtgaggaagcctgtgagacacattcttgtgccctgatttgtagcagatgctgggggctggtgtgatggtgataagagtcagcattttgataagataaagcctggcgctctgtcatgctctgtcccccaaggctgggagccagactccccgcatccccttggttcatgtgcctgaacagttcctggtattcttgctgttgctgctgttgctgctgctgctgccgttgttgctgctgccttttaatgagctgtgcaaactctgttgggggcagccggatgtccgagtggccggtgagcgaatgccggggagaaagcagtccttgaaggatgtggggtacctgctggtgtcttgtatagtctggcggcgtgggagacagcagggcctgctgtagtgccgacgtggtatagtgtggcggctgctgatgtgcactgggagggaaggtggggaattggtcaagtggagggactttcagggcttgggttggagagaaccccactcctgttgaagggctgtagctgctgggggaaccccgggactggtccgaaaacagatgggggtgtaaatgcgcctggtcgtagttagcaggggagaaccgattcacgttcaagctgcagacacaaaagggagtaccagacatccatgtaacaagtactagacttcctgggaacagctcctcctcctcagtagggagaacccactggtacagagaactgtgagcctctgcactgtcagcactcagctgcttggacaagggacggtgcccatagctgagggtggccatcaggttggtacggtgctgcatctgcatctgaccagcactggggctgatggagatgccgcgcccactggagcctgcagctgtgcctggcatgttgctgagcatgtcaacaggctcttggacttggatggtgacctgctgtgactgagcaggctgctgcatacccaagcaggttagtgccacgttgggaggagaggaacagttctcaggttgctgctgaaagattgcactgcgggaaggtaagccttgaaactgggaagaagatgcagccc

SEQ ID NO: 86533 - DNA, 562 bp, Homo sapiens
gatagtggtggtggaggaggaggagggtgtggcagaggtagtgccaggatgcgcaggtggaggcggtggccgaggtggaggtggaggcggacgtggaggaggaggatgtgaaggaggtgctggcagaggaggagtgtccggcgttggggacccaggagcgacttagccgtggtggtgatgccaagtccccagttcttcaggaaaagggcctgcaggcctcccgggctccagccactcctagggatgaggacctggaggaggaggaagaggaggaggaggatgaggacgaggatgatttgctgacggctgggtgtcaggggctggtgacgtttgaagatgtggctgtgtacttctccctggaggagtgggaaaggctggaagcagaccagcggggcctctaccaggaagtcatgcaggagaactatgggattctcgtgtccttgggatacccaattcccaagcccgatctgatcttccggctggaacaaggggaagaaccttgggtcccagatagtccccgacctgaggaaggagacatcgtcactggcgtctacacagatga

SEQ ID NO: 86534 - DNA, 2257 bp, Homo sapiens; identical to SEQ ID NO: 61739

SEQ ID NO: 86535 - DNA, 586 bp, Homo sapiens
ccatggtggagtgtccagcctgccagcattagagaccaacactgagtcttagagataccagctaccaccaggttgagtgcatcagatcccttttaccttggaatgggcatcaatttgttcttaccagaattgatatatgctctaaatgagcttgtcttccccaactactttgcctccagcagcaccaccatctgagagcttacagggtgccttatccattgacatacctgaaactaaggaacccaccgatagccaaggaggtgtgacagtgaactcgaagctacaaaattcatggtgcatactcatcatccagaagcagctagccagatagggttttggaatggcctgttgaagactgggctaaattgcgattaagatgtaatgccttgcaaagttgggagcagttcttcagaatatggtatatgcgctgaaatgcattgggccaaaatggatatatagtattgtgtctccagtaggactatgtgcatacaggagtagcctctattactatcacacccagccactcacctgtagaatttgtgcctcctcgctccgaaatctggagccagctgggttatgatcctca

SEQ ID NO: 86536 - DNA, 469 bp, Homo sapiens
  misc_feature (1)...(469): n = a,t,c or g
aagctgaagaccatagaacanngcgggggggtagaacttctatcaccggagcttnctcacagacagagtcacccaggggagcttcctcacagacagagtcacccaggggagcttcctcacggacagagtcaccccggggagcttcctcacggacagagtcacccaggggagcttcctcacagacagtcacccaggggagcttcctcacagacagagtcacccaggggagcttcctcacagacagagtcacccaggggagcttcctcacagacagtcacccaggggagcttcctcacagacagtcaccccggggagcttcctcacagacagagtcacccaggggagcttcctcacagacagagtcacccaggggagcttcctcacagacagagtcacccaggggagcttcctcacagacagtcacccaggggagcttcctcacagacagagtcaccccggggagcttcct

SEQ ID NO: 86537 - DNA, 492 bp, Homo sapiens
  misc_feature (1)...(492): n = a,t,c or g
tatgagaccctgnnanngggnaatcgagacattagtccangcggnggaattctcaatttgtgacccaggaaataaccaaccttatgtatgttatgacaccaagttttcacctggtaaatggtttgaaatccatgcagggtcaaaggactgttccctcttaaaccaaaccaaggtccctcccttttacctagggcctatttctctatattttgatgcttgtcaggtagcatacctagactcacccgtctgtcgtaacctacctttaaaaagagactataaaaatgactacaaatatgtatgcaagtcaccttgtccccctgggaccccagaaaaagattgtcagtattgcatatcgtggcaccctagcacacaacaaaggccaattatgcttaccaaaatgatggtaaaaccagattgtaaaacaaaaacctgtgatcctataaatttcaccattctaaggccaaacctacccatgtggactgcaggttaccc

SEQ ID NO: 86538 - DNA, 2377 bp, Homo sapiens
acccgggtcgacccacgcgttcgggctgcggggtcgcgcccaccctctacctgtgccgtttccggattctggccccggggagggcgcgtcctcggggagacggcgtgcaagcccagcactgttggtcaccgcaggcctgtcttcctattcaccgtgggcagcagagggatggctgctcacctgctgactgatgaggcactgactgggagactagacctgaaatgaaagagttggatccaaagaatgacatttcggaagacaagctctccgttgttggggaggccacggggggacccacgaggaatggtgccaggggtcctggctcagaaggagtgtgggaaccaggcagctggccagagaggccgcggggagatgcaggtgcagagtgggagccattgggaattccccaggggaacaaactcttagggggctcagtacccgcatgtcatgaactgaaggcatttgccaaccaaggctgtgtcctggtcccaccacggctggacgaccccacagaaaagggggcctgtccacccgtaaggcgtggcaagaacttctccagcacttcagacctcagtaagccccccatgccctgcgaggagaagaaaacctacgactgcagcgagtgtggcaaggcctttagccgaagctcgtccctgataaagcaccaaaggatccacacgggagaaaagccgtttgagtgtgacacctgtgggaagcacttcatcgagcgctcgtccctcaccatccaccagcgggtgcacacgggcgagaagccctatgcctgcggggactgcggcaaggccttcagccagcgcatgaacctcactgtgcaccagcgcacgcacacgggcgagaagccgtatgtgtgcgacgtgtgtggcaaggccttccggaagacttcctctctcacccagcacgagcggatccacacgggggagaagccctacgcgtgcggggactgcggcaaggccttcagccagaacatgcacctcatcgtgcaccagcgcacgcacaccggggagaagccgtacgtggtgccccgagtgcgggcgagccttcagccagaacatgcacctgaccgagcaccagcgcacgcacaccggggagaagccgtacgcctgcaaggagtgcggcaaggccttcaacaagagctcctcgctcaccctgcaccagaggaaccacaccggcgagaagccctacgtgtgcggcgagtgcggcaaggccttcagccagagctcctacctcatccagcaccagcgcttccacatcggcgtgaagccgttcgagtgcagcgagtgcggcaaggccttcagcaagaactcctcgctcacgcagcaccagcgcatccacaccggcgagaagccctacgagtgctacatctgcaagaagcacttcacggggcgctcgtccctcatcgtgcaccagatcgtgcacaccggggagaagccctacgtgtgcggcgagtgcggcaaggccttcagccagagcgcctacctcatcgagcaccagcggatccacaccggcgagaagccgtacaggtgcggccagtgcgggaagtccttcatcaagaactcctccctcactgttgcaccagcggatccacacgggcgagaagccctaccgatgcggcgagtgcgggaagaccttcagccgcaacacgaacctgacgcgccacctgcggattcacacctgagcgcctctgtgcagggctctcactggcggtgcccaggacggacgccagatggctgcgcgctttgtcagcagggctgtgagaagttctcccctggggtggggactcggggtcaggggagctcaggaatgtggggttgtggaggggctggctgatcacacatgccccctccttactgagcctcagaaagcaagcccctcggtgtctgacgtatctggggacacttcaaggttcactgtagctgagccatggccgctggtaacagacatcagggttccagactagccctcttgagtaactgtcctagagctgggacaggtcacgcctgcctccacatctctgtttcttcagcgggaaagtggagctggtggaggggagggaggagacatctccctctttgtcagatacatcctggagtccagatgcagcttgtcaccatctgcattttctccgtgggttgggagcgtgagggccttcctatccctccacccaccgtttccctgcagtgcacgctggcagccaccaagctaggaagtggcaggagtttgccggttgtttgtgaggggaaaaatttttttttcagagttagcaaataacagtaactactgctttgaatcccaaagtttcttagagtggtctgttacgttttataaaaataaaacttttaattaaggcagacaatgtatt

SEQ ID NO: 86539 - DNA, 554 bp, Homo sapiens
  misc_feature (1)...(554): n = a,t,c or g
attcgaatccagtccaagtggnggaattccggacccgtcacatcctggtccctcctcttcccccacccccacatccgactggcactccctttgggcagctccatccggtggtgtcctctctgagtcccagggcctgcatcgggtggtgtcctctctgagtcccagggcctggcactcagcaggccctggggacatcaaccaggggcccttgaagctgtgtccctggacacagtttccctgccccaagccctggcacattcggcccaggcttggcaaaaactccttgtcctccaaggactcggctgcaccagccactcaaataaattgatgttcccatctctgctgactcatggatgagaacatcggggctcctgccaatggccacacacacccccagccccaccagggaatagccctgcaccctgcagggacaatgtcatgagcctgagaagccaccagcttcccctactccgtgagcaccanactccagcctgcttgagctgttgnggccccctgccttgcactgttcctaataaagctgggatcttgttgag

SEQ ID NO: 86540 - DNA, 1130 bp, Homo sapiens
tccctattccagtgaggtggaattcgctggaagggcgcctcctccgcgggtatgaacagcacgccaacgatggcaaggattacatatcccggaactaggacctgcgctcctggaccgcggcggacatggcggctcaaatcaccaagcgcaagtgggaggcagaagaatttgcagagcagatcaaggcctacctggagggcacgtgcgtggagaggctcgcacacacctggagaacgggaaggagacgctgcagctcacggagcagtcttctcagcccaccatccccatcgtgggtatcgttgctggcctggttctccttggagctgtagtcactggagctgtggtttctgctgtgatgtgcaggaagaagaactcaggacattttcttcccacagatagagtgagctactctgaagctgcaagcagcgaccatgcgcagggttctgatgtgtctctcacggcttgtaaagtgtgagacagctgccttgtgtgggactgagaggcaagatttgttcacgccttccctttgtgacttcaaaaaccctgactctctttctgcaaaggcacctgaatgtgcctgtgttcctgtaggcataatatgaggaggtggggagaccaacccacccccatgtccaccatgaccctcttccctcatgctgacctgtgttccctctccaataattaatcattcctgctccatagacgtgaggctgagatgtctccatctctgtctcaactttatgtgcactgagctgtaacttcttacttccctattaaaattagaatctgagtataaatttactttttcaaattcttgccatgagaggttgatgggttaattaaaggagaagattcctaaaatttgagagacaaaataaatggaagacatgagacccttccagagtccacatgtttcttatgctgatttgttgcatgagaggagagtagatggggctgtgcccagtgggtgctcaggccaccgtgcgctttatgtggtcactactcagctgggtcatctttgctgctccgttgtccttggctgtatgatccagccctacgggacttagagggttttctccccgtgtgcggagataagagattgtaataaataaaagcacaagacttgtatt

SEQ ID NO: 86541 - DNA, 485 bp, Homo sapiens
  misc_feature (1)...(485): n = a,t,c or g
catgaccccnctcgtnagtagatcatcggacangcggnggaanncggaaagggtgacattcaaggatgtggctgttgtcttcaccaaggttttagctggcactattggataaagcccagataaacctgtaccaagatgtgatgctggaaaacttcatgaacctcatgttagtgagagacgggattaaaaacaacattttgaatcttcaggctgaggggttaagttacctttcgcaagaagagcttcattgctggcagatttggaaacaaaggatccgggatttaactgtgagtcaggattatatcgtgaaccttcaagaagagtgttccccacatttagaagatgtttccctcagtgaagagagggcaggcatttctcttcagatttctgaaaatgaaaactatgtagtaaatgccattatcaaaaatcacgatatcacagcatggcaaagcctgacacaggttcttaccccagaatcgtggagg

SEQ ID NO: 86542 - DNA, 1622 bp, Homo sapiens
ttttttttttttgagacaaagtctcactctgtagccaggtgctggggtgcagtggcatgatctcggctcactgcaacctccgcctcctgaggtcaagtgattctcctgcctcagcctcccaaatagctgggactacaagagtgcgccaccacgcctagctaatttttgtatttttagtagagacggggtttcaccttgttggccaggctggtctttaactcctgacctcaggtgatccacccgcctcggcctcccaaagtgctgggattacaggcataagccaccacgcccagccaggaaagtatttaaaaacaaattaagcaaagattataaaagtttttggagtaacacatttcccgaaatgatcacgatccacatcaagtctgagccatgttgacatccccacgtcggggcccttcctggtggtcgaggaatcttcagaggtctctaaaatatattaaaaatgtcccaacatttcaggacattccaccggcttttcttgctgggcttcctggttttcttcttgggctttctggttttcacttcctcttccactttggtcttttctgttgcttcttctgcaggtgcagaggaaggacttgctgacatctgctggtggctgcctgtaatggtggagtcttccaattgctttgccagtgtggctgggtccacctgcatcatgtgaacccctgtggcttcctcagagactgtctgctctggcacatgctcctccaggtcttccaggtcactctttgccagcgtggctgggtccacctgcatcatgtgaacccctgtggcttcctcagagactgtctgccctggcacatgctcctccaggtcttccaggtcaccacgttgtggaactcccaaggatgtcttcacctcctctgggtccctcctcctcgccgttgtaactggacagctcctgaagtacatccctgatcagaagttcggccagtgtgtctgggtccccctccatcatgtgaacttctgtggcttcctcagagactgtctgccctggcccatgctcctccaggtcttccaggtcaccgttggtttgggtgcctgcgtctgcatgggcaacagtgaggagactctgattggatgcttcagggagatgttctgctataaactcctctagatgatcttctgatggaaagcatacccttttcttcacagagcctggcaacgtctccgagagtatctcgggtggacacaatggcttgcccaaggagccttcgtcacgctcacgttgtggaactcccaaggatgtcttcatcgcctcttggtacttcttccatgtgctgtataggtggagctcccgtagtcgccgtagttgccgtttcatctcaatgtctctctctgtgtctttgtccaccatatgaacgcccaggacatcttcagatgaagcttcctgcaccaggtcctcatcgtaatctggattgtaagttttaagaatcttctttttaagttccaaaatttggtgtcaaattctatatataaaaaagtaataaataaaattgctattttaatactgaaataaaagttaccatattaaattcttaatgtttggtaaatgtataatcaaactgattcttttttcctcgctggctaaaacaaaa

SEQ ID NO: 86543 - DNA, 1268 bp, Homo sapiens
  misc_feature (1)...(1268): n = a,t,c or g
aggatggcggtgctgcagggacccgtccaggctgctatatggcaagcactaaaccactatgcctacctaccgagatgcggtttctccccgcagaacgcctttatgcagaagtacactcagaagaagccttgttcttactggcggacctgttcttaccgcctcaggaaaaggctagtaaaacatatagactctttgaaaaggacacagtgtgtactaccccgcaatgcaaatgcctgcttgcgaaatgttgtgttgatctcagcaagcttgcagaaggggatcaaatcttatcgggtggagtgtttcataagcagaaaagccacgatgatattatcgttcctgagtttggtgattcagctcgctttccccttccatcgtcgggacatgtatattgcaagacagatcggcttaccaaaggatcagaatgtgaccaaaagagccttcgttgaaatcctttcctctgggtgtccctttgaatcatgatgtgaaataggggggaaaagccagatcctgaccaaacattttgattcacctctctagagagctttagcaactgcctgtccaagtgttgcgccacaacacttggacctcgtcctagtttaatgtcacagacagcccgagaccgttcttacggaaacacccccaggacaccgtcggaatgaaacggatggaatttagaatcttccaattcaaagtactccttgaatacagactccgccagtgtcttctatcgattcagctgtcctttcacctgatactgtcccactgggaacagggaanttccatatgatctaaacaggttcaacataaaccaaaaactggtcgaagtttattaggaggaccagcagctgttagtccattaaccccaagtgttggcattttgccattagaaaccccaagtcccggagacggaccctattgacaaaactgcactggtatgagacaccgtctgtcattgacgtgccatccaccggagcccctttcagaaaaagcctgttgccaggaatcgggccaaaccgggaacacccgtcttgtcttcttcggcaggaggggaaagagccgaaaggtaactccagtccttgcaaaaacacaaagttctggtccgccgacaagggcaacacctcaggtattgagccccactatggcatctcccccaaatgcaccgcctcgaagaaattcacgactcttgactagtgacagctccacaaccgaggagaataggaaaaaattnaaaatgaagtttcccccaataaaccttgaacagtgaa

SEQ ID NO: 86544 - DNA, 3172 bp, Homo sapiens
tttcgtagcccaacacccgtaaagggtgactcacaagggccccagacccagacagagtcggactcgtcgctgatttcctcagactcttcatccctacagccaaaggacccgtcattaacgccccgcttcctcagcgactgcgttcaaatacagccccaatcaggacgctccacgcaccatcggtacacagacccacaggccgcgagtccatgcccagaactcgactcacccgagcccgaacctctccagacaccactggcagcgacaaaacgccgcatccacgtccgaaaacgcttcctattcagacgcgctcctgcgcggactccgggaagctgagcgaaatcaggaaaattgatgatcctctgcagcatcacttgcaaaatcaaagtattcagaagagtgtgaaacagtgccatgaacagaatatgtttggaaatattgttaatcagaacaaaggtcatttcctgctgaagcaagattgtgatacgtttgacttacatgaaaaacctttaaaatcaaatttaagttttgaaaaccagaaaaggagctctggcctaaagaactctgctgagtttaatagagatgggaaatccctttttcatgctaaccataaacaattttatactgaaatgaagtttcctgcaattgcaaaacctattaataagtcccagttcattaagcaacagagaactcacaacatagagaatgcccatgtatgcagtgaatgtgggaaagccttcctcaagttgtctcagtttattgatcatcagagagttcacactggagaaaaacctcatgtatgcagtatgtgtgggaaagctttctccagaaaatccagactaatggaccatcagagaactcatacagaactgaaacattatgaatgcactgaatgtgacaaaaccttcctcaagaaatcacagctcaatatacatcagaaaactcatatgggagggaaaccttacacatgtagccaatgtgggaaagccttcatcaagaagtgtcggctcatttatcatcatcgaactcatacaggagagaaaccccatggatgcagtgtatgtgggaaggccttctctacaaagttcagtctcactacacatcagaaaactcatacaggagaaaaaccttatatatgtagtgaatgtggaaaaggcttcattgagaagaggcgtcttactgcacatcatcgaactcatactggtgagaaaccctttatatgcaataaatgtgggaaaggcttcaccttgaagaacagtcttatcacacatcagcaaactcatacaggagagaaattatatacatgtagtgaatgtggaaaaggcttttcaatgaagcactgtctcatggtacatcaacgaactcatactggagagaaaccttataaatgcaatgagtgtggaaagggcttcgctttgaagagcccactcatcagacatcagcgaacacatactggagagaaaccctatgtatgcaccgaatgtcgaaaaggtttcaccatgaagagtgacctcattgtacatcagcgaactcatactgcagagaagccatatatatgcaatgattgtggaaaaggcttcactgtgaagagccgccttattgtgcatcagcgaactcatactggagaaaaaccctatgtatgtggtgagtgtggaaaaggctttccagcaaagatccggctaatgggacatcaacgaactcatacaggagagaaaccttatatttgcaatgagtgtggaaaaggcttcactgagaagagtcatctcaatgtacatcggcgcactcatacaggagagaaaccctatgtatgcagtgaatgtggcaaaggcttaactgggaaaagcatgctcattgcacatcagcgaactcatactggggagaaaccttatatatgcaatgaatgtggaaagggcttcaccatgaagagtactctcagtatacatcagcaaactcatactggagagaagccatacaaatgcaatgaatgtgataaaaccttcaggaagaagacatgcctcatacaacatcagcgatttcacacaggaaagacttcctttgcatgtactgaatgtggaaaattctctttgcgcaaaaatgatcttattacacatcagagaattcacacaggagagaaaccgtacaaatgcagtgactgcgggaaagccttcactacaaaatcagggctcaatgttcatcaaagaaaacatacaggagagaggccctatggatgtagtgattgtgggaaagcttttgcgcacttgtctatccttgttaaacacaagagaattcacaggtagtcattttgggaaagcctcttgccagatgtaggcccttaagatatctgcaaagaagagtaatttcatgaatgcagactacatggttgtttatttagtgatcagttacttcatgttttgtgtcagagaaaacatgtacaaaacatttgagaaaatattttaggacattatgtctaaaaattgtatactgagaaaaatcctatgaatgtggcagactataaaagcctttggtgggaagataaaccccctcagaagtgatcatagatcatgaataaactactaattcgtggaaatgtaataattataggaacgtctttgcccaaaaataaaacctcaacagattgagagagttcacactggagaaatactttcctctggcagtgaatgtggcagggttttcagtaaaatgttttgcctcatcgtgtgctaggaaataatgcagaaaaaaactaatgaaaacattcaatgtagaagacttttaggaaaacaacagagaatttaatgaaggaaagaagccttggcaaaatgatggatgagagctttctgtcacaattctaaccttaacagataatatgcctcatgtgcatttgggaacaggatagcttgagccatattcctagttgccttgtcactgattttatacattttaaattgtgacttcctctaatcacgaactaaaatttaatattgtatataataccggagtattttatgcctgcctcattttattatatgattagctcctgcatttctttagttctaagtttgtgttatttcagaataactaaagtacttcagaatgaaactggatacagtatattcaattcataagtgtaattgaccatacttgaatatgtttaagtttataagtaacatct

SEQ ID NO: 86545 - DNA, 450 bp, Homo sapiens
  misc_feature (1)...(450): n = a,t,c or g
attgacgccttattgaagcctgtcggaanacgcaaagnttttatttctttctcatttctgaaacatagctttatttggtaaagtattcttgggtggtcatttctttttattccttcagcactattaatatagaatttgcctctcttctggcctgaagtgtttctgctgacaaatctgccaaaagccatattgtgcctccactgaatgtgatgtttcttatcttttgctgctttcagtattatttctttgtatttgatttttgataatttgattataatgtatcttggtgatgtcctctatgggttgaatttgattggcaacctgtgactgagatgcctgtacctggatgttgttgtctttccccagatttgggatatttttagctattattttctcaaatatgctttctaggcttttatctctttctttgtcttcatgaattcctactag

SEQ ID NO: 86546 - DNA, 417 bp, Homo sapiens
ccaaaaattagtaacaagacagccttcaaaggtcccagaagaggtaggtaaaagccagttgagacttgcgaaggcagttttgatagttgaccagctgtagttgcaatgagtgccctggttatatctgtaaccaggtagtttactcatagatcttttgaatgttaatctcaacctgtctggagttgttcatataggtgcagcaggttttattaataactgcacatactctaccttgttcagctagtaaatagtccagtgctagtctgttattgagaaatacatttgccaaagagtctagggactcttgaattctctttagtgcatgacctgtgttggtggctaaggattctagggtttgagtcaagttgtttagggttcactttaagcaaagccacccaagggtactgctgccctgat

SEQ ID NO: 86547 - DNA, 574 bp, Homo sapiens
  misc_feature (1)...(574): n = a,t,c or g
ttagaagtttttgcatataatatatttggaaaaccaaagacaacaaatatcaaaattaaattacataacatttaaaaattaaggttttttggcatgatttaaaattttcacacaaaaataatattatacagacatatacacacacagataaatcggtcaaaagctacttaggaatacagtatctaaaacctatataagaaaacattaaaacattcctgagaggctcaaaagtaaatttgaacaattaaaagggcatttattgttcttggatagcctatgttaacttcataataatgtcaatactccccaaattaatatacaaatttagggctatttcaacaaatataagttattttttctaatgttaaacatgtgaattataacattcatatagaaaacaaaacatgtaagaactctgagaaagaataacaataaaaggaagactaatgctaccagatattaaaacatactctaaagcttctatagattgtgaggtcatgacataaataaggtctacagaacatttanctggaattgcaccgcaaggactagtgtctacaaaannatttttccg

SEQ ID NO: 86548 - DNA, 447 bp, Homo sapiens
  misc_feature (1)...(447): n = a,t,c or g
nttcgaagactcttagtcagtgcggtggaattcgtttattgtaaatcagcaatccataatgcatgggtctgtttctgggatctctctttgattccattggtctctttggctatccttggattagtatcacactaaactactatgactttataacgtgtcaatatttagattttataataagttttggtatttagtagacagagcaaagtcctccagattgggattttttcaataatgtgtaagttattcttgactttttgtgtttgtatataatctttagaatcagcttgtcaagtgccatgaaaggaaggaagaagggaaggagagaatgaaggaggagttttgtttaggattgcattgtaattataggtcagttagaagagaattgacatcttcctaacactgagtcttccaacccatgaccatggtatatattccatttattta

SEQ ID NO: 86549 - DNA, 479 bp, Homo sapiens
  misc_feature (1)...(479): n = a,t,c or g
ggagggggccnncgattgtagacattgagcacagtggtggagtgccgngcgcaactgggggcgccgggggctccgcacggaccatgtattttctgagcggctggcccaagaggctgctgtgccctctggggagcccggccgaggcgcctttccacgttcagtccgacccgcagagggctttcttcgccgtgctggccgcggcccgcctcagcatctggtacagccgacctagtgtgttaattgtaacctacaaggagcctgcaaaatcatctactcagtttggatcctacaagcaagctgaatggaggccagatagtaccatgatagctgtatcaacggcaaatggatacatcttgttttttcatattacatctacaagaggggacaagtacctttatgaaccagtgtatcccaagtaagtttgttgcctttcattcttttaatatgtgatttgcatactttatattcagaanaacatt

SEQ ID NO: 86550 - DNA, 467 bp, Homo sapiens
ttttttggctttgtagaccatagtccatgtggtggaattcgatgaacaggaagggaggggaaatgggtctgcttagaggctggactttccatggccaagagcccagagtccaggaacctgggttggttcccctttaaggtgcctggggctgtggggtgccaggacaggggataaaagggggtggactagagcctgggaagcgggtgacttcaccccccagcccattgtgcttattgtcatggcaacccaatcctcgcttggaatgcggctggtgctttgagatgcaaaaggagctggacaaagagctaggggccccaggcctgagaaaagcaccccccttccctctccttcctgcctccctttccctccctcccttctctctcaggcctggtgagctcaaggggggctggggaaaagcaaggccccaggcatggtggcacagtgcccactggcaccctagcaccaat

SEQ ID NO: 86551 - DNA, 421 bp, Homo sapiens
ccactggattgtgaacctcctgaaattagggctgtgacttgtaccttataagtatcacatagatgagaaaaaatttcatcgatgtaatggatggaacactagataggagatcagtaaggaaatagaagactttaaaaacactgtaaaccagctagacctaacagacactgctttctaacggcgattgaagagcacattccacccagcaacagcagaatacacattcttctcaagtgcacacggaccattctctagcatagatcatatcttaggccacaaatcaaatctcaataaatttagaaaaattgaaattacacaaaatatgttctctgacaacagagtaatgaaattagaaggtcaaaaacagaaggaaatttgaaaattcacaaatatgtaaaaattaaacgacacactcctaacc

SEQ ID NO: 86552 - DNA, 810 bp, Homo sapiens
ttttttttttttaacatcttaatattgagtttattagataaagacaagaaaaaatggggcttggggaaattggggcttctggggttttaaggagcatgctgaaagaacgtaagaaacaaaacatgaagggaaatggaaatgttaccctcactcccctcctccctgctgtccagtgtggatgccacctccagcctgcaggacggagccccctcccatcatcacacagtgcacctgggctctgcagccccttgcatccattgcagccgcagcaagaggcctccacttgtccgtcagggacgctccaaggaagggaaaaagccgcccccggacaggggagaccactgtgttctctgtgggcaggtggggcaggtgcttccaggggaaaggggggctgaaggtagggggcccagtgatcaggcacctgatcccaaaagtgggccttggctctttcctcctggactgggagctccggcagaagtcaggctacacaatgtgccccacaatctgagaaggcctcccctaccttaggccagagggaagtagccaccaaactcaggatgtccctggtcagaggggagggccaagcagcctctgagttgtggtcctaaaccccagtgttccctcccctcccaggttccgggtgacacacattgagaagcgctatggactgcacgaacaccgtgatggctcccccacagacaggagctggggctctggtgggggacaggacccagggggtggtcaggggtctgggggagggcagcccaaggcagggatgcctgacctcgtgccgaattcctgcagcgcggt

SEQ ID NO: 86553 - DNA, 6129 bp, Homo sapiens
atgcagaaaagagtccaagtctctcctttgggccacaagagggcaccctgcagctagctaaccctccccttcttcagaacagcgttttccaaagagtatgtcattttcagaggactgatttaaggcttttgcctaccaaaaagttttgggaacctgatgattcaacaaaagatggacaaaaaggcatatttcttggggatgatgaatggagagagactgcatggggagcttctcaccattcaatgtcccagcctattatggtacagagaagatctggacagggttttcatggaaacagtgaagtaaatgcaatactgtctccgcgatcagaaagtggaggccttggtgtgagcatggtagaatatgtattaagttcttctcctgctgataaattggattctcgatttaggaagggaaattttggcactagagatgctgaaacagatggacctgagaaaggagatcaaaaaggcaaggcttctccatttgaggaggaccaaaaacagggatcttaaacaaggagatgatgatgattctaaaataaatggcagaggtttgccaaatggaatggatgccgattgcaaagattttaatcgtactcctggaagtcgtcaagcctctccaactgaagtagttgagcgcttgggccccaatactaatccctcagaaggactggggcctcttcctaatcctacagctaataaaccacttgttgaagaattttcaaatcctgaaactcagaatctggatgccatggaacaagttggtctggaatccttacagtttgactatcctggtaatcaggtaccaatggactcttcaggagctactgtaggcctttttgactacaattcccagcagcagctctttcagaggactaatgcactaacagttcaacagttaactgcagctcaacagcagcaatatgcattagcagcagctcagcagccacatatagctggtgtattctcagcaggccttgctccagctgcatttgtgccaaatccatacattattagtgctgctcctccagggaccgatccgtatactgcagcaggattggctgcagcagctacattagcaggtccagcagtggttccacctcagtattacggcgttccatggggggtgtatccagccaacttatttcagcagcaagctgcagctgcggcaaataacacagccagtcagcaagcagcatcacaagctcagcctggacagcaacaggttctccgtgctggagcaggtcagcgtcctcttactcccaatcagggtcagcaagggcagcaagcagaatcacttgcggcagctgcagcagcaaatccaacattggcttttggtcagggtcttgctactggcatgccaggctatcaagtactagctccaactgcctattatgatcagactggtgccttagtggttggccctggagcaaggactggccttggagctccagttcggttaatggctccaacacctgttttaattagttcagcagcagcacaagctgcagcagcagcagcagctggaggaactgcaagtagccttacaggcagcacaaatggtctgtttcggccaattggcactcagccaccacagcagcagcaacagcagccaagcactaatctgcaatctaattcattttatggaagcagttcctttgactaatagctccccagagtagttcctttaattttcctccatggaccctggtcaaccctggaagtacatctcttggctttggaagtggtaactctttgggtgctgctataggctcagccctcagtggatttggttcatcagttggcagttctgcaagtagtagtgccacaaggagagagtctctatctactagctctgacttgtacaaaagatctagtagcagcctagcacccatagggcaaccattttacaatagtctgggattttcctcctctccaagtccaataggcatgcctctgccaagccaaactccaggacattcacttacgccaccgccatcactttcatcacatggatcctcatccagtttgcatttaggaggactgacaaatggtagtggtcgatatatctctgcagcacctggagcagaagcaaaatatcgaagtgcttcaagcacttccagtctatttagctccagcagccagctctttcctccttcccggcttcggtataataggtctgatattatgccttctggccgcagtagattattggaagatttcagaaacaaccgcttcccaaaccttcagcttagagacttgattggacatatagttgagttttctcaagaccagcatggttctagattcatacagcaaaaactagagagagctactccagctgagcgacagatggtatttaatgaaattctgcaagcagcctatcaattaatgactgatgtttttggcaactatgttatacagaagttttttgagtttgggagtctggatcaaaaattagccctggctactcgtattcgtggtcatgttctacccttagccttgcagatgtatggctgccgcgttattcagaaagcattagaatctatttcttctgaccagcaggtaattagtgaaatggtaaaggagctggatggtcatgtgctcaaatgtgtgaaagatcagaatggaaaccatgttgtacaaaaatgtatcgaatgtgttcagccacagtcactacagttcatcattgatgctttcaagggacaagtatttgtgctttcaactcatccttatggctgcagagtaattcagcgcatcctagagcattgcactgcagaacagaccttacctatcttagaagaactccaccaacatacagagcagttggtacaggatcagtatggcaattatgttattcagcatgtactggaacacggtcgacctgaagacaagagcaaaattgtttccgaaatcaggggaaaggttttagccctgagtcaacacaaatttgccagcaatgtagtagaaaagtgtgttactcatgcctcccgtgctgagagagctttactgattgacgaggtttgctgccagaatgatggtcctcacagtgccttatacaccatgatgaaggaccagtatgccaattacgtggttcaaaagatgattgatatggctgaacctgctcagagaaagataatcatgcacaagattcgacctcacattactactttgcgcaaatacacatacgggaagcatatactggccaagttggaaaagtattatttgaagaatagcccggacctaggacctattggaggaccaccaaatggaatgctgtaaattacaggagcaagagaaagaagataatttaaccatgtgaaaagaatttttttgtgtgtgaattatcaaaacacaactcaactatgaatcttcaatttttttttaaagcaaaactatttattgactttattcatccatttgtaaattttttaaggttcttgtgtatatttggggggggggggatgaattataaattatattcagccctgagtggagacctatcagattggattgctggcaaagcacagaatgcctgtatatgatgtaactgtatcaaaaataaaaagctgtcacatattttgtaaatttttaccttgtaaagtcacaaaaatagtttttaaaggaaaaagtacagtattcttttaataaactggctcacagtctggtaggtctacaaccccatagcacaacaggtttatagagatgtatatagaattatagtccttatttttttcctttgcgtgaaaccttttataacagattaacaatcaactgcataaatattattaatattttaaaaagagttaagttgtattttgataattcacaaactatcatgcaaataacgagtaagtagacaagaataaagtggtttgagatgaaaagaacctaacattatttacagtagatgtggttttaatacaattactgccctaaaatgtctctggcaatgtacagaaatattgtatatacttacatatgtaattgttgtaagagttaaatacaaaatcatggtgacacttccaattaagtgcactaaatgaaaagttaagtcacttattaacttttcagtttggtttgcaatgagaaagagtggaaatttgtattttgttttgcttatagaattacagacatgttgaggaagtgttgagctttattttgctttttcatagaggcagaaagtaggaaccagatagagatgaaaaggggccactgaaaagtgaatttgatagctcagcatttaagcatgattacatattcagatagctctttttgctttctataaatatatgcattgtgtgtgtagtaatagatgtaagtttacactttgaaaggaaatcttgtttcaatgtttattataaaagccttgctaatttagtagtgatgctttccttggttgtacaggtgtacatttgtaaaccttcatgctgtaaatggaatttgttttatctctttgggatacatttgcattttagtgtacatttacgtccctgccctctttgacctggcaatatagtgttgtataatgtaaatttatttctccaaatcgagagtgattttttaaaaattttttatctttatatggtttcagaagtatgaaccagctttctttttattattgtgagatcattttgttttataacatagttgttgactgttaatatggacctgctagaatttggatcactttcaattgaagtcagggtattgtgcataatagaaagtattggactgagatatttggttaccatggaggccaatgcttttttcatcttattaaatgtgatgtgacttttttctttgtacagaagagtactgtatttttgaatagcctactcccaagtaagagcaaatctgtatgataacattttttcctctggacataagacataacagtaacacgatgtacatttacaagcggccttatgtacatttcccaacaatctttttaaggcaaaattgtgaccatatgtgtataattaaaatcgtttttaatcctttgcctatgaaaatattttggaaaaaaacttgctgtgtatattcagtttctgaaagataaagaaagtgctttgtattttgttgaagtcagtattttgtataaacatttatgttgacccacttatgttcagtgctgaaaactaaaatgaacatgctattctgtcagctgaatatggaagagatctttttttactagagatctgcagaagaaacgcaatcttctgagcacaatatggaatctaaaggttttatcacttagttgttcatattatgaacctaaaaataatggcataaagtttggggatgccaggcatactttttcatgtttggtgttgagttattttacttttctaacccaacattccttggtgagaccattaaatccaaacacttgtcaccgttccttctcatagtcactctgggtcatcagcatgtcccagtcactgcagcaacgccttgtgtttgtttcatttttttaaaacccacacaaagccgctgtctcactttttcctactttaccaacctcagagtatttcggcccgtatcgaacttttgttctcagtatcagcccatggtttcaggatcaaagctgtcatgttggagattggtaatggctttcctgtctttgtacagttgaattcctagtcttccttcatccttgccctctgttggcacaggcattatctctgcaattttagaaaatgacaagtagagaatactacattgagaaactaaaccctcttcttggggtcctgatactcattcccatttgtcccagtgctgacaacccaatcttcccaatactttcaggcctgctctacaaaagtacctgttcttgtagaaattttacagtctgccattttgggtgcccaccccaatttttaccttttagtaagttggcatgaaattttggtaaaatctgaaaatcacatttcagaataaaacaattgggcaaaactacctaggctttactcttgagtgtctccttttgatagggattgtttctggaccagtttgtctaagtcctggctcttattggttcatatgaaataatgttaacttcacttctttgtatattatgtataaattagaaaatgaaaaatgtgtgaataacattgtatgaaat

SEQ ID NO: 86554 - DNA, 452 bp, Homo sapiens
  misc_feature (1)...(452): n = a,t,c or g
gataaacactgaaaccntctgnaanctcgagaacctagtccangtcgtggaattcgcccttctctgagccctgcctcctcccacactgggtgaccccccaaccaccaccccctctcctcaggccgaccaccagcacagctaccccagctctcagcagcggcaggagaggaggcaacctgtttcttcccaaggcagcccctagccagttcctgcatccctgcctcttgctgcctccgtggcctctaaacctccagcctcccccgcccccaccccgctctttcctacagcattttaaagtgctaggtctccacttgcttcaggctgtctgcttttctccccttcagccaaacttcttgaatgtatactgcctgcagcggcctgccatctccacagcctcaacccccattctccccccacccatcaaaacctgactttgacctcccgctcctcca

SEQ ID NO: 86555 - DNA, 476 bp, Homo sapiens
  misc_feature (1)...(476): n = a,t,c or g
tggggattnnnattgatcgcgtacattagtccgngcggggaattccaaaaggagaatggcagaactaatcaagcaggagaaaaaaatatgtgtgaactctatttcaaaataatatggtcaaaggagaaaaaataatgaaaaggaatgaagaaagactacaggatttatgagacatcatcaaaagagctaacaaatgtattatagaaataaggatgagggtttttcaaaacctgatttgaaaaaaataatagctgaaagcctcccaaatctggggaaagatataaatacacactattatgaaaaggtcagaggtctccaataagattcaatctaaattatatgaagacatataatcaaacttcaagacaggattctgaaaacagcaagagcaaagaagcacattacattaagaacaatatcaataagactatctgcagatttcccaggacagaccttacaggccaggaaagggtggg

SEQ ID NO: 86556 - DNA, 576 bp, Homo sapiens
  misc_feature (1)...(576): n = a,t,c or g
aatacacttgggttcattcctcctgctatggctgtgggactaagcaggtgtaaagaagagtagccactctgtcaggggtattggctctgatcatcaggaggaggcagggttgttcttacacactgtgaacagagaaggatatatttggcacccaggtgatccatttgaatgtctcctaataattccctgcccaatttttatggtaaatggacacatgcaatttccacagtctgagaagggcacggggaccatgggctcagaaacaatcctcagggataaaggtctgttactcgaccagccaggtcactgagaacggcagacatggtggctgagactgagggtactctagaatggatagtagatgaagaagaccatgagcatcagttgtggcttcaaagccagctgcagtcatgcaggccatacaccgtcccactaccctgcctcatgttcacctccctaggaaaagggccaagccaaaccctggagaagttattcccaaatgaggggagcatcctgtgtgaagcaagcccagaattccnccgcnctgtataatggtcatcaannantgttgtctag

SEQ ID NO: 86557 - DNA, 470 bp, Homo sapiens
  misc_feature (1)...(470): n = a,t,c or g
gggcgccgngnngnntatggatagagtccatangacggngcnggaattcccctggtcccctcactcaggcctctatgggtacagacggacctctcctgcaggactgttttgacaagtgaccagttctgggccatccaggcagcatgcccagcctgagcggaggctgatggtccccacagttctcatctagagccagaacgagctccccaaccaattcagaattggagccagcaccatacatggagctagacccagcgccaagttcagaggaagagcccgtggcatcactgggtctcgcatcagctccagaggtagagtccgatccatcagcagctcccgcaccagctgcagagctacagatggccccagcactagcttcagagctacaagcagctccagaaacagctctagcaccatcagcggaggtagatctagctccagtacgaacttgaacatcacatacggagttt

SEQ ID NO: 86558 - DNA, 1877 bp, Homo sapiens
  misc_feature (1)...(1877): n = a,t,c or g
aagaaaggaaaataatttaacagaagataatccaaatctttcaatggcacagagaagacataaaagagtaagaacatggactcgtcacataaacatttttaataaagattacatctttgtacctgtaaatgagtcgtctcactggtatctcgcagtcatttgttttccatggttagaagaagctgtgtatgaagattttccacaaactgtatcccagcagtcccaggctcagcagtcccaaaatgacaacaaaacaatagataatgatctacgtactacttcgacactgtctttgagtgcagaggattcccaaagtaccgagtcgaatatgtcagtaccaaagaaaatgtgtaaaaggccatgtattcttatactagactccttgaaagctgcttctgtacaaaacacagttcagaatttacgagagtatttagaggtagagtgggaagttaaactaaaaactcatcgtcaattcagcaaaacaaacatggtggatctatgccctaaagttcctaaacaggacaatagcagtgattgtggagtatatttattgcagtatgtggaaagcttcttcaaggatcctattgttaactttgaacttccaattcatttggagaagtgggtttcctcgtcatgtaataaagaccaaacggggaaggatattcgaggagctcatcttggaaacttcatttacagcaaccagaagggcagcagtagctagttaatctgtacaaacatgacacagatgttctctaagattactggaaagcctcttaccagcatttgtgttagccagctcacagagaagaaaataacttgcagtagttttataataagtcattggaacattatttaaaatatgtaggacacattattagaattgttgggatctcatagatggaatgggaatgggggtgatatagataaacttactagatataaattaaaattttataaatatttcatatttttctgagtaaatatgattggattatgcaacagcatatgtaatatgggaatgttttgtagataataaaacttacatgatctgtacttccacgtgactgggtgctgaggggagttaaagcctccctggtgccagccccagtgcttgtcaaatttgctgacaggtcacatcatattgtaattctattctttgcagctcaagcatgcagtatgaatactgtgtattttttaaaaaaataatttagtatcaaggcttcagaaaatgccatttacggcatcccttctgtatgtaacaaaaagacattcataatgttaggaagatgataaaaattcgctcttttaaagtgcagcttattattctcaattgctaaatacgattactctgctttatttttttttcatttcttttgatgtcatatgtgagtatcttataatttagttcatttgttcagggtaaaatttgaaacaaaaaattttacctgtgcaaaatagttttttaaaaattatacatgtagctcaacttgaggtactgctatataaatattcactcacattatcacggaatttatgtatagtttctctaatatagaagataaaattggtgtcctcataactttaacaaagaaaaccctcagtcttatttattaatgggtagaattaaatatataattttatagctcagtttacccagtattcatctgcaaagccagattgctctcattgcttttatatttttaaattgtagcttttagagacctatgatcctcatggaacttaattttttattaaatattcaggtaacagttctgaattcatgtgataatggtggcattatatatggttaaccactttcagaactttctaatgttatcaggngtattttgagggaggtatgattatatggtatttcc

SEQ ID NO: 86559 - DNA, 1708 bp, Homo sapiens
ttttttttttttgtacatttatttgcatgtttattggtttaacacaggggtcgcaaactcaaatgcccacaggggccaggttaggttagcggctgaagcagtctggggagaggcaaaaagcaatggcagggaggtgggacagaggaatgtgggccccaaactatgggggcagctgctactcagtgccagctgttcgtcgccatggggggaagcgggaccagagccgccgggtcttcggctttttcaagaggacgcataactccggattgttatttgaactgtcctgactttggtaagactctgtgacggtgacagtgaaggaggccgactcatcgtcaatttcacacaagtactcgccggagtcctcgagctggacagcgggcagcaccaggcggcggacagtgtcttccttctgcaggagcagcgcggggctctccaccacctcctctccatccttggtccagcgcacctctgcccagggccggcatagctcacaggtcagcaccacacgctccaggcgcacggctgccacatacaccttgccgctgggatacacgatccacgaggagacgtctgtgatggtgacagtgaagtaggcacactcatctccagcgacgcactgaaactcgcccccgtctgagggctgggtggcgggcagcaccaggcggcgatggggcccctcattctccagcaccacgaagtcactctcctccacctcctgcccgtccttgtaccaacgcacaggggcgtcctctcggtccacctcacaggccagcatgacacactcggaagttatggcatgcacgaacacatgttctcgggggtccacgatgtgcacgggaggatcttggacagtgacgccgaagaaggccgagaccccttctgtcctgcactcaaactcgccactgtcctggactttggcctcaggcaggatcagacggtgtttgcgcccatccatcttcaccaccagcaactcgctctcctccaccttctgcccatccttgtaccaggttgccgggaagtccacccttgagagctcacaagtcagcaccacccgctctgaggttgtgaaggtcaacgacaccttgtcctgggggctcaggatgtgcaccgggctctcttggattgtgagggcagctgagtcctgcacgccgggggcagctgaagccgaccagggcaccgctgtcctggtgcttgacggcatgcaggatgagtctgtgctgcagacccttctgctctatacggtaccgcagggccccaggttccacctggccctccggctcgttactcttgagctcttccccattaaggaaccaggtaccctggatgatggtggagagatcgagggagaagacggcatcttccccgtcgtatacctgcacatcctccagacctgccaccaggcgagctgtgggcacaaggtgagcagaaccgtggaacaccacgtggggactacggccatgtccgctgactgtgcagatgcggaagcggtagtcaccctcggagggcacacagtcgcccggcacctccacggctccggctttctcgatgctgaagcactgaatccagtcttcagagcccacttcctgccgctccagccggtagatgaatggggtctcgggagctggctcgggaggcttccaggtcaacaggaccgtgttcttgtggcccttgaacatctctgccaatatgggggcggacgcgtggg

SEQ ID NO: 86560 - DNA, 401 bp, Homo sapiens
atagggggcataacatgaagcacatgtaagagatgtgcttagaaggcgtcatatgacaggatatgatagatggccgaagtctagatgactggggccagatatggtgagcatcctccagttagtatcggaatctcatgcatggagataaaaatcaagagcccccgagccccacattcctcattattggacaacacgggcatatggctttgttgggacatagtctgtgagcttatatttcaactctggacctggagaggcttataaaacttacagctaggatactttcagatacgaccttatggctatgcagaattttcatatatgagagtgggcgtgcttatttccacgaagaggaaagagaaggacttgcgacgatatgtacgcttgccattcattctcga

SEQ ID NO: 86561 - DNA, 3787 bp, Homo sapiens
ggaggcccaagacccgcgggcttgcggaccggacgcaggcggcagatttgcagcccgggatgcgccagggaacagcctgcgcccccctccctcctctccgcccgctggccgggccaactccggcttctgccgcgcgtgcctggctcggagctccgctgcggaaaacccgagcgcgggcggctccccgcctcgccgcccgggaaaatccgggggtggccgccagggatctccaagcggcctgggctgggcggccggagcttccctcccggatttgcgccccgaacctggcgccctgaagctagaggcccgtcggtccagtccttgcctcccatcttctctccgcagagcgcccagacgacggcgagatgacggccgggagccccgaagaatgcggggaggtgcggaggagccccgagggccgcgtctctcgcttgggccgccgcctgggccgccgccggcgcccgcgctccccgcccgagcctctgcgggtgcgggcgcggctgcggctgcgctcgccgtcgggggcgttcgcggcgctgggggcgctcgtggtactggtgggtatgggcattgcagtggccggctactggccgcaccgggccggggccccagggtcccgggccgccaatgccagctcgccccagatgagcgagctgcgacgcgagggtcgcggcgggggccgggctcacggcccgcacgagcggctgcggctcctcgggccggtgatcatgggcgtcggcctgttcgtgttcatctgcgccaacacactgctgtatgagaaccgagacttggagacgcgacggctccgccagggggtgctgcgggcccaggcgctccggccccccgacggcccgggctgggactgcgccctccttcccagccccggccctaggagtccccgagccgtaggctgcgcagagccagaaatctgggacccgtccccgcgtcggggtacttcacccgtcccgtcagtgcggagtctgcgttcagagcccgctaatcctcgcttggggttacctgccttgctcaacagctacccgctgaagggccccgggctgcccccaccctggggtccacggacgcagactggccatgtgatcatcaccgtgcagccgtctggctcctgcattgaacattccaagtctctggatctgggccttggggagctcctccttggggccccagcagctcgggactgtgctcaccgaagctggccacggctggaccgcctcagtcttgggggctatgccaaattgggaggaggaggggacttgggggcccgggtctgaagagaggggagacagcctgctctgaggctgcagcatggaccatgctaataggaccaaaggaccaggagtcccaacgtctaatagatgtttcagtcacatcccaggctggggatggatgctctgaccacagcagctgtgaagggcatcctgacctgcatgcgggcagagaaatgccagctgcaccagggctcagtgagctggagagggtgcgtttcactgtggggtgtggaggactcgcctcaggaatttcttcagcctctgtaagtggccttagccctaacagggctggaggtccaggccagggtgactgggagatgtacccagtgtcttggcaaacccaagaaagtggtgggcaagggcccctaagactgggaggtaggttgggatgttacaggctggggcaggctccctccaaggcggcactggtgatggagtgtggggcctctgggaagatggaccacgggatgagactctccactgccatctgggacggggactgagccttgaactcctaccacctcaatccctttcttccctcagccatctggggtatatccctctagagctacactactgccaatgccttcatactgagctctgggcccctctgcaaataagtctgagaagccccttctctccttcctttatcgtggcctatgctgcagaatctcactgcagctggcaaaaggcattggccagctctcagaaatccctttactcaacgttgaaactgcattttggtcaatgtgggtaacttactttagaaaatgacttgagtttaggtctcccccacccatatttaatttttcccaagttgctggtagaagagaaatttaaaagtggatcaatcctcacagagagagttctttttgttgttgtttattgaaaaaaatgcaatacaagaagcaagaccaaacagatatctaaacactacaaccacttctactacgaaaggccaaaacagcagacttgattattgcctgtgtagtctaaagattctgccaatctgattctgctgcccgagttcctattttttcaagaaatgtaaacaactacttgatatgattcataattttaaaaaaatttacaaagctccttcatttttgtcaccaaaataatacatttgagagagatttgtagaaacaaccagcctggggctgagatcctgggcagaaatttcccgtgagcatcaaaaggcgtcagtcaggccgcagctctggctccagttcccgaggtttgttgtctcctcacccccagctgccaagcatccccccaacacacactgatgggcccagcggtggaggggggggtggggacggggatgggtcacggggccctgacgggtcccgcagttaggctccctgagccctcggcttataaatacaggtcttgctttgtgggtgggtgccagagtcctcatgtggcttggaggaaatctttatttctcaaattaaaataaaattgcagcgagagttgttactgtggtgtgtctgagtcactctaggaaaactgttgccaagtttctgaccctggaaatgtaattctcttccccctcctcaccatttctacctggacagagtctgtttttcttcacacaaacacacatacacacaactgcagaaagaaaaaaaatccaaacaattgccaaaccccaagaactgttgccagagatggaggaaaggggaagaggcctggaaggacacccatcttgctgggcttgtccaaatctatggcttctaagagcctgaaaggcattagagctcttttcatccaatttacagacaacgaagccgagagaagtgagttggtgacagagctgagggaaacgtttaggcccccgatgaacggtcctgtgctgtgaaagctgccacactgttctagatcacacggaatattcagtgtgttagtttttaaagggacactcagtgccctctgccttttccccatcctcttcgttccacaggtctggaagccctggtagctcttcctacaggccatctggccatcaggcagtgggcatgcactacatgttcgtttgatgtaagctgcatttcttgtcaccactcctggcaacacgaccaggcttgggcactaccccaaagcccacctttcagaccctctgcccacagcctataattttgttcctgagataggacaagctctttcccctaagcctgtcccacgtcccacctgggctctttccctccctcctgttgttcatgtctcacatgggtaccaaaagaaaaatgcacacacccgaaatgagttcaaaccagccgaaacaaaactcaggcagtggagactttggacggtgttgggagaagcagctttagacatttctcttgctcactgcccttgagccccagtgactgctgcccgatacccactgtctattttaggaagctggaactgggattctaaggagccttgaggccaatgtgtttgtgggaagcagttggaaggttagagaagttctgttaaataaaaatgccccaaat

SEQ ID NO: 86562 - DNA, 447 bp, Homo sapiens
  misc_feature (1)...(447): n = a,t,c or g
atcgcattcatnacactaggccangcggtggaattcccaattctgggctccctagggaagtatctggagtccctccacttcctcttctctacccttgaacccactccagcctcagtcccacctctgccactccaccggcactgttctttccactgccacctggggcccaccgtgaagcattctcctgatcacgtctccccaggatgcttccttctcctgcaccatactgcccgcctccacctccctggccactccttcccctctccccagctgtctgctcctcagagttctgagtgtcagcttccccaggaccaacccttcacctgaactcagcttgacatccacctgcccactcgcccgctgtcccggtcacctgacacctccagcctcagaccttcaggtctggatggctccttccactactgtcacctgacagcccatttcttc

SEQ ID NO: 86563 - DNA, 450 bp, Homo sapiens
  misc_feature (1)...(450): n = a,t,c or g
ntttgagacctaaggcnatgcggggacttcaggngtacgtggaagaaccacagaaaaataagagagcttgtgtcaggcataactttaaatgttaagtgaaaaggtgagagggtgtagtgaaagaggggtcctgcacccaaaatcctagagatccagcaaaggcagcagccattaaaggttgtaatggggattgatggtgcaactgcgtagagggaaggttcagttctcatggtgtataagaaagcacatagtatctgtgagtagtctttcactactattcatggggctgggtataagcaagcaagaggaggggtcaggaggagagtcaaatgagcagggcgagggtagccaaagatggagtgagatgcagggtaggtgtcttcctaagcattagtgactgccaatgttttttagtttgtcagtaatgatagagagcttatcagtaatgtg

SEQ ID NO: 86564 - DNA, 577 bp, Homo sapiens
catagacttcatactggagagaaaccttacaaatgtgaagaatgtgacaaagtttttagtcgctaatcacaccttggaaagacataggagaattcatactggagagaaaccgtacaaatgtaaggtttgtgacaaggctttcagaccgtgattcacacctggcacaacatattgtaattcacactggagagaaaccttacaagtgtaatgagtgtggcaagacctttgttcaaaattcatctcttgtaatgcataaggtcattcatactggagagaaacgttacaagtgtaatgaatgtggcaaggtttttaatcacaaatcaaaccttgcatgtcatcatagacttcatactggagagaaaccttacaagtgtaatgaatgtggcaaggtttttaatcgaaaatcaaaccttgaacgtcatcatagacttcatactggaaagaaatcttagaagtgtaaatttgcaaggtttttaggcaacagtcaaaccttgcatgtcatcatagactttatactggagagaaaccttacaaatgtgaagaatgtgacaaaagttttcaatttcaaatcactcct

SEQ ID NO: 86565 - DNA, 482 bp, Homo sapiens
  misc_feature (1)...(482): n = a,t,c or g
tggaggagccnngnnttannnggnnaaactggagactatagnccaactgaaggtcattcgggncaacgaacaaactgacagaaatcaaaaagatgcttgaaacaaataacaatgcaaatacaacattccaaacctaagggatacagaaaaaccagtgctaagaggaaagcttatagcaagaaatgcctacttcataaaagttgaataatttcaaataaacaatttaatcatgcaactcgaggagctagaaaaggaagaacaaacccaacatcaaattagtagaaggaaagaaatagaatcagagcagactaattgaaggtagagactaaaaatacaatataaagattcaatgaaatgaacagctgcttttttggaaaaaataataaaaaatcaaattggcaaatcactacctacaccaaccaagaaagagaaaatacccaaacaaaaccagaaatcacaattgatgtcacaacatacgagat

SEQ ID NO: 86566 - DNA, 2328 bp, Homo sapiens
atggttatatcatttcagggcttggtgacatttggggatgtggctgtagatttctcccaagaggagtgggagtggctgaaccccattcagaggaacttgtacaggaaggtgatgttggagaactacaggaacctggcatcgctgggactttgtgtttctaagcccgatgtgatctcctcgttggaacaaggaaaagagccttggacagtgaagcgaaagatgacaagagcctggtgcccagacttgaaggctgtgtggaagatcaaggagttacctctcaagaaggacttctgcgaaggaaagctatcccaggcagtgataacagagagactcacaagctataatctggagtactctctgttaggggaacactgggattatgatgctctgtttgagacacagccgggcttggtgactatcaaaaacctggctgttgacttccgccagcagctacacccagctcagaagaatttctgtaagaatgggatatgggagaacaacagtgacctgggatcagcaggacattgtgtggctaagccagatttagtctctttactagagcaagagaaggagccctggatggtgaagcgagagctgacaggaagcctgttctcaggccagcgatctgtacatgagacccaggaattatttccaaagcaagattcatatgctgaaggggtaacagacagaacctcaaacactaaacttgattgttccagtttcagagaaaattgggattctgactatgtgtttggaaggaagcttgcagtaggtcaagagacacaattcaggcaagagccaattactcataacaaaaccctctctaaggaaagagaacgtacatataacaaatctggaagatggttctatttggacgattcagaagagaaagttcataatcgtgattcaattaaaaattttcaaaaaagttcagtggtaataaaacaaacaggcatctatgcaggaaaaaagcttttcaagtgtaatgaatgtaagaaaacttttacccagagctcatctcttactgttcatcagagaattcacactggagagaaaccttataaatgtaatgaatgtgggaaggcctttagtgacggctcatcctttgcccgacaccagagatgtcacactggcaagaagccctatgagtgcattgagtgtgggaaagctttcatacagaacacatcccttatccgtcactggagatactatcatactggggagaaaccctttgattgcatcgattgtgggaaagccttcagtgaccacatagggcttaatcaacacaggagaattcatactggagagaaaccttacaaatgtgatgtatgtcacaaatcctttcaggtatggttcctcccttactgtacatcaaaggattcataccggagaaaaaccatatgaatgtgatgtttgcagaaaagccttcagccatcatgcatcactcacttcaaccatcaaagagtacattctggagaaaagccttttaagtgtaaagagtgcggaaaagcttttaggcagaatatacaccttgccagtcatttaaggattcatactggggagaagccttttgaatgtgcggagtgtggaaaatccttcagcatcagttctcagcttgccactcatcagagaatccatactggagagaagccctatgaatgtaaggtttgtagtaaagcgttcacccagaaggctcaccttgcacagcatcagaaaacccatacaggagagaaaccatatgagtgcaaggaatgcggtaaagccttcagccagaccacacacctcattcaacatcagagagttcacactggtgagaaaccctataaatgtatggaatgtgggaaggcctttggtgataactcatcctgtactcaacatcaaagactgcacactggccaaagaccttatgaatgtattgagtgtggaaaggcattcaagacaaaatcctcccttatttgtcatcgcagaagtcatactggagaaaaaccttatgaatgcagtgtgtgtggcaaagcctttagtcatcgtcaatcccttagtgtacatcagagaatccattctggaaagaaaccatatgaatgtaaggaatgtaggaaaaccttcatccaaattggacaccttaatcaacataagagagttcatactggagagagatcttataactataagaaaagcagaaaagtcttcaggcaaactgctcacttagctcatcatcagcgaattcatactggagagtcgtcaacatgcccctctttaccttccacgtcaaatcctgtggatctgtttcccaaatttctctggaatccatcctccctcccatcaccatag

SEQ ID NO: 86567 - DNA, 2762 bp, Homo sapiens
tggtcagactggagataaattttgaagggagcaccaacaggactttgtttaaaaaattagtgcaggggctgggcatggtggctggtgctctcccccaactttcatactggaacaagagttaggctcaggtttacatgatcctctactattcttttgtgaagaatgacaactgagtcagttggttgagcttgaagtgttccagtcctaagggattcactctcacttaatgtcatatattggtaaggtgcctacatgaggtcagtgtttgtggctacatataaagaccaatgatgaaatgaggaattatttttttttcttttaataagggatggggtcttgttatgttgcccatgctggactcaaactcccagactcaaattcctgggcttaagctattctcctgcatcagcctcccaaatagctgggactacaggtgcatgccaccacacccagctagaggcaatgattcttaaagtctccgctggctatctaggactcttattaaatatcctgttactttaaaaaggccatccaaatatattttcttgaaagaaacatttatttatgatctttattggtgaaataatttcaaacaaatccagaacaggttctcacactttgagcctttagtgcaaaaacactatgccatgcgggaaataaaatgcttatccagtggagcgctcccctgatgcattgaaatattaggatactcaagcagaagacgacttatgtgacagaaatctgctcataaatctgcttgaaaaagggcatgataaacctcatattaaggtttctcacaacataaatatgcttaagcaacttaattccaacttaatttcaaaacaccccaggaatcaactatccctttaaataaaaaaaataatcaatttatattcttcttaaaagaactccaacaatttaaaataagttccaattccatatatatatatatatatatatatatatatatatatatacacacacacacacacacacacatttataacttaggtgctcttttgcgctatatactttaattcatgcaaaagtgatagaggactggacttgaggctctacagaggcctttctgagaaagctgtgtagctccttactctggcgaagaacaagggggtgtacatcttgtcaatctcaaaagcactgactgcagtctcaccagttgatttgtaagtaatgtgacaagaatgatgtatccagatgagtttgttgaacctctggtgaccactggaacatagctgtagccccacatgaaaactctgatctgcttcttgtacagggacacgacgaaaatatctgtatttatagtcaagtggtttttcttcttttttcttagttattacagcaaatactttggtctgattgtctgtgtcttgtgacaagcgatagtgacccagtagaattgcatcagtcctggtattcctagttcttaaacgtggaacaatggactgaggctcttcaggggttgtcaacatcatcacatggccatcaggaaagaatcttatgtacctgtaatattccacttggtgccaggctctatagaaaccatcaagagactgttccccttgacgaatatatgtggttttactgatatacacgccatcaaaccgaacacgaggccgttctaaaaacatctctctccaggacgtgtacggaacaagtttaatacagcttctgccccaaactttcaagcaggccagacgccatatttcagggtctctggcacagatgtagaatcctctgcacaccagcgacaactgctccaatgatctgaggtccaagtcactagacaccacccatcggaagatgtacatcaggacctccattggcagcactgatatgtgaatctgactgctctcaagctcaggctgacacagtttaagcacagactcctgaaatgtgagttgctgctggaagtaggacaagagatctgccattttgctgtcatcatcattatcttcaatgtagctgtttccaacgccatcaccatctggagaccgggtataagtaatcttgaactctatatcaggtacaagttgcatagccctacgataaaacttgatggcttcatagagagctccattttgttcttcttctactgcttttaggaagagttctcgagccttttcttcttttgcctgttcttgttttcctttggtatctgccgatgttttctggagagagcctcttgctgctctgcaaggtcgattttctaaattgctagagcttacacctggagcaagttcaaacatccactgagctcggaacatctggagttgtgcctgcagatctgtttcagcaggactttcattttcttcatcatcatctgctctgacagtatcagaatgacaatcttcctcagcttctgccatgctggcggggcggcctgctgcgctcgaggggctctccgtgccccctctgcaccgccccccggaggaggggtgctgggtgtccgggtgtctactcctgcctgtctctgcagcggagcttagcagagttctcggtcggagaagcgcaccaggcagcggcaataactgcgggcccggcgtacggcagccatcttcgcggggcagggggccagatcggggcgcgctggggtggcggcggctgccggggactcggggagtggagggacgcccgttgccagccgaggcgggggattgtgcgagcaccggagcgtcagccctactggagaccccggacgccgccgcggagctgccccctcagctgcggaaacctgcgccgac

SEQ ID NO: 86568 - DNA, 933 bp, Homo sapiens; identical to SEQ ID NO: 65485

SEQ ID NO: 86569 - DNA, 845 bp, Homo sapiens
gcgaccttactaaacataagataattttttctggagagaatttttacaaatgtgaacaatggggcaaaggctttaactggtcttcaacccttacaaggcgtaaaagaattcctactggagagaaaccctacaaatgtgaagaatggggcaaagcctttaatgtgtcttcacaccttactacacataagatgattcatactggagagaaaccctacaaatgtgaagaatgtggcagagcctttaaccaatcctcaaaacttactacacataagataattcatgctggagagaaaccttacaaatgtgaagaatgtggcaaagctttttaccgattctcataccttactaaacataagataattcatactggagagaaattctacaaatgtgaagaatgtggcaaaggctttaattggtcctcgacccttactaaacataaaagaattcatactggagagaaaccctacaaatgtgaacaatgtggcaaagcttttaatgagtcctcaaaccttactgcacataagataattcatactggagagaaaccctacaaatgtgaagaatgtggcaaagcctttaaccggtccccaaaacttactgcacataaggtaattcattctggagagaaaccctacaaatgtgaagaatgtgggcaaagcttttaaccgatcctcaaatcttactaaacataagataattcatacaggagagaaatcttacaaatgtgaagaatgtggaatctgccgcacgccgaaaatggcggtgttcagccaatgccaccaggtactcaagatcacgaatattcattatccatcctccatcgccacgatagttcatggcgatag

SEQ ID NO: 86570 - DNA, 761 bp, Homo sapiens
  misc_feature (1)...(761): n = a,t,c or g
tttttttaaatacatgcagtttattctatatcactttataacttaataaagctgtttaagaaaaatgttagtaagctgaatctggcaacgtacaaaaaggattttgtaaaatgaccaaatggaatatataccaagaatgaaagattggttcaacactgaaaatcagtataataaaaaacaaaaactatgtgactatttcaatagatgcagcaaaaggcatttagcaaaaccaacgtctattcatggcaaaaactctcaacaatctaggaataaaagggaatttcctcaacttgataatgggcatttttaaaaaaccctagctaacatcctacagaatggtgaaagactgagtgtttttcccctataataggaaacaagcaagggtgtctgctttcaacacttctgttcaaagttgcactggatgttctagccggttctgttccacgttgcactggatgttctagccggttctgatccacgttgcactggatgttctagccggttctgatccacgttgcactggatgttctagccggttctgttccacgttgtactggatgttctagccggttctgttccacgttgtactggatgttctagttggttctgttcaacattgtactggatgttctggctaatactgttcaacgttgcactggatgttctagttggttctgttcaatgttgtactggatgttcgganttccnccgcncttgcggatgtntcagtctccattttnnnnggcccgcccttacagacc

SEQ ID NO: 86571 - DNA, 823 bp, Homo sapiens; identical to SEQ ID NO: 68529

SEQ ID NO: 86572 - DNA, 3116 bp, Homo sapiens
gagaaaacgatttctgtttccagtagtaaaagtggaccagtcatagccaagcgagaagttaaaaaggaagtaaatgaaggaattcaggctctctcaaatagtgaggaggagaagaaaggggtggcagcatcgctgcttgctcctttattgcctgagggaataaaagaagaagaagagagatggagaagaaaagtaatttgtaaagaggagccagtttcagaagtaaaagaaacaagtacaacagtagaagaagcaacaacaatagtaaagccacaggaaattatgttggacaatatagaagacccttctcaggaggatctttgcagtgttgtccaatctggagaaagtgaggaggaagaggaacaagatacccttgaactggagctagttttggaaaggaaaaaagcagagttgcgagccttggaggaaggagatggtagtgtgtcagggtctagtccacgttctgatatcagccagccagcatctcaagatggaatgcgtaggcttatgtctaaaagaggaaaatggaagatgtttgttcgagctaccagtccagaatctaccagtaggagttctagtaaaactggacgagatactccagaaaatggagaaactgcaattggtgctgaaaattcagaaaaaatagatgagaattcagataaagagatggaagtagaagaatctccagagaaaataaaagtacagacaacaccaaaagtagaagaagaacaggatttgaaatttcagattggagaactggcaaataccctgacaagtaaattcgagtttctaggcattaatagacaatccatctccaactttcatgtgctgctcttacagactgagactcgaattgcagactggcgggaaggggctcttaatggaaactaccttaaacgaaaacttcaggatgcagcagaacaactaaaacagtatgaaataaacgccactcctaaaggctggtcctgccactgggacagggatcatagacggtatttctatgtaaacgaacagtcgggcgagtctcagtgggagtttccagatggtgaagaggaagaagaagaaagccaagcacaagaaaatagagatgagactcttgccaaacagaccttgaaagacaaaactggcactgattcaaattcaacagaatcctctgaaacttccacaggttctctttgtaaagaatccttttctggtcaagtttcttcttcatcactcatgccacttactccattctggaccctccttcagtcaaatgttcctgtgcttcaacctccattacccttggaaatgccaccacccccacctccacctccagaatcacctccaccccctcctccaccacctcctcctgcggaagatggtgagatccaggaggtagagatggaggatgagggaagtgaggagccccctgccccaggaacagaggaagatacccctttgaaaccttcagcacaaaccacagttgtaactagccagagttcagttgattccaccatctctagttcttcttccactaaaggaataaagaggaaagctacagaaattagcactgcagtggttcagaggtcagctaccattggcagttctccagttctctatagccagtcagctatagctacaggtcaccaggcagcagggattggaaaccaggcaacaggaattggacatcagacaataccagttagccttccagcagcaggaatgggtcatcaggccagaggaatgagcctgcagtcaaattaccttggactagcggcagcacctgcaattatgagttatgcagaatgttctgtcccaattggagtgactgctccctcattgcagccagttcaggcccgaggtgctgtgcctaccgctaccattatagaaccaccaccaccacctcctcctcctcctcctccaccaccaccagctcccaaaatgccaccacctgaaaagacaaaaaaaggaaggaaagacaaggcaaagaagagtaagaccaaaatgccatctttggtaaaaaagtggcagagtatccagcgtgagttagatgaagaggacaattctagttccagtgaagaggatcgggaatcaactgcacagaagcgaattgaagagtggaaacagcagcagctggttagtggcatggcagagagaaatgctaattttgaagcccttcctgaggattggagagcaaggctgaagagaaggaaaatggctccaaacacatagtttttaagtttttaaaacttttttgtattattgtttgttttgtgttcagttcaaagtcttaaccagttttattgtcaaataaactataaatgttatgggggagatcttataaatttcctgggcaagagtgtatgcatacaaagttttcacttttgtgaaatgtaatttttctgtttttgcaaagggatgaggtgattggaattgctttgaccatgctgcctttattctcaaactggcaaacttagcatgttaggtgtattaacctcatcagtcttgaagaacatgtggctcatgagtataacacttctgtagaggactccctgacaaaagtgaagaattaacttctcctccagaacaagtgcaattcagaaggcagctctgcattctaccttgcttgactggaattgtctgaagctttttctggcctcttttctctagtcggccacccctgaagtgctgaggtctaagtggtttacctcgtgctgatagatggccacactctttagagtagttctcataagttctagaactggtagctcggtcgtttcgcacactaggtggcatacaggcagcagcaggtgttcatatccttgattttgagaatttcccctcaagtatgtggcagtaaatacaacaagacactctatgtattaatgtctccattgtcttaaccctgttccaaaacaaaattcacctcctttctttatgtgaatgtattctccataaaattccagtatttaaaaagcagtttactgttctgtactttctgttgtatcacaatcaggtaaaagtcactttaaactgaggaaacggcaaattgtgttttaaagctctttgtatttctccagtttctgaccttgtaaatttgtatatatgcactaataaagctttttttataatcc

SEQ ID NO: 86573 - DNA, 488 bp, Homo sapiens
  misc_feature (1)...(488): n = a,t,c or g
agcgggccggnnngnaattgactgcgtacataggccagngncgnggaattcatcaaataaaaatagatttctaaaaaaaagtatcataaaagataaagaagggcactttagaagaagaaaaggaataattgatcaagatgacataaaatttacaaatttatttgtgcctaataatagtctcaaattacataaggcaaaaactgatagaatgaaaggaagaaataggcaattataattggaaattttaatgtctctcagaagttgatagagtaaccaacaaaaaatcagcagacagaaaacctgaacaacattatcagtcactttgacctaattaatatttttagaacatttcactcagcaatagcaaaatgcacattcttttcaagtgcacatggaatgcttaccaagatagaccacattctggaccataaaaaagttttaataaatattaaaaaggttgaaatcaaatagtttggtctctgaccaca

SEQ ID NO: 86574 - DNA, 2529 bp, Homo sapiens
ttcgatgtgggctcagagaagacacgaattggtcttgcacagtatagtggtgaccccagaatagaatggcacttgaatgcatttagcacaaaagatgaagtgattgaagctgtccgaaacctcccatataaaggaggaaatacactaacaggtcttgctttgaactacatttttgaaaatagcttcaaaccagaagcaggatcaaggactggagtatccaaaattggcattttaatcacagatggaaaatcccaagatgacattattccaccatctagaaatcttcgtgagtctggtgtagaactgtttgccataggggtgaaaaacgcggatgtgaatgagctgcaggagatcgcctctgaaccagacagcactcatgtgtacaatgttgccgaattcgatctgatgcacacagttgtggagagtctgaccaggactctctgctctagagtggaagaacaggacagagaaattaaagcctcagcccatgccatcactgggccgcctacggagttgattacttctgaagtcactgccagaagctttatggttaactggactcatgccccaggaaatgtggaaaaatacagagttgtgtattatcctaccaggggtggaaaaccagacgaggtggtggtagatggaactgtatcttccacagtgttgaaaaacttgatgtctttaactgaatatcagatagcagtctttgcaatctatgcccacactgctagtgaaggcctacggggaactgaaactacacttgctttaccgatggcttctgaccttctactgtacgacgtgactgagaacagcatgcgagtcaaatgggatgcagtgcctggggcctcaggttacctgatcctttatgctcctctaacagagggcctggctggggatgaaaaagagatgaaaattggagagacccacacagatattgaattgagtgggttgttgcccaatacagaatacacagtcacagtttatgccatgtttggagaagaggccagtgatcctgttacgggacaagaaacaacattggctttaagtccaccaagaaacctgagaatctccaatgttggctctaacagtgctcgattaacctgggacccaacttcaagacagatcaatggttatcgaattgtatataacaatgcagatgggactgaaatcaatgaggttgaagtcgatcctattactaccttccctctgaagggcttgacacctctcacagagtatactattgctattttctccatctatgatgaaggacagtcagagcctctgattggagtttttaccaccgaggaagttccagcccagcaatacttagaaattgatgaggtgacgacagacagttttagggtgacctggcatcccctctcagctgatgaagggctacacaaattgatgtggattccagtctatggggggaagactgaggaggttgtcctgaaagaagagcaggactcacatgttattgaaggcctggagcccggtacggagtatgaagtttcactattggccgtacttgatgatggaagcgagagtgaggtggtgactgctgtcgggaccacacttgacagtttttggacagaaccagctacaaccatagtgcctaccacatctgtgacttcagttttccagacgggaatcagaaacctagttgtaggtgatgaaactacttctagcctgcgggtaaaatgggacatttctgacagcgatgtgcagcagtttagggtgacctacatgacagctcaaggggaccctgaggaagaagtcataggaacggttatggtgcctggaagccagaacaacctccttctgaagcctctgcttcctgatactgaatacaaagtcacagtgactcccatctacacggatggcgaaggcgtcagcgtctccgctcctggaaaaaccttaccatcctcggggccccagaacttgcgggtgtccgaggaatggtataaccggttgcgcattacgtgggaccccccatcttccccggtgaaaggctatagaattgtctacaaacctgtcagtgttcctggtccaacactggaaacgtttgtgggagctgacattaacaccatccttatcacaaacctcctcagcggaatggactacaatgtgaagatatttgcctcccaggcctcaggcttcagcgacgccctgacaggcatggtgaaaacattgttcttgggtgttaccaatctccaagccaaacatgttgaaatgaccagcttgtgtgcccactggcaggtacatcgccatgccacagcctatagggttgttatagaatccctccaggataggcaaaagcaagaatccactgtgggtggagggacaaccaggcattgcttctatggacttcagcctgattctgaatataaaatcagtgtttatacaaagctccaggagattgaaggacctagtgtgagcataatggaaaaaacacaatcacttcctacacgaccaccaacttttcctccaaccattccaccagcaaaagaaggtaaaagaataatagaa

SEQ ID NO: 86575 - DNA, 479 bp, Homo sapiens
  misc_feature (1)...(479): n = a,t,c or g
cggacgacaaatggagacccatccgatcgagcactctaggccagngcggnggaattccgcgtgaaggaggagagctcattacttttcggggaatcctgagaacaggaccagtcgttggagaaccaaccaacaatgatggtgatgactcggaaggcacctgacatcacctggggacagctaaagaaattgaatcaacaagcatctatccagcttgccgccgtggaagcccctgcaactgcagacaatcggtttcttacatatctggtggcaattggggaaacttctgagaaagtaagacagacatggatgttggggtggcaggtaattcttgtcctttgctaagtgggatcagcttaaggacatgtttattggagtcatgttctaaatccccctgtttttaatgttattacatggtgggatgctgacccgcctttgtcatctaatgatacttcttgggcaggaggccgatggatgcctct

SEQ ID NO: 86576 - DNA, 364 bp, Homo sapiens
ctactgacctcaaacaaacgccaaggtgcacccgactcgtgcagacaagtttgccgttactgccctgcgcagccaggcgtacgcttattaaacccgcgccgaggccctgttcaaatatgaggtgggcgacccttggacccaaaggttctttgagtcctttggggatctgtccactcctgatgctgttatgggcaaccctaaggcgaaggctcatggcaagaaagtgctcggtgcctttagcgatggcctggctcacctggacaacctcaagggcacctttgtcacactgaatgagctgcactgtgacatgctgtacgtggatcctgagaactaaggctcctggcaacgtgctggtctgtgtgta

SEQ ID NO: 86577 - DNA, 3846 bp, Homo sapiens
aatataataccaagagaagaaaagcctattgaggatgaaattgaaagaaaagaaaatattaagccctctctgggaagtaaaaagaatttattagaatctatacctacacattctgatcaggaaaaagaagttaacattaaaaaaccagaagacaatgaaaatctggatgacaaagatgatgacacaactagggtagatgaatccctcaacataaaggtagaagctgaggaagaaaaagcaaaatctggagatgaaacgaataaagaagaagatgaagatgatgaagaagcagaagaggaggaggaggaggaagaagaagaagaggatgaagatgatgatgacaacaatgaggaagaggagtttgagtgctatccaccaggcatgaaagtccaagtgcggtatggacgagggaaaaatcaaaaaatgtatgaagctagtattaaagattctgatgtcgaaggtggagaggtcctttacttggtgcattactgcggatggaatgtgagatacgatgaatggattaaagcagataaaatagtaagacctgctgataaaaatgtgccaaagataaaacatcggaagaaaataaagaataaattagacaaagaaaaagacaaagatgaaaaatactctccaaaaaactgtaaacctccggcgcttggcccaaacccaccatttcagacaaatcccatctcctggaaatggtatcccaaactggatctcactgatgccaaaaactctgatactgctcatattaagtccatagaaattacttcgatccttaatggacttcaagcttctgaaagttctgctgaagacagtgagcaggaagatgagagaggtgctcaagacatggataataatggcaaagaggaatctaagattgatcatttgaccaacaacagaaatgatcttatttcaaaggaggaacagaacagttcatctttgctagaagaaaacaaagttcatgcagatttggtaatatccaaaccagtgtcaaaatctccagaaagattaaggaaagatatagaagtattatccgaagatactgattatgaagaagatgaagtcacaaaaaagagaaaggatgtcaagaaggacacaacagataaatcttcaaaaccacaaataaaacgtggtaaaagaaggtattgcaatacagaagagtgtctaaaaactggatcacctggcaaaaaggaagagaaggccaagaacaaagaatcactttgcatggaaaacagtagcaacagctcttcagatgaagatgaagaagaaacaaaagcaaagatgacaccaactaagaaatacaatggtttggaggaaaaaagaaaatctctacggacaactggtttctattcaggattttcagaagtggcagaaaaaaggattaaacttttaaataactctgatgaaagacttcaaaacagcagggccaaagatcgaaaagatgtctggtcaagtattcagggacagtggcctaaaaaaacgctgaaagagcttttttcagactctgatactgaggctgcagcttccccaccgcatcctgccccagaggagggggtggcagaggagtcactgcagactgtggctgaagaggagagttgttcacccagtgtagaactagaaaaaccacctccagtcaatgtcgatagtaaacccattgaagaaaaaacagtagaggtcaatgacagaaaagcagaatttccaagtagtggcagtaatttcagtgcttaaataccccttccttacttacacctgaatcgccttcatcagtcactgtaacagaaaggcagccggcagcagtcttctgtaacagtatcagaaccactggctccaaaccaagaagaggttcgaagtatcaagagtgaaactgatagcacaattgaggtggatagtgttgctggggagctccaagacctccagtctgaaagggaatagctcgccagcaggttttgatgccagtgtgagctcaagcagtagtaatcagccagaaccagaacatcctgaaaaagcctgtacaggtcagaaaagagtgaaagatgctcagggaggaggaagttcatcaaaaaagcagaaaagaagccataaagcaacagtggtaaacaacaaaaagaagggaaaaggcacaaatagtagtgatagtgaagaactttcagctggtgaaagtataactaagagtcagccagtcaaatcagtttccactggaatgaagtctcatagtaccaaatctcccgcaaggacgcagtctccaggaaaatgtggaaagaatggtgataaggatcctgatctcaaggaacccagtaatcgattacccaaagtttacaaatggagttttcagatgtcggacctggaaaatatgacaagtgccgaacgcatcacaattcttcaagaaaaacttcaagaaatcagaaaacattatctgtcattaaaatctgaagtagcttccattgatcggaggagaaagcgtttaaagaagaaagagagagaaagtgctgctacatcctcatcctcctcttcaccttcatccagttccataacagctgctgttatgttaactttagctgaaccgtcaatgtccagcgcatcacaaaatggaatgtcagttgagtgcaggtgacagcaggacttgctaaagcactttgcacttaatggctgttgagggccactttttttttatactgcacagtggcacaaaaaaatatcagacaagcactattttatatttaaaaattgtttcttgacaagctgacttggcacttaagtgcacttttttatgaagaaaaagtacaatgaactgcttttcctcaagcaataattgtttccaacttgtctgggaattgtgtgtctggtaactggaaggccttccactgtggcaaatggaggcttttcactgcctgtagagacaatacagtaagcatagttaaggggtgggtcagaacatgttaagataacttactgtatatgtattcccttgtattttgttaaagctggaacatttgatatttttccatttatttatgaaaaaatatgaacctattttcatttgtacaaggtaattgttttttaaagcaagtcaccttagggtggctttaattgtataagtcaagcacatgtaataaattcaaaacctgcagttaacaggatattagacatcaatcctggtaaccaaatattaaagattctctttaaaaaagactgaacatgtttacaggtttgaattaggctaaaaggtcttgcagtggcttttcatggcccttcaaattggaatggaactactgtactttgccatttttctataaatcagtatttttttttaattttgatatacattgtgtgaaaaaagaaaatggctaataaactgtattaaatcttaaacaatgtataaagattgtacttagccagttcaaagtgtatatttattcataatgaattataacagttatatttttgtgttttcttgtaaatgtttcttttcccttaaataccagataattcatttgtattgcttattttattatgagctacaacaaaaggacttcaggaacaagtaatgtattagtatggttcaagattgttgataggaactgtctcaaaaggatggtggttattttaaatataaatagctaatgggggtggtaggcctataaaattaaatgccttgtataaaatccaaaatgaatgcaaaattgttttcacttgtattgactttatgttgtatgattccaatctctgttctgtttggcacttgtatttaattcttcacctttgtaagacatttgtatattgtgcatgtgttcattcaagctatttaatatctggcactgttaatacacagtactttattgt

SEQ ID NO: 86578 - DNA, 463 bp, Homo sapiens
  misc_feature (1)...(463): n = a,t,c or g
nattgaaacctcgtagaccctagtccagngtggnggaattcagtggacagctgagctactgagttctagaaggcaccgggcattggtggggcagagcctcacgtggacccacgtggggaaagaagcagaggctccgtcacggggagttgtcgtgaccttgaacttggcatcatctttgaagaagctgaagggaaagaaggaatgacagagggagtgcctttccatccacatcggtcaagctggcatccagattggggacgcctgctgggaactctattgcctggaacatggaatccagccaaatggcgttgttcttgacactcaacaggatcagctggaaaatgcaaaaatggagcacacaaatgcatctttcgataccttcttctgtgagacaagagctgggaagcatgtgcctagagcactcttcgtggacttggagccaactgttatagatgggatccgg

SEQ ID NO: 86579 - DNA, 463 bp, Homo sapiens
ttcgcagaccctagtcatagaggagcaattcctttcttgaaaccctctgacctctgagatttgctcccctctcaggccaagacttcttactcttcacagaccggcttcttcctgctgcccctgaaaccatgatgttacccagggttccagcctcagctctccttctgctcatggccttccctctcctgggtgatgccaagcacccccagggctttgacacccagctgtctggggattcttccccctctcctccacactgtccctccagcctggactccaatcaatggcagcctgccagacacctccgtctgggtattccacaccacgttcaaaatgcaattcttccctcggagactcactcttccccctgtctccaactcatcttccaaggtcccccaggcctgaagcagatgcatctcagacctcctccccacctcacccagttggtcaccgaggtctgcta

SEQ ID NO: 86580 - DNA, 493 bp, Homo sapiens
  misc_feature (1)...(493): n = a,t,c or g
nctcgatcacagtccgtgtggtggaattcccggngagctcatgcccaggggtgtggggcctccagggctactatggcccatctgtccgtgaacagaaagggccttgccctccagcttgagctgggtgcctgtggacagaagcaggactttggccaccactggcaccagaaccctcagcaccagctgctaggggtgagggtcgggtgcccccaggtcaaggtggcctgagcctgcccacccaaggacagggacataagaatctggacaatcctgccagcctgaagggagggcagccaccctggagcagcccaagtgctcctgagtccttgccacctcccctctgcccacagggcagaccgcagcagagaccccaggccagcccccggagtctgcaaatgaaaggagctgtgggagcccaggtctgccaaggagctggagtctgcagtgtggactccaccagaggccaatgggaggtgggttcagagctggctga

SEQ ID NO: 86581 - DNA, 1591 bp, Homo sapiens
  misc_feature (1)...(1591): n = a,t,c or g
ggaattcccaccgttcccgggctgtgacccattctcgggacactggtggataagaatggtgtctttggagtccgacgcctggattcacgtcctggctagtcgcgtgaaccttggtgctctcatctgtgcagngggaataatgcaggttctgggcagggatgggaagagtgaatgcgctggtacgggacctgatgcccagaaccctggacgggcagatcaccatggagaagacgcccagttacttcgtcacgcgggaggcccccgcgcgcatctcggccatgtccaaggacaccaagctcatcgtggtggtgcgggacccggtgaccagggccatctcggactacacgcagacgctgtccaagcggcccgacatccccaccttcgagagcttgacgttcaaaaacaggacagcgggcctcatcgacacgtcgtggagcgccatccagatcggcatctacgccaagcacctggagcactggctgcgccacttccccatccgccagatgctcttcgtgagcggcgagcggctcatcagcgacccggccggggagctgggccgcgtgcaagacttcctgggcctcaagaggatcatcacggacaagcacttctacttcaacaagaccaagggcttcccctgcctgaagaaggcggagggcagcagccggccccattgcctgggcaagaccaagggcaggacccatcctgagatcgaccgcgaggtggtgcgcaggctgcgcgagttctaccggcctttcaacctcaagttctaccagatgaccgggcacgactttggctgggatggataaccatataatttaaaaagaaaaaaaaaaatcaaaatataatatatttttttaccaatcggtagagaagagacagtttaatatttgtgctgaaaatatgtttcagtatttttttcaatgaatgttaagagattgttctcactcccgccccatcttaatgtataaccaacaccaaacacggtggatcaacagaaaaggaaaatttcactcgtctaaacactttcaattttcagtttttattttatgttctatatacccagtcataaagtataagcatcagttgtcattaaaagttttcagaaaatcttgaggttaaacatctctctctctttttttaaaatacaaggccctgataaaattgatatctatccttatatttttctccctttttcccgtgccactttttcttaaattatttcccagttagtattatcatatgtttgtacccgtcacagttttcatagtgctttcaaatacacctttttgatcattaaaataaaaaaataaatcttgctctgttgtataagatcacaataggtaaatattattatccccattttacagaaaggaaaactgagtctttgggaggtgaaataatgtatctaaaggtcaaatgttggatggaccctgggacaaaattccatcttccacttgttccctatttcatgtcactttttccggggagaatgggaaaaggaaggacatctgcacctttaggaaatgggttagggtagtttttcaggatggatatggaaaagggggaaaggaggagccccttgtttttctta

SEQ ID NO: 86582 - DNA, 1454 bp, Homo sapiens
ttttttttttttatggtgggcaggatcaccagaaagcttttattttaacccagggccagggaggccgaaggcttcaatcctgctgcttggttcgggaggcctctgcattggcccggagcacagcccctggggatggatacggccgctgctggaagaggggcccagctcgctcgtggtgtcagcgccagtcttggcctcattccgcttggggagtcctgttgaccaaagtgccccgggggggcgtctgagtatgagccagggtccatgggggtctaactcttcatcctttcggcttactgccttcttgctcttggggataggggagccagctccttcccgggcgatgggtgggcgccgtttcttttgccctttttcccggtctgccttgtcatacccgcggtcccgatcccgtttccctgtctcgctctctctctctgtctaccttgtcataagcaacgctctcgatccctgtcagacttgtcgtgggccccggtctgacttgtcgtggcccctgtctagtttctcatggctgcggtccgacttgtcatggcccctgtccgacttggcatggcttccgcccaacttttcttcagcatctgcattactgcttctgagcttcttggccgatttggtaaccacggagttggggtcatgtggggagagccaggatacaaggtctgtgtctgcattccagtagtaagggagccccgcaggaaagggtcgaacaccttgtaccagcttggtggtaggccctccaaacctggtggcctcgtagtccacaggatcatcgtcatagtcctcggcaatgatctcttcctctggttcaggctccagatgtttgaggatgcctctcttggccaagcgggtctgcagcgcaacgggcagcggcatagctgatagcagacagacctagggacagacgaacaaactgacaagcagctcagataaagattcctatctggatcccgtaaccaagcgcctcccgtaaacatgtactcatctgactccgatctactcaaatgaaccagtagctgggtggacagaacatacgccctaaaagatgtaagaggtaggtggcaatatcatcgcaactcccaccaaccctactgtccccgaaaccaggtgctccagggccctgttcctctcccaggcccaggctccgcccacagcctaagaagcccggcccctccgcacttcagaaatgggctcatccagcgtccccatgactgccgggtgggagaaaccaaagcgctgggatgggggagcagagggcagcacttcctccagctccaaaagagtgcacccaccccaccgttgccaatacactcgtgcaggtagtggaaggctgtcacaccgcccgtctctctagtgtcgccgctacgacacctgggcccacacgactctcttcccaaaacacagaatgagaccttctctcaacgaggcccacgcgtccg

SEQ ID NO: 86583 - DNA, 491 bp, Homo sapiens
  misc_feature (1)...(491): n = a,t,c or g
gagcggtgnnnnnnccatcgactcgcctngcattggngcaattcctattatccagcctacagtaactatgcaacaaaaacaccaaggaacgttggtaggcatttctcttttggctgtcttctaaacaggtacttcagggctgccacaggttcacaggtgcagtggctgatgggaacttcaggttccaggtccggggcttcaggtatcacagacttgatccttgaaaggtgtatccaactatctaatcccagtactttgaccgcagaaggcgtggccagtatcactgaaaacggtgcctttccattggggttgtaattgttgaggaggtgacccctccgtccatgctttaacaagcaccttatctgctggcctgatttgaggtggctggttagcttccagtaccggaagccttttgagtncanacttctgtgtaaacctgctgacattgtcctaggttaactaggtattttactaaaccagctgtttctgan

SEQ ID NO: 86584 - DNA, 1979 bp, Homo sapiens; identical to SEQ ID NO: 66853

SEQ ID NO: 86585 - DNA, 4279 bp, Homo sapiens
caagtctataagggtcgacatgttaaaacgggtcagttggcagccatcaaagttatggatgtcactgaggatgaagaggaagaaatcaaactggagataaatatgctaaagaaatactctcatcacagaaacattgcaacatattatggtgctttcatcaaaaagagccctccaggacatgatgaccaactctggcttgttatggagttctgtggggctgggtccattacagaccttgtgaagaacaccaaagggaacacactcaaagaagactggatcgcttacatctccagagaaatcctgaggggactggcacatcttcacattcatcatgtgattcaccgggatatcaagggccagaatgtgttgctgactgagaatgcagaggtgaaacttgttgactttggtgtgagtgctcagctggacaggactgtggggcggagaaatacgttcataggcactccctactggatggctcctgaggtcatcgcctgtgatgagaacccagatgccacctatgattacagaagtgatctttggtcttgtggcattacagccattgagatggcagaaggtgctccccctctctgtgacatgcatccaatgagagcactgtttctcattcccagaaaccctcctccccggctgaagtcaaaaaaatggtcgaagaagttttttagttttatagaagggtgcctggtgaagaattacatgcagcggccctctacagagcagcttttgaaacatccttttataagggatcagccaaatgaaaggcaagttagaatccagcttaaggatcatatagatcgtaccaggaagaagagaggcgagaaagatgaaactgagtatgagtacagtgggagtgaggaagaagaggaggaagtgcctgaacaggaaggagagccaagttccattgtgaacgtgcctggtgagtctactcttcgccgagatttcctgagactgcagcaggagaacaaggaacgttccgaggctcttcggagacaacagttactacaggagcaacagctccgggagcaggaagaatataaaaggcaactgctggcagagagacagaagcggattgagcagcagaaagaacagaggcgacggctagaagagcaacaaaggagagagcgggaagctagaaggcagcaggaacgtgaacagcgaaggagagaacaagaagaaaagaggcgtctagaggagttggagagaaggcgcaaagaagaagaggagaggagacgggcagaagaagaaaagaggagagttgaaagagaacaggagtatatcaggcgacagctagaagaggagcagcggcacttggaagtccttcagcagcagctgctccaggagcaggccatgttactgcatgaccataggaggccgcacccgcagcactcgcagcagccgccaccaccgcagcaggaaaggagcaagccaagctttcatgctcccgagcccaaagcccactacgagcctgctgaccgagcgcgagaggtggaagatagatttaggaaaactaaccacagctcccctgaagcccagtctaagcagacaggcagagtattggagccaccagtgccttcccgatcagagtctttttccaatggcaactccgagtctgtgcatcccgccctgcagagaccagcggagccacaggttcctgtgagaacaacatctcgctcccctgttctgtcccgtcgagattccccactgcagggcagtgggcagcagaatagccaggcaggacagagaaactccaccagcagtattgagcccaggcttctgtgggagagagtggagaagctggtgcccagacctggcagtggcagctcctcagggtccagcaactcaggatcccagcccgggtctcaccctgggtctcagagtggctccggggaacgcttcagagtgagatcatcatccaagtctgaaggctctccatctcagcgcctggaaaatgcagtgaaaaaacctgaagataaaaaggaagttttcagacccctcaagcctgctggcgaagtggatctgaccgcactggccaaagagcttcgagcagtggaagatgtacggccacctcacaaagtaacggactactcctcatccagtgaggagtcggggacgacggatgaggaggacgacgatgtggagcaggaaggggctgacgagtccacctcaggaccagaggacaccagagcagcgtcatctctgaatttgagcaatggtgaaacggaatctgtgaaaaccatgattgtccatgatgatgtagaaagtgagccggccatgaccccatccaaggagggcactctaatcgtccgccagactcagtccgctagtagcacactccagaaacacaaatcttcctcctcctttacaccttttatagaccccagattactacagatttctccatctagcggaacaacagtgacatctgtggtgggattttcctgtgatgggatgagaccagaagccataaggcaagatcctacccggaaaggctcagtggtcaatgtgaatcctaccaacactaggccacagagtgacaccccggagattcgtaaatacaagaagaggtttaactctgagattctgtgtgctgccttatggggagtgaatttgctagtgggtacagagagtggcctgatgctgctggacagaagtggccaagggaaggtctatcctcttatcaaccgaagacgatttcaacaaatggacgtacttgagggcttgaatgtcttggtgacaatatctggcaaaaaggataagttacgtgtctactattttgtcctggttaagaaataaaatacttcacaatgatccagaagttgagaagaagcagggatggacaaccgtaggggatttggaagggatgtgtacattataaagttgtaaaatatgaaagaatcaaatttctggtgattgctttgaagagttctgtgggaagtctatgcgtgggcaccaaagccatatcacaaatttatggcctttaagtcatttggagaattggtacataagccattactggtggatctcactgttgaggaaggccagaggttgaaagtgatctatggatcctgtgctggattccatgctgttgatgtggattcaggatcagtctatgacatttatctaccaacacatatccagtgtagcatcaaaccccatgcaatcatcatcctccccaatacagatggaatggagcttctggtgtgctatgaagatgagggggtttatgtaaacacatatggaaggatcaccaaggatgtagttctacagtggggagagatgcctacatcagtagcatatattcgatccaatcagacaatgggctggggagagaaggccatagagatccgatctgtggaaactggtcacttggatggtgtgttcatgcacaaaagggctcaaagactaaaattcttgtgtgaacgcaatgacaaggtgttctttgcctctgttcggtctggtggcagcagtcaggtttatttcatgaccttaggcaggacttctcttctgagctggtagaagcagtgtgatccagggattactggcctccagagtcttcaagatcctgagaacttggaattccttgtaactggagctcggagctgcaccgagggcaaccaggacagctgtgtgtgcagacctcatgtgttgggttctctcccctccttcctgttcctcttatataccagtttatccccattctttttttttttcttactccaaaataaatcaaggctgcaatgcagctggggctgttcaaattctaccatcaggtgctataagtgtttgggattgagcatcatactggaaagcaaacacctttcctccagctccagaattccttgtctctgaatgactctgtcttgtgggtgtctgacagtggcgacgatgaacatgccgttggttttattggcagtgggcacaaggaggtgagaagtggtggtaaaaggagcagagtgctgaagcagagagcagatttaatatagtaacattaacagtgtatttaattgacatttcttttttgtaatgtgacgatatgtggacaaagaagaagatgcaggtttaagaagttaatatttataaaatgtgaaagacacagttactaggataacttttttgtgggtggggcttgggagatggggtggggtgggttaaggggccccattttgtttctttggatttggggtgggggtcctggccaagaactcagtcatttttctgtgtaccaggttgcctaaatcatgtgcagatggttctaaaaaaaaaa

SEQ ID NO: 86586 - DNA, 471 bp, Homo sapiens
  misc_feature (1)...(471): n = a,t,c or g
aggagcggccngnnacctgagaaacttangangcanggaagngccgnggaantcctccaccgtgacttgcaccagggcattgaggcagccagtgacgaagaggatctgcgctggtggcgcagcacccacgggccaggcatggccatgaactggccacagttcgaggcatgtgttccaggcggggtggggatgggaggtgggatgggctcccactcagctcggccagggctagggatgaagtaagtgaaggtggttcagatggccccacctgactataagcactgtccccacaggagtggtccttggacacacagaggacaatcagccggaaagagaagggtggccggagccctgatgaggttaccctgaccagcattgtgcctacaagagatggcaccgcacccccaccccagtccccggggtccccaggcacggggcaggatgaggagtggtcagatgaagagagtcccn

SEQ ID NO: 86587 - DNA, 1010 bp, Homo sapiens
cgccaccccccatctcctccatctcctctatccttccatcccctccatcccttcgtccctccatcccctccgtccctccatccctccgtcctctccgtctccttcatcctctctgtccctccatccggtacagttccgtctgccagaggcagggcttgcttcatgccttctgtgctcctcctccacactcaacctccttttccccccaacaggccaccctgcagttctgtgtggtgaagccactcatggcggtcagcactgtggtcctccaggccttcggcaagtaccgggatggggactttgagtaagcagcgggtgctccccggggtgtgtgggaggagtgttggcgcaggctggtgccttggctcagggaagggggcagccagagtggccgcacagccatgaccttcctgggtgtctggtgctcacaacccccctgaagtctgagcccagcagtggacacccttgcagttggccccgctgccagccccggagtgagccattggcagcagtcacgttcatgtccaggctgcagagtggtaccatgaagggatgggccacaaagggacagtgaccactgctgaggcagggagcgagagggtcagagccccaagaggtcggctcaagtccacagatacaaagcccgtgctgtgtaaattgtccacacccatttcattctgggcttagtgaaagtgaccccgtggctgggcacagtggttcacgcctgtaatcctagcactttgggaggccaacgcgggtagatcacctgaggtcaggagttcaagaccagcctggccaacatggtgaaaccccatcactactaaaaatacagaaaattaaccgggcgtggtgacgggtgcctataatcccagctactcgggaggctgaggcaggagaatcgcttgaacccaggaggcagaggttgcggtgagccaagatcacgccattgcactctagcctgggtgacaagaacagaactccatatctaaaaaaaaaaaagaaagtcgacg

SEQ ID NO: 86588 - DNA, 1365 bp, Homo sapiens
tttcgtctggcttgtggactgagcaatctgcggcccggtctcgaggggaaaataggtctgtggtccgcaaggccccagtggagcccttgggttcccgcagaaccgactgggtctccagtagtctctgaggagccgctcgaccttctcccgaccctggatctgaggcaggagatgcctcccccgcgggtgttcaagagctttctgagcctgctcttccaggggctgagcgtgttgttatccctggcaggagacgtgctggtcagcatgtacaggtcagaggaagggacgctggcgccccaggaacagctctttggagggggtggggagcagggccggaaccttgctggcgcttgagccgattcaaatctgattgagtcatgttggcaagagctgggtctaggaccctggggtggggactggagggttgagcaggtcggggcctcagcctccctccggttccccagggaggtctgttccatccgcttcctgttcacggctgtgtcgctgctgagcctctttctgtcagcattctggctggggcttctgtacctggtctctcctttggagaatgaacctaaggagatgctgactctaagtgagtaccacgagcgcgtgcgctcccaggggcagcagctgcagcagctccaggccgagctggataaactccacaaggaggtgtccactgttcgggcagccaacagcgagagagtggccaagctcgtgttccagaggctgaatgaggattttgtgcggaagcccgactatgctttgagctctgtgggagcctccatcgacctgcagaagacatcccacgattacgcagacaggaacactgcctacttctggaatcgcttcagcttctggaactacgcacggccgcccacggttatcctggagccccacgtgttccctgggaattgctgggcttttgaaggcgaccaaggccaggtggtgatccaactgccgggccgagtgcagctgagcgacatcactctgcagcatccaccgcccagcgtggagcacaccggaggagccaacagcgccccccgcgatttcgcggtctttttcctcctttcattcttcacccaccagggcctccaggtttatgatgaaactgaagtttccttggggaaattcaccttcgatgttgagaaatcggagattcagactttccacctgcagaatgaccccccagctgcctttcccaaggtgaagatccagattctaagcaactggggccacccccgtttcacgtgcttgtatcgagtccgtgcccacggtgtgcgaacctcagagggggcagagggcagtgcacaggggccccattaaacatgctgatttttggagtagaattgaaaaaaaaaa

SEQ ID NO: 86589 - DNA, 726 bp, Homo sapiens
  misc_feature (1)...(726): n = a,t,c or g
tttcttgactcaaaagatttatcctaactcctgtgatcctcaaatacatcaaccctcatgatctcaatggttatgtttgccttcccattgaccaccaacagccatatctctctaacctcccctgacctcaatggccccatcactgatgccgtcatgactccagtgaccctcaattctctgatcttagtgtctttgtctctgggntcccctggggatcccatgtccttgaccccttggacctgctccctccagcctggtgccctcatcttggcccctcactagcccctgttcccctccaggttaccgctgcttcaaggcagtgctcttcctcactgggttgctgtttggctcggtggtcatcttcctcctctgctaccgagagcgggtgctagagacacagctgagtgctggggcgagcgcgggcatcgctctgggcatcgggctgctctgcgggctggtggccatgctagtgcgcagcgtgggcctcttcctggtggggctgctgctcggcctgctgctcgcagctgctgccctgctgggctccgcaccctactaccagccaggctccgtgtggggtccactggggctgttgctggggggcggcctgctctgtgccctgctcactctgcgctggccccgcccactcaccaccctggccaccgccgtgactggtgctgcgctgatcgccactgccgctgactacttcgccgagctgctactgctggg

SEQ ID NO: 86590 - DNA, 1938 bp, Homo sapiens
ttttttttttttgccgctgtcaacagacagtttattctatatacaaacacaattttgtacactgcaattaaatagaatggaatgagcgctcctccgcattcctccccgagtgactggtttggccgccggcccactccatccccgagtgggactggaccacggccctggctgctgccactgatgttggcgcctgcaccccacgtccctatgcccgaggcgcaagctctgctctcccggggaccccaggcctggcgcacacgcggggagggcggggccatggagaaggcactgcagggagcaccaggcagagccgggctgaggccggccggcactagggcgcgaggccccaccccaagccggcctctcctccacacctccgccttgctcagagacctgcaccatgggaccccactccatcctcaggacggttcactgcagacctaccaagacccctccagaaccttccgcggaaccccaccccctctccttgctgaccagctcaaacacctcactagcgggtacaagcctcgggcgcgacctcacaccagggggaggaaagccgccttccgggcaaaccccacgaaaccctgaaagcccccgacacaggctgggcagtcccagaggaaggaggtggctggcctcccccacccccacgggctcgggaaggtcaggcccagccagcaggggtcagaggcggctcagctgtgcggctcaggaccccacctccgagggcgcctccgttggggccatggaggccgggctaggcccgcctaccgcagcccccaggggagttgtgtcagaagctgcggagtcactcggggggacactgtcctggggggcgtgggggaggcccccagcagggcccagcgggctggctggacgccgctccaggagggaggcgctcaggccggacaggaaggaggcgtctgtgatgatggcagcggtctctgccatccaacccaggtcaccaccggcagctgctgccactgaggctgccgcggccaccagggagctgggcgccgctgccacaggcccgggactcccgctggccccaggcgagacggggcccagggcggggggctggccggcagagtccaggggctgtagccggggcgcccgagttgttgttcatgtcatcgggcagctgccgtgggggtcccggggcccagtgtcggcgcctgaagcagcatctccctggatgcggacatgctgcaggatggcaggcagctcgtagtggtggaagaagtagatcatggaatgctggatgaagagccaggaggtgaccagggccaggctgctatactgcccattgaagcggtagtgataggcatagaaggcgaagtggtagagatagaagaaccgcagccaatgccgcttgctggtgctggtgtggcagcagatggcgtcatactggtccgcgagccacacgatgaggatgatgtagaaggcggtggtggtgtcgttgaagaactccgacatgatggcctccatcccgacgagggccaggatgacggtcagcaggggcgctgcggggaaggcgatggccatgttcatctccagcatctgcagcaggtccacgatgaagacgaagatctggtggtgtgagtacccgcagcaagcatgggacacgctcagcgtaaaagattgaccatgattggcgaaggcggccaggtaggacggtccgcgccatccacatgctgcacaaagcggtagtgctcgcccgacaccacattccgcaggaagcccttgttctcctcgttctcggccaggcccttcacgctggacattaaggatgtcatcatagcccaggaactcatccagcagcaggcggctgaagcggtccccgaagcactgggtcccgcgtggggtccagggtgagcaccatgacggggatgctcaggcgctggcggggtggcctgcgacaggcgaaggaagcca

SEQ ID NO: 86591 - DNA, 421 bp, Homo sapiens
ggaattcgatgcacagccttcaattggtgctttggtggtttttaagcggccttgagcaaccacaggctcggaccccgggccaaagcggggcatgaattaccttgtcagttgcagcatgagatccccagagtccggaaaaggagagccggggactgcgcgggactacacaccaatggggcgcccccctcctcctgtcccctcagtctctccagggccgctgccagggagcttggcgatcgcgccacactctccggagccccacccttgggagcagcaaccacccagaggtcaagcacgttccccgccgggcggatggctgggaagcgctacgctgttcgacgaccacacaaccaccctctggccaccctctcctgtggacaccgccggagccccggcttccccgggcccggatgtgtgtgaa

SEQ ID NO: 86592 - DNA, 427 bp, Homo sapiens
gccggaattcattgaaccatcaaaatatattcactttaccatctgggacattttaatcaaacctctcatctgttcaatcacatctttcacttcagaaagaactttcacttctgccttgtttttcagaactatctatagccaccacttttcacattaagatgatccttctcaagccatcagagaactaagtgacatctgcaatgaaatggcttcaccacttctgtcctcgggtaattctgcaatctatttttgctggatccaatccctgaagaccatcctgcctttctaagggatgcttctccctttcagctaccttcatgtcttttaatgcaattgttgcttctttctgtcctggtgttgtactttggcagtggtcacacccatggagcacagacttctacaaggcacaaggcatgactttgatttt

SEQ ID NO: 86593 - DNA, 1711 bp, Homo sapiens
aggccttctcggacagaacccctacaagagaggccctgaggtgaccatccttaaggcagcatgtggtcaattgactggcttcagcctccaggacagcctggagctccgtggggtttggcacatgctgtggctccacgaagatgcccacgtcatggttcatcactgctcgtctccctacatctggcccaaaaatacacttggtggcagtcccgccatcacactcaggctcgggagctggcggcccctggtccgtgctgcctgccacgctgctttccacggcagtggtgggaaagggagagcaaaattcaaaatctgcagttctggcaaatttccggggcctcccggacacgaaaagcagctgaaatctcaggacaatgtcattggatgcggaccgagaagaagccgttcggaaccagagctgccccggattctcccaggcctggctcgccggatcgacccgtacggattcgagcggcctgaggacttcgacgacgccgcctacgagaagtttttctccagctacctggtcacgctcacccgcagggcgatcaaatggtcccggctgctgcagggcgggggcgtccccaggagccggacagtgaagcgctatgtccggaaaggggtcccgctggagcaccgtgcccgcgtctggatggtgctgagtggggcccaggcgcagatggaccagaatcccggctactaccaccagcttctccagggagagagaaaccccaggctggaggacgccatcaggacagacctgaaccggaccttccccgacaacgtgaagttccggaagaccacggacccctgcttacagaggaccctgtacaatgtgctgctggcatatgggcaccataaccagggagtgggctactgccagggaatgaattttatagcaggatatctgattcttataacaaataatgaagaagaatctttttggctgttagatgctcttgttggaagaatactaccagattactacagcccggccatgctgggcctgaagaccgaccaggaggtcctcggggagctggtgcgggcgaagctgccggctgtgggggccctgatggagcgtctcggtgtgctgtggacgctgctggtgtcccgctggttcatctgcctgtttgtggacatcttgcccgtggagacagtgcttcggatctgggactgtttgtttaacgaaggctcgaagattatcttccgggtggccctgaccttaattaagcagcaccaggagttgattttggaagccaccagcgttccagacatttgcgataagtttaagcagataaccaaagggagtttcgtgatggagtgtcacacgtttatgcagaaaatattttcagaacctggaagcttatccatggccaccgtcgccaagctccgcgagagctgcagggcccggctgctggcacaggggtgagcgtgcctgtcccctgcgttgctcgtctctacactgacgatgcccctttccagagttgacactggaccaactttcactggctttcctttttagtgttgtaaatacttgacatcgctacactttagttgtgaattttttaaaagagcagttttaaaatcagggtcattctaccagctttttgatggattaggctatggaaggtccatacttttttaaaggaaaacttattttttacccgaggagttcattattatattaaaatgttgagtgtgggtttgtatc

SEQ ID NO: 86594 - DNA, 1998 bp, Homo sapiens
aaatactccttacataatttaggagaacaaaacgtaacttactagattgatggaacatatttctattatccccgattacagacaagcctggaaagtggaacataaattatcggatattctactgttgactatttgtgccgttatttctggtgcagaaggctgggaagatatagaggattttggggaaacacatcccgattttttgaagcaatatggtgattttgaaaatggtattcctgttcacgataccattgccagagttgtatcctgtatctgtcctgcgaaatttcatgagagctttattaactggatgcttgactaccattcttcagatgataaagacgtcatcgcaattgatggaaaaatacaccggcattcttatgacaagagtcgccgtaagggagcgattcatgtcattagtgcgttctcaacaatgcacagtctggtcatcggacagatcaagacgtcagctccggggcagagtggaggaggaggtgtgcacagaggcaccattgttgtgggaagcaatttgttggtgaggagggagctgcggtcctgcatgacatccacacgtgtgacatccacacgcgtgaaatcagcacacacgcgtgacatccacacgcgtgacacccacatgcgtgacaccagcacacacgtgacatccacgcacatgacatcagcacacacgtgtgacatccacacgcgtgacatcagcacacgtgtgccattcacacatgtgacattagccaaggtactaactcaatctcagccggtcacggtggtttacgcctttaaatccaacaactttgcgaggtggagacagaggatccccaagcgtatcgcctttgtttgcgatgcggggatgggctccagtgcgatgggcgcgaccaccttccgtaaacgcctggaaaaagcggggctggcaattgaagtaaaacattacgccatagaaaacgtgcctgcggatgcggatatcgtcgttactcatgccagtctggaagggcgcgtgaaacgtgtgacggataaaccactgatattgattaataactatattggcgatccaaaactcgacactttatttaatcaattaaccgccgaacataaacactgattacagaggtaaaaatgaaaaccaaagttgctgctatttatggcaagcgggatgtccgtctgcgcgtatttgaactgccagaaattaccgataatgaattactggtgagtgtaatttctgacagcgtctgtttatcgacctggaaagcggcgttactcggtagtgaacataaacgcgtacccgacgatttagaaaatcatccggtcattaccgggcatgaatgtgccggggttattgtcgaagtggaacagaggctcgtggtaacgcgtacagagatggtacatccctgtcctctcatcaaagtgattcctctcccttttgccaaacttccacagaagccaaataaacagtgtagacactccgtcactcgctacggccacggcggccactcggatcacactccgtcactcactgtggccacagtggccactcagatcacaccccgtcactcgggccacggcagccactgtgatcgcaacctgtcacttgctacagccacagcagccactctgatcacaccccatcacttgctatggccacgatggccccttggatcacactctgtcacttggtgtggccacggtggccactcggatcacactccatcacccactacggccacagcagtcactcggatcacatcccgtcacccactacggccacagcagtcactcggatcacatcccgtcactcactacagccatggcagccactctgattgcattcccgtcactcgctatgcccacggcggccactcagatcacactccatcacttgctatggccacggcagccactcagatggcactctgtcactcactatggccacggcagccacttggatacttggtcaataaaataagaaggtcaaacatttaccctgtgtga

SEQ ID NO: 86595 - DNA, 1741 bp, Homo sapiens
gtggtggcctaccactactgccaggctgacaacacgtacacttgcctggtgcccgagtttgtgcacagcatcgcagctttgctctgccggtcccatcagctggccgcctacagagaccttctgataaaggagccccaactacagagcatgctgagcctccgatcctgtgtgcaggacccggtggcagctttcaagaggggagtgctggagccactcacaaacctgagaaatgagcagaaaattcctgaagaagaatacattattttgatagatggcttaaatgaagctgagtttcataaacctgattatggagatacgctttcttcatttattaccaaaattatttctaaatttcctgcctggttgaagttgattgtgactgtaagagcaaattttcaggaaatcataagtgcgctgccatttgtcaagctttccttagatgacttcccagacaacaaagacatccacagtgacctgcacgcctacgtccagcacagggtgcacagcagccaggacatcctcagcaacatctccctgaatggcaaggccgatgccacactcattggaaaagtgagcagccacctggtgctgcggagcctcggctcctacctgtacctcaagctcaccctggaccttttccagaggggccacttggtcattaagagtgccagctacaaggtggtgcccgtgtctctctctgagctctatttgcttcagtgcaacatgaagttcatgacccagtccgcctttgagagggcacttccgattctcaacgtggccctcgcatccctccaccccatgacagacgagcagatctttcaggctattaatgctggccacatccagggggagcagggatgggaagactttcagcagaggatggacgccctctcctgcttcctcattaagaggcgagacaaaacccgcatgttctgccacccgtccttcagggagtggcttgtatggagagcagacggggaaaacacggccttcctgtgtgagcccaggaacgggcacgcgctcttggcattcatgttctcgcgtcaggagggcaagttgaaccgccagcagaccatggagcttggccaccacatcctgaaggcgcacattttcaagggcctcagtaagaagacgggaatttcttcaagccatctccaagccctgtggatcggctacagcaccgaggggctgtccgccgccctggcctctctcaggaatctctatactcccaacgtgaaggtgagccgtctcctgattttgggaggggccaacgtgaactacaggacagaagtgttaaataatgccccaatcctgtgcgtccagtctcaccttggccacgaggaagttgtcactctgctcctggaatttggtgcctgcctggacggaacgtcagagaacggcatgactgccctctgttacgcagcagctgctggccacatgaagctggtgtgtctgctgaccaagaagggagtgagagtggaccacttggataagaagggccagtgtgcgcttgtccacagtgccctacggggccacggtgacattctccagtacctgctgacttgtgagtggtcgccgggtcctccccagccaggcaccctgaggaagagccacgccctgcagcaggcgctgaccgcggcggccagcatgggccacagctcggtggtccagtgcttgctggggatggagaaggaacatgaagtagaagtcaatggcaccgacacattgtggggagaaacag

SEQ ID NO: 86596 - DNA, 492 bp, Homo sapiens
  misc_feature (1)...(492): n = a,t,c or g
ggcncggaggccggcnnnnnnnncccgtcagacgtcgtagaccngcgnggaattccttccccacatccgcgggaacgtgggcttcgtcttcaccaaggaggatctgactgaggtccgagacctgctgctggcaaacaaagtgcccgctgctgcccgtgctggtgccatcgccccctgtgaggtgaccgtgccggcccagaacaccgggctcggtcctgagaagacctctttcttccaggctttgggaatcaccaccaagatctccagaggaaccattgaaatcttgagtgacgttcagctgatcaaacctggagacaaggtgggcgccagcgaggccacgctgctgaacatgctgaacatctcgcccttctcctacgggttgatcatccagcaggtgtatgataacggcagtgtctacagccccgaggtgctggacatcactgaggatgccctgcacaagagattcctggagggtgtgaggaacatcgccag

SEQ ID NO: 86597 - DNA, 439 bp, Homo sapiens
ggaattcctcaggaggcgggggcggctttgctccctgctgtgtctgcagctcccatggggagccctatccacagtgagctccctgggaacactcgctggatgaatgaatgaagaggagcccaggggacggaggtggttcatttattcgtcatcctcctgaggcctggggagagctctaacaaccagacggccaaacagaggatgaggagcaggaaggggacccgggaggaggcccacgaggtcccaggacagcagaagagagtgaggtcacagcaggcgggaggcagcatgctggacaaggaggggtccaccgtgacgatgctgagagccgggggaaggaggacagagaagtcctgcaggattagatctggcaccaggaggcctttggtgcctgggacggggcgggatctcacctgactgtccagctccacccttgcct

SEQ ID NO: 86598 - DNA, 460 bp, Homo sapiens
  misc_feature (1)...(460): n = a,t,c or g
nattgagnccctgagaacngtcgngagagtggnggaattccccggccccgctgcgcgcccctcacgctgcagcctgggaacctgggccgggagctgcgggccgctccgtgaccgggaagcgggcctgacctcccctccccaccgccgcccctgcggtgagatcctgcctgccggggcgcaggggcccgcggttgggctccgggagacggaagaggccccacagctcgggccccacgcagtggacgctgccacttaattttggcgtaattgatgtcaaggcgggtacccgggcccccagtgaaatgcctcatgaactcgctgcgaggaacggcgctccacgcggtgcacggtggccaatcagagctgccgcttctgatggaggctgagccggctggggaggcgtcttggccaagaaccagccccagcctcgctcagggccccaacccgcagaccatgtaan

SEQ ID NO: 86599 - DNA, 836 bp, Homo sapiens; identical to SEQ ID NO: 60837

SEQ ID NO: 86600 - DNA, 9401 bp, Homo sapiens; identical to SEQ ID NO: 61589

SEQ ID NO: 86601 - DNA, 5365 bp, Homo sapiens
agtttgacaccttaggaaccgctcgataaacctcgggacgacccacgcgtccggtcccgggaggcggcgccagcgaagagctcggccttttgccccaacgctccccccgccctgttcgagctgtgcgggcgggcggggagcgcccatatgggggttctggagagcggggtgtgggccctcccaggcccaatacttcaaagcatcctacctctgctcaatatatattacttggagaggattgaggaaactgccctcaagaaaggcctctcaactcaggccatctggcgccgactctgggatgaactgatgaagacaaggccttccagtttggaaagtgtgacatgttggcgagccaagtttatggaggccttttttttcccatgttctacgtgggaccattgatgtgtcttctgacaggcgtctttgtgatcagcggttctcacctcttctgcacagctcccgccatgtccgacagctcaccatctgtaacatgctgcagggtgcaaccgagctggtggctgagcccaaccgcagggttctggagaccctggccagctccctgcacactctcaagttccgccacctgctgttctctgatgtggctgctcagcagtcacttcggcagctgttgcatcagctcatttcaccatggggctgtcagtcaagtgtcgctatactcctggcctgtgcctgagtcagcccttttcatccttattctcaccatgagtgctggcttctggcaaccagggcctggtggcccaccctgccgcctctgtggagaggcctcccgaggccgggccccatcccgagatgaaggggccctcttattgggctcacgtcggccccgccgggatgctgctgagcgatgtgctgcagccctgatggccagccggcgtaagagtgaagccaagcagatgcccagagctgcacctgccactcgggtaacacgccggagcacacaggagagcctgacagcaggcggaacagaccttaagagggagctgcaccccccagccacctcccatgaggctcctggcaccaagcggtcaccttctgctccagcagccacctcctctgcctcttcttctacatcctcatacaaacgggcaccagctagctcagccccacagcctaagcccctaaagcgtttcaagcgagctgcagggaagaagggtgctcgcacccgtcaggggcctggtgcagagtctgaagacctgtatgacttcgtttttattgtggctggcgagaaggaggatggcgaagagatggagattggggaagtggcttgtggagctttggatggatcacatcccagctgcctggggcttccagcactggaagcttcacaaagattccgcagcatctccaccttggagctattcacagttccactctccacagaggcagccctgacactatgccacctgctgagctcctgggtgtcactggagagcctcacactctcctacaatggcctgggctctaacatcttccgcctgctagacagcctgcgggccctgtcaggccaggctggatgtcgcctccgtgccctgcatctcagtgacctgttctcaccactgcccatcctggagctgacacgtgctatcgtgcgagcactgcccctgctacgggtcctctctattcgtgttgaccacccaagccagcgggacaaccctggtgtgccagggaatgcagggccccctagccacataataggcgatgaggagataccagaaaactgcctggagcagttggagatgggatttccacggggagcccagccagccccactgctgtgctccgttctgaaggcctcgggttctctgcagcagctgtccctggatagtgccacctttgcctctccccaggattttgggcttgttttgcaaacactcaaagagtacaacctagccctgaaaagactgagcttccatgacatgaatctcgctgactgtcagagcgaggtgctctttttgctacagaatctgactctgcaagagattaccttctccttctgccgtctgtttgagaagcgcccagcccaatttctgcctgagatggttgctgctatgaagggcaactccacactgaagggcctccggctgccagggaaccgcctggggaatgctggcctgctggccttggcagatgttttctcagaggattcatcctcctctctctgtcagctggacatcagttccaactgcatcaagccagatgggcttctggagttcgccaagcggctggagcgctggggccgtggagcctttggtcacctgcgcctcttccaaaactggctggaccaggatgcagtcacagccagggaagccatccggcggctccgggctacctgccatgtggttagcgactcatgggactcatcccaggccttcgcagattatgttagcaccatgtgatggggcccgtacctcacagtctcatgctcggtaccatcagcttgcaggggctgaagcatgggctgccccagaaccccaaccaccagttctatctttctctttctgtcaccttttttctcttttttccttcttcccttgcactgaggtcctggaggccttgatgaggcccagcaaacaggcattctcacagctgggtttatagtctttgggccccttactcaagtatcctggggaacccctgggcccagggaggtttacagtggtcatcataattggttgaaagagatcccctccccctggccctggggttcctgccttccctcctcaagcagggcacccagggctttaggagaagtataggggggcttctttccctgctggggctttaccacatggctcttcagggcctcaaaacccttttcatacctttatttttttttttaaccaaaaaagttttttttataaaataaattttgggcaaacatcatgcagcccttcttgatgattttctcccaaaaaacaaaattcaacagggccctgtggagcaaggagccccttttccctatctccttcctctaagagctacacccagaccagctggttatcagcggaggccccgctgctcctcatgagaacgctggtggaagacgaaggtgatggcagtggaggcagcatcccaggcagcctggagtacctcatcccggagcccccacttatcagtgcaggggttccaccctgccaggtctgaagtgcagtcagaaccatcagggggtggccggatctgacggctgttgacacaacgtcggcagtgcaacctgtcatgtgtgtcactgaggctagcttcatccaggataaacagctccttcaactcgcccagagagaagtggcgctctacatcctgctcctcatccaccacacagctgctcagtgccttcttgtggctctgacgctggaagatcttctcctcaatggtccctgcagacagcaggcggtagatatagcaagtcttcctttgaccatctcgccagacccgggccatggcttgttcatcattggctgggttccagtcagggtcaaacatgaccagccggttagccccaatgagattgaggccacagcccccagctttgctgctcagcatgaagacaaagtcagggctcgatggactattgaagcgttctacaaccttggctcgcttcttaatggacatcgtgccatccaggcggacgtataagtaccttcgggcacggcacagcttctcaaagagatccaaagtctgggtgtaattcgacaccagcactactttgtcactgctacggcttcgggtcaccgccagaatataatccaggaccagcatcttacctgacagctggggctccagggccttagagctgtaaccaggagggaagaggtccaaggcacccacaaagccatcctcctcttccacacacttatcatagattagagctggatgattacaaagcttctttagcgaggtgatggaagaaagggaagacacactcatcttgccctcaagcaattcttctgccggtttggcttgtctcagaaacctcttgtataactcagtctgaaggggtgtcagcctacaacaaacgacctgctcaatcttcacaggcagatatttagaaaggatatcagaagtcctccgtatcaggcatctattcacaatgctggtgagctcccgcagccgctcctctcctagctgcctgtctgcctcactagcagcagcgtctcgacccttcaaaattggcaattcaaaatgcttcttgaattcatgggcagtccctaggatgccggaattaacaaaatgtaccaagctgaaatactcaagcagatcattctggatgggagttccggagatgagcacccgccggctggtgttcaagctgtccagggcttggtaagtctgattctcagagttcttgagcctgtgtccctcgtcacatatgaccagaccaacacttcctttctggaggactccaacatgaaggcggaaggtctcataggaaatgatgaggatgggagaagacaccctggctccacgctggttcatgaatccttccagcttttggtctatttcatccttagatcctccatcgatggccagaggttggatcctccctccgagccatttcccaacctcattgtaccagttcttcaccaggctggaaggcgacaccaccactgccttgtcaatttctggcttgcactctggactctggcgtaaaagtgtccacatcaatgtgatgcactgcagcgtctttcctaggcccatctcatcagccatgatgcagccatggctgccagggatgcgccgactggtgacacactcccacaggaatttcactccctctctctgatgaggccgcaaaaccttactgagaatagggtcaacaaccacatggacagggagtttctccttgtcaagcttcagctggtcatgagcgctcagcgggggaggctcatacagaaccaaggcatctttttccagggggtcatggagggcccggcggaccccagcccttttcaggcccaatgctcgagagcccagaggaccttgataatttggaatggggactttgaaaggctttgacaaaatgcttcgaataaatgcttcatgctgactgctgtccagacaaggtggttgattggttagctgactcaaaggtttccgaaaaggagacaggaaacactcctggatctgggtctcactgctggatttccgtttcctaggagtcactaggccaggttgccagtcttcatcatcacaggacctgccttcaggttttctcttggccagctggctgggagccaagctcctcctcatcctgggcctaggagtttaaaacgtcaagtacccatgagccaaaggtcaaaagcaggcagcggctaagagtgtaggaccagggtctaatctgcccgaattc

SEQ ID NO: 86602 - DNA, 1588 bp, Homo sapiens
cttggaccttggccctcgctttccaggatgggtagggtggaagacgggggaacaactgaggagctggaggactgggacccaggcaccagtgccctgccagctcctgggatcaagcagggtcccagggaacagacaggcacggggcccctgtcccaaaagtgctgggagcctgagcctgatgctcccagccagcctggcccagccctttggtccaggggtcgggcccgcactcaggccttggctggcggctcctcactgcagcagctggaccccgagaacacaggcttcatcggtgcggacaccttcactggcctggtgcacagccatgagctgcccctggacccggccaagctggacatgctggtggccctggctcagagcaacgagcagggccaggtctgctaccaggagctggtggacctgatcagcagcaagcgctccagcagtttcaagcgggccattgctaacggacagcgggcactgccccgggacgggccgctggatgagccaggcctaggtgtctacaagcggtttgtgcgttacgtggcctacgagatcctgccttgtgaggtggaccgccgctggtacttctaccgtcaccgcagctgcccaccccccgtgttcatggcctcggtcactcttgcccagatcatcgtgttcctgtgttacggggcccgcctcaacaagtgggtgctgcagacctaccaccccgagtacatgaagagcccccttgtgtaccaccccgggcaccgtgcccgcgcctggcgcttcctcacctacatgttcatgcacgttgggctggagcagctggggttcaacgccctcctgcagctgatgatcggggtgcccctggagatggtgcacggcctgctccgcatcagcctgctctacctggcaggcgtgctggcaggctccctaaccgtctccatcaccgacatgcgggccccggtggtgggaggctccggcggggtctacgccctgtgctcggcacacctggccaacgttgtcatgaactgggctgggatgagatgtccctacaagttgctgaggatggtgctggccttggtgtgcatgagctccgaggtgggccagcgctgtgtggctgcgcttctccccgccgctgcccgcctcgggcccacagcccagcttcatggcgcacctggcaggcgcggtggtgggggtgagcatgggcctgaccatcctgccgaagctacgaggagcgcctgcgggaccagtgcggctggtgggtggtgctgctggcctacggcaccttcctgctcttcgccgtcttctggaacgtcttcgcctacgacctgctgggcgcccacatccccccaccgccctgaccggctacctgaggctgcacaggccagggctcgggcatgtggtggccgcccaccaggggccttcacgtctgccctttgtgaacggacgtctcagggctgctgtgccccttgggtgtgggtggcctcaaaggaggccctgtcccagccacccaccccccactcccaggacttgcggtctgagcctttttggataattaataaatattttacacagccctcgtgccaagcttggcgtaatgatg

SEQ ID NO: 86603 - DNA, 1528 bp, Homo sapiens
ttttttttttttaataaagtcggctgccatcctctcccccggctcaggtcaaagttcataggcagcaatgcacaaagtcctctgtgaagccagtgttctctgctccccgggtcagaggtcacaggtcaagttcagtcagtccgaagaatcatgggcgggtgctcgctgtcctcatccagggcgcagggcgtgggccttcggtcctccagggcaggcgccacccacagcacccagggtcgtctcgtgtagggcaagtctccgttggggatgaaggcacgtaagtaccttttcctgcaagctgcgcccgtaatgtctgaggtgactaagggggcaattcgtgagaaggcagagttcccaagattctcattgggtcgttttccaagactgccgttccagccggtgctgcttcattcaggggcacactcgccgccctccttgggggtccaggttgtacatgtacaggtacccgtcggcggcacccaccaacaaccgcgggatcttctgaattgtggctagcgagcagatgtttttgtggccgcagaatggcaggcggaccgtggcgaaggctctgccctggttgaacatttctgtcacttgggaaggcaggtagctggtggaggcccatgagcactttcccgaagtacccggtccaggtggtgggctcctctgggggtttttctttcacagtctcgagtttgaagatgtgcacggtctcagtgttgctggaggcggagaggaacatgccgtccatgctgaaggccagggagcagatgctcacgcacctctttactcctctccgaaactcaaagagtttttgtccttctggaatggaaaataccctaatcacggtccccttctccgaagccgtggcaagtttagttccacttgcgtcaaaggccagtgccgcttaaaggactgtcgtgagccggaatcatgtttgcagctctcaaattaaagggtatcgaagacctggcaaaccctctccgatggtcgcgctccctgggtacgccaagtagcagttgtcgttgttgattgacagcgcacacaggcctgcagggtttggaggcgtctccctgatcgtatgcagcaccttcatgtcccgaatgttgtggatgtacagggactcctccaggcatactatcagcctctgcctgttgagcttcacagccagaatcgtgttggagtagctgtagttgcagatctcagttcccttcttaaagtggcaaacctttagcttccttggtgctttaaggctcacgatggccactaggctgctggagaacaatctctctacaatgcacacatcttccgtatcggtgcattcatagatctgttccagcttatccacagaagaaagggagaaaaatttataaccggacttactaccaacagctagggaccagacaacagcgcgacggccaagaccagctgctcttgatgcccctttcacttctgtgttgtcctggttgaagttggcgaagagcagctggccggcgccggcctccccgctctggctcgccaggttcat

SEQ ID NO: 86604 - DNA, 543 bp, Homo sapiens
  misc_feature (1)...(543): n = a,t,c or g
cgtggttatggggagtagggattggtagtgcaacatggattgaggactgatattgctcatacgagggggagagcgacaaacacatttgatgacattgngaatgcctcggaaanctcaagaccccctcatgcgactctgggctcccaccctctctctagtgttcccctctgtgatccaggatttgagtgtggtcggctctgccccaggctgtcactgcacttgttgcctgggctttgggaaggcggctgtgcaccccctactcctctgggagggtggctgtgtaccccctactcctttgggagggtggctgtgtactccctactcctttgggagggtggctgtgaaccccctactcctcctttgggagggtggctgtgcaccccctactcctcctttgggagcgcggctgtgtaccccctactctttctttgggaggggggctgtgcatcccctactcctttgggagggacgggtgtgcaccccctacttatccagcgccttcttgtgctctgggcccaggagactccagacccctgggaaagg

SEQ ID NO: 86605 - DNA, 1226 bp, Homo sapiens
acaggccagacctgacctacgataggcccttcagctgcgagagcctttgtgccttcaccacggtctgcggagggctggatccttgctcaccaggctctcctgtcaccaagtgtcaaagcgccagaagccatggaaactcaccagctggaagagccgcccattacccacgcacctacagtgaactcaatttcaacaaaggtggcaagaacaccccccttccattgcttccacacacactgctgttttcacactcaccttctgatgggcacctcccacagcccgagcaccccagcagccccctttgctcccctgaagcagaccacaatgaaaagttccagttgatgttacaggaagcgagccagggaacacttgacccccaggctctaggaaccatcaagatcaagctagaaaagggcatcggcaagaaggggtgtctggaggcgtcagggctgcgctgtctgtgcggagagaattccgctgtgtggagcagctatgctcccttaggggtggctggctatgagggctacggcctgtcctcgagggtcccacctcttccccagctcccaagattcagggggtgggacttcccctggaaccctggaaagcagggagcaccgaccgccctggatgccaggaaggagggagtgttgctgcctgtggcccctgagaaggaaggagcattgctgcctgtggacgccggcaaggaaaaagcaccagccgcccgtggaccctgagaaggagggagcattgccgcccgtggacgcggggaaggaggcagcattgccgcccgtggaccctgggaaggagggagcattgcggcccgtggtccctggctgcgtgccctcccctcgtctcctccacccaagagcaaagtcgaagctctttttccaaagctctgtctcccccacctcctccagcttccctataagagttcctgttggtgtcctccacccccagtccacagtccaggagccaagaattcatggcagaccccgagccacagctcgccaaatcattcgctcattgttagacatctggggttttcaactttctgttttcataaaggacacggtaagtgcccctgggcagcggctcctctggagctccagtccgagaacctcgggggtgaaattctgttctcagctccgcccctgcccaggccgctgtaccatcccatgagaggctggagttggaagccccttgacgtcccggcctccatgggcatg

SEQ ID NO: 86606 - DNA, 1165 bp, Homo sapiens
gggtttgttggaaccattttcaaaactgctcagctttgtaattcagaatgccgtcttcactctggcctacctggtggagctgtgtggcttatgttaccgagctttcactaaggaacgagataaattctacttgtctcgtagtgttgttctagaacttctgcaggccctaaagctcaaatctcctttaccagatacaaaccttcttctgcttgttcagtttatttgtgcagatgctggaaccaaactagctgagtcaacaatcctgagcaagcagatgatagcctctgtacctggatgtgggactgcagcgatggagtgtgtgaggcagtacatcaacgaagtgctggatttcatgggcagacatgcacacgctgaccaaactgaagagccacatgaagacatgttcccagcctctgcatgaagatacctttgggggacatctcaaagtggggctggcccagattgcagccatggacatctcacggggcaaccacagagataacaaagctgtgatccgctatctgccttggctttatcatcccccctctgcaatgcagcaaggacctaaagaattcattgagtgtgtctcccatatccgactgttgtcctggctgctgctgggttccctcactcacaatgcagtgtgcccaaatggcctcctctccctggcctgcccattcctctggatgcaggctcccacgttgcagaccatcttattgttatcctgattggatttccagagcaatcaaagacctccgtgctggcacatgtgctccctcttccacgcgttcatctttggctcagctgtgggacagtttattggcgaggcaaagtggccgttggtaacaaatctccaaaatcaggaatgaattcagcttcacgggcgatactgacaggcactaggaattttgggagtaggggtcgacatccaggcattccttcagtttaatgggcccattaacaaagtggtgagttcacagacgagtttcccttctgagatggaatctcaaagtgtccacaccactcctaatcctcacactccctgttttcacagatctcagttgtaaggttatataaatggatcggggatatgttaccttataagctggatgttctgcttgcataagcattttgattaaaaataagcattttgattaaaaacaaa

SEQ ID NO: 86607 - DNA, 4838 bp, Homo sapiens
gtagaggtggccccttctgtccacacgccatgaggtcgttcccactctccagcaacttgaccggtttagtaaaaaacgatgagctgaaaaaccacatgcaataaacaagaaggagcagccaacaaaatctcttaaaatctcagaaatgttcaataaacatttgcagagcgagaaaataaataacatcgcaaaggagccagtggctcctcttttccccgcatgttccttgggtcaggggtgcatgtgtctcactagaagtcacatgtattaaaagcaggtgagttccagctctctctacaaccccactggcccccacccaaatgctcccaacgggtccctgacaccctcgctggtagctcctgcctttgataagctcctctagcctcaactgcttcttgatcctggctcccttcccagacaggctgcccagaaccctggttcatctgctcactggagccgctttgccagccagccagagaccccctcccagccatggcctaaagagccaacagctgggaacttgggctcatccccagctgcgtctggtcggcttggcggccaactggaaaacccagggcctccatggcgctctggacagaggaggccccgatcccagccccggctgccagccaatgccagcctgtccacttgacagaaaaacacacgctggccgcctgccccagggtgtttccagaagagaaatttaatctaatttacatacttctaggtacatcgataaccaaaatgtggccactgaaaaaagttaaaaggtcaatcagctcctggcttctagctggcccaggattgcaaaataaaaagatccacgttccttattctctacacaaaacgcgtttttaaaaaagtgaaaggtctagggagctatacatagaaagcaacagtgaaaagggagagggagcaggagtgggggaggagagtcccaccccccaaccccaccctccagggccccagagcccctgaggctctttggggggccttgacatggcaggaggcagctgtcagctctgagctcttcccagctgggaaggcccctctcgggggcagccaacaaggatttccgtggcattgtgggctcagtggggggctcccaggccccagcaggccccacagagggagcgtggcttcccctgagcaagcaccgtggcatgatgtggtcgttcaacccaggaactgggggtccggggcaggtcccgggtctcacgaggtgcgtgttgtgtgtgttcgcatgtacatgtgtgtgagaggatattcatgggggagagagggaaccagaacaggggtctttggggtctttgcaaatggccacggatggcagacatcgccctgcctggctgctagacgggggagtgctgtcctcccctgtgaccagaccggctgccatcagagacctggctgctgcccctgctggaccaggtgggcatgggctgaaggaagacaccctgtggccccagagtcctcgggctgggggaagggcagctagctggctcccggcgccctggctgtagtgtgcccggcccccaaggggcgccggtttgaggttttggcttgctcctttggaaacggaaagaaagaggaagagggacgaggacacagaggaggaagaagaggagacagaggtggcacgagaggggatctggaatgcttttgtgttagggagcctctgccgccgctgtctgtgcctgcggggcctgggactcctcaggtggggggtccgctttggagaagttcatctccaggatgtgccgctgtaagtgccgcacccactcttcctggatggagagggggccctggaattccacctcacagaacctgcatttgagggtgtagatgttgcccacgaacttgacaagtgatgtctgggggggccggggcaccagggaggggactggccggactcggggtgggggttgccgcacctcctccagcttctgctgtaggtcattggtgtcctcgcctccccgggctgcgaaggcatctggagggcgggcttgtcggcgttcaaatttgttgatgttctgctgctggtgctcctcagccttcacggtgcctggcgggctggctgccagaggccgctcaccaccgtcggctgcccggccagcctcgggccctggctcccctccggcactgcggccgaccacggccaggcccccgggtgccagccccagggacgcccgcgttgtcactgtcacggccatggccggcactgcggaacttcttggtgaaggggcggccgccctggatgtagctgcggtaggcgcccaccttctggggccggtgtttgatccactcgctcagtgtctcgatgggcgagccattgacgcaccactcggtcacgccgaactgccgcaggtgtgcccgtgcgtggctggccagggccttgcggttttcaaagtaaaggccacacagctcgcagcaggcctcggtggaggagtgggaggtcttctcatgaagggtctttgccttgaagggcagttcagtctggatgtaggtcttggccttgacctctgctgggaggaggcggtcctcctgcaggggccgcttggctgccactgagcccaggtagccagtggctgagggcttggccccagtgatgggcgtcaggctgagctcacgaggaacctgggccggccctgcacctggtttgcctggccggccagccaggggcgacagcggcagtggggactgcacgggcccaggggccacggtgggaggcccgtcctcagccagggcaggggccaggtctccagccggtggctccttcttgatgaggcacggcttggacttcttcttgaggatctctcgcagtgtgtcgatgggcgaaccattgacggaccactcggtcacacccatctgccgcaggtgtgagcgcgcgtgactcgacaggcccttgcggttctcgaagaactcgccgcagaactcacagcggatgtcgcgcaccggctctgcccgggacgacaggttcaggggtgtcatgtcttcccgtggtgccccccagggaccctcagatgggtgcagttccccatgaagggcccccggcagcatctcccgcttgatctccacccgtatttgttcaggcttcagcttcttgggcaaggagggtgcagccaggcctgggaacatctttcgggccgtaggaggaggagaggcagttggtgagtggcccagggggctgcccggtggtggtggcaacttcttggccaagggtgagatgtgaaggtccgaggggctgcgggcttccagtgagctgccaggacctgcgccgcccatcatcttggccagggcttttgggcttggccctggtgggttgggaggtccaccaggccgagactgggtccgtctcttcaggatctcccgcagcgtgtcgatgggcgagccattgacgtaccactcggtcacgcccatttgccgcagatgggagcgcgcgtggctcgagaggcccttgcggttctcgaagaactcaccacagaactcgcagcggatgtctcgtgctggctctgggcctgaggtgaggttcaagggcccctcatcctcagactgaggccactgtgcctttggggaggccggccgggggctcagggacagctgggggctcttgtcctcaggattcttaggggtaggggagcccgccagggccagtggtgtctttttgaggagtggagagctgggcgggtggcccaggcccttggccgagaagccgggaggcgacttgatggctttgttgacagcaggggcatccaagggcttggccaggctgagcaagccgggccggggggccccggcgaccacctccttcagtgagctggacttcttagccaggcctgggggcagcccaaggtgggcgtcaggcagacccttctgcttcacaagctcgtagaggaggtcgatgggtgcgccgctgctttccgactctgccactcccagctgccgcaggtgggagcgcgcgtggctggacaggccctttcgggtctcaaagcaggcaccgcagacctcgcaggtggtcaggctctgggccttgaggtcctgcagctcctgtttgctgccatgaggaacctctgcagccactttgctgctcagccgactggccacctgctccagggccccagggacaggcaggctcttcttagggagcgagggagagcccaagtccatggccaccattgcgttttcctcagaacccaggccgggcgcgggagcggacgcgggcccgggccccggctccggctcggccttgggcccgtcccgcggcggcggtggcggtggcggtggtggtggcggcggcggcgggggtgggggcggcggcggcggcgcggggggtgccgcggggcccgggctcggggggctgggcgggggcgcccccgcgggcgcgcgctcccgggcgccccccgcgcgcggccccgccgccgccttgctctccgcttttgtcactcggcactgggcggtggaggcggccatcttggctccggcgcacgcggggcggccgccccaggcgggagcagcatctccataggctggcccagggtcctcagcccaggtgggtggaaagggcaccgtgagaggtaagcggggccgacgggaggtcaggaagctgccaggcggacccccaggctctcggcccagggggctggggggctgctcagcagcagaggtggccagcagctcctgcaggatgttgatgggtgagacagtgagctcccagttggtgataccgaagtcacgtaggtgggcccgggcgtggctggagaggccggcccgtgtgtcgaagccagccccgcagaagtcacagcgcatcaggctgaaggtgcctgggtcaaagttggcca

SEQ ID NO: 86608 - DNA, 2186 bp, Homo sapiens
cccgggcacttttcagaaaaagaatctgcatcctggaaaccagaagaaaaatatgagacggggaatcatcgtgtgatgtgtgtgctgcctttggctgagtgtgtggagtcctgctcaggtgttaggtacagtgtgtttgatcgtggtggcttgaggggaacccgctgttcagagctgtgactgcggctgcactcagagaagctgcccttggctgctcgtagcgccgggccttctctcctcgtcatcatccagagcagccagtgtccgggaggcagaagatgccccactccagcctgcatccatccatcccgtgtcccaggggtcacggggcccagaaggcagccttggttctgctgagtgcctgcctggtgaccctttgggggctaggagagccaccagagcacactctccggtacctggtcctccacctagcctccctgcagctgggactgctgttaaacggggtctgcagcctggctgaggagctgcgccacatccactccaggtaccggggcagctactggaggactgtgcgggcctgcctgggctgccccctccgccgtggggccctgttgctgctgtccatctatttctactactccctcccaaatgcggtcggcccgcccttcacttggatgcttgccctcctgggcctctcgcaggcactgaacatcctcctgggcctcaagggcctggccccagctgagatctctgcagtgtgtgaaaaagggaatttcaacgtggcccatgggctggcatggtcatattacatcggatatctgcggctgatcctgccagagctccaggcccggattcgaacttacaatcagcattacaacaacctgctacggggtgcagtgagccagcggctgtatattctcctcccattggactgtggggtgcctgataacctgagtatggctgaccccaacattcgcttcctggataaactgccccagcagaccggtgaccgtgctggcatcaaggatcgggtttacagcaacagcatctatgagcttctggagaacgggcagcgggcgggcacctgtgtcctggagtacgccacccccttgcagactttgtttgccatgtcacaatacagtcaagctggctttagccgggaggataggcttgagcaggccaaactcttctgccggacacttgaggacatcctggcagatgcccctgagtctcagaacaactgccgcctcattgcctaccaggaacctgcagatgacagcagcttctcgctgtcccaggaggttctccggcacctgcggcaggaggaaaaggaagaggttactgtgggcagcttgaagacctcagcggtgcccagtacctccacgatgtcccaagagcctgagctcctcatcagtggaatggaaaagcccctccctctccgcacggatttctcttgagacccagggtcaccaggccagagcctccagtggtctccaagcctctggactgggggctctcttcagtggctgaatgtccagcagagctatttccttccacagggggccttgcagggaagggtccaggacttgacatcttaagatgcgtcttgtccccttgggccagtcatttcccctctctgagcctcggtgtcttcaacctgtgaaatgggatcataatcactgccttacctccctcacggttgttgtgaggactgagtgtgtggaagtttttcataaactttggatgctagtgtacttagggggtgtgccaggtgtctttcatggggccttccagacccactccccacccttctccccttcctttgcccggggacgccgaactctctcaatggtatcaacaggctccttcgccctctggctcctggtcatgttccattattggggagccccagcagaagaatggagaggaggaggaggctgagtttggggtattgaatcccccggctcccaccctgcagcatcaaggttgctatggactctcctgccgggcaactcttgcgtaatcatgactatctctaggattctggcaccacttccttccctggccccttaagcctagctgtgtatcggcacccccaccccactagagtactccctctcacttgcggtttccttatactccacccctttctcaacggtccttttttaaagcacatctcagattaataaaaaaaaaaaatatctcgagggggggcccggtaccca

SEQ ID NO: 86609 - DNA, 444 bp, Homo sapiens
ctctgctcgcgcgactcggcggagagggctggagactggagacccgcggggctggcgtgactgcgcattctagcggcggaggatgccgagggcgcgggccgggggcacctgccgtggccctggactggggcacagagggtgttgtttgttaatcgaaagatgcagacgcctgggcctgcgtcactcggctgccggggcgcactggggcgtctgtacccagcgtgcgggagggcacccagggccggacgcgcaccgcaggggtctttttttggccgcggggccgggcgggcgggtaatgacagccgggttgctggggagccgcgggccagatggaagcggggccgcaggtgagggacgtccctcgcgtagcgccactcagccgccggggccagagcgggagtcaaggtgagggcgcccccaggtggccgctctcggccgcggcgg

SEQ ID NO: 86610 - DNA, 2202 bp, Homo sapiens
tttttttttgctaggagcagttctctttattaatggctagaaagtcaggatcacccaaggaagtcactgaggggccacagcattgaagggtatggggtttggagagataggagcaggacccaccactcacgtccagaacccagggggcacacctggtccaagaggtggaggcattggtcactggagtcacgagggtcaggacaggcactgagaggctgagggagtgtcataagcactctcttctacactacacccagcctagttgggctctaccaagccccactttgcaccccctgtgtccactcctttggaagccccaggactcactgagaggctgagggagtgtcggtccggagggaggcagtcacgggctagggctgggagtcgtagccagtgtgcagggcctgggagccccagggctgatgccctggctggcgtagtactccaccacctgccgtggcacctcagccaggacacacttggcgagtgcagagggggcagcctagggtggggacagtgatgtggttaggggtgagaggaagagtaggggaggcagggtcatctgagggagaagtggggcttcagggtggccagctgggctcccgcgtccttagcaggacatcaaatggtggaagacgaaggtcagatttggggggatgagaagctgaggagtccttcagccggaaggggcccgggggactcacatccttgaagtctcggaagggcacgaactggacaatgtctcgggctgcaggcacccctcgggggcagcgcaaggggccgtcgtcgccatccagcagccgcatgtcagagaagtcagcattgcccacgcctacgatgatgatggacatgggcaggcgggaggcacgcacgatagcagtgcgagtctcagccatgtcgctcaccacaccgtcagtgagcaccagcagcaccgagtacttcgtggcttggccggtgctctgctcccgctgggccggctcagccacacggttgatgatgggggccacattggtggggccgtagagctggatctggggcaggcaacgacggtaggaggcgatgacccctgagatctctgataaagacaggcctgggatgggtggaagggacaggaagctgggccctggggagtggagtctgtgctcctgtgtggagtgtgtctgcggggaggcggggcaggtgaaaatctccccttttaccttcacattcaggattttccgggtcaaagttgatagcaaagtcatgggacacctgtgagggcaaggcgggagcagtgagggcctgccttttctgcctgactgacacgccccccatctccttctttccctcgcatctagcctacctcgaagttgggggggattcgagccccaaagccaaaagctgggaaccgcttatcactggggagaagaaaaagctgtggaatccgttgggcaaggcctccctgcctgttccctcccgccccactctctcctacctgtcatagtcctggcagatgcctcccactgcacgcagggcctgcaggtagtggttgggctgtcggggactgaggcagtgcagggactggctgctcctcgggtccccattggaggcagtgaagtcaatggccacctgggtgggggtgggaagaaggtcatgctgcaaccatgagagccaccagattgcctaggccagagctgggatctgtagggaggactaagatgagtggtggggaggctacaggtagccacataatgatgtgggggtgcataagctgacaatgcgaaggctcatgagcagcccaagttggggcagtggagattctgggctccttcctttcactatggactcagcccctccctcttgcctgtgtgccctccctctgagtctttaccgtgaagctgatctggcagccacccatgatgtaatccaggaaggtgtgcaccttctccacctggaggtagggagaggggtaaggcgaggggatggggtggtcctttgaggagggagcttgggtagggcttctgtggggaacatgggggagccagagttttttgggttgcagttgggggtggtttccagttcccagaagcagagaaactggtctttgaaacaagggaagggttgaacctgagagtgtggtaggggcaggggctggggcaaggcttgaagcaggaagtgaaatttaccgtgcactgggccagcactaccgtccctgagctccca

SEQ ID NO: 86611 - DNA, 429 bp, Homo sapiens
cccgatggtgagtgtctctaggagtcattatcaataacatcagtgagaatttctttgctggtcacatgaacaccaaattcaatcttcatatcaaccggtgtacagttctgggagcaaccgggatttctccgggatttcaaaaacagcctatgtggcatgactcatgatatccacttcagttttataccaagtgcagcaaagccaaattttgctgcaattagctgttgcctagaccactgtgggtcatgattggcatcatccttgaaaaacatctccactttaggtgggcaaaactcacatccttccttgacaccaggatttctttcgagtgaagaaccagttggtattcttctgcaaaccattcagttggaattatttcacactggggcacaatgaaagctgtctcctcacattttctggtgaaagcag

SEQ ID NO: 86612 - DNA, 429 bp, Homo sapiens
tttcgtggggcctgtggtggggatcctggggctgtcgggctgagtatgccgtgtgggtggagaggaagcctcggggaaatcgcccaggtgaagggagggcttggtgtggggacttgcactgggcagaggggcagcttccctgagagcagctaagccccaggcacaccgggcatccggacacacaggtcggggaaggataggctgagccggggctcccagcagagacgcctgggtggggcaggaggccgctccaggtgtgagccacagaggaggggagagggacccccacgggagtggaagtggcagagcagctgcagaagtgcagggagcggaaaggtaccagggcagctgctttccgctgcctccgggccgggcagtcgcagaaacagcagggggaggagcaacagctgccaaaaattgccaactaag

SEQ ID NO: 86613 - DNA, 486 bp, Homo sapiens
  misc_feature (1)...(486): n = a,t,c or g
ngaagaggggtttggcccttctgagtccctagtcagtgtggtggaattcggtgtgctcacttacattatgctcagtggacgctccccgttctatgagccagacccccaggaaacggaggctcggattgtggggggccgctttgatgccttccagctgtaccccaatacatcccagagcgccaccctcttcttgcgaaaggttctctctgtacatccctggagccggccctccctgcaggactgcctggcccacccatggttgcaggacgcctacctgatgaagctgcgccgccagacgctcaccttcaccaccaaccggctcaaggagttcctgggcgagcagcggcggcgccgggctgaggctgccacccgccacaaggtgctgctgcgctcctaccctggcggcccctagaggcacggaccacagccaggcctcgggcttcaactggggttcccaccaatgccacgggacattccagggcccac

SEQ ID NO: 86614 - DNA, 561 bp, Homo sapiens
tccaatgtcacacacagccacaaagagaataatagtcgcacagtcacatgcagaataacacagttacagccacgcacatgagaataacagtcacacacagtcacacacacagaataacacagtcatacacacagagtcacacacagaataacagtcacacacacagagtcacacacagtgaataatagtcacatacacagtcacacagaaaatagtcacacacacggtcacacagagaataacactgtcacacattgaataacagtcacacacagtcgcacacagaataacagttacacatagtcacacacagtcacacacaaagaataacagttacagtcacatacagaataacagtcacacacagacgcgacaccagcctgcgaccttgcccagggtggcagaaggagctggtggcagaggagctggtggcagaggttcgggccttatttggccacccagcctggcttgtcctcctggtgcagacagagctgcgaggggccccacggccacgccagggcttcctgcaccacgggccgccatgcaggtcgccttggagtc

SEQ ID NO: 86615 - DNA, 479 bp, Homo sapiens
  misc_feature (1)...(479): n = a,t,c or g
agagcgtgnccaaatgagaccccatcngatgacggtaattacctgaaaccacctctgagggaaggtggtggcgtctcaaatgcatgggcatgtggctggtcaggtggcctccatcccagggtgccccgtctgtgtgacctccctctgggtgctgtgggcttgctccagggtgcaggtgcaaccccagcagcggtctctggggccaggcaggtgggtggacgattggacttggaggggaatacagagggcatggaagtggcgaggctggcctgttggcgagggtgtcctggtggtggggcgggctgagtcagggaaggactctgaaggtcccaagcagctgctgaggcccccaaggaagtggttccaaccttggacccctaggggtctggatttgctggttaacaagataacctgagggcaggaccccataggggaatgctacctcctgcccttccacctgccctggtgttcacggtggc

SEQ ID NO: 86616 - DNA, 480 bp, Homo sapiens
  misc_feature (1)...(480): n = a,t,c or g
gaggccccnaattgagaccatggacatctggtggaattccgcagccagccagaatgttccattcattcctctgagtcattcaggcaaaggcttaagagggcctgccgtgggcaggaggttaggaggctccagggagcaagcgccgtgcagacaccaggctgtgggtggcgggcagaccccagggggctttggtgaggggcccaaggccatcaggactggctctgagcacccatcgtggtcccttggaaggaggttcaggtccagctggatgcctgaggctgttggctgcagaacagcatccctgggttgccaatgccaccgggcactgatggcccgtgttgctgagaccctgcggcagaggcggaggagccttcagacctctggtggacagagtggtggtcggggcccagccgggagcacgaggctgctcttccgtgttctgttcattaggggtcgacacaggcagccagatttcaagag

SEQ ID NO: 86617 - DNA, 504 bp, Homo sapiens
  misc_feature (1)...(504): n = a,t,c or g
tggtgtcccggggnnnncgcngaattgagaccctannnanaatcggagaccatantccangngcnggaattcgttcgtgcgctcagtggtggaagacaggacagaaaataaacggatcaacatccaaagcaacaaggtcattacagcttatggggaaactgactcgatgaagctcaggcctggccgcggtcagggtagaatcaggactagaacccaggctgtgtggctgcggccctgaccctcaccatccaggtcaggcagagaacactcaggtggggcaggaggtcttggcccccatggtgtggggcttggtcacagctgcttccccagccccaggcctgcacgaagaaggcactcactaaatgcttgctgttgaggtgagtgaagctgagggtggaatccgagagtgggaggaggaggagaaggaggaggaggcagcagagaggacgcccacaggagaaaagtctccaaactctcccaggactttgctgtctctgagagggn

SEQ ID NO: 86618 - DNA, 3031 bp, Homo sapiens
  misc_feature (1)...(3031): n = a,t,c or g
gtcgactttttttttttttgatgctcaacaggatctcacgtttattgagaagtgattaatggtaaaaagaaaggcaatgccctttcctcattggctgaacaagaaactgaagaaacattcacggacacgttttaacagtatttttctcttccaaaatgcatttctgtaaacgagtttttaccactgttctcagctttgaaatcaaattaatcctgacttaatcagtataatgtacaagaacagaacatttcttaggactcctagtactttactttgagtaacaaaaggtcagagaaaatgaaccacccttaaagacacaaccttgggtaacactgttatattctcctagacaaaaattcttcataaaaatgttcttccagttcggaaggataaaatcaaattcccactttctggggtggatgcccaaaaccttcacaactcaagtgttctccaagtgcaaatgtcaaaatgggaggaggaaagggtttaaaaattagagaaaactgtatgcacttacggacttaaaaatccgaaaaacatagtaaaaagacaaaaaaacatagcattatgctctgaaatcacaaccaaagccaaaataaaagggacatttttcacctaaactacctagagggattttttggttagttttttctttttcttttttttttcattttccagttaagtcctatgtcttttgtgaaattccaatacttaaactgcaagtctgcaatcgtctctgaagtcagtgaaattaagaaaaaagtcctaattctcttgaaggtcattttttcctcttaggatatgcagatgcaaccgttgctgcagtctgtgtagaactgccttttatttcccacgaccttgacgttcctttttaacactttcttcttcctcttggcgtttctcatagtgtgagaagtcatcaaaaatggaagtggtgtgcttgtagctggctataattttcaacacctgcttagccttttccagaggcacttcctgagtgtccctagagttggtcactggtttattctcgttgttctctaggcgaatgtgtcgcagttggctattgggaacgtccttcacaaaaatccacctgacatcaaaacgacccttccatttgtcctgggaccacacacctgcacatgtgttgtagtccacagcagatttcatttctgccacgccacagaagtgtccactgccgttgacactgaaaagtaagtaaacggggcctttcccgttcatggaacgataagcagcatccagtctcttgttaccatgctctgtgctgcaccaaatattatacttaatggaacggtgaatatcgtcctcagagtagctcttaatgatgaaaacccggccatgtttcagattccagtcaaaatctttggggttatagttattaatggaccgaagcttctccaacactgggtggggttctgaaggagtagatccagaaccagcctgagactgtcctactccattaccatccaccccattatgaccgaacccactgccacggttccgaggtgctacccagcgggttggctgagctgcctgttgctggactgaaagctgggcaggctgtggtggaggtggaggcaatggctgtgtctgttgccctactgatgcctgagccactggtgggctattgttagcctgctgacctacaggctgaggagacccctgggttggctgacctatattctgaaccaaagcctgtgagggggcttttgcaacgggacccttgttatcccaagttccaatatccatgttatgctttatcgggggtggcggaagacttgaccctgcaatgccattcttggtcttcagtttaggttgctgttttgcaggcttgctagcaatatcagcccaagatgctggttttggaggagcaatggtggctggaggcaaactattggaagccacgatgttactagtaatggacccgctaccaacagcagaacctacaacttttggaacattgcttgcaacttctgtgctacccaacttcagtgctgccatcccttggtctatagtattcatgccaggagccttattgagggtctcattggcaaaagctgactgtccatcaatcatggctccacctaaggagctaggtgcataagcataattgctactatatccagagctctgagtagactgtccctgagaactgttatttccccatgctgagaagtcaatcccactgggaaagaaattaaaaccatgctgaccaagaaatggagtgctacctagggctcctggttgcccaaacattgcatctggtaggaagtggggctctccgttgctcagctgtccataagaagttaagtagggcatggctgtgtcaccccccgtagaccaagcagcttcacccaaagaataggagaagccaatggagggactgtagtaactgggtaagtaggaatctgacatggcagtatatgcattattgggccttgcctgtggactcaagtaaggttcaaaatcatcatcgtttaatccatccttttgatgtacagatccattttgtactttgtttccttgaccttttggtctctgctccaagaggctgctggccgacatggctctcagatcctcacgggcggcgacggcggcgaactctcctcagcgcggcggcggcggcagatgagccccggctgcgggagcaggcggaggcttttgtccctgacactcgggggcctcggcggacgcagcggagacacagcgcgcggctcaggctccggctccgactcggcgacgctctagcccaagagctcaatgcccgtctctatgcttttacgcgcgcgcccgccccccaccgcctaaagcagagcgccgaacagcggaggcgggcggcgcgcgcggcgcgagcgctgactctcacattcactcacccacgcggaaggggcccggcgcgaagaaccccgggaagggagaggccggccgctgcgccctctggcggattggaggagcggaagctgtgctcacggnnctcccgccctcaccggcccaggattaaggcctagggggt

SEQ ID NO: 86619 - DNA, 429 bp, Homo sapiens
  misc_feature (1)...(429): n = a,t,c or g
atcgcattgatgactcttagaccgngnggnggaattcaataactctgggaggggtgggggcggaggagctgggaaagggacctggctccctacagatgggggcctaggatgcaccttcaccctccagcttcccttctgggagggcagtggcagcagcaaagggccaaggccccaagccaggcaggctatgccaacgacactgccatgtgccaatctgtcaccaccctgccaagcactaaaggtaggggtagagatggaggaggaggaggggccggggccgggctagagggggactcagctccattcacagttgggggcgtgtctgggaaacaccctgggtccagaggtacaggactgcttggtgcccagaaaatgccaaagaaacctgactctactcttctgtgcccaggtggggaaggagaagggtcg

SEQ ID NO: 86620 - DNA, 1646 bp, Homo sapiens
gccctggtgttcccacctcctcagagccatgaggaggaatgttctccttatgtgactaggcacaggttccaaatggggaggggactggctcagcatccggagccaaaacaggaatagaactgggagctgagcctggagcggttctgggcttttggttctctgcatcaacacagccagcatgcctatgatttctgtgctgggcaaaatgtttctgtggcagcgtgaagggcctggaggacgatggacttgtcagacaagtcgcagagtgtcctcggaccccgcttgggctgtggagtggatcgaacttcctcggggtctctctctatcctctttgggatctgctcgaaccctccgaggctggagcaggtcctcccgcccttcctcggtggacagtcaggacttgccagaggtgaatgttggagacacagtcgcgatgctgcccaagtcccggcgagccctaactatccaggagatcgctgcgctggccaggtcctccctgcatggtatttcccaggtggtgaaggaccacgtgaccaagcctaccgccatggcccagggccgagtggctcacctcattgagtggaagggctggagcaagccgagtgactcacctgctgccctggaatcagccttttcctcctattcagacctcagcgagggcgaacaagaggctcgctttgcagcaggagtggctgagcagtttgccatcgcggaagccaagctccgagcatggtcttcggtggatggcgaggactccactgatgactcctatgatgaggactttgctgggggaatggacacagacatggctgggcagctgcccctggggccgcacctccaggacctgttcaccggccaccggttctcccggcctgtgcgccagggctccgtggagcctgagagcgactgctcacagaccgtgtccccagacaccctgtgctctagtctgtgcagcctggaggatgggttgttgggctccccggcccggctggcctcccagctgctgggcgatgagctgcttctcgccaaactgccccccagccgggaaagtgccttccgcagcctgggcccactggaggcccaggactcactctacaactcgcccctcacagagtcctgcctttcccccgcggaggaggagccagccccctgcaaggactgccagccactctgcccaccactaacgggcagctgggaacggcagcggcaagcctctgacctggcctcttctggggtggtgtccttagatgaggatgaggcagagccagaggaacagtgacccacatcatgcctggcagtggcatgcatcccccggctgctgccaggggcagagcctctgtgcccaagtgtgggctcaaggctcccagcagagctccacagcctagagggctcctgggagcgctcgcttctccgttgtgtgttttgcatgaaagtgtttggagaggaggcaggggctgggctgggggcgcatgtcctgcccccactcccggggcttgccggggggtttgcccgggggcctctggggcatggctacaagcttgtggcagacaagtgaatgttcatgttcttaaaaattgccacacacacattttcctcctccggataaatggtgaaccactaaagggggttgtgactgggctgtgtga

SEQ ID NO: 86621 - DNA, 1384 bp, Homo sapiens
cggccgcattctttttttttcacgtttcatttttattgtgctgggggtcaggcagcagcccccactgaggccccacccagcctccgggctgcctggcctgtgccatgggtcccaggctccagcagggagctcgtaccttccctcagctgagggcccacctggccttgggatgccgttggggtagccagggtgggggtagccaggggtggattcacagagaagatcccagcccatcccatgccagggtctggggagcctcccgaggaaggggaggaggaagaggaggaaggccctgcctggccttccgctcagtcacgagtctttcttgcaggagcaggaccccagctgctcctccaggaaggaaatctgctcgctcagggagtcgatgcggccgagctgctggaaggagtgcaccaggaggctgccggggtccggaagcccatgctccagtgcctgcgaggccaggctgtgcagtggggccagcaccagctgcagcttctgtgggtgcagaagggcagtgaccctgggccggcccccgccctctctgctccaccggggtctagggaggacccctgggaagggctccacaagcctccagcccccgcctccgcggcagggctccaagtgtccactagagggggctgccgtggcagaaaagcttgccgcagagtgggtgcctggggcatcaggctggcggggtggtcccagccttggggtccctggcaggagaactagggggacagctggaccactggccagtgggaagactggcaagagctctttgtcctggtggggacaaagatgggggggtggggaggtctcgtctgggtccaggctctgtgtattgtctggggggctgtcaagcttggttcctccggccctgggggggtccctggtcaagtgtcccagctgcttctgcccagcatggaaacaggccagggccccctcggcagtcagcagcgaggaagccacctccccagggccaggaccttttcagaccacccccagccatccgtgggtcgggaccatgtcccaggagactacggagcctgtacccgggcctgggcctctgctgttgtgaagacctgccccctgccgacgcctcacctcctccagcaggtccaccctggactgcctgcctcccccccggacgcctcatctcctccagcaggtccaccctggactgcctgcccccctgacgcctcacctcctccagcaggtccaccctggactgcctgcccccccgacgcctcacctcctccagcaggtccaccctggactgcctgcctacccccccgatgcctcacctcctccagcaggttcaccctggactgcctgcccctccacacctcacctcctccagcaggtccaccctggactgcct

SEQ ID NO: 86622 - DNA, 500 bp, Homo sapiens
  misc_feature (1)...(500): n = a,t,c or g
tggagttgcncngnannnaggggngnaatcgagacccctgnngaatggacggcccatcgcgcaccaccggntttcgacacgggagagcgacccttcgcctgcgcagaatgcggcaaggccttccgcggcagctccgagctgcgccagcaccagcgcctgcactctggcgagaggccgttcgtctgcgcccactgcagcaaggccttcgtgcgcaagtcggagctcttaagccaccggcgcacgcacacgggcgagaggtcctacgcttgcggcgagtgcgggaagcctttcagccaccgttgcaacctcaacgagcaccagaagcggcacgggggccgcgctgcgccctgacccgaggacgccctgagcgggaggtcgcggacacacggcattgcggggtctcgggcgtgagtgcgctgtctgctggcccagactttttcgggccgccggtgcgggcgccctcctgctgggagtgcaggggcggccttgggtgtggagat

SEQ ID NO: 86623 - DNA, 453 bp, Homo sapiens
  misc_feature (1)...(453): n = a,t,c or g
ggcattcgctgctgacgtcggggaggaaagcagtttccagtcgcctggggccaggacatggcgttcccagctgttgtagagcatgaagcaccaggatgcccattcgggtgcctgctgagatcaggctctttgagaaggaatcctgtggtcgcctgaggaagtccaaaaaaatttcgaggacatctcagccatccatcccctgttcactgtggaggttgaacaccggggctcctggaggggggccctgggtctccacagaagtgctggcagccaccatccacttcctggccttccgtgcccgctccacctctgttctgttgtttactgtctcctttgtgggaattatggaataaacaatcactctggtgtcctggaaaataaacctgatgctggagggcttgagtgtangaatccagctgggctcccactgtctgccccagggtgcggagttag

SEQ ID NO: 86624 - DNA, 8699 bp, Homo sapiens
agtgaagaagatgagagggaggagtcggacttcgacagcgccagcatccacagtgcctccgtgcgctccgaatgctctgcagccctgggcaagaagagcaagaggaggcgcaagaagaagaggattgatgatggtgacggctatgagacagaccaccaggattactgtgaggtgtgccagcagggtggggagatcatcctgtgcgacacctgcccgagggcctaccatctcgtatgcctggacccagagctggagaaggctcccgagggcaagtggagctgcccccactgtgagaaggaggggatccagtgggagccgaaggacgacgacgatgaagaggaggagggcggctgcgaggaggaggaggacgaccacatggagttctgccgcgtgtgcaaggacgggggcgagctgctctgctgcgacgcctgcccctcctcctaccacctgcattgcctcaacccgccgctgcccgagatcccaaacggtgaatggctctgcccgcgctgtacttgccccccactgaagggcaaagtccagcggattctacactggaggtggacggagccccctgcccccttcatggtggggctgccggggcctgacgtggagcccagcctccctccacctaagcccctggagggcatccctgagagagagttctttgtcaagtgggcagggctgtcctactggcattgctcctgggtgaaggagctacagctggagctgtaccacacggtgatgtatcgcaactaccaaagaaagaacgacatggatgagccgcccccctttgactacggctctggggatgaagacggcaagagcgagaagaggaagaacaaggaccccctctatgccaagatggaggagcgcttctaccgctatggcatcaagccagagtggatgatgattcaccgaatcctgaaccatagctttgacaagaagggggatgtgcactacctgatcaagtggaaagacctgccctacgaccagtgcacctgggagatcgatgacatcgacatcccctactacgacaacctcaagcaggcctactggggccacagggagctgatgctgggagaagacaccaggctgcccaagaggctgctcaagaagggcaagaagctgagggacgacaagcaggagaagccgccggacacgcccattgtggaccccacggtcaagttcgacaagcagccatggtacatcgactccacaggcggcacactgcacccgtaccagctggagggcctcaactggctgcgcttctcttgggcccagggcactgacaccatcctggccgatgagatgggtctgggcaagacggtgcagaccatcgtgttcctttactccctctacaaggagggccactccaaagggccctacctggttagcgcgcccctctccaccatcatcaactgggaacgcgagtttgagatgtgggcgcccgacttctacgtggtcacctacacgggggacaaggagagccgctcggtgattcgggagaacgagttttcctttgaggacaacgccattcggagtgggaagaaggtattccgtatgaagaaagaagtgcagatcaaattccacgtgctgctcacctcctatgagctcatcaccatcgaccaggccatcctgggctccatcgagtgggcctgcctggtggtagatgaggcccaccgcctcaagaacaaccagtccaagttttttagggtcttaaacagctacaagattgattacaagctgctgctgacagggaccccccttcagaacaacctggaggagctgttccatctcctcaacttcctgactccagagaggttcaacaacctggagggcttcctggaggagtttgctgacatctccaaggaagaccagatcaagaagctgcatgacctgctggggccgcacatgctcaggcggctcaaggctgacgtgttcaagaacatgccggccaagaccgagctcattgtccgggtggagctgagccagatgcagaagaagtactacaagttcatcctcacacggaactttgaggcactgaactccaaggggggcgggaaccaagtatcgctgctcaacatcatgatggacctgaaaaagtgctgcaaccacccctacctcttccctgtggctgccgtggaggcccctgtcttgcccaatggctcctacgatggaagctccctggtcaagtcttcagggaagctcatgctgctacagaagatgctgaagaaactgcgggatgaggggcaccgtgtgctcatcttctcccagatgaccaagatgctggacctcctggaggacttcctggagtacgaaggctacaagtatgagcggattgatggtggcatcaccgggggcctccggcaggaggcaatcgacagattcaatgcccccggggcccagcagttctgcttcctcctctcaacccgggcaggtggtctgggcatcaacctggccacggcggacactgtcatcatctacgactcggactggaacccgcacaatgacatccaggccttcagccgcgcccaccgcatcggccagaacaagaaggtgatgatctaccgcttcgtgactcgggcctcggtggaggagcgcatcacgcaggtggccaagcgcaagatgatgctcacccacctggtggtgcggcccggcctcggctccaagtcggggtccatgaccaagcaggagctggacgacatcctcaagttcggcacggaggaactcttcaaggacgacgtggagggcatgatgtctcagggccagaggccggtcacacccatccctgatgtccagtcctccaaaggggggaacttggccgccagtgcaaagaagaagcacggtagcaccccgccaggtgacaacaaggacgtggaggacagcagtgtgatccactatgacgatgcggccatctccaagctgctggaccggaaccaggacgctacagatgacacggagctacagaacatgaacgagtacctgagctccttcaaggtggcgcagtacgtggtgcgcgaggaggacggcgtggaggaggtggagcgggaaatcatcaagcaggaggagaacgtggaccccgactactgggagaagctgctgcggcaccactatgagcagcagcaaggaggacctggcccgcaacctgggcaagggcaagcgcatccgcaagcaggtcaactacaacgatgcctcccaggaggaccaggagtggcaggatgagctctctgataaccagtcagaatattccattggctctgaggatgaggatgaggactttgaagagaggccggaagggcagagtggacgacgacaatcccggaggcagctgaagagtgacagggacaagcccctgcccccgcttctcgcccgagttggtggcaacatcgaggtgctgggcttcaatgcccgacagcggaaggcctttctgaacgccatcatgcgctggggcatgcccccgcaggacgccttcaactcccactggctggtgcgggaccttcgagggaagagcgagaaggagtttagagcctatgtgtccctcttcatgcggcacctgtgtgagccgggggcggatggtgcagagaccttcgcagacggcgtgccccgggagggcctctccaggcagcacgtgctgacccgcatcggggtcatgtcactagttaggaagaaggttcaggagtttgagcatgtcaacgggaagtacagcaccccagacttgatccctgaggggcccgaggggaagaagccgggcgaggtgatctcctcggaccccaacacaccagtgcccgccagccctgcccacctcctgccagccccgctgggcctgccagacaaaatggaagcccagctgggctacatggatgagaaagaccccggggcacagaagccaaggcagcccctggaagtccaggcccttccagccgccttggatagagtggagagtgaggacaagcacgagagcccagccagcaaggagagagcccgagaggagcggccagaggagacggagaaggccccgccctccccggagcagctgccgagagaggaggtgcttcctgagaaggagaagatcctggacaagctggagctgagcttgatccacagcagaggggacagttccgaactcaggccagatgacaccaaggctgaggagaaggagcccattgaaacacagcaaaatggtgacaaagaggaagatgacgaggggaagaaggaggacaagaaggggaaattcaagttcatgttcaacatcgcggacgggggcttcacggagttgcacacgctgtggcagaacgaggagcgggctgctgtatcctctgggaaaatctacgacatctggcaccggcgccatgactactggctgctggcgggcatcgtgacgcacggctacgcccgctggcaggacatccagaatgacccacggtacatgatcctcaacgagcccttcaagtctgaggtccacaagggcaactacctggagatgaagaacaagttcctggcccgcaggtttaagctgctggagcaggcgttggtcattgaggagcagctccggagggccgcgtacctgaacatgacgcaggaccccaaccaccccgccatggccctcaacgcccgcctggctgaagtggagtgcctcgccgagagccaccagcacctgtccaaggagtcccttgctgggaacaagcctgccaatgccgtcctgcacaaggtcctgaaccagctggaggagctgctgagcgacatgaaggccgacgtgacccggctgccatccatgctgtcccgcatccccccggtggccgcccggctgcagatgtcggagcgcagcatcctgagccgcctgaccaaccgcgccggggaccccaccatccagcagggcgctttcggctcctcccagatgtacagcaacaactttgggcccaacttccggggccctggaccgggagggattgtcaactacaaccagatgcccctggggccctatgtgaccgatatctagccgtcctcgagacttccctgtgttgcagcgctcatttccagctgagccacgcctgccgggccacctgcccgacccacatgggagagaaaagctgccacctttttaggagccagcaccaccttgggacaaaaagggaaacctagtaatgccatcacatggaggacgaggcccagctcagctgggccagagcccagaagtgccacctcatcataattcaagtgttcttccacacagcgttgcccccacaaccacgccggacgtgccccctcgccaccttttccagacgacttcttagaagagatttcatttatttgtacatcttttgcactttcctattgaagacttgaacacgtttgtcttgataaaagttggatgacgtatggaagattcgaacctgcagcactgatgtctctttaccgatgggttccagacccaaggtagtcctggcactgccctgtggactcagcccagctggggaggacatggcgcccggtgccctaggagccctcagtgtcccctacctgacctgtctgcacctgtgtgacagccccttctgatttggccccctgcccgcttggagcctcccagcaccagacagggcaggtttggggagccgctgtcgagccctatggtgagaccctggctgacatttcccctccttcctgccaaggctggaggccgccaggtgtttgctctctccttgtggggaggtggatcctctgccagcaggtgtctgtccccggcccagcgcatcttgaaggccctggactctgttaccagtggggggcctgtggccccggctcttcacagcaggcagaagcgtatgatcccagggagggtgggctgggggggggccagcacttgcctcggagccactgctgcgttgggtttgccttctgccagaggtgtggttaagggcagtgatagctgcgccccagcaaggagggtcatgggccctgagctggcccaggagaccctggccctgccctgtgccctgggatgcctaccctgcccacctccggaggtggaaccgggctgcccctgggggcctggacttgtcccattcccctgtccctggaaaggccttcccgggggctttttgcctgaggctgcactcttggaaggtgtggggagagttctgcctggagggggactggacccagtgccctctgcagacccctcccagccgcagcaccaagggcttgctgccttgtttcctgccaggagcgccctgacatcccaaaaccatcttcccacatgtgggttgttggaatcccacccactcccccggaccctgcccctccaagttggggacggagatggggagcaggtcaggccctccctaggcctgtttgtgtgtgatccttctcctggccccaggtcgacctggaaggcgtttctgagtcttgtactgggaccttcccagggaaggtgccttggggtgcagaatcctgggaatgttaggaaagggctgcgtgaaaaacccagctgggcctggggtggaggtgcacacgggctggggctcaactccttggagagggcctgcctgggactgagggggccagggctgggtcaggattcaccagcttgtgttgcagacactggagcaattgcctggccctccctaagccctatatgcctcactcataatgaggctgtctctgaaccccggagggcgggacctacaagtccttcctcttggcgcattcccacactccagtctggatccaggtctgcaaggccagcccgaccctgacactgcacgtgggcgtagtggggagcaccctggagtggagatgattgtcagcgggctcacatgttatggttcatccacatgcgtgttgtgtgctctgcggtgcctcctggcaaagggtcctggctcgggtcagaagctcactcccgtgccctcgtccccaaacaagcagtggcaagcactggggttggccctcgttgggagcagtgcccaccttccttggcccacagcagatatggtcccgagcagcaggactggaggcctgtggcggtcagggcaggggtctgtgtctccaccccaagggctgatggtccctcccctgtgcgccttcctctcaggcaggcttgctctgtcccttcctctctgcttccctcccaggcctcgccagggctcccttctcctctgcctggttagactcgggcacccaggaaagcctggccagggctcctttgggcctgggccccctgcactgcctggtccaaaaggggtggtgctgtccgtggccagcaccccggggcccgggaggggtgggctactagagtcagagcgggtttggggctgaccagtttgggagaggagaaaagatctgagaatgtccttcttggtttgtcagtcatctctgccaaaagtggtgatggtggtgtccgtatgtttggcgtctttgggctgggtttggtttttgctgctggtagaatcagggtcctcgggcatgaacgcgagcccaaagtgccagtctgcgattggaaatttccagccactttaagccagtgctgagtagggcttctgcagagccatgtttgagccaaggtcttggaaggcattgccccatgggctcaggtgactcggggtggagtgagcacgtctgcagggccctctcatacacgcctgaggcaggaagcagcgtcccccgtgaaagccaccttccgaagctcctgcgttttttgcaaacttggcttcccccaggggcaggctggactttccctgccccctatgattgaagtcctcctgcttttgggggctgccttcccagagtcccccgggtgctcccctgccgaggtcaggagctgaccaagccttggcccggtgacacctgcagccctcactcctgtcatcccaggacacttgaggcccaaggagatggagtggagaatgggctcgggtacatgggagccagaagccagatggacttggtcaagtgtcggtcacttggagcctccagtgtgcgtcagggtctgtgggcaggggacagggcgtgggtgggggccgaggctggcacgcccctctgccctcaccgtcttggtgacctggcctcggcccctcccccaagtctcttctgtgcaaggcccgcctcggcctcggcagctggttcctgtcccgttttctgtgtctgaaagtttacaggttgtggtgcatcagcccaaactcacaggcgttgtgttttttttttctttaattttcagatttttttttttaaacaaagtattttttttaggtgcgataacccagaaagggcccgttgggtgtgtgtgtgtgtcctgaactcctcaagcagcgattggagcccaagcacccctggagaggaagggagggtccccactggcccgtggggtctgagttcaggggtgtggagggagcagactccaccggcccaggcccagctaagagggggccgacccctttcccccaggcacagccccaggctggcaaaaggagggccctgggctgggtgcagggcgcgcccaggagtccccagccagggttggcccggcgggggcgggtccagctttggaagccaggctcccctgtgagccgtggcttgtcctggtcttcgcccacgggaggctggacagaggctgtagccaacacaatcacctttactttgtactctgtgtgtatgttttggttttctgtgttttaataaatcctttgggaaaggatttaaaaaaaaaa

SEQ ID NO: 86625 - DNA, 10348 bp, Homo sapiens
ttgctgtgtgaggcagaacctgcgggggcaggggcgggctggttccctggccagccattggcagagtccgcaggctagggctgtcaatcatgctggccggcgtggccccgcctccgccggcgcggccccgcctccgccggcgcacgtctgggacgcaaggcgccgtgggggctgccgggacgggtccaagatggacggccgctcaggttctgcttttacctgcggcccagagccccattcattgccccggtgctgagcggcgccgcgagtcggcccgaggcctccggggactgccgtgccgggcgggagaccgccatggcgaccctggaaaagctgatgaaggccttcgagtccctcaagtccttccagcagcagcagcagcagcagcagcagcagcagcagcagcagcagcagcagcagcagcagcagcaacagccgccaccgccgccgccgccgccgccgcctcctcagcttcctcagccgccgccgcaggcacagccgctgctgcctcagccgcagccgcccccgccgccgcccccgccgccacccggcccggctgtggctgaggagccgctgcaccgaccaaagaaagaactttcagctaccaagaaagaccgtgtgaatcattgtctgacaatatgtgaaaacatagtggcacagtctgtcagaaattctccagaatttcagaaacttctgggcatcgctatggaactttttctgctgtgcagtgatgacgcagagtcagatgtcaggatggtggctgacgaatgcctcaacaaagttatcaaagctttgatggattctaatcttccaaggttacagctcgagctctataaggaaattaaaaagaatggtgcccctcggagtttgcgtgctgccctgtggaggtttgctgagctggctcacctggttcggcctcagaaatgcaggccttacctggtgaaccttctgccgtgcctgactcgaacaagcaagagacccgaagaatcagtccaggagaccttggctgcagctgttcccaaaattatggcttcttttggcaattttgcaaatgacaatgaaattaaggttttgttaaaggccttcatagcgaacctgaagtcaagctcccccaccattcggcggacagcggctggatcagcagtgagcatctgccagcactcaagaaggacacaatatttctatagttggctactaaatgtgctcttaggcttactcgttcctgtcgaggatgaacactccactctgctgattcttggcgtgctgctcaccctgaggtatttggtgcccttgctgcagcagcaggtcaaggacacaagcctgaaaggcagcttcggagtgacaaggaaagaaatggaagtctctccttctgcagagcagcttgtccaggtttatgaactgacgttacatcatacacagcaccaagaccacaatgttgtgaccggagccctggagctgttgcagcagctcttcagaacgcctccacccgagcttctgcaaaccctgaccgcagtcgggggcattgggcagctcaccgctgctaaggaggagtctggtggccgaagccgtagtgggagtattgtggaacttatagctggagggggttcctcatgcagccctgtcctttcaagaaaacaaaaaggcaaagtgctcttaggagaagaagaagccttggaggatgactctgaatcgagatcggatgtcagcagctctgccttaacagcctcagtgaaggatgagatcagtggagagctggctgcttcttcaggggtttccactccagggtcagcaggtcatgacatcatcacagaacagccacggtcacagcacacactgcaggcggactcagtggatctggccagctgtgacttgacaagctctgccactgatggggatgaggaggatatcttgagccacagctccagccaggtcagcgccgtcccatctgaccctgccatggacctgaatgatgggacccaggcctcgtcgcccatcagcgacagctcccagaccaccaccgaagggcctgattcagctgttaccccttcagacagttctgaaattgtgttagacggtaccgacaaccagtatttgggcctgcagattggacagccccaggatgaagatgaggaagccacaggtattcttcctgatgaagcctcggaggccttcaggaactcttccatggcccttcaacaggcacatttattgaaaaacatgagtcactgcaggcagccttctgacagcagtgttgataaatttgtgttgagagatgaagctactgaaccgggtgatcaagaaaacaagccttgccgcatcaaaggtgacattggacagtccactgatgatgactctgcacctcttgtccattgtgtccgccttttatctgcttcgtttttgctaacagggggaaaaaatgtgctggttccggacagggatgtgagggtcagcgtgaaggccctggccctcagctgtgtgggagcagctgtggccctccacccggaatctttcttcagcaaactctataaagttcctcttgacaccacggaataccctgaggaacagtatgtctcagacatcttgaactacatcgatcatggagacccacaggttcgaggagccactgccattctctgtgggaccctcatctgctccatcctcagcaggtcccgcttccacgtgggagattggatgggcaccattagaaccctcacaggaaatacattttctttggcggattgcattcctttgctgcggaaaacactgaaggatgagtcttctgttacttgcaagttagcttgtacagctgtgaggaactgtgtcatgagtctctgcagcagcagctacagtgagttaggactgcagctgatcatcgatgtgctgactctgaggaacagttcctattggctggtgaggacagagcttctggaaacccttgcagagattgacttcaggctggtgagctttttggaggcaaaagcagaaaacttacacagaggggctcatcattatacagggcttttaaaactgcaagaacgagtgctcaataatgttgtcatccatttgcttggagatgaagaccccagggtgcgacatgttgccgcagcatcactaattaggcttgtcccaaagctgttttataaatgtgaccaaggacaagctgatccagtagtggccgtggcaagagatcaaagcagtgtttacctgaaacttctcatgcatgagacgcagcctccatctcatttctccgtcagcacaataaccagaatatatagaggctataacctactaccaagcataacagacgtcactatggaaaataacctttcaagagttattgcagcagtttctcatgaactaatcacatcaaccaccagagcactcacatttggatgctgtgaagctttgtgtcttctttccactgccttcccagtttgcatttggagtttaggttggcactgtggagtgcctccactgagtgcctcagatgagtctaggaagagctgtaccgttgggatggccacaatgattctgaccctgctctcgtcagcttggttcccattggatctctcagcccatcaagatgctttgattttggccggaaacttgcttgcagccagtgctcccaaatctctgagaagttcatgggcctctgaagaagaagccaacccagcagccaccaagcaagaggaggtctggccagccctgggggaccgggccctggtgcccatggtggagcagctcttctctcacctgctgaaggtgattaacatttgtgcccacgtcctggatgacgtggctcctggacccgcaataaaggcagccttgccttctctaacaaaccccccttctctaagtcccatccgacgaaaggggaaggagaaagaaccaggagaacaagcatctgtaccgttgagtcccaagaaaggcagtgaggccagtgcagcttctagacaatctgatacctcaggtcctgttacaacaagtaaatcctcatcactggggagtttctatcatcttccttcatacctcaaactgcatgatgtcctgaaagctacacacgctaactacaaggtcacgctggatcttcagaacagcacggaaaagtttggagggtttctccgctcagccttggatgttctttctcagatactagagctggccacactgcaggacattgggaagtgtgttgaagagatcctaggatacctgaaatcctgctttagtcgagaaccaatgatggcaactgtttgtgttcaacaattgttgaagactctctttggcacaaacttggcctcccagtttgatggcttatcttccaaccccagcaagtcacaaggccgagcacagcgccttggctcctccagtgtgaggccaggcttgtaccactactgcttcatggccccgtacacccacttcacccaggccctcgctgacgccagcctgaggaacatggtgcaggcggagcaggagaacgacacctcgggatggtttgatgtcctccagaaagtgtctacccagttgaagacaaacctcacgagtgtcacaaagaaccgtgcagataagaatgctattcataatcacattcgtttgtttgaacctcttgttataaaagctttaaaacagtacacgactacaacatgtgtgcagttacagaagcaggttttagatttgctggcgcagctggttcagttacgggttaattactgtcttctggattcagatcaggtgtttattggctttgtattgaaacagtttgaatacattgaagtgggccagttcagggaatcagaggcaatcattccaaacatctttttcttcttggtattactatcttatgaacgctatcattcaaaacagatcattggaattcctaaaatcattcagctctgtgatggcatcatggccagtggaaggaaggctgtgacacatgccataccggctctgcagcccatagtccacgacctctttgtattaagaggaacaaataaagctgatgcaggaaaagagcttgaaacccaaaaagaggtggtggtgtcaatgttactgagactcatccagtaccatcaggtgttggagatgttcattcttgtcctgcagcagtgccacaaggagaatgaagacaagtggaagcgactgtctcgacagatagctgacatcatcctcccaatgttagccaaacagcagatgcacattgactctcatgaagcccttggagtgttaaatacattatttgagattttggccccttcctccctccgtccggtagacatgcttttacggagtatgttcgtcactccaaacacaatggcgtccgtgagcactgttcaactgtggatatcgggaattctggccattttgagggttctgatttcccagtcaactgaagatattgttctttctcgtattcaggagctctccttctctccgtatttaatctcctgtacagtaattaataggttaagagatggggacagtacttcaacgctagaagaacacagtgaagggaaacaaataaagaatttgccagaagaaacattttcaaggtttctattacaactggttggtattcttttagaagacattgttacaaaacagctgaaggtggaaatgagtgagcagcaacatactttctattgccaggaactaggcacactgctaatgtgtctgatccacatcttcaagtctggaatgttccggagaatcacagcagctgccactaggctgttccgcagtgatggctgtggcggcagtttctacaccctggacagcttgaacttgcgggctcgttccatgatcaccacccacccggccctggtgctgctctggtgtcagatactgctgcttgtcaaccacaccgactaccgctggtgggcagaagtgcagcagaccccgaaaagacacagtctgtccagcacaaagttacttagtccccagatgtctggagaagaggaggattctgacttggcagccaaacttggaatgtgcaatagagaaatagtacgaagaggggctctcattctcttctgtgattatgtctgtcagaacctccatgactccgagcacttaacgtggctcattgtaaatcacattcaagatctgatcagcctttcccacgagcctccagtacaggacttcatcagtgccgttcatcggaactctgctgccagcggcctgttcatccaggcaattcagtctcgttgtgaaaacctttcaactccaaccatgctgaagaaaactcttcagtgcttggaggggatccatctcagccagtcgggagctgtgctcacgctgtatgtggacaggcttctgtgcacccctttccgtgtgctggctcgcatggtcgacatccttgcttgtcgccgggtagaaatgcttctggctgcaaatttacagagcagcatggcccagttgccaatggaagaactcaacagaatccaggaataccttcagagcagcgggctcgctcagagacaccaaaggctctattccctgctggacaggtttcgtctctccaccatgcaagactcacttagtccctctcctccagtctcttcccacccgctggacggggatgggcacgtgtcactggaaacagtgagtccggacaaagactggtacgttcatcttgtcaaatcccagtgttggaccaggtcagattctgcactgctggaaggtgcagagctggtgaatcggattcctgctgaagatatgaatgccttcatgatgaactcggagttcaacctaagcctgctagctccatgcttaagcctagggatgagtgaaatttctggtggccagaagagtgccctttttgaagcagcccgtgaggtgactctggcccgtgtgagcggcaccgtgcagcagctccctgctgtccatcatgtcttccagcccgagctgcctgcagagccggcggcctactggagcaagttgaatgatctgtttggggatgctgcactgtatcagtccctgcccactctggcccgggccctggcacagtacctggtggtggtctccaaactgcccagtcatttgcaccttcctcctgagaaagagaaggacattgtgaaattcgtggtggcaacccttgaggccctgtcctggcatttgatccatgagcagatcccgctgagtctggatctccaggcagggctggactgctgctgcctggccctgcagctgcctggcctctggagcgtggtctcctccacagagtttgtgacccacgcctgctccctcatctactgtgtgcacttcatcctggaggccgttgcagtgcagcctggagagcagcttcttagtccagaaagaaggacaaataccccaaaagccatcagcgaggaggaggaggaagtagatccaaacacacagaatcctaagtatatcactgcagcctgtgagatggtggcagaaatggtggagtctctgcagtcggtgttggccttgggtcataaaaggaatagcggcgtgccggcgtttctcacgccattgctcaggaacatcatcatcagcctggcccgcctgccccttgtcaacagctacacacgtgtgcccccactggtgtggaagcttggatggtcacccaaaccgggaggggattttggcacagcattccctgagatccccgtggagttcctccaggaaaaggaagtctttaaggagttcatctaccgcatcaacacactaggctggaccagtcgtactcagtttgaagaaacttgggccaccctccttggtgtcctggtgacgcagcccctcgtgatggagcaggaggagagcccaccagaagaagacacagagaggacccagatcaacgtcctggccgtgcaggccatcacctcactggtgctcagtgcaatgactgtgcctgtggccggcaacccagctgtaagctgcttggagcagcagccccggaacaagcctctgaaagctctcgacaccaggtttgggaggaagctgagcattatcagagggattgtggagcaagagattcaagcaatggtttcaaagagagagaatattgccacccatcatttatatcaggcatgggatcctgtcccttctctgtctccggctactacaggtgccctcatcagccacgagaagctgctgctacagatcaaccccgagcgggagctggggagcatgagctacaaactcggccaggtgtccatacactccgtgtggctggggaacagcatcacacccctgagggaggaggaatgggacgaggaagaggaggaggaggccgacgcccctgcaccttcgtcaccacccacgtctccagtcaactccaggaaacaccgggctggagttgacatccactcctgttcgcagtttttgcttgagttgtacagccgctggatcctgccgtccagctcagccaggaggaccccggccatcctgatcagtgaggtggtcagatcccttctagtggtctcagacttgttcaccgagcgcaaccagtttgagctaatgtatgtgacgctgacagaactgcgaagggtgcacccttcagaagacgagatcctcgctcagtacctggtgcctgccacctgcaaggcagctgccgtccttgggatggacaaggccgtggcggagcctgtcagccgcctgctggagagcacgctcaggagcagccacctgcccagcagggttggagccctgcacggcatcctctatgtgctggagtgcgacctgctggacgacactgccaagcagctcatcccggtcatcagcgactatctcctctccaacctgaaagggatcgcccactgcgtgaacattcacagccagcagcacgtactggtcatgtgtgccactgcgttttacctcattgagaactatcctctggacgtagggccggaattttcagcatcaataatacagatgtgtggggtgatgctgtctggaagtgaggagtccaccccctccatcatttaccactgtgccctcagaggcctggagcgcctcctgctctctgagcagctctcccgcctggatgcagaatcgctggtcaagctgagtgtggacagagtgaacgtgcacagcccgcaccgggccatggcggctctgggcctgatgctcacctgcatgtacacaggaaaggagaaagtcagtccgggtagaacttcagaccctaatcctgcagcccccgacagcgagtcagtgattgttgctatggagcgggtatctgttctttttgataggatcaggaaaggctttccttgtgaagccagagtggtggccaggatcctgccccagtttctagacgacttcttcccaccccaggacatcatgaacaaagtcatcggagagtttctgtccaaccagcagccatacccccagttcatggccaccgtggtgtataaggtgtttcagactctgcacagcaccgggcagtcgtccatggtccgggactgggtcatgctgtccctctccaacttcacgcagagggccccggtcgccatggccacgtggagcctctcctgcttctttgtcagcgcgtccaccagcccgtgggtcgcggcgatcctcccacatgtcatcagcaggatgggcaagctggagcaggtggacgtgaaccttttctgcctggtcgccacagacttctacagacaccagatagaggaggagctcgaccgcagggccttccagtctgtgcttgaggtggttgcagccccaggaagcccatatcaccggctgctgacttgtttacgaaatgtccacaaggtcaccacctgctgagcgccatggtgggagagactgtgaggcggcagctggggccggagcctttggaagtctgtgcccttgtgccctgcctccaccgagccagcttggtccctatgggcttccgcacatgccgcgggcggccaggcaacgtgcgtgtctctgccatgtggcagaagtgctctttgtggcagtggccaggcagggagtgtctgcagtcctggtggggctgagcctgaggccttccagaaagcaggagcagctgtgctgcaccccatgtgggtgaccaggtcctttctcctgatagtcacctgctggttgttgccaggttgcagctgctcttgcatctgggccagaagtcctccctcctgcaggctggctgttggcccctctgctgtcctgcagtagaaggtgccgtgagcaggctttgggaacactggcctgggtctccctggtggggtgtgcatgccacgccccgtgtctggatgcacagatgccatggcctgtgctgggccagtggctgggggtgctagacacccggcaccattctcccttctctcttttcttctcaggatttaaaatttaattatatcagtaaagagattaattttaacgt

SEQ ID NO: 86626 - DNA, 469 bp, Homo sapiens
  misc_feature (1)...(469): n = a,t,c or g
tccgactacgtcggccatnacgacagngccggnnggaattccacactcgcacatncggtgcggatactataagtggccgcgtggacacgcacgactgacatttctaaatctgtacacttctgactagccatacataagcagcatggccctcacgagagcgttacttgaccctccaaggagccgctcccactgtgctttcctagttacctgaggaaatatcgatgattagtctgattatgtgacctcatagaatgcggnaggagagcagggtgataataaggagaaggtcagcaaaaaaacatgtgagcaaaggaatctgtgtcataattaagttcaaagggaggtactatgcctggatgtgcacgtaggccagatttatgtttccctccgcccaaacatctgtggagtaaagcataacaaggcagcattgctgccaacatgtctcgcctcccgccatagggtggttttt

SEQ ID NO: 86627 - DNA, 461 bp, Homo sapiens
  misc_feature (1)...(461): n = a,t,c or g
nttganaatcgagacattagtccgtgcggtggaattcccccgagctaagctggctgcgccgcatctcacggtccccggggcccgagcgctgcgcctggaccggcgccgagcgaggcggccaatcggccggctggacccacagtccccgcgccataggcgggtcggggctttcagacccggctcccagccctcgaactcggtaaccttggaggtcagcttgagatgactgcgcttcctgcacgcgttgtcctccccagaaacgcccaaaatggcaaagcggcgtccgtggccgcccgaggccctccctgcctgggttctccccagccgaacctcacgcccggcccctccttcattctctcctggccaggctgctcctgcccttgggcgaatccgctgcgtcccacggtcctgactgtggcatttctgcgtgtctggagggctcccccggcagcgacgtcctg

SEQ ID NO: 86628 - DNA, 430 bp, Homo sapiens
ggaattcgaggcctagcccctccgcagccctggtggaggtcctcctgcgcagcgggagcaccttcccgcacacggtgagcgggggctgggccgcctggggcccgtggtcgtcctgctcccgggactgcgagctgggcttccgcgtccgcaagagaacgtgcactaacccggagccccgcaacgggggcctgccctgcgtgggcgatgctgccgagtaccaggactgcaacccccaggcttgcccagttcggggtgcttggtcctgctggacctcatggtctccatgctcagcttcctgtggtgggggtcactatcaacgcacccgttcctgcaccagccccgcaccctccccaggtgaggacatctgtctcgggctgcacacggaggaggcactatgtgccacacaggcctgcccagaaggctggtcgcg

SEQ ID NO: 86629 - DNA, 546 bp, Homo sapiens
  misc_feature (1)...(546): n = a,t,c or g
nttcggaccatagaccagctgtgggaattccatcctagggttagagagtcaacgatgtcctctctgttccatcaaggtgacaactgtgtggggcacacgaattatcaacttctgtccaaatgtgagcttgttagcatcttcggctaacaaggcagtggcagccagggccttgaaacagggtggccatcccatagccaccaagtccagttgcttggacaaatacgctacaggccaataccatgactctagtgtttgcactaagactcctgtagccataccttttctttcatgaacatacaagtaaaagggctttgtcatgtctggcagtcctagtgctggggcccaggttaaagctttcttgatttccttgaaagccatgtcctgttcttttccccaaaggaggggctctttntctcccactntggttgcctcatataaaggctttgctaggagcgagtagttaggaatccatatgtggcaanagcagctgcccctaggaantcccacacttgccccttgtgtctggctgaggaatctacagacatn

SEQ ID NO: 86630 - DNA, 548 bp, Homo sapiens
  misc_feature (1)...(548): n = a,t,c or g
aatcgaacatagtccagccgtggcgaantccatgttagtagaataaaagatgaaaacgttgatatcatctcagatgcagagaaagcattttggcaataataactctcagaatactggaaatgtaagtgaaattcctcaacttgacacagcacatctatgaaaaagcaatattcttaatggtgagatcattgagaaggaatgctttctacctaagatcaggaacaaggcaaagatctctgctgtcagtgcttatgttcaacattgtactggatggaggtcagtgaaataaagggcatacataagggaaaggaagaaataaatctttttttattcccagatgatactaagctattttagtgagtgaattctaattagtgaatttaatgaggttataggatacaaggtccatgcatganaatcagtggtatttctatatgtaaccaacctacaatcaaactgaaatttctaaaacagttccatttatgtgagcatanagaaataaaaatatttaagaggaaaattacggnagctgtgcangaccttttatn

SEQ ID NO: 86631 - DNA, 476 bp, Homo sapiens
  misc_feature (1)...(476): n = a,t,c or g
gggagcanaagaaaaaatttgatcccctttttcgtagaccctagtccatgcggtggaattcctcaaagatgagcccttgagcccctgcataaccccgatgttgagtggctcagagatgaaagtggttttattcataagggagaaagaaagatcggttatgcagtagttagccgagaagaaggcattgaggccaaagcttgacctccccagacatctgctcaaaaagtggaattaattggtctaatcagggtcctccaactgagaaaagacttaagagtcaacatatttaccgattccaaatatgggtgcctggtgctccacgctcatgacgccatatggaaagaaaagggagcgctaacagctaaggaatcccccacacagcattgctctgagatcttggaattgtagatgctgtccagctcccaaaggaggtggcagttactcactgcaggggacaccaaaagggggacacctct

SEQ ID NO: 86632 - DNA, 480 bp, Homo sapiens
  misc_feature (1)...(480): n = a,t,c or g
tgagccccnnnnaggggggggaattgagaccantagactgatgaccactagaaagngcggnggaattcggcagtgccccagcaccgcgtgcgcttcttccgcttccgtggtcgccttgtgtgggaccgcgcctcgcgcaccgacctcgtctttggctctggctcggcggcgggacgcgggcccaccatcctggacgcaccgaacaccgagggcgcccacggggcagagggtgccgagtggacactggcggggacaggtcaggaggcccaggctgcccccaagcgagggagcacaaggccgctctgcacagggcaccaggaaccaggcgtggaggaacccggagagctggaggcggcccaggagagggcgctgggcacagctgctgatttgggaacactggccccaagaggacgcctcgccggagtgactgaggcactgaagccaacagcagccaccatgaccacattgctggggggcaag

SEQ ID NO: 86633 - DNA, 406 bp, Homo sapiens
ggaattcccagggcctgagagtgacttctgcctaaaggtagaggcggctgttcttggggcaaccggaccagccgactcccagcacgagagtcagcatgggggcctggaccaagacggggaggcccggcctgcccttgacggtagcgccgccctgcaacccctgctgcacacggtgaaagccggcagcccctcggacatgccgcgggactcaggcatctatgactcgtctgtgccctcatccgagctgtctctgccactgatggaaggactctcgacggaccagacagaaacgtcttccctgacggagagcgtgtcctcctcttcaggcctgggtgaggaggaacctcctgcccttccttccaagctcctctcttctgggtcatgcaaagcagatcttggttgccgg

SEQ ID NO: 86634 - DNA, 56 bp, Homo sapiens
gcggccgcggagaggcacttaaaagccccgtgttaccctagaccttaaaaaaaaaa

SEQ ID NO: 86635 - DNA, 460 bp, Homo sapiens
  misc_feature (1)...(460): n = a,t,c or g
gcncgcaattgaccccctnnnnnattgacgacacttagaccagctggtggaattccccctctgcaccagccctgggtcagcaccatcctgacggccccgccctgtctccctcttcactggcagattccttctctcccaccaaaacccgcctctgcagcagccactccggaagcaggcccaagctcctgtgtgtaccccatttcctgccaagcgtgcagggaaccctgaccccacatgccacggcctggttcacagtgggtgcatcgtgcagcctgggggcagagggtaggtaggaaggaagggcccacccggtcggccctcccaactgggcctctgtttgcacagccctggggtcctgaggcctacaccccaggatgccgtgggtaagaacagaccttggaggcccagagccacgcgtgtcctctgaatggtggccaacccaggggcccctctccgaggg

SEQ ID NO: 86636 - DNA, 182 bp, Homo sapiens
ttttttttttttgcactttgtgacatgctttaatatatatattttttatgtatccaaagaggtaatcaactttaactttcagaattcatgaatcttggtttggtggcatgaatgaaaggttatgtaaccccaccagtaactcatttggggtgcccttgaaatattaaagtttggtcctcaat

SEQ ID NO: 86637 - DNA, 934 bp, Homo sapiens
  misc_feature (1)...(934): n = a,t,c or g
accttttctaacccaagtttcctgtctatttcagttagaacctttaagaaaactttaaatcattatggntcattaatgtggaattggacatganctctgancttggggctgcaggtacttgaccaaactattaagcaatctgtatcaaaggtttatttggaagcttctgagtatgagggttcttgcattaaatgaggattcaaggggggaggaaaaaagtgtgcttgtcagtttgggaaagtcacaggggagtttacccattctataattaggattagggagggaaaatgaggaacccactgggtaggaaggaaggaaggcaacagtcttctagggtctggcatttgatgagataggtattcagttactgtgcatttccattgtttttccatggcagaacatacggcagagatttggggaaactccgcatgccctgaaagccaggttattcttatgttctgtaactatgttgctcgcagggctgttgttgtcagagtagtgagttgtgccccagacaaatggggtggtggtctgctcccacaaatctttatcccagtcttcatcgcaaggagggcactgccaagtgctctcagccagagtctcttgtctaaggctcctggtttggttgacaacatcttgctcaatacaacttctgtcatcacagcttgagatatgatgactaatttcagctcgaggaacctggtggcgagcattgaagggacaagtagccaatttgcttgcaacatcaggatgattctttctgcacttgataagatgataaggaaacctgcaagccctgatttgatggtttttgtcataggggcattgcaatagcttctcagggtccagggagtcggtgtaagtttcttccatgttggaaatgaagaagctgaatccaagtgctcggtggacacacaccttcctcacagtcacc

SEQ ID NO: 86638 - DNA, 2080 bp, Homo sapiens
gggaccggcaccggaatgcccgggtcgacgatttcgtcagctccggaaagcgcggtggggacgcgctgcgttctcgctgctcagaggcgggtctgaggctcggtggcggcgcccagggtggcccgggccctttcctcggtcgttgtctcaccgccacaggctccgatggcggcggccacgctgagggaccccgctcagcagggctatgtgacctttgaggacgtggctgtctacttctcccaggaggaatggagattgcttgatgacgctcagaggctcctctaccgcaatgtgatgctggagaactttacacttctggcctctctgggacttgcatcttccaagacccatgaaataacccagctggagtcatgggaggagcccttcatgcctgcttgggaagttgtgacttcagccatactgagaggtagttggcaaggagccaaggctgaggcagctgctgagcagagtgcttctgtagaagtgcccagttcaaacgttcagcaacaccagaagcagcactgtggagagaaacccttaaaaagacaagagggcagggtcccagttttgaggagttgcagagtccacctatcagagaagtccttgcaaagcagggaagttgggaaggatcttctgaccagctcaggtgttctcaagcaccaggtgactcacacgggagagaagtcacataggagctccaaaagtagggaggcctttcatgctggaaaaaggcattacaaatgcagtgaatgtgggaaagcctttggtcagaaatatttacttgttcagcaccagagactgcacactggggaaaagccttatgaatgcagtgaatgtgggaagttatttagccataagtccaacctttttatacaccaaatagttcacactggagaaaggccttatgggtgtagtgactgtggaaaatcctttagccgtaatgctgacctcattcaacaccagagagttcacactggagaaaagccttttacatgcagtgaatgtggaaaagctttcaggcataattccacacttgttcagcatcacagaatccacactggagtaaggccttatgagtgcagtgaatgtggaaaattgtttagtttcaactccagcctcatgaaacatcagagagttcacactggagaaagaccttataagtgcagtgaatgtggaaaattctatagccacaagtccagccttatcaatcattggcgtgttcacactggagaaaggccttatgagtgcagtgaatgtgggaaattttttagccaaagctcaagcctcatgcaacatcgaaaagttcacactggagaaaaaccttttaagtgcaatgaatgtgggagattctttagtgagaattccagccttgttaaacatcagagggttcacactggagcaaagccttatgagtgcagggaatgtgggaaattttttcgccacaactccagtctttttaaacatcgaaggattcacactggagaaatgcagtgattgtgtgaaatcctttagccagcgtttcaacctcattcaacaccagaaagttcacagtggaaaaaatcttgaaggtaacagatggaaatccgttagccacacctccagtctcattcaacactggacagtttacaatgtggacaatgtagtgaatatggaaaaaggtttcagccaaaggcctaaccctattcaacaccagaaagtttagaatggagaaaggccttagggtgacaggttatgtactgtctctgaatcaatatgacctcacttaaaacagaaactctgaggatggcctttatgagggagctggcaattgaacatcattcatctaaatatgcacactggaggcaagatgagaattcctgacagattgtccttcctgagaagacagccctctgccttggagctccagagagagggagccctgtattcttggctgtacccgtcgaatggagttttgatctcgctgagtttggagttgggggaggaaaggagtggtcttggttcaaatgtgactcacttttgctgttcttgtgaatgttagatcttctttaataaatatttatttcccatacacccttaaaaa

SEQ ID NO: 86639 - DNA, 426 bp, Homo sapiens
aaagaaagaaatgaatccactatcatagctggagacttgaatacctctctatcagaaatgggcagattcagcaggcaaaaaatcagtaaagatatagttgaactcaataacaccatcaatcacctggatataactgacatctatgcgctaattcatccaagaacagaatacatattcttctcaagctcacactgaatatactccaagacagatcacattctggaccataaaacacaccattaacaaatgtaacataatagaaaccatatataatgtctgctctcagagcacaatgtaactaaactagaaatcagtcacaaacataattgaaaaaaatatcaaaatacatgagattacacaacaacctcttaaataacacctgggtcaaagaagaaatctcaaaagaaattttaaaaatattttaaa

SEQ ID NO: 86640 - DNA, 774 bp, Homo sapiens
ggaattcctaaaagtggaaaacacatgttcattaataaattttcaagaatcaaacttaatgtatctattcactggagataaaataaggaaaaaatgaaatgacaaacagtggctatcatacttggaaaaatatatcaaagttacattgccaaaatgatattcaaaaccccattcctggtgttctacatatctataatgattcagattggttgataatattgataatttctctactttcccagtgttaacaaagtctaaatcacagattccgttgagtttagagaaacaaagtatataaaaaagcttttttcacccgccttaatcattactggcaagtatgtagtttgccatagaaaacaaatatgcataccttggtttgcttttactttataaagtcaattcacaaagtagagttcaacaattatttaattcaatgatttaatttggtttcatcagatacagagatagagtggcatgtttgatgatattgatgattattactgttgtctagaaatacttaaattgatgtttatgctttaattaactcagaagagtacctttatgtcagttaataaaaataaataatcttaaatgataaatcagaaatattaggaaagcaagactgttttgtacttgggtgtgttgaaagaacatgtatgatgagatgggttacaaattgtaagatgaaatatttttccagactctcattgcttatactttgaaggttaccatttaatactgaacacaagatgcacttcatttctatgaaagcag

SEQ ID NO: 86641 - DNA, 1675 bp, Homo sapiens
ttttttttttttatcatcaaatcggatctttactcaactatggtgaatgccatggaacataatacaaacatggatgttactggagtttatatttttaaattcaaaattgaaaaaatacaaattgaaaaatagaaatatttaattattaaaattttctctttcataattctttttgcgcctttgagttgaagccaaaaggctggccgtcttcccttccacaccgagatgtcagtgtcaggcctcgggtggcacggtggggacgggcagtttagaattcagccttgaatccttcaactgggaacgatgtttaatttgattcaggttcgtaacggaaaacagctgttcacaagcgtgggtactcccaaacacagatattcaggacaactactggagatagttgtagaatctcaccatcttcacacagacttgtatttaggaaccagcaccgtattgcactgtagttcaattactatttatggtctgcattcacacaagaaacatctgccaacaaaggcaaactggacaatgtctgttccttctcatgagtctggattccgagagcctttgggggaatttggtcttcaaccccaggacgtaggtgaatacagtccgggccacctctttcatttctgaaagccgactgcagcacaggaaagagtaaaggttttttttccttgccggtggattccccaggaccaagcatacaccatcatacattcaagtagctgtttgtggacatccttgcggagaaatattcagtgttcagaacggtcataaccttgaccagaagtctttgactaaccttctcaggggaacccactgtggcttttgcctgatttaaaatgaaccaagttggttaacttgaacagttcagatttcttccacaaccaagtcacagagcttctgtgaaatctctcaggtcaagtcaccatcaactcactcgtgactgaagtccaggagcggaagtgtcgagagcatcgcggtgtggttctggttcaagttgcttcagaaccaagtcaaactccttgatgatggatgcaacggaccccaacttccggtgtccttgccaaaatgtgtcgccttggatcaaggtgtcctgcccaagtccccctgtcaatgacgctgtcctgtagttgtgcttcggaaactctggccagtctatgtgaaacttttctctcaatatacaaaaaaaattagtcctttcccagtgttgggcctgccttggcaccatgccacagacttcttcggtcacatcaagattcttaacaccacaaataaataaagctaactgggtggtaatagtttatgagcagcgaaagaaaaggccacaatcaatttgactctttcaagcaactggacttgtaaatcccccgagttatctccaactcactgtgcaacgcaaatgcccgttagacttaaataacggtctcaacagtcatgtgtttctgtgcaggacacgtcactctgctcctttataaacttgccatctgctgtagctctgaatgcccaggtcattcttctcacgtgattccggaacggcgtaccactgccgcgccacttctgttaattcgcttttcaaaacaaaccctattgacatttgagtccctttttcagttcgttgaggatggcatctcgagtctgttctgtgtactggtcgtagctcttactatgcttt

SEQ ID NO: 86642 - DNA, 991 bp, Homo sapiens
gtcgtggaattcgtatgtgttctaaaaaatgggttatctaggtattttttaaaagtttgaagctttaaaataaatagtaatcttttaatataatacagtaatcatcagtatttgcgaatttgcctactcattaaaatttatttgtaaccgccaaatcagttcctgaggtgctttctgagccattggcagacatgcccagggctgggagaaagctgggtctcctggcacacacacttccagctggagtctaagaaggcaacgctctgccttttttcccagttcaactataaaccagtgtacttcttgtggtctatttagtgccacagttttcacatttttgtgctttttgttgatgatttcactgttttgaaataatccccaagcttagtgaaatgctatctagtgttaattgtgatacacttttgtgttacagaggaaacacatgtattagagaagcttcattcaagcaggcatcagtatttatagtgctgctggccctgacttcaatattgatgaatcaacaatatgtatcaaataagacgtctttaaatagaaacacacataaaacaaggttacgcattgatcaattagagaaaatgtgaccagagaattgcaggaatctaactgtatttcccctggcagccgcggttcaatatttgctaactcagtgtacacagtgactttatagaacataaatactgtggttgggtgcggtggctcccgtctgtaatcccagcactttgggaggccgagatgggcgtattgcttgaggccaggagtttgagaccagcatgtgcaacatggcgaaaccccgtctctactaaaaatacagaaattggccgggggtggtgttgtacacctgtaatcccagctgtgtcaggaggctgaggcacaggaatcgcttggacccgggaggcagaggctgcagtgagctgagatcgcaccactgcactccaacctaagtaacagagtgagacttttaaaaaaaaaa

SEQ ID NO: 86643 - DNA, 625 bp, Homo sapiens
  misc_feature (1)...(625): n = a,t,c or g
ctttctgaatctgtttcacccgaagccatctcccctcggcactcctttctcgccctgactgctccttgcttcgtcccgatctttcctcctccctttcacctgcgtcctgcgttcctaccccgcgctctccagctcccggcctcccttcctgagctgtgctggccagtttggacggtccccccttgtcagctagactttcgggagggatggtggagttttaaggtggaggcctgaattttgatctatgttctacctacatccagctggctgaaagtacttgaggatcacatgaccctggacatggatgctgttctgtcagattttgtccgttccacaggagcagagccagggctagcgcgagatctcctagaaggaaagaattgggatgtgaatgccgccctcagtgattttgaacagctacgtcaagtccatgctggaaacctacccccatcctttagtgaggggagtggtggctccaggacccctgaaaaagggttttctgacagagagcctactcgccctccccgacccatcctccagcggcaggatgacatcgttcaagataacgcctgtctagggcatcntccacgccagcttcagcattgtttccttgcccggtcccatg

SEQ ID NO: 86644 - DNA, 356 bp, Homo sapiens
ggaaataataatggtgagacataggcaaataaatgcgatataccatactatcagaatataaggtaaaactacatgattatctaaacagatctagaaaacgcatttgacaaagttcaaactctattgatatttaaaactttcaacaaaatagggacataaggaatggatctcatggttaatgctgcatggaacatgtacacacttaacatcataatcactgtgggcagaaatgaatagctttcctcctaaaccctaagtaagaatgctcattcttggcatctgtttagaatctaatactgtatgctgtaacctgacgctgagatagcattaattactagatggcattcagaactttt

SEQ ID NO: 86645 - DNA, 5805 bp, Homo sapiens
tttatagcagcagcagaaatataccaccctagaggacacacctccttttagctaggtacctataaatgtccaggattttctattcaattgagaagaacccagcaaaatggggatctccacagtcatccttgaaatgtgtcttttatggggacaagttctatctacaggtgggtggatcccaaggactacagactacgcttcactgattccctcggaggtgcccttggatcaaactgtagcagaaggttctccatttccctcggagtcgaccctggagtcaactgcagcagaaggttctccgatttccttggagtcaaccctggagtcaactgtagcagaaggttctctgattccctcagagtcaaccctggagtcaactgtagcagaaggatctgattctggtttggccctgaggctggtgaatggagatggcaggtgtcagggccgagtggagatcctataccgaggctcctggggcaccgtgtgtgatgacagctgggacaccaatgatgccaacgtggtctgtaggcagctgggttgtggctgggccatgtcagctccaggaaatgcctggtttggccagggctcaggacccattgccctggatgatgtgcgctgctcaggacacgaatcctacctgtggagctgcccccacaatggctggctctcccataactgtggccatggtgaagatgctggtgttatctgctcagctgcccagcctcagtcaacactcaggccagaaagttggcctgtcaggatatcaccacctgtacccacagaaggatctgaatccagtttggccctgaggctggtgaatggaggcgacaggtgtcgaggccgagtggaggtcctataccgaggctcctggggcaccgtgtgtgatgactactgggacaccaatgatgccaatgtggtctgcaggcagctgggctgtggctgggccatgtcagccccaggaaatgcccagtttggccagggctcaggacccattgtcctggatgatgtgcgctgctcaggacacgagtcctacctgtggagctgcccccacaatggctggctcacccacaactgtggccatagtgaagacgctggtgtcatctgctcagctccccagtcccggccgacacccagcccagatacttggccgacctcacatgcatcaacagcaggacctgaatccagtttggccctgaggctggtgaatggaggtgacaggtgtcagggccgagtggaggtcctataccgaggctcctggggcaccgtgtgtgatgatagctgggacaccagtgacgccaatgtggtctgccggcagctgggctgtggctgggccacgtcagccccaggaaatgcccggtttggccagggttcaggacccattgtcctggatgacgtgcgctgctcaggctatgagtcctacctgtggagctgcccccacaatggctggctctcccataactgtcagcacagtgaagacgctggtgtcatctgctcagctgcccactcctggtcgacgcccagtccagacacattgccgaccatcaccttgcctgcatcgacagtaggatctgaatccagtttggccctgaggctggtgaatggaggtgacaggtgtcagggccgagtggaggtcctataccaaggctcctggggcaccgtgtgcgatgacagctgggacaccaatgatgccaatgtcgtctgcaggcaaccgggctgtggctgggccatgtcagccccaggaaatgcccggtttggtcagggctcaggacccattgtcctggatgatgtgcgctgctcaggacacgagtcttacccgtggagctgcccccacaatggctggctctcccacaactgtggccatagtgaagacgctggtgtcatctgctcagcttcccagtcccggccaacacctagtccagacacttggccaacctcacatgcatcaacagcaggatctgaatccagtttggccctgaggctggtgaatggaggtgacaggtgtcagggccgagtggaggtcctataccgaggctcctggggcaccgtgtgtgatgactactgggacaccaatgatgccaatgtggtttgcaggcagctgggctgtggctgggccatgtcagccccaggaaatgcccggtttggccagggttcaggacccattgtcctggatgatgtgcgctgctcaggacatgagtcctatctgtggagctgcccccacaatggctggctctcccacaactgtggccatcatgaagacgctggtgtcatctgctcagcttcccagtcccagccgacacccagcccagacacttggccaacctcacatgcatcaacagcaggatctgaatccagtttggccctgaggctggtgaatggaggtgacaggtgtcagggccgagtggaggtcctataccgaggctcctggggcaccgtgtgtgatgactactgggacaccaatgatgccaatgtggtttgcaggcagctgggctgtggctgggccacgtcagccccaggaaatgcccggtttggccagggttcaggacccattgtcctggatgatgtgcgctgctcaggacatgagtcctatctgtggagctgcccccacaatggctggctctcccacaactgtggccatcatgaagacgctggtgtcatctgctcagcttcccagtcccagccgacacccagcccagacacttggccaacctctcgtgcatcaacagcaggatctgaatccactttggccctgagactggtgaatggaggtgacaggtgtcgaggccgagtggaggtcctataccaaggctcctggggcaccgtgtgtgatgactactgggacaccaatgatgccaacgtggtctgcaggcagctgggctgtggctgggccatgtcagccccaggaaatgcccagtttggccagggctcaggacccattgtcctggatgatgtgcgctgctcaggacacgagtcttacctgtggagctgcccccacaatggctggctctcccacaactgtggccatcatgaagatgctggtgtcatctgctcagctgctcagtcccagtcaacgcccaggccagatacttggctgaccaccaacttaccggcattgacagtaggatctgaatccagtttggctctgaggctggtgaatggaggtgacaggtgtcgaggccgagtggaggtcctgtatcgaggctcctggggaaccgtgtgtgatgacagctgggacaccaatgatgccaatgtggtctgcaggcagctgggctgtggctgggccatgtcggccccaggaaatgcccggtttggccagggctcaggacccattgtcctggatgatgtgcgctgctcagggaatgagtcctacctgtggagctgcccccacaaaggctggctcacccacaactgtggccatcacgaagacgctggtgtcatctgctcagccacccaaataaattctactacgacagattggtggcatccaacaactacaaccactgcaagaccctcttcaaattgtggtggcttcttattctatgccagtgggacattctccagcccatcctaccctgcatactaccccaacaatgctaagtgtgtttgggaaatagaagtgaattctggttatcgcataaacctgggcttcagtaatctgaaattggaggcacaccataactgcagttttgattatgttgaaatctttgatggatcattgaatagcagtctcctgctggggaaaatctgtaatgataccaggcaaatatttacatcttcttacaaccgaatgaccattcactttcgaagtgacatcagtttccaaaacactggctttttggcttggtataactccttcccaagcgatgccaccttgaggttggtcaatttaaattcatcctatggtctatgtgccgggcgtgtagaaatttaccatggtggcacctgggggacagtttgtgatgactcctggaccattcaggaagctgaggtggtctgcagacagctagggtgtggacgtgcagtttcagcccttggaaatgcatattttggctctggctctggccccatcaccctggacgatgtagagtgctcagggacggaatccactctctggcagtgccggaaccgaggctggttctcccacaactgtaatcatcgtgaagatgctggtgtcatctgctcaggaaaccatctatcgacacctgctccttttctcaacatcacccgtccaaacacagattattcctgcggaggcttcctatcccaaccatcaggggacttgtccagcccattctatcccgggaactatccaaacaatgccaagtgtgtgtgggacattgaggtgcaaaacaactaccgtgtgactgtgatcttcagagatgtccagcttgaaggtggctgcaactatgattatattgaagttttcgatggcccctaccgcagttcccctctcattgctcgagtttgtgatggggccagaggctccttcacttcttcctccaacttcatgtccattcgcttcatcagtgaccacagcatcacaaggagagggttccgggctgagtactactccagtccctccaatgacagcaccaacctgctctgtctgccaaatcacatgcaagccagtgtgagcaggagctatctccaatccttgggcttttctgccagtgaccttgccatttccacctggaatggatactacgagtgtcggccccagataacgccgaacctggtgatattcacaattccctactcaggctgcggcaccttcaagcaggcagacaatgacaccatcgactattccaacttcctcacagcagctgtctcaggtggcatcatcaagaggaggacagacctccgtattcacgtcagctgcagaatgcttcagaacacctgggtcgacaccatgtacattgctaatgacaccatccacgttgctaataacaccatccaggtcgaggaagtccagtatggcaattttgacgtgaacatttccttttatacttcctcatctttcttgtatcctgtgaccagccgcccttactacgtggacctgaaccaggacttgtacgttcaggctgaaatcctccattctgatgctgtactgaccttgtttgtggacacctgcgtggcatcaccatactccaatgacttcacgtctttgacttatgatctaatccggagtggatgcgtgagggatgacacctacggaccctactcctcgccgtctcttcgcattgcccgcttccggttcagggccttccacttcctgaaccgcttcccctccgtgtacctgcgttgtaaaatggtggtgtgcagagcgtatgacccctcttcccgctgctaccgaggctgtgtgttgaggtcgaagagggatgtgggctcctaccaggaaaaggtggacgtcgtcctgggtcccatccagctgcagacccccccacgccgagaagaggagcctcggtaggtggtcgctctcagaccccactgtccaccggggcgcagacccctgactcggggacttgggatgttcctcttggtgtcatattccaactcagattgagccctacattgtgctgcacctggtcatacggagttgaatcagacctggttcccgcctcccccaaggctcatggtccttggaggacccgttgcagggtgaggtcaagagagttctgacctggatggcccatagacctgacgtcccagaatccatgcttctcatctgcaaaatgaaaatgtcaatacttacttcttagcactgttgagagggttacttacataaaggaattttggtgaaaaaaaaaa

SEQ ID NO: 86646 - DNA, 770 bp, Homo sapiens
gaaaaacaaggcattggactgggcgataccacagcagcggagttcatcatgcccgcgcatgggcggcaccgatgctgtcatcactaacgtttcagggtcagtgtcgagtgcgggccgcccagcctccgcatcacccgcccccaatgccaatgcagatggcaccaaaaccagcaggagctctgtagaaaccacaccatccgttattcagcacgtgggccagcccccggccactcctgccaagcacagtagcagcaccagcagcaagggcgccaaagccagcaacccagaaccgagtttcaaagcaaacgagaacggccttccaccaagctctatatttctgtctccaaatgaggcattcaggtccccaccaattccctaccccaggagttacctcccttacccagcccctgagggcattgctgtaagtcccctctccttacatggcaaaggacctgtctaccctcacccagttttgttacccaatggcagtctgtttcctgggcaccttgccccaaagcctgggctgccctatgggcttcccaccggccgtccagagtttgtgacctaccaagatgccctggggttgggcatggtgcatcccatgttgataccacacacgcccatagagattactaaagaggagaaaccagagaggagatcccggtcccatgagagagcccgttacgaggacccaaccctccggaatcggtttttcgagattttggaaactagcagcaccaagttacatccagatgtccccaccttgtatt

SEQ ID NO: 86647 - DNA, 7231 bp, Homo sapiens
atatttgctaggaaaaaccttcagattcctaaatgtcccgatgggcacactcgcagagtagtggggcacctgggcctgtccaggtgcagagggaagctggctagtttgttcattatcccctgtcaggagttccttgcccctgctacatctgttcaggaagagtctttggaatttgttctctctcgctgtatattcactgagcatgataaaaatttcgacgatgaagattctgtggatggtaacagaccttcctctgctagttctacatcatccaaggctccaccaagttctcggagaaacgttggaatgggaaccacccgccggcttggttcatccacccttggatccaagtcttcagctgcaaaagaaggagctggtgctgttgatgaagaggattttattaaagcatttgatgatgtacctgtagtacagatttattccagccgagaccttgaggaatccataaacaaaattagggaaatattatctgatgacaagcatgattgggagcagagagtaaatgctctaaaaaagattagatctttacttttggctggtgctgctgagtatgataacttctttcaacatttgcgtcttttggatggagcctttaaactctctgctaaggacctgcggtctcaggtagtgcgggaggcttggtatcacgttggggcatctgtcatcagttctggggaataagtttgaccatggagctgaagccattatgccaactatctttaatttaattccaaacagtggccaaaattatggccacatctggtgttgtagctgttaggttaattattcggcacacacacatccctaggttgatacctgtcataacaagcaactgtacctctaaggctgtcgcagttagaaggcgctgttttgaatttttagatttgcttttacaagaatggcagacacattcactagaacgacacatatcagtattagctgaaacaataaagaagggaatacatgatgctgattccgaagcaagaatagaagccagaaaatgttactggggtttccacagtcacttcagcagagaagcagagcacttgtaccacaccttggagtcctcctaccagaaagccctgcagtcccacctgaagaactcagacagcatagtgtctctgcctcagtcagaccgctcatcttccagctctcaagagagtctaaatcgtccgctgtctgccaaaagaagtcctactggaagtaccacatctagagcttctacagttagtaccaaatctgtgtcaacgactgggtccctccagcgatctcgaagtgatattgatgtgaacgcagcagccagtgccaaatccaaagtctcctcatcttcgggcacgacgcctttcagctctgcagcagctttgcctccagggtcatacgcatccttagatggtactaccactaaagcggagggtcggatccgcacaagacggcaaagctctgggagtgccaccaacgtcgcctctacacctgataatcggggccgcagtcgcgctaaagtggtttcacagtcccagcgatccagatctgctaatcctgctggtgctggcagccggtcaagttccccaggaaaattgttgggaagtggttatggtggacttactgggggctcctcacgaggcccacctgtgacaccgtcttcagaaaagcgaagcaagattcccaggagccagggatgtagccgggaaacaagtccaaaccgaataggattagcacggagcagccgtatccctcgacccagcatgagtcaggggtgcagccgcgataccagccgtgagagcagccgagatacaagccctgctcggggctttcctccacttgatcggtttgggcttggccagccaggaagaatacctggttctgtgaatgccatgagagttctgagcacaagtacagatcttgaagctgctgttgctgatgctttgaagaagcctgtgaggaggagatatgagccgtatgggatgtattctgacgatgatgccaacagtgatgcctcaagtgtttgctctgagcgctcatatggctccaggaatggtggcattccccattatctgcggcagactgaggatgtagcagaagttctcaaccactgtgctagttcaaactggtcagaaaggaaagaagggcttctgggcctgcagaacttactgaagagccaaagaacactgagtcgagttgaactgaaaaggttgtgtgagatcttcactcggatgtttgctgaccctcatagcaagagagttttcagtatgtttttggagactcttgtggattttataataattcataaggatgatttacaagactggctttttgttcttctcacacaattacttaagaaaatgggagcagatttacttggatctgtgcaagcaaaagttcaaaaggctctagatgtcacaagggactcctttccatttgatcaacaatttaacattttgatgagatttattgtggatcaaactcaaactccaaacctcaaggtcaaagttgcaatcctgaaatacattgagtctctggccagacagatggatccaacagattttgtaaactctagtgagacaaggcttgctgtttctagaatcataacctggacaacagaaccaaagagttcagacgtgagaaaggcagcacagattgtgctaatctctctgtttgaattgaatactcctgaatttaccatgttacttggtgccttgccaaaaacattccaggatggtgccaccaaactcctgcacaaccacctcaagaattccagtaacaccagtgtgggctctccaagcaatacgattggccggacgccctcccgacacaccagcagcaggaccagccccctgacctcacccaccaactgttcccatgggggtctgtctccaagtcggttatggggttggagtgccgacgggttagcgaagcacccacctcccttttctcagcctaactccatccccaccgctccctcccacaaggctctcaggcgctcttactctcccagcatgctggactatgatacagagaacctgaactctgaagaaatctatagttctctacgtggagttacagaagccattgaaaagtttagttttcgaagccaagaagatctgaatgagccaattaaacgagatggcaaaaaggagtgtgatattgtgtcccgcgatgggggcgctgcctcccctgccactgagggccgggggggtagtgaagtagaaggaggccggacagctctggataacaagacctcactactcaacacccagcctccgcgcgccttcccggggccgcgggcgcgagactacaacccgtacccctactcagatgccatcaacacctacgacaagaccgccctgaaagaggctgtgttcgatgacgacatggagcagcttcgagacgtgcccatcgaccattctgacctggtggctgaccttctgaaagagctgtccaaccacaatgagcgagtggaggaacggaagggagccctgctggagctgctcaagatcacgcgggaagacagccttggtgtctgggaggagcacttcaagaccattctgctcctgctgctggagacccttggagacaaagaccattcaattcgagcactggcgttaagagttttgagggaaattctgagaaatcaaccagcaagatttaaaaactacgccgagctgacgattatgaagactctggaagcccacaaagactcccataaggaggtggtgagagcggctgaggaggctgcgtccacactggccagttccatccacccggagcagtgcatcaaggtgctctgccccatcatccagacggccgactaccccatcaaccttgctgccatcaagatgcagaccaaagtcgtcgagaggatcgcaaaggagtcattgctgcagctccttgtcgacatcatcccaggcttgctgcagggttatgacaacaccgaaagtagtgtgcgtaaggccagcgtgttttgcttagtggcaatttattccgtaatcggagaagacctgaaacctcaccttgcacagctcacagggagcaagatgaagctactaaacttatacataaagagggcccagaccaccaacagcaacagcagctcctcctccgatgtctccacgcacagctaatggcagtacctgtctcttgtgtagacctagaagcaatcggtggtgcctctcagagacctttccccacccccttcatcggctgcccagtcagtacaaggaggcccacaaatatttattacaatcagtattttggtcccttccagcttttctgtagaatcttactggtattgaatgtaaaggaagcaaggcctgtattgcagtcttcatacaaaacaaaaggaataagaacagaaaagagccatactgaaacatgtcttgtacagcctgctgagatggcgaaaccctgtgtgtggggtgcagttttttaaaaatcagagcgctctagccactacttggtagaaagtagcattttttttttcagttaataacatatttgggggtggggggggggtgttactttgtgttcatcctccttagcctattttcttgtgcgtatggtctgtgtggggcccctttcacagctggacaccacgaaaggggatatatctttaagttgtgttctgagacctactaaaaatgggaatcaagtcttggcaagaacagtctgaagatggccttttaacaaacgctgggaattttgcttgtcatatccagactggaggccgactgccctggctttcagcgtagaattgggagtgcaccctgacagtctccttccagctctccctaatcgactccaccgacaaggtccctaccccagagcttccatgcaaaggaattcttcaagtttaaatctggacacaaaaataagataaatgtatggcatcatttagggatgcctgagatggcagttcatgaagcacagaagataaagaagaagtctttcatctttactgctgagatccttgggaacactgttgtcatgggggctctgccaagaccctcatctctgggctacacggtgattcagattgagcaccaacttgtttcctcccctcaaagttctgcctaagccgttcagttctaacatggtctcagttaatctggtaaatggcatctttaccatcttagttctgacttctcagtttaatgtgggattaagagccaagaaaagcctagagagactggatatcacaattttttttaattttataaactgaagtagttccttgaatgtctgttgatgaaatagtcactgtttaaggaaaaaagtaattatgaggtgtagcagattgcagaaaaacaggattagaaacacacttaaaaagaacacacatttagagtctctcttcctcctcagcgaaccactaggccccctttttaaaaacacctttagagcctaattactccaataaaagtaactagaggtttggagtctggttaaataaattctgagtaaaattcttaagccaaatggaaattcttaatgcaatcatgaggacttctattgtctcttactgttgtattagatcctataaattgaactgatttttccataaggaaaatgcttcttttgagattaattctaataacgtatttgctattgcagtgcagagcccactgcaactgctaggactgaaagcagaggctgggtgccagagcacgtgattcttaacatcatttccacagacccctctgccctgaccctctgcattggatgcaggaagctgggaaagactgatgttgatttggaaacatgggctgaaaatgaaggccccatagtgcataggaacagtaaagccagggtgctgacgtgtgtgtgtgtgtgtgtgtgtgtgtgtgtgtgtgtggggtgttgtgtgtgtttgcgcgtgcaccctacacatgtgtggtacctcactgctgctgtttagggaacttgagggacgcgtttcaaggggttgggtattactgacgagctttggctcaaaatatagcaggaccaggtcttttgttgataagtactgtttgtttattaatatgtcattaatggtatttcttttttacactctacaagtgaattagggagtctcttgttgacccctttgttgcaggaatgggcgtcgggctaggttatccatgagtttctttattcctaatgcagttagaaagacctttctccttgagctctttgactcccagaaggtaccccagtccccagtgtacttagaaaggatctcgaacattgctggacgtcctcatagtactcacaaagggctagccttgaatgtcactcgcccagtcttcagtctcctgacttagagatacaatcacgtcacaggtctcttggcctcaatctgaaaactgctgccgccgcgccgaggagactcgcatgccgccaccacctcactgggagggcgccgagcccaccgtcgccccctagaccctgacagctgcagctgccttgccttgccgccgcctccctgcagggcccctgttccaatgaaaaacagaacacaaaagagcagagcacctaagcctgtctctgcctccctgtctacctgactggccagggcccaagacccccgctgctccactgcggggctgggcgggctgactccctgcttcctccaagctgctgcctcccctgcagccagggtctgggcagggtgcagccggtcctcggggcacgcagcttccttcaagtacactgtgtgtgcttcccggacctgcggcgatgccacgggcctgccttttctatgcgcctcactagcttaccaccctgtgcaggtaatgcaactgactttgtctcatcagtctttttctttccctgccaccctttatttatcaagcgtaatgttacactttaaaggacagcaaataagaactttgtagaatcccaccaggactttgctaacaataatgtttggaaataaagaagtgctctgaaaaaatatcagccaccaaaatagttatgttggcactgtgttcacacgcatggtccccacacccccaggttgggtgggtttttttgttttttgggtttttttggggggggggctttttcatgttacatccatatctgtatttatatcttatttgtttcactttcaagggtatcatggcaaatgtacagatttttttgttaataatgtgctaggatttgctaaaaaagaaaaaaaaaaaacccttttgagtttgccctaaaataaatgagacttaattcaaaaaaaaaa

SEQ ID NO: 86648 - DNA, 503 bp, Homo sapiens
  misc_feature (1)...(503): n = a,t,c or g
ggggcgnnnnnccccccctgagaccctatcagngattgagatccctagccccgagatcttccgccgcgccaagttcgaccgtccggaggcgacctccgcgctctggcagctcctcttccgagtgctctcgccactccctgcgggcaacgccttggcatcgctcgccctggaggtccaagcccgcttggtgaagtcagcactatgctcccagggctacccgaggctggcactggcacaactacctgaggatggctcgcagggcagtcgggagctgctgctggctctgtcctggctcttggcccgaggacctgtgcccgagcagatgctggcccaggcccgagtgcctctgggtgacgagatgactgtgtgccagtgtgaggccctggccagccctggcccacctgcaccccacatggaagcagagggtcctgtggatgtccgccatgtgcagtggctgatgggaaagctgcggttccggtggcgccagctggtgtccagtcagc

SEQ ID NO: 86649 - DNA, 488 bp, Homo sapiens
  misc_feature (1)...(488): n = a,t,c or g
tggcatgtaggagatnncnnnnattgaaaccatcgagaaccntatgcagngtgcnggaattcctaagataaagcaagtgtgaaagtaagatttttaaaccatttatgggtccggttggaagcagtttctgttctgcctggcaggaatttgggagagtgactggtcccctgcagaggtgctgcaggctgggcctgccctgtgggcagatactgagcccaggggctcctccagccgggccacccctgcactcccaggcgcgttggcccagcacgccctgcttagtggaggagctgagatgaccagatagagagcctcgccctggcctgggagcagcctgcggccaagcctgtcccaccgaatccatccccgggagcagcctgcggccgagcctgtcccaccgagcccatccccgggagcagcctgcggccgagcctgtcccaccgagcccatccccgggagcagcctgcggccgagcctgtcccaccgag

SEQ ID NO: 86650 - DNA, 1721 bp, Homo sapiens
gatggagcgacccctcgaggagcaagtccagagcaagtggtcgtctagtcaaggccgcacaggaacaggagggtctgatgtcctccagatgcagaacagtgaacaccatggacaaagcatcaagactcaaactgactccatctcccttgaggatgtggctgtgaacttcaccctggaggagtgggctttgctggatcctggccagaggaatatctacagagatgtgatgcgggcaaccttcaagaacctggcctgtataggggaaaaatggaaagaccaggatattgaagatgaacacaaaaaccagggaagaaatctaagaagtcctatggttgaagcactctgtgaaaataaagaagattgtccatgtggaaaaagcactagccagattcctgatcttaatacgaacctggaaactcctactggattaaaaccatgtgactgcagtgtgtgtggggaagtcttcatgcatcagggctcccttaataggcacatgagatctcacactgaacagaaaccaaatgagtgtcacgaatatggagagaagccacataaatgcaaagaatgtgggaaaaccttcactcgcagctccagtattcgaacccatgaaagaatatatactggagagaaaccctatgaatgtaaggaatgtggcaaagccttcgcatttctcttttcctttcgaaaccatataagaattcatactggagagacaccctatgaatgtaaggaatgtgggaaggcattcagatatctcactgctcttcggcgccatgaaaaaaatcacactggagagaaaccctacaaatgtaaacagtgtggaaaagcctttatatattaccagccttttctaacccacgaaaggactcacactggagagaaaccttatgaatgtaagcaatgtgggaaagccttcagttgtcccacgtacttacggagtcatgagaaaactcatactggagagaaaccttttgtatgtagggaatgtgggagagccttcttttctcactcaagccttcgaaaacacgtgaaaacccacaccggagttcaaccttatacatgtaagaaatgtggggaagccttcaagtcatctagttcctgtgaagtgcacgaaagaactcattttggagaaaaaccctatgaatgtaaacaatgtggtaaagccttcaattcttcaagttaccttcagttgcacgaaagagttcacactggcgagaaaacttacgaatgtaaagaatgtggtaaagcctttctttattccactcactttcgaatccatgaaagaacccatactagagagaaaccctatgaatgcaaacagtgtggtcgggtcttcatttacttcagtcaccttcgaaggcacgaaagaagtcacactggagtgaaaccatgtgagtgtaagcagtgtggcaaagctttcacttgtttaaattccctgaaagtacacaaaagaattcatactggagaaagaccctttcagtgtagacaatgtggtaaagccttcagttactcaaagtctttgcacgtgcacgaaaggactcatagtagacagaagccctaagaaagtaaagtgtggtaatgctgtcagttgtattagttccttttggatgtatgagagtacttacgctggagagaaattcaaggaatgtaaacggtgtgattaagccttcagttgtcctaattccctttgaagacgtgactcatgcggcaatgaaatattt

SEQ ID NO: 86651 - DNA, 1454 bp, Homo sapiens; identical to SEQ ID NO: 60891
  misc_feature (1)...(1454): n = a,t,c or g

SEQ ID NO: 86652 - DNA, 3398 bp, Homo sapiens; identical to SEQ ID NO: 61287

SEQ ID NO: 86653 - DNA, 571 bp, Homo sapiens
tttcgtccggcacctggccatgtgcaaccctgaggaggcagctctgctgcggctggaggaggtcttctcagccaccctcgcccatgtcaacagccttgtcctccagcccctgctcccagccgccccagatccctcggatccctggggcagagagtgcctgcggctcttgcaacagctgcacaagagctcccagcaactctgggaggtgacggaggaaagcctgcactcactgcaggagaggctgcgttacccggactccaccggtctggagtccctgctgctgctgcgaggtgctgaccgtgtactgcaggcccacatagagtacattgagtcctacacaagctgcatggtggtgcaggccttccagaaggcagcaaagaggagaagcgagtactggcggggccagcggaaggcgctgcggcagctgctttcaggtgtgagctcatagggctcggtgggcgcatcgctgatccctgctttacaacaaccaatcagcacataacttgtctcacttcatgcgtatcccgctgagccgtttggtcacccttgtggggtttactctcgcctcttg

SEQ ID NO: 86654 - DNA, 489 bp, Homo sapiens
  misc_feature (1)...(489): n = a,t,c or g
agagtcggaaatcgataccatagatgagcgtcgnggaantccttggattctgtttctcatttaacataactagtaataacaaccatttattgagtgaacatatattttaaaagtcctaacaaaattttagcaagtcaaatccaataatatataaaaagtataatacattatgattggggttaccttgggaatgcaagattggtttaacgttaaaaaattaatgaacgtattttaccatgttaacagactaaaaaggaaaaaaatatgaacatctcaataaatgcagaaaaagcatttgataaaaattcagcaaattagaaatagagataagaattctcagcaaattagaaaaaagagggcttccttaacctgataaatggagcatatttatgaaaagcctacggtttaacattatacttaatgacgaaagactaaatgcattccctccataaacacagacaagggaagtatatcttttcttaccacttg

SEQ ID NO: 86655 - DNA, 486 bp, Homo sapiens
  misc_feature (1)...(486): n = a,t,c or g
nggagcagaggccncctctgaaattcttgagancntaggccagngcgtggaattcctgattctggaacaccctctcccctacctgcgaaacaccccgctacccgacagaaaccaccatgcttgccccctcagctctgcaccgccctcctcttaaggatgccttccccaggggtctcccccacggacctgtcccttcctctctacattctttacgggggctgactgccctcatccatcccactgtccccctaaggccgcacaacctgcctgcgatacctcctgctcggcctgctcctcacctgcctgctgttaggagtgaccgccatctgcctgggagtgcgctgtgagtaaggctgaccctacttcccacttacaccgaacgactttcgtcccgactctcgccccaaagctgatcttcctcagcagggatcatagtcactaccaccacctccttagctttgggtttggtttccagccagggctgtt

SEQ ID NO: 86656 - DNA, 598 bp, Homo sapiens
ccttgtctacctcactagtccgtgcggaggaattcgtgggataaccaggcggaagtgctcagggagtagtcttgcagcctaaaaaaatgttaatagttgcttcttctttgagaaaacatcaaatggcggatgacgccagtgtagctagggctggtgagggggcaaggggtgcaggagtgcgacccaaagcccctgggggtcctgggatgaggaactgcagaggcttccgcattggcatctggggctagggcctcagccaaggacaagaaatatatgcccattaccaagctgggccacctggtcaagaacatgaagatcaagtccctggaggaaatccatctcttctccctgcccatcaaggagtctaagatcattgacttttaactgggggctctctcaaggatgtaggttttgaagattatgccaatgcagaagcacacgtgcatcagccagcacatcaggttcaaggcatttgttgccttcagggactgacggtcacgtctagtgtggggtgttaagtgttccaggagatgcgtcgaggggcatcattctggcaagcttttcattgttcccgtgcacaggggttactggggggaca

SEQ ID NO: 86657 - DNA, 475 bp, Homo sapiens
  misc_feature (1)...(475): n = a,t,c or g
tgaggttnaggggnnnnnncctcgagatccactattgagtgcgcgtgaataccccaggtcacctggatattcttgatctagaagttttgtgattctgcattctacatttagatctttgatccattttgagttttaatttttgagaagggtgtaaagtctgaacttagattctttttttttgtacatggacatccaatttttaagcaccatttgttgaagagactgcattccttcatttaattgcctttgcttctttgtcaaagctcagctaactatatttgcataggtcaatttccgggctctctcttctgaaccattgatcaatctgcatattctttcactaatgccatgctatctcaattatttagctggagagtaagtcttaaagttgggtagtgtcagtcttctgagttgttattcttcagcattttgactatgagtcttttgcgtcttcatataagctttagaataaatg

SEQ ID NO: 86658 - DNA, 2168 bp, Homo sapiens
attattacagctctgtgaggcagagggttacctgtgaagaacctagattccgggaatgcgccgcagccctcatcgagggctcggccacagaggtgtacgcgggcgagtggcgcgcagatcggcgcagcggcttcggcgtcagccagcgctccaacgggctgcgctacgagggcgagtggctgggcaaccggcggcacggctacgggcgcaccacccgccccgacggctcccgcgaggagggcaagtacaagcgcaaccggctggtgcacggcgggcgcgtccgcagtctcctgcctctggcccttcggcggggcaaggttaaggagaaggtggacagggctgtcgagggcgcccgtcgagccgtgagtgctgcccgtcagcgccaggagatcgccgctgccagggcagcagacgccctcctaaaggcagtggcagccagcagtgtcgctgagaaggccgtggaggcagctcgaatggccaaactgatagcccaggacctgcagcccatgctagaggccccaggccgcagacccaggcaggactcagaaggttccgacacggagcccctggatgaggacagccctggggtatatgagaacggactgaccccctcagagggatcccctgaactgcccagcagtcctgcctcctcccgccaaccctggcgaccccctgcctgccggagcccactgcctcctggaggggaccagggtcccttctccagccccaaagcttggcctgaggagtgggggggggcaggcgcacaggcagaggaactagctggctatgaggctgaggatgaggctgggatgcaagggccagggcccagagacggttccccactcctcggaggctgcagcgacagttcaggaagtcttcgagaggaggagggggaggatgaagagcccctgcccccgctgagggccccagcaggcacggagcctgagcccatcgccatgctggtcctgaggggctcgtcctcgaggggtcctgatgctgggtgcctgacagaagagctcggggagcccgctgcaaccgagaggcctgcccagccgggagctgccaaccccctggtggtgggagccgtggccctcctggacctcagcctggcattcctgttctcccagctcctcacctgaggctacttcctggcctggttctggctttggttgcgtgcctcttcacccctttgacctgccttttttctcttctcctcttcctggctgtgttttctcctatctttctttctcttcttcctttcttttctgtgctcctttgtttttttctctcgctttttctttccctgtcttctttcagattatctcatttcttctggatctgtctctgtattcctcactcccttccccatcccaaccccttctttctctagattgtttacatatgaagggcttttctctctcagagttgctgtcttctctgagacacacaaatctaagtcagaccattgctccacgccctcccaccttttctttagacctcaacttcgctgcgggtgggggtttggtgtcctaaggagactcctggaagctgaatggagaggaggaagaaaatgaagaaggagtgattgaatgtcgggcaaggcactggctgagctgctgtggctccctagcctaaggggcctgctgtccctctgaggcctagtgaaaaagctgcaggaggtgcatcctccacctctaatcttggaggctattatcttacctccaagcactgagctgggttactgcccaattccatccttccctgaaggagagaagggaagtgaaaagtagagtaactccccagcatttccctctttttctcctcatcggccagcccctcctccagccccctctggtgggcatgccatgccaagagcaacgtgtaaaggaacagagaatatccaatgcagtcaagttccaccctgcccagactttgccactgacttctcccacccttctgtctcccccataatagtttatttggttggtctggactcacttgtggcctttgattaaattcctaaggggcctgaagaagacatttctactgcagagggttagaggcacttgagcaaggcccccacatcccaactctgggagttgtggtgggaggaggcacttctgggggataggaccagacaagataacaggagctcacatggaagcaga

SEQ ID NO: 86659 - DNA, 962 bp, Homo sapiens
ggccgagaacaggagccggagggagttccactctattggcgtgcaggtggaagaggacaagaggcgagcaaggttcaagcgctccaatagtgtgacggctggcgtgcaggcagacctggagctggagggcctggcaggcctggccacggtggccacagaagacaaggccctgcagtttggacgctccttccagaggcacgcctctgagccccagcctgggccccgggcccccacctactcagtcttccgcacggtccacacgcagggccagtgggcctaccgcgagggctacccactgccgtacgagccgccggccaccgatgggtcgcccgggcctgcccccgcccccacccccggccctggggccggccgccgtgactcctggatagagcgcggttcacgtagcctccccgactcaggccgcgcatccccctgcccacgcgacggcgagtggttcatcaagatgctgcgggcagaggtggagaagctggagcactggtgccagcagatggagcgtgaggcggaggactatgagctacccgaggagatcctggagaagatcccgcagtgctgtgggcagcacacaacttctcctgtcccagaaggttcagcagttcttccggctgtgtcagcaaagcatggatcccactgcgttccctgtgcccaccttccaggacctggcgggtttctgggacctcctacagctctccatcgaggatgtgaccctcaagttcctggagctacagcaactcaaggccaacagctggaaactcctggagcctaagctgaagaaactgaggctcagagaattaactattgtttctcaaggtcacacagccatgtggcagatccgggcctggactccggcatccctgcttcacaaccaggccctggcacctgctgattacggagtgtcctgcccctgccctctggctgtggaggcagctggggagcagggctga

SEQ ID NO: 86660 - DNA, 2143 bp, Homo sapiens
ttttttttttttccctacaaaataatttattggaacacacagctacagcactctatgtacaagcacattgacgctcctgactatcctcaactaggggacccttttcttcccccttgcccttgcggacctcttctatcaaatctttcaggtactggatctccttggccagggaatccgccctctcttttagagcctcgttccttcttttccagctctttggcacttcaccagtaaagagccttcccttgctccggccctcttcttctgggcgggtaccctaggtggggctggctgttcttgtttttgctccattttttttcagcttctttatccagtttctcacccctttacttttggctggctaaccattcttacttttccagggagggatcgtaaaggtttggggacggggcaggacccacaggaggaacacctggggagatggggagggctcctaatttggaagaaccccctgggtagagggggctgtgcctgaagaagacccccagataaggactctggggctcataccagatgccactaatcattaatctgaaggggggtgtctttcctcctttatgcactgagggatcatgggcaaccgtatgcagttgtagtctgggcttccctaatctccctttcagtgaatatcccactttcaactgccccagctcctaaaactaaaaggaaatgaatctggagtggaggaacaggaccccctggggaaagggggaagaggttgtaagaaggttgaaagggggcaaaccctggtcggggttttgttaaaatctcctgggagaatggtccatatgggttcaccgttttggggggggctgcttattaagtctccctggactaaggggggcaaagagatcacaaatgtcaatccaagtggtcaagaaggtcatctggcaatggtttccccaggtcatctaatacccaagcatgggcatccaaagtcgaactccttcaaatccattttctccaacatccaatctgtcccggagaaggcatcctccttgctgttgttggagggactgaccaacccatccacagccagccattcggaggagcccgccttagccttgtcgctggagaacccatgaggtttgaagtgcttggccacctccaggtaatcatctaagagacctaggctttcttcagcccccaaacccgactggtcgaagggggacatcaagtcccccaccaacacctcgctgctcaggaagctcatttcggtcatgttgcggtgctttgctggaatcgaggaatgtgcttaattcgaaggtgtctttgtcggttacagcaacgctgctgctgaatgccgtgagaagcctgaatgagaatcagaagccaactcccattagaggttagctgttctgagaatttcatccttccacttatgaggcgggacttctctagatcggccatctagagaatcgggaacagggcagttgtatttgcccctccctgcttgcaactcaggttccacaaaatggacgctcacggagaccaggggattcttccaccggccgccaagaggaaagcgctccgtccccacgtccaaatacggccagggcggccgcgccccgcccaccgcccgcccttgactcacgcccgcgccgccgccctgccgccgccatcttggttcctgccacgtttcgtgggggcaacagccaagacccctgggacccttgcggggctcccgggtccgaggggcttgtagggctcctggggaagcagtccgggcacccgactacgctttcccgatcccaggcacgcgagcgtctcggcggacacccacagcaaacgaccacgcagtcccgtggcgctcagttaaatcgccttaccccccttggcggcaccgccctggccccaggccgcaccccaccaatccaaaacccgcgccggccccaggagcacagctggacgacccgccccggtactcacgccatggcttaagccgctgggggttgccgctgcagagccctggtgctgctgccgccgctgcaaaggccaatgcctgccgcaggcactgctgcccctaatacgccatggtggccgtggaccctgagggcgggggaggagggaaaacgcacacgcgcagagaaaactacatctgtgggcgggcaaagtagaaaac

SEQ ID NO: 86661 - DNA, 385 bp, Homo sapiens
ggatgatctgcaaatattttctcccagtctatacatcgtcttttcactttcttggagtggcttgtgatacacaaaagttttattttgcgtgaagtccaatttaagtattttttcttttgtggcttacttttttcatgtcatatgtaagaatccattgccaaatccaagggcataaagattaccactaaattttcttctaggtgtatttagttttagttgttatatttagggcattgatccatattgagctaagttttgtatatgacgtgagttaggggtccaacttcattctcttgcatgtggatatctaattgtcctagcatcatttgtcaaaaagactctttatgccctaatgaatttttacacacttgtcaaaatcaattag

SEQ ID NO: 86662 - DNA, 425 bp, Homo sapiens
ggaaaaagacccaactatacattgtttacaagaaactcactttaaatgcaaagacatatagatttgaagtaggaaatggaaaaagatatacaaggttaacaataattaaaataaagctgaaacagctatattagttttcagacagagtagacttcagagagaaaagataattctggatgaatataggcactgcttgataacgaaaagtgaattatctgagaaaatataacaattcttaatgtgtgtccacctaacaagagtgttaaaatacgtgaggcaaaaaactgatagaactgcaaggataaataaaagaattcacaatcatagttgtaaacatcaacaccctctatcagaaatggagagatccaatagatagaaaatcaataaaatatggtagaactaaacagcatcatcaaagaactgga

SEQ ID NO: 86663 - DNA, 1762 bp, Homo sapiens
gcggccgcgcgttctccgctttcccggctccgtcgctgactcgtcgtagacgttggggagcgggaaggcagcggcagcgggatcgggatgaacagcggcggcggcttcggtttgggcttaggcttcggcctcacccccacgtcggtgattcaggtgacgaatctgtcgtcggcggtgaccagcgagcagatgcggacgcttttttccttcctaggagaaatcgaggagctgcggctctaccccccggacaacgcacctcttgctttttcctccaaagtatgttatgttaagtttcgtgatccatcaagtgttggcgtggcccagcatctaactaacacggtttttattgacagagctctgatagttgttccttgtgcagaaggtaaaatcccagaggaatccaaagccctctctttattggctcctgctccaaccatgacaagtctgatgcctggtgcaggattgcttccaataccgaccccaaatcctttgactactcttggtgtttcacttagcagtttgggagctataccagcagcagcactagaccccaacattgcaacacttggagagataccacagccaccacttatgggaaacgtggatccttccaaaatagatgaaattaggagaacggtttatgttggaaatctgaattcccagacaacgacagctgatcaactacttgaattttttaaacaagttggagaagtgaagtttgtgcggatggcaggtgatgagactcagccaactcggtttgcttttgtggaatttgcagaccaaaattctgtaccaagggcccttgcttttaatggagttatgtttggagacaggccactgaaaataaatcactccaacaatgcaatagtaaaaccccctgagatgacacctcaggctgcagctaaggagttagaagaagtaatgaagcgagtacgagaagctcagtcatttatctcagcagctattgaaccagggtggctgcactcaacgagtttatgcaatgactttcttggatgtttctgaaggaggaggatgtacagagagtaggccccttgcactatatgtggtacattccacttgtgcctgattattaactgggatctttaattgttctgagcttacactgcaaagtgattttttcctcccagagtctggaaagagcaatgaaagaaaaggcggtcgatctcgttcccatactcgctcaaaatccaggtctagctcaaaatcccattctagaaggaaaagatcacaatcaaaacacaggagtagatcccataatagatcacgttcaagacagaaagacagacgtagatctaagagcccacataaaaaacgctctaaatcaagggagagacggaagtcaaggagtcgttcgcattcacgggacaagagaaaagacactcgagaaaagatcaaggaaaaggaaagagtgaaagagaaagacagggaaaaggagagagagagggaaaaggaacgtgaaaaagaaaaggaacggggtaaaaacaaagaccgggacaaggaacgggaaaaggaccgggaaaaagacaaggaaaaggacagagagagagaacgggaaaaagagcatgagaaggatcgagacaaagagaaggaaaaggaacaggacaaagaaaaggaacgagaaaaagacagatccaaagagatagatgaaaaaagaaagaaggataaaaaatccagaacaccacccaggagttacaatgcatcgcgaagatctcgtagttccagcaggtttgataatgcttaa

SEQ ID NO: 86664 - DNA, 415 bp, Homo sapiens
gggcggaacataacccgagctgtgcttgtggctgcggctagtatttgttgtgcgcacagaagctgatataaaaggtgggcaagatacttttgcctgcatggtgaagccaaggaaggagctggcaccatgccttactagtacccaaccctttttgctgaacaaaagaaggagttggctgacattgccctgcggactgaagccccgggcaaaggcattctggctgcggatgagtctgaaagcagcatggccacgcagcatgatccaaatatggggtggaaaacacagaagagaaccgccggctgtaccgccaggtcctgttcagtgctgatgaccgtgtgaaaaagtgcattggaggcggcattttcttccatgagaccctctaccaaaaagacgataatggtgttccctatccccg

SEQ ID NO: 86665 - DNA, 1512 bp, Homo sapiens
atggaggaagtggaccatgagtcaaaggatgtaagtggcctctggaacctacaaaggaaagtacacattagggaaaagccttatggatgtaatgagcatgggaaagtcttcagagtgtcttcaagccttactaaccgtcaagtaatccacattgcagataaaacttacaaatgtagtgactgtggcgagatctttagtagcaattcaaactttgcacaacatcaacgaatccatactggagagaagccttacaaatataatgaatgtggcaaagtcttcaatcagaattcacaccttgcacaacatcagaaaattcatactggacagaaaccttacaataacaaagaatgtgggaaagtctttagtcaccatgcctaccttgcacagcataggaaaattcatactggagagaagccttacaaatgtagtgaatgtggcaaagcatttagtgtgtgttccagtcttactgctcatcttgtaatccatactggagagaaaccttatgattgtaaggaatgtggcaaggtcttcaggcataagtcttccctaaccactcatcagacagttcatactggagagagaccatacaaatgtaatgaatgtggcaaggggtttagtcgaattgcattccttgcaaggcatcggaaagttcatactggtgagaaaccttacaaatgtaatgagtgtggcaaggtctttattggcaattcacgccttgcacgacataggaaaattcatactggggggaggcgttacaaatgtaatgaatgtggcaaagcatttagaacgtgttcagatctcactgcccatcttctaatccatactggagagaaaccttacgaatgtatagactgtggcaaggtcttcaggcacaagtcttccctaacctatcactgtagaattcatactggagagaagccttacaaatgtaacgaatgtggcaaggtcttcagtcagaattcaaaccttcaacgacataggaaaattcatactggagagaagctttacaaatgtaatgaatgtggcaaggtcttccgtcagaattcacaccttgcacaacatagggatattcatactggagagaagccttacagttgtaatgaatgtggcaaggtcttccgtcggaattcacaccttgtgcgacataggaatgttcatactggagaaaagccttacagttgtaatgaatgtggcaaggtcttcagtcggaattcacaccttgcgcgacataggaatattcatactggagagaagcctcacagttgtaatgaatgtggcaaggtcttcagtcggaattcacaccttgcgcgacataggaaaattcatactggagagaagctttacaaatgtaatgaatgtagcaaggtcttcagtcggaattcacgccttgcacaacataggaatattcatactggagtgaagccttacagttgtaatgaatgtggcaaggtctttagtaaaaattccatcctagtacaacattgcagtattcataccagagagaagccttaa

SEQ ID NO: 86666 - DNA, 3363 bp, Homo sapiens
ggaggtgcccctgggggccccagtccccatcactccaaggggcagtcctgcaagtgacaaggtgggcccaatccctgtggaacaggtctctgaggaccacagagtggggccccagggaaagctgggagccgagctagaggcaggcagcaagtaagggccaagctgtgcccctgcccggaagaccttcctgcccccagaacccgaccctccgcagatagccctccctgggcagcagccccccagcttccaaggcccgtgcctcaccagacgccatgctctcacggacttgtttgctgctctgtaccctgcagatctgccccagaggagcaggtgaaaagccgcgcctgccgaggtgctgtggcggtggagttttgggcagaggagtggggggaagagtttctcacttttaagattctccaaatccaagatgaagtcatgctgtgctttggaatggtagatgctcatttatgtaaaatcataataaatgttacccaaactgttagaataaaaaaataccttttttgagggggaggaggtccccagcctgctgctgggtagtgagagggggttagcaccattagggcgcagggggcgggagctccgccacagcccgtggtgggcactgaggtctgtcggtcggtctgtgcatcctggcacagtcagcggcgggcaacccgctgatggcctcggggagggggcgccgtggctgggctaagagcacgaagcggcaacactgggtgcggaatggtgggcagctggcagcggcccagtatgcgccagtgtctcacagaacccgaaggacaggcggtcccgctcacagcggggaggctcgacgggctcacaatcctcggtgccacacggccgggagctctcaggccaggcctcgtggccacactggtcactgtcttcctcgggcagccctgtctgggtgttgacacacttgaccaggcgccgctggacaccaccaccacagggggctgagcactggccccagggccccaccacccactgcgtgcaggggtgggtgttgcagggccgggtggtgttgggtctcagcgcctcctcgcagaggcctggctccgggcaggtcactagacgctgctgctcaccaccgccacaggcctcggagcactccctccaggaagatgtgtaccagctgaggcagggctgggccccgcagggccggtgcgcaggcggcttggcaggcccgggctgacaatggaagggccgcagtggccggaggtcccgtgtgtccacacactgcacgtcccgcactgaggaacctccgccgcagctgcgggagcacttactccagttgcctgagtgccaggtggcacagggccgcaggtggcagcggcggggcaggctggggccggccagcgggggcgcagtcctcatcccggccggagctacagcgcaccggcctccagaccgcacccaggccacaggtggtagagcactcgctccagtttcccgcttgccagctggcgttcctgacaaccaacgggtccgcggggggccccgcttcagccaggctgggagccagcggctgggtctcagggactctgtggctgttggcggggctgtcccaagctggtgtggacagcagcctagagctcaggggcacctcagggctgagggactcaggctgacccttgggtcctgggttcagggcaggctcaggcatgtgcccgaggccagtcagggttgtggggaggaaggtcccccacactgccacagtctgcaggtcccatgagcctggtcctggggctgggaaggagggagtccccggcttccagggaactgtccctgacctttcatctctggcagaggggctatgggaggaggaaggagagaagccaccccaacagtgggccacagttcactgtccacaggccccaggccaccctccagagctggctcccaggccactgtgcctcctgtccacagctccgccacgtcaggactaggagaggagtgggtgctgccaacaggggacaaagggggcagcgtggagctgggtctcgggggcaggtggggtgctccgcggcccttgggttcctcatcatccttgaaaacctcattggtcctgtcccgccatggagggggcagctggctctggctgtccttgccaactgggaaatcattttggctctcaggggtggcaggtgtctgcaggccatcagtggaaaccctgggccaggacaggctggggagcccaagatctggggcccctatgggggtgtcttcctcaggcaggaaattgatcaaagggttcccaggggtctgctctgagggtgggggtggggagcggccggcctggctaggccaagggctcggggaccaaggtcccagtaccccctcctccttggctgcaggaggctctgtggcaggcacagggctacccgtggagggcgcagcaggacggctgtgtggtgggggtgtccggtcccctgtccccgccaggtctagatcgggctcctcagagggcccgtaggacagatcctcgtggaaattgatgaaattgtagtcgtagtagaagtcgtccacaaacacgggccccggcaggtccagctctggagcctcctcctcaatggcgttgcccatggtgcctggcttgggtgatgaggcgggtgaagggcgtggggccaggtggtgcgggatgaagtcagcctcgttgaagagctcgtggctggaggagccgctgcctgagccttcagggcccagtgtgcccaggggccaccgacagagtggcagagagcaggtgacttcgctggctggctgctgggcctcgtcacaggggacaccggtgtcattggtgcagaggacatttcggcgctgagtgccctccccacatgtcactgagcactgagaccagttccccacagcccaggtggccggacagggtacatggcggttgcaaggggtttcagtagggggccggggaaggtgttcacaggcgggtggctccagggcgctctgctcatccagccccacgctgcggatgcagagcacggcccggcgggagaggcccccaggcccgcaggagctggagcacagctgccactcacctgcccaccacctggcagggcagggctgctcgctgcacttcctctgttggtcatcaggccggcccagggggtcacagtgctcctcgtccacgggccctgcctgccgctccaagcagtacacattctgcctctgcacacctctgccgcaggtgactgtgcacttggtccagggcccataatgccaggagaacacgggcggcgggacctcgtcgtggccacctgcctccctgtggatggtgtactcgtagtgcaccccagggttgctctcctggaacagcagctggatccagac

SEQ ID NO: 86667 - DNA, 5364 bp, Homo sapiens
  misc_feature (1)...(5364): n = a,t,c or g
ctccagcctcctggagaagatgacgtccagcgacaaggacttcaggttcatggccaccagcgacctgatgtcggagttgcagaaggactccatccagctggacgaggacagcgagcgcaaggtggtgaagatgctgctccggctcctggaggacaagaacggtgaggtgcagaacctggctgtcaagtggctgggtgtcccgctgggcgccttccacgccagcctcctgcactgtctgctgccacagctgagcagcccgcgcctggcggtgcgcaagcgggcggtcggagcgcttggccacctggcgaccgcctgcagcaccgacctcttcgtcgagctcgctgaccacctactggaccggctgcccggcccgcgggtgcccaccagcccgactgccatccgcaccctgatccaatgtttgggcagcgtcggccgccaggccggccaccgcctcggggctcacctggaccgcctggtgcccctggtggaggatttctgcaacctggatgatgatgagctccgggagtcctgcctccaggcttttgaggccttcttgaggaagtgccccaaggaaatgggtcctcacgtgcccaacgtgaccagcctctgcctccaatacataaaacacgaccccaactacaactacgacagtgatgaggatgaggagcagatggagacagaggatagtgaattcagtgagcaagagagtgaagacgagtacagcgatgacgatgacatgagctggaaggtgcgccgggcagctgccaagtgcatcgcagccttgatcagctcgcggcctgacctgctgcccgatttccactgcaccctggcacctgtgctcatccgccgcttcaaagaacgcgaggagaacgtcaaggctgacgtcttcactgcttacatcgtgctgctgcggcaaacacggcccccgaagggatggctggaggccatggaggaacccacccagaccggcagcaacctccatatgctacgtggacaggtgccccttgtggtcaaggccctgcagcggcagcttaaagatcggagcgtcagagcccgccagggatgcttcagcctcctcaccgagctggcgggtgtcctcccaggcagcctggccgagcatatgcctgtgctggtatcaggcatcatcttctcgctggccgaccgctccagctcctccaccatccggatggatgccctggccttcttgcaggggctgctgggcaccgaaccagctgaggccttccacccacacttgcctatcctcctgccacctgtgatggcctgtgtggctgactctttctacaagattgcagccgaggccctggtggtgctgcaggagctggtgcgggccctgtggccgctgcacaggcctcggatgctggatcctgagccatatgttggagagatgtctgctgtcaccctggcgcgacttcgtgccactgacctggaccaggaggtgaaggagcgggccatttcctgcatgggccaccttgtaggccacctgggtgaccggcttggggatgacctggagcccacgttactgctcctcctggaccgcctgcggaatgagatcacccggctgcccgccatcaaggcgcttacgctggtggccgtatccccactacagcttgacctacagcccatcctggccgaggcactgcacattctggcctcattcctgcggaagaaccagcgggctttgcgactggccacactggcagccctggacgccctggcccagagccagggcctcagcctcccaccgtctgccgtgcaggccgtgctggctgagctgcctgccctggtcaacgagagcgacatgcatgtggcccagctggctgtggacttccttgccacagtgacccaggcccagccagcctctttggtggaggtcagtggccctgtgctctcagagctgctgcggctgctgcgttcgcccctgttgccagccggagttctggcagctgctgaaggcttcctgcaggccctggtagggacccgtcccccgtgtgtggactatgccaaactcatcagcctgctcactgcgcctgtttatgagcaggctgtggatggtgggcctggcctgcacaagcaggtgttccactcattggcccggtgtgtggcagccctctcagctgcctgtccccaaagaggcggaaagcacagccagtcgcctggtctgcgatgccaggtcgccccactccagcacgggggtcaaggtcctggcattcttgtcgctggctgaggtgggtcaggtggctgggccaggccacgagcgggagctgaaggcggtgctcctggaagctttggggtcacccagtgaggatgtgagggctgcagcctcgtatgcactgggccgtgtgggtgctggcagcctgcccgacttcctgcccttcctgctggagcaaatcgaggctgaaccccgacgacagtacctgctgctgcactcactcaaggaggccctgggggccgcccagcctgacagcctgaagccctacgccgaggacatctgggccttgctgttccagcgctgcgagggagctgaggagggcacccggggggtggtggccgagtgcattgggaagctggtccttgtgaacccttcgttccttctgccccgcttgcggaagcagcttgctgcaggtcggccacacacccggagcaccgtcatcacagcggtcaagttccttatctcggaccagccccatcccattgaccccctcctgaagagcttcatcgctgtgcacaacaagccctcgctagtccgggacctgctggatgacatcctgcccctcctctaccaggagacaaagatccggcgggacctcatccgagaggtggagatggggccctttaaacatacagtggacgatgggctggacgtgcggaaggcggcctttgaatgcatgtattcactgcttgagagctgcctgggccagctggatatctgtgagttcctgaaccatgtggaggacgggctgaaggaccactacgacatccggatgctgaccttcatcatggttgcccggctggccaccctgtgtcctgcacctgtcctgcagagggtggaccgactcattgagccactaagggccacctgcactgccaaggtcaaagctggttctgtgaagcaggagtttgaaaagcaagatgaactgaagcgctctgcaatgagggcagtggctgccctgctgaccatccccgaggtggggaaaagccccatcatggccgacttctcttcccaaatcagatccaaccctgaacttgctgccctctttgaaagcatccagaaggattccacttcagcccccagcacagactcaatggagctcagctagtcccctcagcaccaaggtgggccctcgcttaagagaaaggagcccacccaagtccgaggcctccccatcccaccatcgcaggactctacttttgcccttccaccatctcactgggggccctgtcgctcctggtcagggcttacagtgccttctccagggacccaactcaaaggcccccagcccaagctgtgaggctgccaacagttgggccccttccttaactcaggacagtcatccaaagaaatagggtgaggaagttttccagtgacttcacactgtacccctccatagtctgtctggttccttcagagggtgtctctgcctcacaaactagtagtatttagaaataggctgtgctgtcagctgtaaaagatcaggaggcagcagacaccactctggtttcttcactgcattcagcaatgcctgaagttagtgctcaggccgggcatctcaaaagaaaagatacttgagttattcacattttaaaattcaaaacggttcatttttaagtggcagtgatgaatcagaaatttggaagatgatacgggtttcttttttccagggaggaggaatgggttgggtagggaactggacaggcttggacctcatgtttcatttctaatttcaaaatacttattagcaaattgggcaacaatgggcatcttccatgccaccacccaggcataaccagttggtttgtttccttctgaggaaggtttcaaatgtgtctagtgttcagtattgaggacaaagaaatacaagtggcaggcccaagtattttctgtgatatcccaggttaataaagattagattctaagttacttctttcctctgcacgactcgtctccaattgttaatcgaatcgcctgaacccaggaggcagaagttgcagggagccaagatcaagccnctgcactccagccggggtgacagaatgagtctcaaaaacaaaatcccaaaaatgaccagtttgcattataaatatttatgactaggttttgaacaggagacaatctgtaagcttcctgtctagactagaagtagaaaagctttattatacccagcgcagcatttctgctaagttgaccaggatggttacagaaaaacatcctgtaagcatttctgtctcataagtaccacatcccatatccctcatgacctatatactacagaagatgcctgtaatcccagtactttggggagggctgaagcaggattgcttgagctcagggagttccgggagccctagggcaacatgggctaggaccacctctacaaaaaaacttcaaaaactacccaggtttggaggtgtgcatctgtagtcccagctacttggaaggctgaggtgggaagatcacctgagcctggggaggtcaaggctgtagtcagtgtgccactgcactcccagcctgggtgagagcaagaccccgtctccaaaaaaaatcaggaccacgtgtcactaaattctgagtaccagtcaagaggctcaattgtcaccagttaggtccccgccttggcaaactgctgtaacattatacctgaagcagcagctggtgggagggttataggagactgaaagtgcttttccagttaaccgtggtggattacctggaagagcaatttgtacatcatcctgttctttttggacagaagttacaggatgcaatttaggcatcccgtaagaatctgtgtaagaaattcatctggatatttccatgcatattttctcaattctcacaagcatcacatggaataacttgtcacctaactttacaaaagcaaggctaagaatgactacttgtggcttgggagccacaagcttcttcaagtgtctcagaacctacctggtgtgagggccaagtctgtacccctcatacccagcctcaactggagatgactaaggctagtctgtgcacttgaggccacattcccctgttcaaggactgagtgtcctttacaaatcccctccaaatgggagattccaaaggggcttaagcaaaagaacaatctctgtggcaaactaagt

SEQ ID NO: 86668 - DNA, 1332 bp, Homo sapiens
atggctgctgggtacctgccccgctggtcccaggaattagtaacctttgaggacgtgtccatggacttctcccaggaggagtgggagttgctggagcctgctcagaagaacctgtacagagaggtgatgctggagaactacaggaacgtggtctccctggattggatgactgtactaagaaaccaagactcaacttacaagaaggtggctttgcaggaggaaccagccagtggtataaatatgataaagcttatcagagaagatgggggatggaagcagttagaggacagccatgaagacccccaggggcttttgagccaaaaggcatcccttcacgtagtggccgttcctcaggagaaggctactgcatggcatggatttggggaaaatggtaatctgagcccagcccttgttttatcacagggaagctctaaagggaaccacttgtgtggcagcgagttagatattacaagcttggcatccgattcagtcttaaaccaccatcagctgggatatgcagatcggagaccttgtgaaagtaatgaatggggaaatgccatccgccagaacagtcactttattcaacacggggggaagatgtttgtgtatttggaaaatgggcagtcattgaaccacggtatggccctgactatccacaacaaaatcaacacggcagagaaaccctttgagtgccaccagtgtgggaaggtgttcaaccggaggcattctttgagcgaacatcaaagaattcacacgggggagaaaccctacgagtgtcaggagtgtgggcgagcctttacgcacagctccaccctcacgcgccatctgagaactcatactggagagaagccctacgggtgcggtgagtgcgggaaagccttcaacaggatctcatcgctgactcagcatcagaggattcacaccggggaaaagccctataaatgtgaagactgtgggaaatccttctgccagagctcttacctgatcttgcacaagaggacacacaccggagagaagccctacgaatgcagtgaatgtggaaaggccttcagtgaccgttcctctctcaaccagcacgagcgaactcacacgggcgagaacccctatgaatgtaagcagtgtgggagagccttcagccagaggtcttcccttgtgaggcacgagagaactcacactggagagaaaccctacaggtgtcaggaatgtgggaaagccttcagccagagctcatcccttgtcacacatcagaaaactcacagcagccagaaaacctataaaatcattgactgtgggaaagcgttctaccagaacagacatcttattggatattag

SEQ ID NO: 86669 - DNA, 4839 bp, Homo sapiens
acacccagcaccacaggcaccaagtccaacacgcccacatcctccgtgccctcggccgccgtcacacccctcaacgagagcctgcagcccctgggggactatggcgtgggctccaagaacagcaagcgtgcccgggagaagcgcgacagccgcaacatggaagtacaggtcacccaggagatgcgcaacgtcagtataggcatgggcagcagtgacgagtggtctgatgttcaagacattattgactccacgccagagctggacatgtgtccagagacccgcctggaccgcacaggaagcagcccaacccagggcatcgtgaacaaagctttcggcatcaacaccgactccctgtaccatgagctgtcgacggcagggtctgaggtcatcggggatgtggacgaaggggccgacctcctaggggagttctcaggaatgggcaaagaagtggggaatctgctactggaaaactcacagcttctggaaaccaaaaacgccttgaatgtggtgaagaatgacctgattgccaaggtcgaccagctgtccggggagcaggaggtgctgaggggcgagttggaggctgctaagcaggccaaagtcaagctggaaaaccgtatcaaggagctggaagaggaactgaaaagagtgaagtccgaggccatcatcgcccgccgtgaacccaaagaagaggcggaggatgtaagcagctatctctgtacagaatcggacaaaatccccatggcccagcgccgccgcttcacgcgggtggagatggcccgtgtgctcatggagcggaaccagtacaaggagcggctgatggagctgcaggaggctgtgcggtggactgagatgatcagagcgtcccgagagcacccatccgtccaggagaagaagaagtcgaccatctggcagttcttcagccgcctcttcagctcttcctccagcccccctccggccaagcgcccctatccctcggggaacatccactacaagtcacccaccactgccggcttcagccagcgccgcaaccatgccatgtgcccgatctcggcaggcagccggcccctggaattcttccctgacgacgactgcacgtcctccgcccgtcgagagcagaagcgcgagcagtaccgccaggtgcgtgagcacgtgcgtaacgacgacggccgtctgcaggcctgcggctggagcctgcccgccaagtacaagcagctgagtcccaacgggggccaggaggacacgcggatgaagaacgtgccggtgccggtgtactgccgccctctggtggagaaggaccccaccatgaagctgtggtgtgccgcgggcgtcaacctgagcgggtggaggcccaatgaggacgacgctgggaatggagtcaagccagcgccaggccgcgatcccctgacctgcgaccgcgaaggagacggcgagcccaagagcgcccacacgtctcccgagaagaagaaggccaaggagctccctgaaatggacgccacctccagccgggtgtggatcctgaccagcaccctgaccaccagcaaggtggtgatcatcgacgccaaccagccgggcacggtggtggaccagttcaccgtctgcaacgcgcacgtgctgtgcatctccagcatccccgcggccagcgacagcgactaccctcccggggagatgttcctggacagcgacgtgaacccagaggacccgggcgcagatggcgtgctggccggtatcaccctggtgggctgtgccacccgctgcaacgtgccgcggagcaactgctcctcccgaggggacaccccagtgctagacaaggggcagggggaggtggccaccatcgccaacgggaaggtcaacccgtcccagtccacagaggaggccacagaggccacggaggtgccagaccctgggcccagcgagccagagacagccacattgcggcccgggcctctcacagagcacgtcttcactgacccagccccgaccccgtcctctggcccccagcctggcagcgagaacgggccagagcctgacagcagcagcacacggccagagccagagcccagcggggaccccacgggagcaggcagcagtgctgcacccaccatgtggctgggagcccagaacggctggctctatgtgcactcggctgtggccaactggaagaagtgcctgcactccatcaagctgaaggattctgtgctgagcctggtgcatgtcaaaggccgtgtgctggtggctctggcggacgggaccctggccatcttccaccgtggtgaagatggccagtgggatctgagcaactatcacctaatggacctgggccacccgcaccactccatccgctgcatggctgttgtgtacgaccgcgtgtggtgtggctacaagaacaaggtgcacgtcatccagcccaagaccatgcagatagagaagtcatttgacgcccacccgcggcgggagagccaggtgcggcagctggcgtggatcggcgatggcgtatgggtgtccatccgcctggactccaccctgaggctctaccatgcacacacgcaccagcatctacaggacgtggacattgagccctacgtcagcaagatgctaggcactggcaagctgggtttctccttcgtacgcatcacggccctgcttgtcgcgggcagccggctctgggtgggcaccggcaacggagtggtcatctccatccccctgacagagactgtggtcctgcaccgaggccaagctcctggggcctccgagccaataagacatcccccacctctggggaagggcgcccgtcccgggggcaatcatccacgtgtatgggcgatgacagcagtgacagggcggccagaagcttcatcccctactgctccatggcccaggcccagctatgcttccatgggcaccgcgatgccgtgaagttctttgtctcggtgccagggaacgtgctggccaccctgaatggcagtgtgctggacagcccagccgagggccctgggccagctgcccctgcctcggaggtcgagggccagaagctgcggaacgtgctggtgctgagcggcggggagggctacatcgacttccgcattggagacggagaggacgacgagacggaggagggcgcaggggacatgagccaggtgaagcccgtgctgtccaaggcagagcgcagtcacatcatcgtgtggcaggtgtcctacacccccgagtgaagctgctgccctgcctggcccgacctgtacataggacccccgaccacctgacccccgcccggcccgcggggtagccagccaggcgccgccgcccctcttctaacctctcaacctgcagctttcacctgagtctggcccctccagcgggcagggagtgcggggatgcggatcaactgggaggaggaggggaggggtgcttccacccgaggggaagatgctctcgggacagtttcccgggcagctcctggccagcttccagcccagagtcctcaagtccagggcaccttgggcccagcgcaggcagaatccgaggtggtcctggctctaccctgggcctcctactccccagcacccctggaggaggcaggggctccccgccgccgaggctgcctgccctgggcccacctctgcatgctgctcatggggccaccctgcctcctgggccctcactctgcctaggggagctgggccaggcactagcctttgcccagggaggtgggcctcaggctgcccaggtgcctgcaccccagccggccttctctggggcctccccgtcgtcaagcctctatcctgtctgtccccaccccagctgtcccctgcccagggagctggcataaaagcacgaggcccggctccctggggcagctgcttgagaacagagactgctaccccatcctgcccatgcaggcaggctcttgccagccccgttctgacccgtgtccccccaggctctgcctgggcagaagactcaccttggaggagtgggccctggagtcctgtccctcccagaagcccccagggtgggatttctcaggctgccagggcaggcccaggcctcaggaagaaggggaggcccctggcctctccgggatcagtcctaggacacaggctcagcctcaggttgatgggggatgatgtgctcccggggcctgcctcctgcacggggctccacggagcccagctcccagacacgctactaagtgcctagggttgcccgctgtggcctgctcccagggagcaacagagaggccaccaagcagaggcccgtggggctgaggatggagccgcccccagccgactccaagcccgcagagggcagacgccaccctggactgctctccctgcccagctgggcctctctggccctaattcctaaccttcccaggcccactgcaactcctgtctgggaggcccttatgaggggcagcccagcccccccggcaccacccccaaccagagaagcacagatcttggggagctgccccacaagccccgctggccaccgagggctgcagccgctgcgctgccggcttctccccaccaccctgccacctccactgtgatgtatgtccgctccctcgtctgttcccccaggatctcgaagtgactccgggctgagcagtggggcggctgggggaggggtgacgattctcctcaggctttggccctgcaagcaaacccacatatctgctctgtatgtaataaatgtcttaacgtcgaaaaaaaaaaaaaaggggcggccgttttaaaggatccttgggggggcccaagtttacccgggcatgcaaggtaatagttttttccttatagggagccgaattataacctacctgggaatttttgaaaagaaccc

SEQ ID NO: 86670 - DNA, 401 bp, Homo sapiens
ggaaactttcctcttaacactcctttggtgacattctagagattttgataagttgtgtctctgtttgcattgatttcaaaaatttttttcattctgtctaatttctgttttcatccagaaattcttcaggagaaagttgtttaatttctatgttttcatgtaattttgagagatcttcttggtatttatttctattttcatttcactgtgggccaagagtgtgcttgttacaatttatattgttttgaatttgtggaggcttgctttatgactgagcattttgttgatcttagaatatgttccatgcacagatgcgaaaaatgtatactctgtgattgttgggtggagtgttctgtaaatgttgacaaggtccagttggtcaagtgtcaaggtaaaagtgt

SEQ ID NO: 86671 - DNA, 400 bp, Homo sapiens
ggccatcccctctacctgctgaatggagtaaaacttgatgcctgtgcttcggtcccagatgctgatgaggtcatccaggccactgctgatgacacaggaggtggtacaggccgcttacctggtcaatgtacacggtcgtgatggcccctgagtggccctgaagggtgaagaggcagcacgagtcctccaaacggaacacctgggacagggatgggcctcaggttctggtctctgggattttccaagttatactttggctgggaaatgccctctgttcttcaccaggactcttccagcctctccctgacgaatgcatcaggctcccaccccgtgccgggccactccagcacccaagagacaagacaatactcactctcagtgtgtggtcttggctcccaga

SEQ ID NO: 86672 - DNA, 412 bp, Homo sapiens
  misc_feature (1)...(412): n = a,t,c or g
gggggccgagggccgcggaggcagcaggggcgaacatggtttttatcacacacggggggaacccgaccgccgagcccagggagcttgacaacccctttcaggacccacttgtgattcagctccgacccaaccggagggatgccacacttgacgtttacaacgcttttgggacccgggaggcgccaccagcctatgaacctgcagaccctgccccatgtgactgcaccctctgctgcctccttgcaggcctcgagaaagctcacccccacagaacctaagaactatggcgcatacaggactcaggcctcacatgcagcagacacagatgagctgctgaaaaaacaggaggagctgaaccggaaagcacaggagatggaccgaacggagcgagagactgagcatgcttccctgn

SEQ ID NO: 86673 - DNA, 1258 bp, Homo sapiens
cctgatgaattaatgaaggcgaaagtattcagtgaggtatctcctttatataccccctttaccaaacctgccagtctgttttcatcttctctgagatgtgctgatttaactctgcctgaggatatcagtcagttgtgtaaagatataaataatgattacctggcagaaagatctattgaagaagtgtattacctttggtgtttggctggaggtgacttggagaaagagcttgtcaacaaggaaatcattcgatccaaaccacccatctgcacactccccaattttctctttgaggatggtgaaagctttggacaaggtcgagatagaagctcgcttttagatgataccactgggacattgtcgttatgcccgctaagaaatagattgaaagatgttgggggagaagcattttacccattactttgaagatgaccagtctaattttaccttattcaaacagcaataatgagttgtctgcagctgccacgctccctttaatcatcagagagaaggatacagagtaccaactaaatagaattattctcttcgacaggctgctaaaggcttatccatataaaaaaaaccaaatctggaaagaagcaagagttgacattcctcctcttatgagaggtttaacctgggctgctcttctgggagttgagggagctattcatgccaagtacgatgcaattgataaagacactccaattcctacagatagacaaattgaagtggatattcctcgctgtcatcagtacgatgaactgttatcatcaccagaaggtcatgcaaaatttaggcgtgtattaaaagcctgggtagtgtctcatcctgatcttgtgtattggcaaggtcttgactcactttgtgctccattcctatatctaaacttcaataatgaagccttggcttatgcatgtatgtctgcttttattcccaaatacctgtataacttcttcttaaaagacaactcacatgtaatacaagagtatctgactgtcttctctcaaatgattgcatttcatgatccagagctgagtaatcatctcaatgagattggtttcattccagatctctatgccatcccttgggttcttaccatgtttactcatgtatttccactacacaaaattttccacctctggggataccttactacttggggaattcctctttcccattctgtattgggagtaggcaattcttcaggcagctgcggggaccggcttttgggctaatgggctttaaatggagtgta

SEQ ID NO: 86674 - DNA, 460 bp, Homo sapiens
  misc_feature (1)...(460): n = a,t,c or g
gggaggcccggcccgctggnnncccgaaaactttagncnngngcatacgcnnnnnntggnacgaggcatacttaatggtaaaagacgggatgttttttcctccaggctcacccaaacagggtgatgaagtctgcctttactactacttttcaacattgtcctagaggtttcagccagggcaaaaagagaaaataatgaaataaaaggcatctggattagaaagtaggaagtacaactctctttattcacagaccacatcatcatctgtgtagaaaatggaataaaatctacaaagtagctactagaactaataaattaggctagaaagattgtaatattcactatcaatgtacaaaaatcaatcagatttatatatactagcaacggacaatctgaagttaaaataatacaacatataataacataaagaatatgacattcttagggataaatatgacaa

SEQ ID NO: 86675 - DNA, 1321 bp, Homo sapiens
agcggccgcccggggccccgccccccaggaaagcctccagctcatcggcagccgtcctctccctgctgcgcgggggccgctgctgccgccgtcgccgctcctccttgccctcctccttgtccttgctcttcttgtgtttgctcttcttcttggcagctttttcttcttcctctttgccttttttcttcttcttcttattctccttagagggggttttgccctccttaccttcctcactgctctccttgggtccggcctcctccagccccagcccgaagaggtccgagtcattcttcagtctgaaggcgggaagagggagcttggggggtgggggcggctcggcagggccctcatcctcgtcagtcacatcggaggggtcatctcgcacgggaaagtcatccgccctgcgctgtgtgtctgatccctcgctctcaaagtcggggtcatccatgacgaaggacagcatttgtgcagcaatgggtccctcggggtcactctccgacgaggaggcctgctcacccttccccggctccatctcagcagggggcctggtgctgctgcgcttctccggacctgtgcgaacagagacaccgcctggccaggggggtgctgcggtcctcgtgggagctgtccccctccgtggcttcgaagctggtatggaggaccacttggtctctggctctgagcactgctggggagctggggcagggccttttgtgggagctgccacttctgcttcctcctcactcgaaagagtgatgtcttgactggggacggggcctgcaggcagcgggggactcccacgtggctggtcttcgaggtccacatcgtcctggaaccctgccaccatcgggttgccgcccagggcctccccatcactgtcgctgtcctgctgggcagccttggcccccaccttcttctcgtccctggcgggggttgtgtcttccaggaagctgcggtccaggcggtcgtcaggaacaaagtcctccacactctggaccgttgctgggccctgtgcggccgggactggctctggaggtggaggggctgcctcggtggcaggtgacgtcccaaacagcctagagatgatgctgcgccgtggggcgggggctgaggggcacgcaggtgggggcagggcctctgagggtggtacagggggcacagaggatggtggggcggcattgaggggcagcccaccggggccatcatccccatccacttccaagggcagcacctgtgttggctgtgaacacagatttccaggaagcagagcgttgcaatctctcccaccacaaacctggaccatcagggatgtttccat

SEQ ID NO: 86676 - DNA, 413 bp, Homo sapiens
ggcatcctgtttctagggcaggcaggaatggagcccaggccgcctggccagaccctccatatctccggatgttgcattcccagcacattctactgttactcttgagaactacaagtaagagacaactgggtctgtttaaggccactcagataaccttcctgcaggaaccctgacccccttcccttcctttccttacccggccaggtcatggatctgaggatacaggctcagaccctgagttctgttacactaaggtgtatatccccccggggcccagacccccacacctacacctactgggtccagtgggcagggaccacggcccccagtgggaccagaagtgtggcagagatggggttgtggtggaggccctggaatctggggcttcataaaccttcattgtgtgggctgaa

SEQ ID NO: 86677 - DNA, 1876 bp, Homo sapiens
tcattacgcctagcttggcacgaggggaagatgaagaggatgaagaagagcggaaacctcagctggagctggccatggtgccccactatggtggcatcaaccgagttcgggtgtcatggctgggtgaagagcctgtggctggggtgtggtcagagaagggccaggtggaggtgtttgcgctgcggcggcttctgcaggtggtggaggagccccaggccctggcagccttcctccgggatgagcaggcccaaatgaagcccatcttctccttcgctggacacatgggcgagggctttgcccttgactggtccccccgggtgaccggtcgcctgctgaccggtgactgtcaaaagaacatccacctctggacacctacggacggcggctcctggcacgtggaccagcggccattcgtgggccacacacgctctgtggaggacctgcagtggtcaccgactgagaacacggtgtttgcctcctgctcagctgacgcctccatccgcatctgggacatccgggcagcccccagcaaggcctgcatgctcaccacagccaccgcccatgatggggacgtcaatgtcatcagctggagccgccgggagcccttcctgctcagtggcggggatgatggggccctcaagatctgggaccttcggcagttcaagtctggttccccagtggccaccttcaagcagcacgtggcccccgtgacctccgtcgagtggcacccccaggacagcggggtctttgcagcctcgggtgcagaccaccagatcacacagtgggaccttggcaagtggagcgggaccctgaggcgggcgacgtggaggccgaccccggactggccgacctcccgcagcagctgctgttcgtgcaccagggcgagaccgagctgaaggagctgcactggcacccgcagtgcccagggctcctggtcagcacggcgctgtcaggcttcaccatcttccgcaccatcagcgtctgaggcgtcccactggctctgatcttgcttcctgcttggaaactgaagtcgaattgggctcccctggaaggggttcattcaggtctgttgactgagactggccggcctgtgggctgccgtgatggattctgtttgacgtattgttctctagaaggcctggctctgatccagtgacccctctcaccaaagaactcggtttaaccagggctctgtaagaccactcccacccagagacttgtgtggcctggtgtggcctgtgtgtcggattccttcctgtcagctgtgacccatttgacctgtgtccccagaacccagttttttgtttgtttgtttgagacggagtcttggtctgtcgcccaggctggagtgcagtagcacgatcttggctcactgcaacctccgcctcctgggttaaagtgattctctcagctcagtctcccaggtagctgggattacaggcatgtgccaccacaccccgttaatttttgtatttttagtagagacggggtttcaccatgttggccaggctggtctcaaattcttgatctcaagtgatctgtccgccccggcctcccagagtgctgggttgggattacaggcgtgagccaccgcgtccggctcaggacccagttttggctgctggttcccagcaggggactcgggggatatacagtggctgcaccaaattggaggtgtgggttcctccaacacaatttgcttctgcccgttgtcttcctgccagctgggtttggccaggatttctccgtgtgggggctacatgcgaccctctcccctcctccctgactttagaggctggtgctgtgtcgggaggaaggtcagggctcctgagcagcaataaaggaccaggaagaggcctgaggtgtaaaaaaaaaa

SEQ ID NO: 86678 - DNA, 4685 bp, Homo sapiens
agctcggggacctcttcatgcacctttctggagtggaatcatcagaaccctaaagagtagatggttgccctgcatcttgggctccatcggccgaaactttcccaagccagggtgtgcggcttccctgtactgcagccaaggtgacgtgtgacttggatttgagtggagttgcgcttagccttagtctcattcaatctccattattacagccatggggaagagtgaaagatataaagtaacctaattaaatgtatggaattgctatttttatagctgatatagttacacctcaagcccctcaggggtaacaactaacaaacacccaaactgtttggattgattgctttaaaaaacaaacctggctcttatctttgatcttttcttccccagaaatagtaaacttgcagctgcccctaatgcagcatatttttcttaccaaaggagtcttcagccctataaaaggattcctctatagtgtatttctctagtgtatttagtgtgtcgtcaaaattttgatttatacagagctttcaagaacacacaatgcaaagtgagcgcagcatagctgttaacaaacatacaacttttttctagggctttaagggtggtcatttttttcaagttctctcaagtgtcccaaatcagggtagcaatcttgttgccacatgtgcagcaaacaaagtggaagtatagatcttcttctcccttagggaggctcttgaaggagcaggaggtacagtactgggtagcagtctggccctcctgtcgtctggttggtgttggggcctccagccagggccctctaggggaaccaagcctctgctctcacctgtgggttcttgcccatcagggtaattgtattgagaactcaaatatacgtgcacttacatgtgtggttcgtactcaagtgatctattatctagctgcaaagcctggctttgatttgaaattttgtaaaaatttcatggcacccaaggtttctgattctgacccagcagtggtcctgaagagagctgatggcaagtcttgtagtcattttgattttaattgaagggtgagcataaccttgtgaaccagcactagcttgttccaagctggaatttatctaatctatttttgtgtttaaaaaagctgtacctaccaaataaataaatagtttataaaatgtattacttaaggtattagctgagtttagagtactttctgcttaattaatttttatacttaactcttcagtagaggtttacaaagagtacaaaggttaaattacaaattcattcccagcctaggctctgggcacatttcctgttcttgaattctgctcctgaagagggtgaacaaatggggcattcaagttgtgagctcagaattactttaaaaggaggtaacagccagccattacacctaaatttaatttattttattaaaataacataattgagggaccatcagataactgtattttgtcaggtgcaataaaaacaaaattaaaacccaaatcatcaagaaaacctgtattcctggcttccttgtatacacatgatgtgactagagaaacaaggctgtttgtttgtttgtttgttagagaaacttagagaaacaaggctggcccttgtttgttagagaaacaaggctggccctgcggccccgccccataggggcagctcctggaagacaaaattcagcatgatggaagactgctccctgagagggctgagatgcggattggccgagtgccttgcctggaaaaccatcccaatgcactggacaccttagaagctgtgaaaggaggacgtgtcccctaagaaaagttccatagtaccaaagcaggctccttcgggcggccagagtctcggcagtcctgggctgtttggtgccttatgtgcaaaatgtctggcgctgcaccactctctgaagaaagtcccgcctgtgacatgcattcctccagaagctgatttccaaaatcccatgtgtctccacatcagggctggactgcctgctaccttacttcctctaaatactcatgtagccaacagctggggctgggcccctgctttttgtactaccatcaacatccacttgcgcatctacagaaggctgggccttgagcatggggaatgtggggagggagcaggacacaccagcactgcaaatggcttccttctcccagggcccaaagggatagaaaagaaggcaacatgaagttaaggccctgtgagcagtctagaaggtccttagcagcagcttctctgaaaacatgtgttctgcctctggagaaagggagcagaaaagtggtgcctgctggcttctcctcctcccctggcagcctgaagacaggtgcaaagtcaactagaagacaggcagcctcggggacgtggtcagcgtgcaagcattgatatcctcagtgtgggctgcccgatgcaaggatggctcggaagcgctccggttgatcttcggtagagagtgttggagcagctcaatggaagacaggatctggggaaaaagaggcctctcttcctttactttcttcacacagtcagctaccagcctcttcattgctttggggcagttcttatatagcttactaagatctggggaggcatatcctcggcccaccatgaagatgatctgatctcggttgttgatgtgagaataaggaagctcccccgtcatcagttcatacaatacgatgccataggagtagacatccgactggaaactgaatgggttgttatcctgcattcggatcacctctggggccatccagaggacagagccagtaggttgttcaacctgctgagaaccactccagcgtgactttactgttgccaaaccaaaatctccaattttcactgttaagccttcatggagaaatatattgttggatttcatgtctctatggatgatgttctttgcatgcaaatagtccattccctgagccgtctgccgggcaatgtcaattagctggaacatctgaaacttggtctcctggacatgcaggtgtttgtagaggctgctgccctcgcaccactgggtcacaattgccaggttgtcctttgtcatgtaccccatgaaaagcagaatgttcacatgccgtgttttgcgcagaacagccacctcattcctgaaggcctggaattgctctggggttgggtcgacaacctttaggatctttactgcaacatctccgtgccatttacccttataaacagttccaaaagagcctgacccaatccgagtggacagcatcacttcactggcttctatttcccaataatagcttgaatctctctgtccacgaggcctaattttgtttttctcctgggtcccagatactggtgcccgctctctttgtgctggcacgggggttttcggctgtgaccagcctgttgggctcagattgttggggctactggacagggctgaaggtgaggctgattcgctgtgacttcgaattgcatcctcaatcatcctgctgtccacaggcagggtggtgctgaccatgtggacattaggtgtggatgtcgacctctgcctctgggagagggaaccttcagatgagggactggaggtgttaaaggtgaaggcgtgaggtgtagaatatctgtgctgagaactaacaggcatcctggaaacagactctcgcatacgacgcatagtcaaagaaggtagtgctgggactccactatcaccaatagtggaatttggaaacaataagagttgtctgatgttactccagtccacacacatagtaggtactttggtgctacagtgctcatgaaatttgtagccacaagtctgacatcgaaatccattgagcaggaatttctgacagatgtcacagaaggcaagcttcaggaacgtcttccgagcaaagttgtgtgttgtgaggggaacatgatccaggaaatctacttgaagttcttctccaatcaaagacgcagcatcagtattccaatctaagcgtgcttttttacctttgtgttcgtggagaagtctgaacactgcacagcactctggttgcaggcccctcaccttgagtgctttcataaggcagtcatgcaagctcattccatttcgcacattgaccactgttctttgcttgttcggcaagaaaacacggatagtgttgcttgtcttagaaggatctgtgagtttgccatcatctgatgcccggcgctgatagccaaactgctgaactattgtaggagagatgcagctggagccatcaaacacggcatctttgaatccaaaaccattgctgatcgtcttccaagctccctgtatgtgctccattgatgcagcttaaacaattcttaaacctgagggagccaggccgccccaacgtcctgtcgttcggcggcagcttctcgcccgctcctcctccccgcggcgggtgagggagcgggaggcggtcacattcggcgcgtccccagcccaggggacggagccccgagcagcccccgcatcgtagcaaacgcgctccgcgcctcagggcacgcgccccaaagcccggccagctgacccttttcggggcccaaaaaaggcagcagaaagccgttcccgcctcacaatcgttttcctcttactcccgccatctaagatggcggcccaagcgcccgcgattaagactctcgggcggcccagacgagcgagccctcgactcggtgctcgtcctcccgacc

SEQ ID NO: 86679 - DNA, 398 bp, Homo sapiens
ggcacgagtcctgatgcctcacttccacaagaagtggcagtagcagtttggttcagccagctgacccaaaagatccacagatgcaagacccagcaagcaaaagcacaccaccattgcctatcatcctgcatctggacccatctagcccatagtaggatgtcccacagggagatatcacaccaaagtataagctagcagaagcttcagcttataagagttaaggtggccagcattcacacggtgacccggacctttggtatctgtggatccaaggagacattagaacaagtcgagtgagtcctgaaatgccagcaactccagttgaaggagtactgctacaagctcatcccgcttcccaggaagcccttggaccccacgaaggaagacagctctgctga

SEQ ID NO: 86680 - DNA, 2466 bp, Homo sapiens
atgctgctcgggtgggcgtccctgctgctgtgcgcgttccgcctgcccctggccgcggtcggccccgccgcgacacctgcccaggataaagccgggcagcctccgactgctgcagcagccgcccagccccgccggcggcagggggaggaggtgcaggagcgagccgagcctcccggccacccgcaccccctggcgcagcggcgcaggagcaaggggctggtgcagaacatcgaccaactctactccggcggcggcaaggtgggctacctcgtctacgcgggcggccggaggttcctcttggacctggagcgagatggttcggtgggcattgctggcttcgtgcccgcaggaggcgggacgagtgcgccctggcgccaccggagccactgcttctatcggggcacagtggacgctagtccccgctctctggctgtctttgacctctgtgggggtctcgacggcttcttcgcggtcaagcacgcgcgctacaccctaaagccactgctgcgcggaccctgggcggaggaagaaaaggggcgcgtgtacggggatgggtccgcacggatcctgcacgtctacacccgcgagggcttcagcttcgaggccctgccgccgcgcgccagctgcgaaacccccgcgtccacaccggaggcccacgagcatgctccggcgcacagcaacccgagcggacgcgcagcactggcctcgcagctcttggaccagtccgctctctcgcccgctgggggctcaggaccgcagacgtggtggcggcggcggcgccgctccatctcccgggcccgccaggtggagctgcttctggtggctgacgcgtccatggcgcggttgtatggccggggcctgcagcattacctgctgaccctggcctccatcgccaataggctgtacagccatgctagcatcgagaaccacatccgcctggccgtggtgaaggtggtggtgctaggcgacaaggacaagagcctggaagtgagcaagaacgctgccaccacactcaagaacttttgcaagtggcagcaccaacacaaccagctgggagatgaccatgaggagcactacgatgcagctatcctgtttactcgggaggatttatgtgggcatcattcatgtgacaccctgggaatggcagacgttgggaccatatgttctccagagcgcagctgtgctgtgattgaagacgatggcctccacgcagccttcactgtggctcacgaaatcggacatttacttggcctctcccatgacgattccaaattctgtgaagagacctttggttccacagaagataagcgcttaatgtcttccatccttaccagcattgatgcatctaagccctggtccaaatgcacttcagccaccatcacagaattcctggatgatggccatggtaactgtttgctggacctaccacgaaagcagatcctgggccccgaagaactcccaggacagacctacgatgccacccagcagtgcaacctgacattcgggcctgagtactccgtgtgtcccggcatggatgtctgtgctcgcctgtggtgtgctgtggtacgccagggccagatggtctgtctgaccaagaagctgcctgcggtggaagggacgccttgtggaaaggggagaatctgcctgcagggcaaatgtgtggacaaaaccaagaaaaaatattattcaacgtcaagccatggcaactggggatcttggggatcctggggccagtgttctcgctcatgtggaggaggagtgcagtttgcctatcgtcactgtaataaccctgctcccagaaacaacggacgctactgcacagggaagagggccatctaccgctcctgcagtctcatgccctgcccacccaatggtaaatcatttccgtcatgaaccagtgtgaggcccaaaaatggctatccagtcttgatgcaaaagggagtcaaaaacttttgtggaatgggttcccaaaatatgcaggtgtcctgcccagcggatgtgtgcaaagctgacctgcagagccaagggcacttgggctactatgtggtattttcctcccaaaggtgaccgatggcactgaatgtaggccgtacagtaattccgtctgcgtccgggggaagtgtgtgagaactggctgtgacggcatcattggctcaaagctgcagtatgacaagtgcggagtatgtggaggagacaactccagctgtacaaagattgttggaacctttaataagaaaaggtaatatgatagaacctttgtctttatgtgaattgaacaaagctttagactcttgcagaattgataaaggaggattcatattacatcataagctatctgtatgaggaggtctaacgtggctctagaaacacattttaaatatgagaaggaagagacaggagatgaataaaactctggttgctcagggaaaactcatgccgcctctggaagcagataaactgcagtag

SEQ ID NO: 86681 - DNA, 517 bp, Homo sapiens
  misc_feature (1)...(517): n = a,t,c or g
gagagaaggggngnnnnattgaaaaactgagaaccttcgcagngggcggaattcgctggtcgtggcctggagactggccagatccagagctgtgttggccgcggcctgaagagtgacgggaggcagactcatgctgaccatagctggaagactgacgtgagctggagccatgttggccagagcttgatgcctgccctgacgtanatccatgtcgtccctggctagaggagtgacctgagccagaaccatgcttactatatccagaggactgtcctgagccagactcgtgttgcccaaagccagaagtctggcctgagccagactcataatggccacggctgtaagagtaacttgatccagacccgtgttggccgtggctggaggagtgccccgaaccggacccatgtcggacgtggctaggagactggcgagatccagacccttgtcggccgtggcccaaagactgacgggaaccagacccatgctgaccatagctggaagacgaacctgagctaan

SEQ ID NO: 86682 - DNA, 921 bp, Homo sapiens
agcggggcgaggaggagggtgggtatgaggcggtagcggaccgcggagtcgagacctacccgaacgacgcgggcgagcggggctttggacgccggtggagacgcaggcgagactccagcgggaggaagaagaggcctttgccagcagtcagagcagccaaggggcccaatccctcacattctccaagtttgaaggaaagaaaaccaacaagaagacccgcaaggttaccacagtgaagaaatcttcagtacgtcttccagggtcggatcaaagaaggatattgaaatggattccaggcgtgtgcctcgagacaagctggcctgcatcaccaagtgcagcaagcacatcttcgatgccatcaagatcacctagaacgagctggcgtcagcagatgacttcctccccaccctcatctacattgttttgaagggcaacccccatgccttcagtctaatatccagtatatcacgtgcttctgcaatccaagccgactgatgactggagaggatggctactatttcaccaatctgaggctgggcactcactgcagctggctaatgatgaccatgtggacatgctttcgggccttcaggatcttctccagccagtggatgtcgtacgtgttgaggttccggaaagggatgtcaggtggtggctcacacctgcgatcccagcactttgggaggccaaggcgggtggatcgcttgagcccagaagatcaagaccagtctgggcaacatggtgaaacctcgtctctactaagaatggaaaaattggccgggagtggtggcgcacgcttgtggtcccagctacttgagaggctggggcaggaggattgcctgagcccatgaggtggaggctgcagtgagcagacattgcaccactgtactccagcctgggcaacagagtgagacgctgttt

SEQ ID NO: 86683 - DNA, 2243 bp, Homo sapiens
gtacgtgcggtggaattcgggggaagaaaggaagtcagagggcttagacagtgaggggggacagaacatctccatgtgcactctcatctcttggagtcagcaacaggtatctacggggagggccgtgcatcctctactaccctgcaggatctggaggtaagaggccctgggccgaggtgcagtgaccctgcaggccagccctccaacctcctcccacagcaggggcttgttgcccctctgccagctgaggcagcccacacacccccaccagccctaatgattattctctctacccctccccacaatcttcctccaactccttctctctgcatgcacctcagagccagtaccaagaactagcagtagccctggattcaagctccgcaataatcagtcaactcactgaaaacatcaattcactggttcgcacatctaaggaggagaagaagcatgagatacatctggtacagaagcttgggaggagcttgttcaaactcaaaaaccagacggctgaacccctggccccagagcccccagcagggccatctaaggtagagcagctacaagatgagaccaaccacctaaggaaggagctagagagtgtgggaagacagctccaggctgaggtggaaaacaatcagatgttgagtctcctgaacaggagacaggaggagaggctacgtgaacaggaggagaggctacgtgaacaggaggagaggcaacgtgaacaggaggataggctacatgaacaggaggagaggctacatgaacaggaggagaggctacgtgaacaggaggagaggctgtgtgaacaggaggagaggctacgtgaacatgaggagaggctgtgtgaacaggaggagaggctacgtgaacaggaggagaggctgtgtgaacaggaggagaggctacgtgaacaggaggagaggctacgtgaacaggaggagaggctacgtgaacatgaggagaggctgtgtgaacaggaggagaggctacgtgaacaggaggagaggctgtgtgaacaggaggagaggctacgtgaacaggaggagaggctgtgtgaacaggaggagaggctacgtgaacaggaggagaggctgtgtgaacaggagaagctgccagggcaggagaggctgctggaagaggtggagaagctgttagaacaggagaggcggcaggaggagcaggagaggctgctggagagggagaggctgctggaagaggtggagaagctgttagaacaggagaggcagcaggaggagcaggagaggctgctggagagggagaggctgctggaagaggtggagaagctgttagaacaggagaggcggcaggaggagcaggagaggctgctggagagggagaggctgctggacgaggtggaggagctcctggacgaggtggaggagctcctggagcaggagaggcttcggcaacaggatgagaggctgtggcagcagtagactctgcaggagctggagaggctgcgggagctggagaggctgcgggagctggagaggatgctggagctggggtgggaagccctgtacgagcagcgggccgagccacgcagcggcttcgaggagctgaacaacgagaacaagagcacactgcagttggagcagcaagtaaaggagctgaagaagtcaggtggagctgaagagccaagaggctccgagtctgcagcagcagccagaccagtagctggagccccagtcccacaaggagcttggatgtgcggacaagcagggtggactccccaggagcacccaggcttgagtggagaagctgttggtacaggagaggcggcaggaggagcaggagaggctgcatgccattcttttcgggctgcggagaacagggagctaaacatcaccatcatctaagagcgggtcaaggaattgagaaaaaaaaacaaaacatttaaggggttaatatcctacacaattcatttacttcatttgaatgttagagccacttatgtttatttgtgtttctaatttatagtttaaatttatttgtgtttctaatttatagtttaaatttatttgtgtttctaatttatagtttaaatttatttgtgtttctaatttataatttaaatttatttgtgtttctaatttataatttaaatttatttgtaaaaagttaaatgagagtgggtctttctctcatgttcactctggcatcttttagcatttttttaatttgataattataggacgttagcatgcatatcgagt

SEQ ID NO: 86684 - DNA, 4277 bp, Homo sapiens
aaatgatgtcagagatttttttcatgggctccgtgttgatgcagtgcatttgttgaaagatcatgtaggtcgaaataatgggaatggattggttaagtttttctcccctcaagatacatttgaagctttgaaacgaaacagaatgctgatgattcaacgctatgtggaagttagccctgccacagaaagacagtgggtagctgctggaggccatatcacttttaagcaaaatatgggaccttctggacaaactcatccccctcctcagacacttcccaggtcaaaatcgcccagtgggcagaaaagatcaaggtcaagatcaccacatgaggctggtttttgtgtttacttgaaagggctaccatttgaagcagaaaacaaacatgtcattgatttttttaaaaagctggatattgtggaagatagtatttatatagcttatggacccaatgggaaagcaactggcgaaggctttgtagagttcagaaatgaggctgactataaggctgctctgtgtcgtcataaacagtacatgggcaatcgctttattcaagttcatccaattactaagaaaggtatgctagaaaagatagatatgattcgaaaaagactgcagaacttcagctatgaccagagggaaatgatactaaatccagagggggatgtcaactctgccaaagtctgtgcccacataacaaatattccattcagcattacaaagatggatgttcttcagttcctagaaggaatcccagtggatgaaaatgctgtacatgttcttgttgataacaatgggcaaggtctaggacaggcattggttcagtttaaaaatgaagatgatgcacgtaagtctgaacgcttacaccgtaaaaaacttaatgggagagaagcttttgttcatgtagttaccctagaagatatgagagagattgagaaaaatccccctgcccaaggaaaaaagggattaaagatgcctgtgccaggtaatcctgcagttccaggaatgcccaatgcgggactgcccggtgtgggactgcccagtgcaggacttcccggtgcaggcctgcccagcacaggactgcctggttcagcaataaccagtgcaggactgcctggtgcgggaatgcccagtgcaggaatacctagtgcaggaggtgaagagcatgccttcctgactgtaggatcaaagggaagccaattaatgggccttccattttaactttcctgggtaattttgggtgggatccaaatgcctttgggccaccaatccctccttccagggtttagggaggcggggcttttcgtgatggttaggcctggtatgccttcagttggaaacagtggtttgcctggtctaggactggatgttccgggttttggaggtggaccaaacaatttaagtgggccatcgggatttggagggggccctcagaattttggaaatggccctggtagcttaggcggtcccccggggtttggaagtggccctcctggtcttggaagtgcccctgggcatttgggtgggccaccagcttttgggcctggccccggccccggccccggccctggcccaatccatattggtggtccccctggctttgcatctagttctggaaaaccaggaccgacagtaattaaagtgcaaaacatgccctttactgtgtctattgatgagattttagatttcttttatggctatcaagtaatcccaggctcagtgtgtttaaaatacaatgaaaaaggtatgcccacaggtgaagccatggtggcctttgagtctcgggatgaagccacagctgctgtcattgacttaaatgacaggcctataggttcaagaaaagtaaaacttgtattagggtagccattcacatcattttttatagggtagatcttcatattgctgtgattaatgcatccagattgttttcctagtatttccaggttataacctgtggattgttccaatggccatatagcttggtttccataacatcgagcagcattggttgactgtttacagaaagactcactccacccaggataaacattgctgtatgttaccagtaaagctatctgggagagaacacataaatgattttgggcataccattagaagaaaccatttgtaaacttcaaattaccacaataaggcttatcaagtgagtctaggattggttttgttttataccatatgggatgaagaaaatagaaatgtcagtagaactcattgagggtgctcttgccagctgctgaaaatagaagttggctactctcagaatttggtttaaaagctggacagatttgccttgttaatagggtaaagctttgtcctaaagtccctcattttccttttaaaattgaataaaatttctgtatacagattcattgtatgtacctttattgccttccttaagggtccttgctgtatagacagtcctgccttcagaaggttgctgctttgtttgtctaattgactcatttgtaaatgrgcagaactgttttgtgggtttttttccctaaatataaaagtcccacacttcgtttgtgctataacctcaaactttgatttctaatgtcacacttaaaactgtgtggaataagacttttgccataaaaataaactatggagtcctttatctaccagagcctttttggtttgaccgccacgatttaggttagtcagtttaaaaattgttcatgttgtttggatggtatcgaaaaccagaaaccacttttaataatgtgtttaagatacttgatttgaagtccttttcatatggactaattgtagtatcaatttcctcctgtcccgattatgtgaaattttggcctttaaacaaagaggggcccattcataagaaagtgttatatctaggtttttaaaactgaagttgaaattatctttgttagcagtagtagtatagaataaaagatccgtatgctggttcgtagattgatacgtgttagtcctgttatttggaggctttttggcatagttgttcgatcaggagcctgtttactaaaagtcttcatacagagtacaagtgcagccgccagaggagaaaattgagattcttgaccctttcatactcttttctttggtattcaggacactaaggcaggaggaccacatgagttctggttggtaagtgtccttgtcatgaaaacacttgccttacaaggctctaattatgatttccctagtcagtgctctgaagatgtgtcacattatattataaacaatacggaaggggagataggtgagatgatatgaaaaacaaattttctcactgtcataaaaggctctaattatggttactttccttgtgatgaaaaacttggccttacagggctctagttatggttactttccctagtcaatgctctgaaaatgtgtcacattataaacaatacagaaggagagatagatgagagatcatgaaaaccaaattttatcttttacatggcccctttgtcttcgtttgaaacatccccaacatttcctacaaatcagcgtagttacaaaggggtcagtcttttaaaataagtatttcctattaaactatatatatatacagtgcctttttggtgttgtgagtcagtggaacactgaaatacagcggttgtgtaatttaagagtggcaacagtttcatttgataagatttgaaaaggctttttatcactacaatcttagaggattgacagtacaggatttttgtttaagagaaggattgtttagactcaagaggtgactatgttgtgggtcttttgataattcatgaatacagatttgctttgaccgatcactagatactgcctcctcaatttcaaaagcaatataacgtttgtatatgctgtttaatttaagttaatgttaagtaatcatttctcattccaaagacaatgcaaaaaacttcagcactgcttgagagttgtatttcagccacagatattttctccattggaaagctattttcattttagaaaaatgggttgtttgaagatgaaagtcttttatcttttttcacaatttattttggttatatgttcgtacattcttattaaatatttcatacactttattgcaactactttgttatttctacatcttagataaatgctgaaaaggaaaacgatttcattgttcatctaattaaataaattaaaagagcggtttgtgtagaaattggagagaactatgttttatatgaatcacaacagtgctcgttgtggactgtaattaaatgctttgccctctggaacttgaaaaaaaaaa

SEQ ID NO: 86685 - DNA, 794 bp, Homo sapiens
tttctttcattgtatctttgaattttattgctctgtattttttacttcaaaaacacctactatatgcatttttttctctcgtttccttttttttccaagaaatgtttttgtccttttgattttttcactgaccattaccattatttatataccatgtacctggagagtttccaatgtttctctttggtctgagaagatacttgctatgattttcactttttaaatgctcttttgagatttgttttgtggcctaaaatgtggtctatcctggagaatgttctgtgagctgatgagaagaatgcacgttctgcagttggtgggtgaaatgttctgtaattacctgtgaggtccctttgacttctcttggagtcagtctggtctgttacttttctgcctagagggtgtgtctgttgctgaaagtgggtgttggagtccccagctattattgtctgtctctgtctgttgctcgaataactcttactttaataactggggctcctgtgtcaggtgtgtttacattgacaactgtcctaccttcttgctgaattgatctctttatcattttataatgacctttattttctatttttgtgcttttttgacttaaagcctactttgtgtgacaagcatagctatacatactcacttttggtaacacttttcatttcttatcatcttcatcgaatctcactcttcacatttaccaaaatgtctacttttgagccgcggcaattctttgaatcttcagatccaccacatgctgatcaagccttcctttttgtctgtactctgag

SEQ ID NO: 86686 - DNA, 3594 bp, Homo sapiens
ttcgaagccctggccaatctactagccaacatgacgcagttacctggccatttctccacattcctggtgagcgccccacacccagccgcagaagagcccctcctgcattccatcctcacacacaggcctgtccatctacttgctactgtcacactcttgccagcagaagaggcccctctaatggccgatatcaccgcccaggctatcctcaccccacagctgtgcagcgggaccctcctgctggcccacgtggctgccagagcccatgctgacaccaacctccagcatgtcggcgtccctgcgggcgacactaccggtgacatggccagcatgatcctcctccctggcagtgacactgttgatctcgaagtccttgccatcctcctagccaacgtgatgcagttacctggccatttatccacattcctgctgaggactccacactcagccacagaagagcccttcccgcattccggcctcacacaaagacctgtccttttacttgctactgtcacacatttgctggcaggagaggcccctctgatggccgacatcaccacctgggctatcatcacccctcagctgtgcagtgggaccctcctgcctgctgacgtggctgctggcgcccgtgccagcgtgaaccccaaacctgtccgtgtttctgcgggcgacgccaccggggacatccctagcttgaccccctttcctggcagtgacactgtcgtgggcgtgactcgaggtggacgcgcatttacgacaccatcgcccctaggatcggactgcgctgcggagggttctgggaaaggtagtcccacacctcgagtcgactacttccgtttccggcttccttcttggaattgttcgtttctcggagataattgtataaaagaaggagaaataaccccacatctcttgacactagagctccaggagccattgagcttcaaggacgtggctgtggtcttcactgaggaggagctagagctgctggactctacccagaggcagctgtaccaagatgtgatgcaggagaatttcaggaacctactctcagtgggagacaagaatggaaaggatacggagtatattcaagatgaagaattaaggttcttttcacacaaagagctctcctcatgcaaaatctgggaagaggtggcaggtgaattacctgggagccaagactgtagagtaaatctgcaaggaaaagacttccagttctcagaagatgctgctccccatcaagggtgggaaggagcatctacgccgtgttttccaattgagaatttcctggacagtctacaaggggatgggcttatcggtctagaaaatcaacagtttccagcctggagagctataagaccaatccccattcaaggatcttgggcaaaagcgtttgtgaaccagttaggggatgttcaagaaagatgtaaaaatctcgacacagaagacacagtatataaatgtaactgggatgatgacagcttttgctggatatcttgtcatgttgatcacagattccctgaaatagacaagccgtgtggttgcaataaatgcagaaaagactgcattaaaaactctgtacttcatcgcattaaccctggagagaatggcttgaaaagtaacgaatacagaaatggcttcagggacgatgcagaccttcccccgcatccaagagtacctttgaaagagaaactctgtcaatatgatgagtttagtgagggcttgaggcacagtgcccatcttaacagacatcaaagagttcccacaggagagaaatctgttaagagtcttgagcgtggtcggggcgtcagacagaacacgcacatacgtaaccaccccagagcccctgtgggagacatgccctatagatgtgatgtctgtggaaaggggttcaggtataaatcggttcttcttattcatcaaggggtgcacacaggaaggagaccctataaatgtgaggagtgtgggaaggcatttggtcgaagttcaaacctgcttgtccatcagagggtccacactggagagaaaccatataaatgcagcgagtgtgggaagggcttcagttacagctcagtgcttcaagtccatcagaggctgcacacaggggagaagccctacacctgcagcgagtgtggcaaaggcttctgtgccaagtctgcactgcacaaacaccagcacattcaccctggagaaaagccctacagctgtggcgagtgtggaaagggattcagctgcagctcccacctcagcagtcatcagaagacacacaccggcgagaggccctaccagtgtgacaagtgtggcaaaggtttcagtcacaactcgtaccttcaagctcaccagagagttcacatggggcagcatctgtacaaatgtaacgtgtgtggtaagagtttcagttacagctcagggcttctcatgcatcagagactgcacacaggagagaaaccctacaaatgcgagtgcgggaagagctttggccggagctccgacctccacatccatcagagggtccacacaggagagaaaccctataaatgcagtgagtgtgggaagggcttccggcggaattcagaccttcacagccaccagagggtccacacgggagagaggccctacgtgtgtgacgtgtgtgggaagggtttcatctacagctccgacctccttatccatcagagggtccacactggagagaaaccctataaatgtgctgagtgtggcaaaggcttcagttacagctcagggcttctcattcaccagagagtccacacaggcgagaaaccttacagatgccaagagtgcggaaagggctttaggtgcacatcaagccttcacaaacatcagcgagtccacacgggaaaaaagccctatacgtgtgatcagtgtggcaagggattcagttatggctctaatcttcgcacccaccagaggttgcacacaggagagaaaccctacacttgttgtgaatgtgggaagggtttcagatatggctcaggtctccttagtcataagagagtgcacactggcgagaagccatacagatgccacgtgtgtgggaagggctatagtcagagctcacatcttcaaggtcatcagagggtccacactggtgagaaaccctataaatgtgaggagtgtgggaagggctttggccgcaactcctgtcttcatgttcatcagagagtccacactggagagaagccctatacgtgtggtgtgtgtgggaaaggcttcagttatacctcaggtctgcggaaccaccaaagagtgcatttaggcgagaacccttataagtagatgtacatagaggattccatctgggactcagagctttctatccatctgagagccaacacaggagaaaaaccataggaaagtgacatgtaggagggctataggagaaactgatgattttacattttctagtctgcataggaagggaacacctggacgtgtgataaataggttagcacttcagttacaaacttcagtctttaagagtctgttgtgcagcggagtaggctttaaagaaacagtgcagcagtggtttcagtaataatcctcacttccatcagaatctgcctgggagggagc

SEQ ID NO: 86687 - DNA, 708 bp, Homo sapiens
ttctgttatttggtggggtttctgctttcagtttgtttggagtaatcatttggtggtttgcacgcaggggtgtgtttctcttgaggtgatgtttttgaatatggcttggttgtttttgttttgccctttgtgtgtttgcgttgttttttagttggtgttgtttctgtttcgggtgtggatggtttttgttgttttttggtgcttctctcgcgttttttgtttttttttttttttttttttttttttttttttttttttttttttttttttttttttttttttaaagttcaaaaaaaatatttatttataaaaaatacaatgggataagtttatgctgagaaatgcagcaataaatacagttgaagaaaacagagcaactctacattgatacattggcacaaacaggaagagcaaatgcatcacccaggcctaaatgtccacaggccacttttgtacatgctcttttagaaacaccactctgaaaagatcttgttcgctaggtaagagaatgagtacacatataatcacaaatgcacactgatcatgactttatttaaaaattagcaaacaatactgtagaaacattgatatgtaaatttctaaaatgctgcatcttaaatttagttggcaaagaccacatttagcaataagcatgagtttagtcttccatggtaggaaaccagattacactaaactgtaaaaaaaaaa

SEQ ID NO: 86688 - DNA, 482 bp, Homo sapiens
  misc_feature (1)...(482): n = a,t,c or g
tggggaccnnnatcgagatcactaggatgtgcggccgaattcattgnctcagctattctaagtctttcttgttttcgtgtaaattttataattatcttgtttgtgtctacaaaataagcttgctgggatttttataggaatagcattaaacccacatatcaatttggggagaattggcctctttactatgttgtcttctaatccatgaacatagtcattctctctacttatttatatctttgatttctttcatcaatgttgtatactgttcagcacaagtcctgtacatgttttgctgaatttataactatttcattttttgagtagttgtaaatggtattctatttttaatttcagcatctgcatgttcattgctaggatatagaaatacaattgagttttgtatgtttatcttgtacactcagactttgctgaattcctgattagatctaggaatattttgtcaattccttcagattttn

SEQ ID NO: 86689 - DNA, 480 bp, Homo sapiens
  misc_feature (1)...(480): n = a,t,c or g
acgcgcactatgactgaaancgtcggnggaanccctcacagcttatctcacaccagagcattcatattggtgagagaccctatgaatgttaagagtgtggaaaggcctttagactgctctcacaacttactcagcatcaaagtattcacactggtgagaaaccttatgaatgtaaggaatgtagaaaaccttttagactgctctcacaacttacccaacatcagagtattcacactggtgagaaaccttatgaatgtaaggaatgtggtaaggcttttagactttattcatttcttactcaacaccagagaattcatactggtgagaagccctacaagtgtaaggagtgtaagaaggcctttagacagcattcacaccttactcagcatcagaagattcataatggaatttaatagaagaaagccttcaaatgtatatgatgttacagaacatcagaaaattcattttttgagacgatgn

SEQ ID NO: 86690 - DNA, 436 bp, Homo sapiens
ctcgtttgttgttatgctcatgctacctaccagagctttaattattgtgactttataatatgttttgaaatcagaagtgtgagtcctgcaatcctattctttttcaaaactgttttggctatttgttatcccttgagagtccacatgaatttacagatacatttttctatttctgcaaaaatgccattggtattttgataggtattgtgttgaatctgtagatagacctctttgggtagtattgacatcttaacaatattcagtattctaatccataaacataggatgtctttacatttatttgaatcttcttttatttcttttagcaatattttgtggttttcagtgtataagtctttcacctccttggttaagtttattcctatgcattttactctttttggtgctattgaaaattggattgctgccaggagcg

SEQ ID NO: 86691 - DNA, 1072 bp, Homo sapiens
cggggcactagtcaggagagacctggacaggggtggtgggaagagcttgggcagaagtggctgaaaaactaaggcagtggcaaaggtagaactcaggcaggggtggagaaaaggcgttggtcgcagtgattggtgaacacagcgggggtgggtggtagcgctgggggtgattttaggcagcaagaattggagaactcacactgcgaaaagaaaaccttgggtggcagtgatttgaacaccggcagtgctggggcaggacccgagccagcggtggggagagatatagtcagagaacccagcaatacagatccgtccttgggcaaggcgcggtgctggatgatgggtgcggaggaatttgggtaaaggcagagggaaggggtggaggagggccagctcagttgccgaaactctggagtggcggctggctagaaattggtctgtagaaatgaccttgaaaatggagttctggccaggtgcggtggctcacgcctgtaatcccagcactttgggaggccgaggcaggcagatcacgaggtcaggagttcgagaccagcctggccaacatggcaagaccctgtctctactaaaaatacaaaaattagctgggcgtggtggcgcatgcctataatcccagctacttgggaggctgaggtaggagaattgcttgaacctgggaggtggaggttgcagtgagccgaaattgcaccactgcactccagcctgggcaacagagcgagactccgtctcaaaaaaataaataaaaataaaaaataaaaaatttgggtgactctggttgggtgtggtggctcacgcctgtaatcccagcactttgggaggccgaggcaggcggatcacaaggtcaggagttcgagaccagcctggccaacatggcgaaaccccgtctctactaaaaatacaaaaattagccagacggggaggcacgcgcctggagtcccagctactcgggaggctgaggcaagagaattgcttgaacccgggaggtggaggttgcagtgagctgagatcgcaccactgcactccagcctgggtgacagagcgagactccatctca

SEQ ID NO: 86692 - DNA, 503 bp, Homo sapiens
  misc_feature (1)...(503): n = a,t,c or g
gggggtnnnnnnccttgaaccctggacaagcgtcggaattcgcttcttgtcataaggccatccaggggccacgcacccctaccttgccagcctccagcatgcaggataccgtaacgacatcagcattgttggaccccagccactcctcagtctccacccaggacaattcctccactggaggacacacttcaagcacaagcctacagctctcaaagccttcaatcacaccagtccctgcaaagtccaggaacccacatcccagggccaatatccgtcggatgcgccggatcattgctgaggatcctgagtggtcactggccatcgtgcccctcctcacagagctctgcattcagcacattatcaggaacttccagaaaagccttcccaagtgaaccgccctctactctgatggagtcttccatgccatatgctcccggaacaccagcagaaggtcctgaaccacctgtcccctgacctaccactggctgtgaccgccaacctga

SEQ ID NO: 86693 - DNA, 455 bp, Homo sapiens
  misc_feature (1)...(455): n = a,t,c or g
natcggtagcattcgnccgngcggnggaattcggcttcgccatctgtccatattttgactgaagtattaaaaggagttctaaatagattcaaaagattcatttttactttgatgcagtgattatgggattaattgcagtcacagctacggctgctgcggcagaagttgcattgcactcttctgttcagacagtacgctttgttaacaattggcaaaaaaattctatgagattgtggaattcacaatctggtattgatcaaaaattgtcgaacccaattaatgatcttagacaaactgtcatttggatgggagataagctcatgagcttggaaatcgttttcagttacactgtgactggaatacatcagatttttgtattacaccccgagcctataatgagtctgagcatcactgggacatggttagacgccatctacagggaagagaagataatc

SEQ ID NO: 86694 - DNA, 1765 bp, Homo sapiens
ggtacacctgccagtctggagcagcccccggagccccaagcctcagcttcaccgtccaggtggctgagccccctgtgcgggtggtagctcccgaggcagcccagacgagggttcggagcaccccaggcggggacctagagctggtggtgcacctctccgggccagggggccctgtacgctggtacaaggacggggagcgactggcaagccaggggcgggtgcagctggagcaggccggggccaggcaggtgctgcgggtgcagggggcacggagcggggacgctggggagtacctgtgcgatgcgccccaggacagccgcatcttccttgtcagcgtggaagagccactgctggtgaagctggtctcggagctgacaccactcactgtccacgagggcgatgatgccacgttccggtgtgaagtctccccaccagatgccgatgtcacctggctgcgcaatggggccgtcgtcactccagggccccaggtggagatggcccagaatggttcaagccgcatcttaaccttgcgaggctgccaactgggggatgcagggaccgtgactttgcgggcagggagcacggccacaagtgcccggctccatgttcgagagacagagctgctgttcctacggcggttgcaggatgtgcgggcagaggaaggccaggacgtgtgtctcgaagtggagacaggccgagtgggtgcagcgggggccgtgcgctgggtgcgaggtgggcagcccctgccccacgactctcgcctgtccatggcccaggatgggcacatccaccgcctcttcatccatggtgtcatactggccgaccagggcacctacggctgcgagagccaccacgatcgcaccctggccaggctcagcgtgaggcgtgagtgccccgtcctctcttaatgcattacccaccctacaccacagccttttctggctgtcctggagtccctcaggcccccaccaaagtgcccctcatcgctgagaaaagtcacccatggccgtcccagcagcagcttgcccaaagcaaaacttttctttttctaatattttttatttaccttagaagtccatgtggattttgcattccattgcatatttccaagtcggctttgctataaacacaaatattctccagaaagacttgccatgggcatccttcaggcatgtattctagggatacacatacccacttaagtagcagggatggctgtcaaacagcaccccacacctcccacccaaagctggagccctctgtttcctatgtgacctcatgcaagttaacctctttgagccaagtctccttaaaaatggggctgagaccaggtgcagtggctcacgcctataatcctaacactttgggaggccaaggcaggaggatcccttgaggccaggagttcgaggccatcctgggcaacatagcaagaacccatctccacaaaaaaaaataaaaattagccgggcatggtagttactagggaggctgaggcagaaggattgcttgaacccaggaggttgaggctatagtgagctatgatcatgtcacggcattccagcctgggtgacagcaagaccctgtctcaaattttaaaaatggggttgatccccgtctcaagtgtctctgggaacattaactgagataacatgaaaattcttacacagagcttggtgaatggttgtcattggtgacacatctcttctaacttatttcattcaagaaatcatcacaataaacctgtgtcccaatgttaaaaaaaaaa

SEQ ID NO: 86695 - DNA, 728 bp, Homo sapiens
ggcacgagggaggctgaggctggaggatcgcttgagtccaggagttctgggctgtagtgcgctatgccgatcgggtgtccgcactaagttcggcatcaatatggtgacctcccgggagcgggggaccaccaggttgcctaaggaggggtgaaccggcccaggtcggaaacggagcaggtcaaaactcccgtgctgatcagtagctgggactacaggcacccaccaccacgcccagctagtttttttgtatttttagtatagacggggtttcaccgcgttagccagaatggtcttgatctcctggccttgtgatctgcccacctcagcctcccaaagtgctgggattacaggcgtgagacaccacgcccagcctattatattttgagcaagagtctcactctgtcacccaggctggatggagtgcagtggcacaatcttggctcactgcaacctttgtctctggaggatcgcttgagtccaggagttctgggctgtagtgcgctatgccgatcgggtgtccgcactaagttcggcatcaatatggtgacctcccgggagcgggggaccaccaggttgcctaaggaggggtgaaccggcccaggtcggaaacggagcaggtcaaaactcccgtgctgatcagtagtgggatcgcgcctgtgaatagccactgcactccagcctgggcaacatagcgagaccccatctctactaaaaatacaaaaaaaaaa

SEQ ID NO: 86696 - DNA, 629 bp, Homo sapiens
ggaattcgtgtgtgtggtgtggggtacagtgtgtgtgtgcacgtgtgtgctgtgcggtgtgggttatagtgtgtgcacatgtggcgtgaggtatagtgtggcatgtgtgcacatgtgtgatctgtggtgtgtggcgggtatagtgtgtgtgtgcacgtatgtgtggtgtggggtatagtgtggcttgtgtgcgcgtgtgtggtgtgcgcgtctggttgtggagttctgtgtggctttgtgcatgtgtgtggtgtgcgcgtctggttgtcgagttctgtgtggctttgtccacgtgtgtggcgtgcgtgtctgtggttgtacagtttgtggcttgcatggcgtgagtgtgagtgctgtgcttccatggaaggagcgtctcctggccgtgatgtggtcacgaggggcttccccgctctgtggacctggtgggcgtcacctttgcagggcagcctggggctggggctgtggccacctgtgtcctcggaccccaggtgagtgggtgaccaggccccttgttccagggccacgccatctcctgcctgagactcctccagggtgaggagaggccttgccaggcctccgcttcctgaccgtggccgtcgggctcccaggacagtcccagacctgca

SEQ ID NO: 86697 - DNA, 790 bp, Homo sapiens
ctcgatgcaaaaggcaatattaaaagagaatgaaaagaacacaatggatactagaaaacaaaaagtaatgtgtattcaacttatcaataataaatgttaatgaatttaatcaggcagagactatcagattggattaaaaatacattccaactctatgttatctatgctcccatagatcacacactttaggctcaaagacacagatagattaaaaggatacaaaaagaaatagtgcaaacaattgccataagaaagctggactggctatactagtgtcagacaaagtagactttaagacaaaaatgctcctagagatagagacattttataatgataaaaaggttaacccatcaaaaagatataacagttgtaaacatatgtatgaacttaacagtatcaaaacacagaaagcaaaaactgacagaaatggaagaagaaaatggtcataataataattggagactccataacctattttcagtaatggacaaaactagacacaaggttaacaatgaaatagaaaacttgaccaacgctgtaaaccaactagccctaacagacatctatagaacacttcacccaagcgctacagcatatacattatcaaatgctcatagaacattcttcaggataggccttatgctagaccatgaaacttcaatacgtttaaaaggatagaaataatgcaaagtgcattttgtgaacataatcacaggattaaattagaaataaaaaatgggaacatttgaagaactcacaattaggaaattgaacaacacactactaaatg

SEQ ID NO: 86698 - DNA, 3884 bp, Homo sapiens; identical to SEQ ID NO: 60892

SEQ ID NO: 86699 - DNA, 459 bp, Homo sapiens
  misc_feature (1)...(459): n = a,t,c or g
accaatgaatgtaatgaagctgtttttttgcccctaagttcagtggacaaattgatgaaagaaaatgatgaactcagggattctgtctttcagcttcagaagcagatactgagcctcaaatctgctaagattttcctgagtgagagtcttatctcctgtagggaaacagctgaaattgtggaaaaacagacacaagctcttatgtcagtgactgatctgcaatgaaaggtgcatgcacagccttgccaggtgtctgctgttaaagtgagggcattgattggaaaagaatgggaccctgcaacttggaatggggatgtgtgggagttacctgatgaagctggggacactgagcttgtaaactctgatgaacctttttggccagaaggaacagcttccccatccccagtagtggcagcgaattccnccacntggtctagtgctctcgataggggctcgatg

SEQ ID NO: 86700 - DNA, 909 bp, Homo sapiens
tccgtgtggtggaattcgccctggcctagtcgtgggccccagcaaggctggagagcagggacgtgggagtagcagtggctgagagagtcctccaggcagggtggctggtgcccactctcaaaggctgctgcacacagaggagaatgccggcaggggtgggcagcagccagacctcagtggggcgtggatactccgtgagggcacctgggtgtcacccacagtgcacctcttcacaggggcctgggtactggagggagggatacaggaagggagatggattccgtcctcgggggctctgggtgctgcggagtattcctgggcatggtgctgggcatggctggcatagggtgtggcttgtccccagcttctgatggcagccaggagaatgggtcatcacccaggctctggggctgaggagggctgggcccaagcccacagggactttggaggtggggctctgcagctgtgagatggcccagcagggagtggcagggacgggaggcttcaggaatattcctcctggcatccaggccccctgggacagaggagggtgcagtcaggcgacaggcttatcaggactccctgcctcaatccctggggattgtccaggcaaaacctggagggcagcgggcaagctgttggatggaacagagagaccctcgcagctgactagggcccaaggggacggacactcaagaagatgtaaaattgggaggggtggtattggccattggggcaggcagggccgggaagggaagtagcaccgccgcagccccaagccagtggcttttccacaagggcctaccctgcagccggcgcgctccggcttcctccactgctgaagaccctgctgtagtgctgaagctgaacatgtgtttgctaaataaagattcccattcctagcgcaaa

SEQ ID NO: 86701 - DNA, 3557 bp, Homo sapiens
tttttttttaaaaaaggaggaaatcttgtcatttatgaaaacatgggtgaacccggtgcacattatgctgagtgaaataagccaggcacagaaagacaaacactgcatgatctcacttacatgtggaacctataaaagctgcccttatacaagtaaagagtcaaatgctggttaccatgggctgggaggagagggactgggcagatgtgtcaaagaatacaaaatttcagttaggaggcataagttcagggatcttgtacagcatggtgactatagttaacaacaacgtattgtattcttgaaaaaaaggagtgatataggggtaccagagatgggcaggatgattgaagatcacagtccagccttgcaggaccccgggggacagggcgggcactcagaggtggacctccagcaggtagcgcaggcgacactggctctcctggtagatgaggtactcgctctgggagaatgtggagctgctgaactctgggcagggcacaggctggccctggggcaccaccacttgctggccatccagctccaactcagtgtcctgggtcggatcaggctcggtgtggcctcgggcaatgacactgtcgaagccaggaggtgggctcttcaagctggggttgtccgtgttgatatggtgctctctgcccagggccacctcacccaggaacatgtagccgacatggtgggccccacacttcatgccaataacatatccagctgacttgctgttctctgaggcaaagtagatgcccttgccaacacgcccaccagaatgtggcatgatgcggagcccactagtgaggatggcggccaccacggccatgttggtgccatgccacagcagcttccgattacccagtttggagtgggcctggaatctgtcttcctccccttcttggtttactttccagatgtgttgaagtgtagggcacctgtggttgctgccagtctgttctaagtaggtctgtatcaccttgtactcaggtgctccagagtctagcagctgcagctggcacttgagaagctggtagtctcggtccagggggtgtggcacctcctccaccgtcttctcctgctcagagactgcctgcagggcctgggccagctcgatgtccgccagcaccagcagcatgtccttcttggcctgcagaagctcaggggaattgatgggcgggggctggctgtggccgaagttgtgcgggatgacggtgtaaaagtgtgaggacagctcctccaggctttggccaccatccgtggggcctttcagggcctcctccagcgcctccaaggcctcgaaaccccgtgcaatctgttgcttgctcagctttcccaggggcatcttcttcacatccaggtccatgagggccatggtgttcttgaacatctccttgctgaagatgttagtgatgagcttctgcgtggctgggtccagggagcagggctgcacccgcttagtcacagtcctcactgggcctctgtccaccttcaccacagcttcctgggcctcatcctctgcctgtacttcgataagtgtgtacttgcccgggtgagacacaaagtggtcccgctctgcccagttgttcttggtcttttcccgaaatttcttctcaaagtccttctttgcatcttctagccttgtgaagtggttgatctttgactggccgacctctcccacacggccccagcggttccagcaggtgaagaagcggttgctgtcttggagcagctggatgatgtagaacttgttgttgttgttctcgatgttggtctggttcagggtgcagttgtagtcctcatacacctgggtcccggggttgctgctgagtggacatgttggatccacgcggattatgcgcttctctgcgggtatggccttgagggcctcagcggtggagcggaaggggtcctcctcccttcctgcctgccggcccttcttcttctcagggccctcagtctgtacccagggcttcggctttggagccatggctgtcgtgagttctgcggccgctgctacacgcctggtgggcagcatgtcggcaacagcggctgctcgtaagcggggaaagccggcctctggggccggggctggcgcgggggccggcaagcggcggcgaaaggccgactctgcgggggacaggggcaaatccaagggtggcggcaagatgaatgaggagatctccagcgactctgagagcgagagcctagctccaaggaagcctgaggaggaggaggaggaggagctggaggaaactgcacaggaaaagaagctgcgcttggccaagctctacctagagcagctccgtcagcaagaggaggagaaggctgaggcccgtgcatttgaggaggaccaggtggcggggcgcctgaaggaggatgtgcttgagcagaggggcaggctgcagaagttggtggcaaaagagatccaggccccagcctcagctgacattcgcgttttacgggggcaccagctctctatcacatgtttggtcgtcacccccgatgactcagccatcttctctgctgccaaagactgcagcatcattaagtggagcgtggagagtggacggaagctgcatgtgattcctcgagccaagaagggtgccgagggaaagccccctggccacagcagccacgtcctctgcatggccatctcctccgacggcaagtaccttgcctctggtgaccgcagcaagctcattctcatttgggaggcccagagctgccagcacttgtacaccttcacaggacaccgggatgcagtgtcgggtctggcattccgcagaggcacccaccagctctacagcacatcccacgatcgctccgtgaaggtgtggaatgtggcagagaactcctacgtggagacgctcttcggacaccaggacgctgtggctgcactggatgccttgagccgggagtgctgtgtgacggctgggggccgggatgggactgtacgtgtgtggaagatccccgaggagtcccagcttgtcttctatggccaccagggctccatcgactgcatccacctaatcaatgaggagcacatggtgtccggcgcggacgatggctctgtggccttgtggggtctctccaagaagcgaccacttgccctgcagcgtgaagctcacgggctgcggggagagccaggcctggagcagcccttctggatatcgtcggtggcagccctcctcaacacagaccttgtggccacaggctcccacagctcctgtgtgcggctttggcagtgtggggaaggcttccggcagcttgaccttctctgtgacatccccctggtgggttttatcaacagcctcaagttctccagctctggggacttcctggtggctggggtagggcaggagcacaggcttggccgatggtggagaatcaaagaggctcggaattctgtctgcatcatcccactccgcagggtccctgtacccccagctgctggttcctgacactcttatcctccttatttaagtccttcccaggctatgccccaccctctttgtattaaaagcctcctcttttgggcaaaaaaaaaa

SEQ ID NO: 86702 - DNA, 450 bp, Homo sapiens
  misc_feature (1)...(450): n = a,t,c or g
ttgaatggcgnacatctggccgngcgggggaattcggcatctttgctgaaaatcaattgaccagaaatatgtatatttatttctgggctttctattctgttttggcggactacagatctggttttatgtcaatagcatgctgctttgattatggcttgcagtagattttgatatcaggtagtgtgatgcctcttgcattgttctttttgctatttgggggactttgggggtactttggctatttgggggtcttttatggtttcatatgaattttacgatagtgtttcctatttttgcgaaacaggtcattggaattttaatagattgcattgaatcctttgagtaatagattgatttgggtagtatggacattataacaatcttattcttccaatccatgaggacaggataactttctttttattcatgacttctttaatttcttataaa

SEQ ID NO: 86703 - DNA, 2618 bp, Homo sapiens
tggaggtgcccggatgaacatacatcacaatgtgaacagtggtcatctccagatagtagaatttcagatatgtttctttccatttttctgacagtttgaattttctgtaataattaattgacttttatacaatggaaacaacttttttgttttggaaaaaagaaagatgctgccgctaatcagtggatgaaagatgataatatggatacaaaatctattctagaagaacttcttctcaaaagatcacagcaaaagaagaaaatgtcaccaaataattacaaagaacggctttttgttttgaccaaaacaaacctttcctactatgaatatgacaaaatgaaaaggggcagcagaaaaggatccattgaaattaagaaaatcagatgtgtggagaaagtaaatctcgaggagcagacgcctgtagagagacagtacccatttcagattgtctataaagatgggcttctctatgtctatgcatcaaatgaagagagccgaagtcagtggttgaaagcattacaaaaagagataaggggtaacccccacctgctggtcaagtaccatagtgggttcttcgtggacgggaagttcctgtgttgccagcagagctgtaaagcagccccaggatgtaccctctgggaagcatatgctaatctgcatactgcagtcaatgaagagaaacacagagttcccaccttcccagacagagtgctgaagatacctcgggcagttcctgttctcaaaatggatgcaccatcttcaagtaccactctagcccaatatgacaacgaatcaaagaaaaactatggctcccagccaccatcttcaagtaccagtctagcgcaatatgacagcaactcaaagaaaatctatggctcccagccaaacttcaacatgcagtatattccaagggaagacttccctgactggtggcaagtaagaaaactgaaaagtagcagcagcagtgaagatgttgcaagcagtaaccaaaaagaaagaaatgtgaatcacaccacctcaaagatttcatgggaattccctgagtcaagttcatctgaagaagaggaaaacctggatgattatgactggtttgctggtaacatctccagatcacaatctgaacagttactcagacaaaagggaaaagaaggagcatttatggttagaaattcgagccaagtgggaatgtacacagtgtccttatttagtaaggctgtgaatgataaaaaaggaactgtcaaacattaccacgtgcatacaaatgctgagaacaaattatacctggcagaaaactactgttttgattccattccaaagcttattcattatcatcaacacaattcagcaggcatgatcacacggctccgccaccctgtgtcaacaaaggccaacaaggtccccgactctgtgtccctgggaaatggaatctgggaactgaaaagagaagagattaccttgttgaaggagctgggaagtggccagtttggagtggtccagctgggcaagtggaaggggcagtatgatgttgctgttaagatgatcaaggagggctccatgtcagaagatgaattctttcaggaggcccagactatgatgaaactcatccatcccaagctggttaaattctatggagtgtgttcaaaggaataccccatatacatagtgactgaatatataagcaatggctgcttgctgaattacctgaggagtcacggaaaaggacttgaaccttcccagctcttagaaatgtgctacgatgtctgtgaaggcatggccttcttggagagtcaccaattcatacaccgggacttggctgctcgtaactgcttggtggacagagatctctgtgtgaaagtatctgactttggaatgacaaggtatgttcttgatgaccagtatgtcagttcagtcggaacaaagtttccagtcaagtggtcagctccagaggtgtttcattacttcaaatacagcagcaagtcagacgtatgggcatttgggatcctgatgtggaaggtgttcagcctggggaagcagccctatgacttgtatgacaactcccaggtggttctgaaggtctcccaggtccacaggctttaccggccccacctggcatcggacaccatctaccagatcatgtacagctgctggcacgagcttccagaaaagcgtcccgcatttcagcaactcccggtcttcccattggaacccacttcggggaaaaaggccaagcattgaagaagaaattaggagtgctgataagaatgaatatagatgctggcccagcattttcattcattttaaggaaagtagcaaggcataatgtaatttagctagtttttaatagtgttctctgtattgtctattatttagaaatgaacaaggcaggaaacaaaagattcccttgaaatttagatcaaattagtaattttgttttatgctgctcctgatataacactttccagcctatagcagaagcacattttcagactgcaatatagagactgtgttcatgtgtaaagactgagcagaactgaaaaattacttattggatattcattcttttctttatattgtcattgtcacaacaattaaatatactaccaagtacagaaatgtgg

SEQ ID NO: 86704 - DNA, 817 bp, Homo sapiens
catcgcgacccaatcgtcgaccactagtccgtgtggtggaattacatattgctgtgcaggctgcacagggtgactccaggggccacccgctgcagagactgtgctgtgtatgcacatcatacatggcagcccttaggttgataaataccttctggttaactcttccatctgtagctgcaagtctgcagtctccctctgagggttttctagtctcttctctaactaggactgaatctttctgtccccactgagactgtgccctagaggcaggtatagtttctctatcatttagaggcactgctctaaaacagagcagtgatggctttattggccctgaatatatgtgaaggcattagaagggtgatactggatagataatgagaaagacccacttcttccatcacctgtcacctctaatgttctcttccccaggatttgatagatcttactcagatttcagtgcttaaagatgccttttgcggccgggcatggtggctcatgcctgtaatcccagcaggttgggaggcggaggtgggcagatcacctgaggtcaggagtttgagaccagcctggccaatatggcgaaacctgtctctactaaaaatacaaaaattagctgggtgtggtggtgcacacctgtaatcccagctacttgggaggctgaggcaggagagtcacttgaacctgggaggtggaagtttcagtgaaccgaaaccgtggccatttgcacttccagcccggccgaccaagaccaaaactggggtcctcaaaaaagacaaaaaagacgccgccccctcgggacaaaagaggccccctc

SEQ ID NO: 86705 - DNA, 427 bp, Homo sapiens
gcggtggaattcctttcatcatcatgaaaacagaaacttttcctcatggaaatgaatatgtattttagacacacatttaccttctttgctgacaatgattctgtcatcaccatctccatggacttccagaatgccttaatcatcatcagagtatcctacacaaagttgtctctgaccaaggaactcatttaatggtaagtgaagtgcacatccaaagattcactagtctttactacttactttaccatgcagaagcagcttgccttacacaaaaataaataacttactggaagcttagttatgggatcagctgttcctgggagtactgtacgacaagattgcaatagatgctttaacagagccacccatatatggtgctttttttccccatagtgaggttacacaggactaggaataaagaagtcat

SEQ ID NO: 86706 - DNA, 462 bp, Homo sapiens
  misc_feature (1)...(462): n = a,t,c or g
natctgcgaccctattccagtgcggtggaattcaaatgctcagaagtcacatattaataataaggtttttctataatttctttcaatagtgtcctgtagttttcagtgtagaagttgtgtaatacttttgttaaaattatttcgaagtatttttattctttttgatgctgttataaatggatttttctcttaatttcattttcagactgttcattgctaactatataaaaatacaatttaattgtgtatattgatcttttatcataaaaccttcttgaactgttatttattcattaagtagtttgtgcatgtgttcattaggattttccatatacaaggtcatgtcatctgcacatggagacagttttacttcttttccaatatggataccttttatttctttggcttatttaactgccctatctggagcctccagtatattattagactagcacgaaccaa

SEQ ID NO: 86707 - DNA, 2846 bp, Homo sapiens; identical to SEQ ID NO: 61067

SEQ ID NO: 86708 - DNA, 3163 bp, Homo sapiens
atgagtttggtgagggcagccctggaagcattagatgaactggatctgtttggtgtgaaaggtgggcctcaatcagttatccatgtcctggctgatgaagtacagcactgccagtctatcctaaattcactactgccccgtgcttcaacatcaaaagaggttgatgctagtctactctcagtggtttccttccctgcctttgcagtagaggatagccagttggtggagctcacaaaacaggaaatcatcaccaagcttcagggtcgttatggttgctgtcgctttctacgagatggatataaaactcctaaagaggatcccaatcgtctgtactatgaaacccagctgagctgaagctatttgaaaacattgagtgtgaatggccattgttctggacatactttattcttgatggggtcttcagtggcaatgcagaacaggttcaagaatataaagaggctcttgaagcagtcctcatcaagggcaaaaatggagtcccacttctgccagagctgtacagtgttcctcctgacagggtcgatgaagaatatcagaatcctcacactgtggaccgagtccccatggggaaattgcctcacatgtggggtcagtctctatacattttaggaagcttgatggcagagggatttttagcccctggagaaattgatcccctgaatcgcaggttttctactgtaccgaagcccgatgttgtggttcaagtttacccttctctacctcatggttgttcatctaaatctcccagtcaccaatgcaccataatttctattagaaccactcgaaaaatcacagccccagtctccattctagctgaaacagaagaaatcaagaccattttgaaggacaagggaatttacgtggagaccattgctgaggtataccccatcagagtacaaccagctcgtattctcagccacatttattccagcctagaaatatttttaccatttctcaattctgtatcaggatgcaacaatagaatgaaactcagtggacgaccctacagacacatgggagtgcttggaacttcaaaactctatgacattcggaaaactatctttactttcactccacagtttatagaccagcaacagttctacctggctctggacaacaagatgatagtggaaatgcttagaacagacctctcctacctctgtagccgctggcggatgacaggccagcccaccatcaccttccccatctcacacagcatgcttgatgaagatggaacaagcttgaattcaagtatcctggcagcactccgaaaaatgcaagatgggtattttggtggggcaagggttcaaacaggtaaattgtcagagtttttgacaacatcttgttgcacacacttgagcttcatggaccctggacctgagggtaagctgtacagtgaagattatgatgacaactatgattacctggaatctggcaactggatgaatgattatgattcaaccagtcatgctcgctgtggtgatgaagttgctcgttatttagatcaccttttggcgcacactgctccccatcctaaactagcccctacctcacagaagggagggctagatcggttccaagctgctgtgcaaacaacctgcgacttaatgtccttggtgaccaaggccaaggaactgcatgtacagaatgttcacatgtatcttcctacgaagttatttcaggcttcccggccttcattcaacttacttgattcacctcatccccgacaggagaaccaggttccctctgttcgtgtagaaatacatcttcctagagaccagtctggggaggtggactttaaagcactggttttacagttgaaggagacctcaagcttacaggaacaagctgatatcctctatatgctgtatactatgaaaggacctgactggaacactgaattgtataatgaacggagtgctacagtgagagagcttcttaccgagctgtatggcaaagtgggagaaattcgtcactggggcctgatccgatacatttctgggatcttaaggaagaaagtggaagcacttgatgaggcctgcacagaccttctctcccaccagaaacatttgacagtaggacttcctccagaacctcgagaaaagactatctctgcacctctgccctatgaggcgctcactcagctgatagatgaagccagtgaaggggatatgagcatttcaatccttacacaggaaataatggtatatctagccatgtatatgcgaacccagcctggcctctttgctgaaatgtttcgacttcgaattggtctgatcatacaagttatggcaacagaactggcccactcccttcgatgctcagctgaggaagccacagagggcctgatgaatctcagtccttcggccatgaagaatctcctgcatcacattctcagcggcaaggagtttggagtggaacgaagcgttcgtcccactgattcaaatgtcagtcctgctatttctatccacgagattggtgctgttggagcaaccaaaacagaacgaactgggatcatgcagttaaaaagtgagataaagcagtcacctggaacctctatgactccaagtagtgggtcctttcctagtgcatatgatcagcagtcatctaaagatagtcgtcaaggtcaatggcaacgccgaagaaggctggatggggcactgaatagagttccagttggattttatcagaaagtatggaaagttttgcagaagtgtcacggactttctgttgaagggtttgtccttccttcctctaccactagagagatgactccaggtgagattaaattctctgttcatgtggagtctgtcctgaatcgtgtacctcagccagagtaccgtcagctgctggttgaagccatcctttgtcctcaccatgctggcagatattgaaatttcatagcatcggaagcatcattgctgtggaaaaaatagtgcatattgccaatgacttgttccttcaagaacagaaaacccttggcgcagatgataccatgttggcaaaggatcccgcatctggcatctgtactcttctgtatgacagtgcacccagtggcaggtttggcaccatgacctacctctccaaggcagccgccacctacgtgcaggagttcctgccccacagcatctgtgccatgcaatga

SEQ ID NO: 86709 - DNA, 3169 bp, Homo sapiens
tttcgtctcccactcgagctgcccccgccctctggacccgagtgactcaggcctttgtttgtccttcctggtagaggcgggttccctccctcggcaagatgccggagtgctgggatggggaacatgacatcgagacaccctacggccttctgcatgtagtgatccggggctcccccaaggggaaccgcccagccatcctcacctaccatgatgtgggcctcaaccacaaactatgcttcaacaccttcttcaacttcgaggacatgcaggagatcaccaagcactttgtggtgtgtcacgtggatgcccctggacaacaggtgggggcgtcgcagtttcctcaggggtaccagttcccctccatggagcagctggctgccatgctccccagcgtggtgcagcatttcgggttcaagtatgtgattggcatcggagtgggcgccggagcctatgtgctggccaagtttgcactcatcttccccgacctggtggaggggctggtgctggtgaacatcgaccccaatggcaaaggctggatagactgggctgccaccaagctctccggcctaactagcactttacccgacacggtgctctcccacctcttcagccaggaggagctggtgaacaacacagagttggtgcagagctaccggcagcagattgggaacgtagtgaaccaggccaacctgcagctcttctggaacatgtacaacagccgcagagacctggacattaaccggcctggaacggtgcccaatgccaagacgctccgctgccccgtgatgctggtggttggggataatgcacccgctgaggacggggtggtggagtgcaactccaaactggacccgaccactacgaccttcctgaagatggcagactctggagggctgccccaggtcacacagccagggaagctgactgaagccttcaaatacttcctgcaaggcatgggctacatgccctcagccagcatgacccgcctggcacgctcccgcactgcatccctcaccagtgccagctcggtggatggcagccgcccacaggcctgcacccactcagagagcagcgaggggctgggccaggtcaaccacaccatggaggtgtcctgttgaagcccttgatcccgctgacgacgcccacgtcgaggccccaccgccatccttgcgccggctcatgttccctttagtttatttttgtgagggcaaaggggaggaaatggggttctgtttgaaaaaaatgaggggatcttagatgctgcagcagaacagtctccaggtgttttaaggggctcagtcctcctcatcccatctcactctccgtggtaacttagccaacttgacccctctcatcccactcccggcggcccaggcacagaagggcagggccatagggagggagattcgctacggatccaggtcattcctgggtgagcccttgggcaggcatgtttggagatgagagaggcttcgagagggtgggtgctgggccacaggggtgcggggccagctcaggcactggcgtgggagccctgggagaccccttcccccaccctccaccaagcacacctgtttctgtctcatagcacatgtgacaatcatctggacaacagccacaagggggcgctcggaccaggcagccactttcctggtgctctctgggcccagctggtgctgtagggccacgcaggcaggggcgtcaaggggtttctctgcccaaggaagacagaacatggagaaccgtcagggcaggaaccccacagactgtcccttccagcccacactctgccacctcctggccctgtcccaattctgagccaaggcctccccgaggcagaagttgcctggtcctctgtccccacagtgacctgactgggggtgagggagaaggaggagagagcccatgtgtggtgtgtgtgcccctgagaacttcgtggtgactgcctttgggagcccgcaggtggccagaggcaggggtagctgagttcctggagaccccttttttgcccccaggttccccagagggcaacgccatcagtagcagtgtggtgtttcaggcagagctctggccaggctgtgccagtgtgtcccggacgcatcactaaggaagagagagtttatttagtcaactggcccaaggcagcgaggcttctacagtcccacaccccatagccgcctgggctggggcttactgggggctgaaggttctggacatgaacaagggtcaggtagaagagaaaggcttcccctacaccccagcctcctgctgtcccctgaagcccaggactgcgttgtatgctttccatccactcaccttaccccatagcatcttgcggcccagaaaccagagccatttgtctcagaccctaaatcaataatcacaaaccccaaaacgggagagagcagtgaaaacatgcagggctgtggacgggggaagggttgtggcgggtgttctgaggctgagaggacacctatatgcgtatttcctctacacacatcaccccccttctataatcttaagccatgactagcctggtggcgtgttagtttctgcccagttctaccccctcatgtgcttcttctgaatactgaatgtgactgtttgaaagctggtagaattcatccctcttactgtagataacactgcaaatcttggaattttgttttttgctgtttccagatgtatctataaatatctatacattatatgtgtgtgtgtgtgtgtgtgtgtgtgtgtgtacatcgggtcctcccatgtgtggtgttcttctggaggttgtctctttggtcaaggtgaacttttaatgtttattattttcttctccgcacaaagtaaagagcctaattttgtgtattctggtggctgctgtcatgagatgataaaatgtaaaacaaaactctagtcaacgtagaaagagttaactgtgctgaaaaactaataaagaacctaagaagaattccagtgtggtgatgccatgcccatcatgggaggccttttggagaaacagaatgtttgggcaggggctgctggtgctgctttgggtttttgggttgagggtgctaggagaggatggtctccacccatctttctatttccagtacacgtcacattattttaccggtgagatgagaatgtcacaaacattaaaagccttatgtgctcaaaa

SEQ ID NO: 86710 - DNA, 1699 bp, Homo sapiens; identical to SEQ ID NO: 62807

SEQ ID NO: 86711 - DNA, 3228 bp, Homo sapiens
ttggcagcaaacgcagtgctgttcctgtgcgggaacgtggcaggagtgtaccacaaggcgctgatggagcgcgccctgcgggccacgttccgggaggcactcagctccctgcactcacgccggcggctggacaccgagaagaagcaccaggaacaccttctcttgtccatccttcctgcctacctggcccgagagatgaaggcagagatcatggcacggctgcaggcaggacaggggtcacggccagagagcactaacaatttccacagcctctatgtcaagaggcaccagggagtcaggtatgaggaagaatggctggaggggaggggcctgtgggctaagaccctggccctgctgacacagtctgccctatgcagcgtgctgtatgctgacatcgtgggcttcacgcggctggccagcgagtgttcccctaaggagctggtgctcatgctcaatgagctctttggcaagttcgaccagattgccaaggagcatgaatgcatgcggatcaagatcctgggggactgttactactgtgtctctgggctgccactctcactgccagaccatgccatcaactgcgtgcgcatgggcctggacatgtgccgggccatcaggaaactgcgggcagccactggcgtggacatcaacatgcgtgtgggcgtgcactcaggcagcgtactgtgtggagtcatcgggctgcagaagtggcagtacgacgtttggtcacatgatgtcacactggctaaccacatggaggcaggcggtgtaccagggcgagtgcacatcacaggggctaccctggccctgctggcaggggcttatgctgtggaggacgcaggcatggagcatcgggacccctaccttcgggagctaggggagcctacctatctggtcatcgatccacggccaacaggcctgatctcttctgtgccagagattgagttcctgggtcctagtggggggtggagggagaaggaggaagtgtctgtggtctttactgtcagcccttatgtgccccaggcagaggaggaggatgagaagggcactgcaggaggcttgctgtcctcgcttgagggcctcaagatgcgtccatcactgctgatgacccgttacctggagtcctggggcgcagccaagccttttgcccacctgagccacggagacagccctgtgtccacctccacccctctcccggagaagaccctggcttccttcagcacccagtggagcctggatcggagccgtaccccccggggactagatgatgaactggacaccggggatgccaagttcttccaggtcattgagcagctcaactcgcagaaacagtggaagcagtcgaaggacttcaacccactgacactgtacttcagagagaaggagatggagaaagagtaccgactctctgcaatccccgccttcaaatactatgaagcctgcaccttcctggtttttctctccaacttcatcatccagatgctagtgacaaacaggcccccagctctggccatcacgtatagcatcaccttcctcctcttcctcctcatcctttttgtctgcttctcagaggacctgatgaggtgtgtcctgaaaggccccaagatgctgcactggctgcctgcactgtctggcctggtggccacacgaccaggactgagaatagccttgggcaccgccaccatcctccttgtctttgccatggccattaccagcctgttcttcttcccaacatcatcagactgccctttccaagctcccaatgtgtcctccatgatttccaacctctcctgggagctccctgggtctctgcctctcatcagtgtcccatactccatgcactgctgcacgctgggcttcctctcctgctccctctttctgcacatgagcttcgagctgaagctgctgctgctcctgctgtggctggcggcatcctgctccctcttcctgcactcccatgcctggctgtcggaatgcctcatcgtccgcctctatctgggccccttggactccaggcccggagtgctgaaggagcccaaactgatgggtgctatctccttcttcatcttcttcttcaccctccttgtcctggctcgccagaatgagtactactgccgcctggacttcctgtggaagaagaagctgaggcaggagagggaggagacagagacgatggagaacctgactcggctgctcttggagaacgtgctccctgcacacgtggccccccagttcattggccagaaccggcgcaacgaggatctctaccaccagtcctatgaatgcgtttgtgtcctcttcgcctcagtcccagacttcaaggagttctactctgaatccaacatcaatcatgagggcctagagtgtctgaggctgctcaatgagataattgctgattttgatgagctgctctccaagcccaagttcagtggggtggagaagatcaagaccatcggcagcacctacatggcagccacaggcttaaatgccacctctggacaggatgcacaacaggtacggcaacccttccttacctaccatcctcctctgggctctcattgatgggcttattagtgggacttattcctgtgccctccctggcccaccctggtgggcgggcccattgccaggatgctgaacggagctgcagccaccttggcactatggtggaatttgccgtggccctggggtctaagctggacgtcatcaacaagcattcattcaacaacttccgcctgcgagtgggtgagagacttcccctgctgcagcagtctggtacctcctcaccttcctgagcttgccccactccaagtcctttgttagctgctcccagttcatcctgaagcccctttcctgactcactccctgggatggggtgtgaaggtgctgggcaaggaggtacgaggctctcccactctttttcttaagctacattcctccagcccttagagacccctcctctcctctagggccccccaggctcttctcccttccttccagttccttgtggcttcctcttcccctcttccttctccaagtctgtcattaccacatccctcattagggttgaaccatggacccgtagtagctggagttattggggcccagaagccgcaatatgacatttggggcaacacagtgaacgtggccagccgcatggagagtacaggagtccttggcaaaatccaagtgagggaaccacattggaggcatagggggagggggact

SEQ ID NO: 86712 - DNA, 415 bp, Homo sapiens
cccacgcgtccggggttcagggacacattggatccactgtgaaacagacatgagctcacactccatccaccagctaacctccataagtccctactctggtggaccacagtgatgtttttggtctctgggaattcctgtcaaatcagagccagtgtccagaattccccaaatatctgagaattttcttttctctaagtcacagtcatcctggtagaaggctgtaggtccctttggggaagactgggaaaaagattaactatgtaagtttttggcaatgtagcagcgtacttccccaagatcacccagcctccccttcacttaggggttgtgggcctgtgaactggctcaagtctgggaattgattgagggtttagatctgtgtttcattaatttgagttagtcttttattcagttg

SEQ ID NO: 86713 - DNA, 405 bp, Homo sapiens
tctcaatagatattgaaaaggcaatcaactaaacccatcatctgtccctgatgttaagaaccctcagaaatattaggaatagtgggaacttcttcaacctaataaaggacatacatgaaaaaactaaaattaacatcatacttaacaatgaaagactgaatgcttctctcctaatattgggaataaagcaaggatgtcttggctctcaccacttttattcaacgttgtactggaggtgctagccagtgcaataaagcaagaaaaaaaattacatccagattggaaagacagaaatgaacctctgtattcgtagacaacatgattatttatataaaaatctgataaaaatctgtaaaaccactaaaactagtaagggagtttaacaagtttgcagggtacaagatt

SEQ ID NO: 86714 - DNA, 615 bp, Homo sapiens
caacgatctggcgtccgggctctacgcttcagtgtgcaagcgtgccagtgggcccccaggcaatgagcacctctatgagaacctgtgtgtgctggaggccagcccgacgctgcacggtggggaacctgagccgcacgagggccccggcagccgcagccccacaaccagtcccatctaccacaacggccaggacttgagctggcccggcccggccaacgacagtaccctggaggcccagtaccggcggctgctggagctggatcaggtggagggcacaggccgccctgaccctcaggcaggtttcaaggccaagctggtgaccctgctgagtcgtgagcggaggaagggcccagccccttgtgaccggccctgaacgcccagcagagtggtggccagaggggagaggtgctccccctgggacaggagggtgggctggtgggcaaacattgggcccatgcagacacacgcctgtgtccaccctggcctgcaggaacaaggcaggccgcctgtggaggacctcagccctgccctgccctcctcatgaatagtgtgcagactcacagataataaagctcagagcagctcccggcaggggcactcccggcaaaaaaaaaa

SEQ ID NO: 86715 - DNA, 436 bp, Homo sapiens
caggcatggagctgccggatccggtgcgccagcggctgggaaacttcagccgggccgtgttcagtgattccaatcggaccggtccagagtccaatgagggtccggaaaatgaaatggtctccagtttggcactgcagatgtcactttattttaatacctactatttcccactgtggtgggtgagcagcattatgatgcttcacatgaagtattcaatcttgcctgactactacaaattcattgtgatcactgttatcatcctaataaccttaattgaagccatccggttgtatctgggctacgtgggtaacctacaggagaaggttcctgagttggctggcttttggcttttgagccttctattgcagttacctttaattcttttcttgctctttaatgaaggcctaacaaatctgcccttggaaaaagcgatact

SEQ ID NO: 86716 - DNA, 1159 bp, Homo sapiens
catcttaaatggcagtgcatttgaaaaatggcattggtttgtaatgtttgcatttccaaagaaaaatatagaaagaacttaaaaaagcaaggaaactggttttcaaaaaaagtatcgattcaaaaatctactgcacaaaaatatgtacttcttaagtgtttctaataaattaattccataacatttttatgtatatttatatatttatatatataatccctgataatctataaaagagggtctataatagtaaaataagtgaacctcaaaagtacccccttcataaaatgtatgtaacattagtttttctcaaatttaaagaatgtaacaatatgtacaactcttatgtattagtataataccaaaatagtacaagtcatattaacaggctgtcataattgaaaaatgtttgagtcaagttaaaatctgaggacagcttagtttcaaacaaatacaattattatgggagattcactttccaagtggaaatgacaatcgtcttatctacagtagacttcacaagaggtagtgttcaagtagaaataaaaaaaagatacatgcttaactatctttaattaacaaattcacaggaaaaaatgtgttggtttctcagatgatcagttggtggcttttttaatatgaatctcattaagaatggcccaaacagcagaattctgaataactgaaagtcgaaaggctgaaatgggattgagacttggatccaccattccttctgcaacaccattctcaaattttcctattctgaaatagccatcttctaatcgtttgtctttggtttctttgcttatttccaaaccttcactcttaaaaggcaaaacttcccagtttggtgtttagcagaatatctccaggatgttcttggttgccgctatggaacaaataactttctacttgacctgggttattaaattaacacagaggggagtctcactctttcgggggtgataccccaaaagaaatcctctcccatgtaagttttctccagcgtatgcccttggtagaccttcaatgaagtagatacctccgcaggtgggtttacatggattataagaagtactggactcatataatgcttatccgcgagttttaggattctccctgatagtgaagagtgcagaccaacatgttggaacaggga

SEQ ID NO: 86717 - DNA, 5604 bp, Homo sapiens
gcgcccgcccgccggggtctcggcgatcgctgctcctcctcctccttctcctcctcttttttctcctccgcctcctccccccgccgcctcgccaccgccgcggctagggctggaggcgccgctgtcattcctgtgccggaggaaccggcgctgccggtgcctgggggtcggggcgcgggcgaagccgggccgcggaggacacaacaggtagagccgggggtgcccggccgcgcgccccccgcgcatcatgcagctctttgtcacctctctcgcccccaggccaaaatcctgagcatgatggaagacaataagcagctcgcgctccgcatcgatggggcggtccagtcggccagccaggaggtgaccaacctgcgagccgaactcacggccaccaaccggagactggcggaactgagcggcggcggcggccccggcccgggcccgggagccgcggccagcgcctcggcggcgggggactcggcggcgacgaacatggagaacccccagcttggagcgcaagtgctcctgcgggaagaagtgtcgcggctccaggaggaagttcaccttctccggcagatgaaggagatgttggcgaaggacctggaggagtcgcagggcggcaagtcctctgaggtcctctcggccaccgagctcagggtccagctggcccagaaggagcaggagctagccagagccaaagaagccttgcaggccatgaaagctgatcggaagcgcttaaagggcgagaagacagacctggtgagccagatgcagcagctgtatgccacactggagagccgcgaggagcagctccgagacttcatccgcaactatgagcagcaccgcaaggagagcgaggatgcggtcaaagcgctggccaaggagaaggacctgctggagcgtgagaagtgggagctgcggcgccaagccaaggaggccacagaccacgccacggcactgcgctcccagctggacctcaaggacaaccggatgaaggagctggaggccgagctggccatggccaaacagtccttagctacgctgaccaaggacgtccccaagcggcattccctcgccatgccgggcgagacggtgctcaatggcaaccaggagtgggtggtgcaggcggacctcccgctgaccgcagccatccggcagagtcaacagactctctaccactcacacccccctcaccctgcggaccggcaagcggtcagggtgagcccctgccactcccggcagccctctgtcatctccgacgcatctgccgccgaaggcgaccggtcgtccacaccgagcgacatcaactcccctcgacaccggacacactccctctgcaacgtaaggccagcagcagcggggcctgggcccctgggccctgcccagaaactgcaggggcgggggtggcggggtgaagccatactcgctgtttcctctcgtccacccagggagcactctggcgaatgcatttcctgttctgttctttccttttgcaagaagcgatggatgtggggagaaaaaggaatgaggcccgtttgctccttgtgtccgggagggtgaggagaatccagaggaagcgggcctgggtcggccgcaggcacagcctggaactctgccccagtgggccctgtctgggaccgtgggcttctcctcccacacattaccttccagagctcagggcctccccagcacctcctcatttccctttagagccagctctctatcctgacccaggagtcttggcatgaattgcctctggagaggcttgtgaatatggtctaagtttgtttcctttgtttatttcatcaaacactttttgattgcatactgggcaccagctcccaggaggcaaaggccctagctgcctagctcttgatgactagtggggcagacagatgggctctgcaacagtgtgggagtaaattgaaggtgggttgagcttctgaggacagttggaagccatgtcgaggctctaacatgaaatattggggtctgggtgtggggaccaccttgaatttttgttttatcacacagttggtaatgcagaggctcccctctgccatatcctgaagacagacatcatagggttagatcctcaaatgcacgagacggctttttccaaaactcagttaatgtcactttattaaccagcgaaatagataataaaaaagaaatgaggtgaacacattggacaaaaccattacttgccagtgacatgattctctacctggagaactcaagagaataacttgaaaagctattagaatgaataataagcatgtacataacagtgttgcttggaaatcagtgtgtaaaaatcaatcactttcctatagatgagtcgtaattatggaaccatttttttcaatccacaataatgaaaagtgcttataaaaatagctaagagtaaacttcagagaagctgcctcagtctgctcaggtgggcggcagagattgctggcccggggactttagatggcctcctcagagtaggaaggtcatttgcagcctggggccctgctcaggcctgggattctcttttttattgttttattttatttatttgtatgtgtgtgtgatggagtttcactcttgtcacccaggatggagtgcagtgacgcagtctcagctcactgcaaccaacaccttccaggctcaaacaattctcctgcctcagcctcccgagcagctggcattacagatgcctgccatcacacccggctaatttttgtatttttagtagagatgagatttcaccatgttggccaggctggtcttcaactcctgacctcaggcgatctgcccacctcagtctcccaaagtgctgggattatagacatgagccactgcacctggcgggattctctgttttatactggtgctttgaggaagcagtatgttcttctcttgtccccagaagagaatcctagtgacaaagtctatcttgactaacagaaccaaggcaaggaaggtgggccactggaggggtctctgacatccattccctgatcctgaaggaccactgtggagttatacctacagccagcagtgtccctgcaccattctcatcccagttgagaataccttccccccacggccatattttgtcttctcgtggtgggcccatggggactctggcagcagaaatgctgctggaaaaaccccattctgcagaaggagttctccaaaggcctcttgaattgcatttgacccagccctagtcttttgcccaccatagccttggcacattcctgctgccaggaaatgggtgctttgataagccagttgtctgcatacaggcgtttcagtgagcaggccccattctctttacccatagatttggcaaagatgttcctatccagagtggaactatcttagctgccttcagaatggattctgtttgcaaaccttgagactaaagactaaactaccattcattaattccctcacttcctcaaccctttttatccccccatctcaacaggtgtgcatgcaggtaagccaggaagagcccaaaaatagctacaggtaaccctttgccttgggcatctgacgtccaccagcaagaatagtgcagcctggactaatgactgcctcatcctctcacactctggccactaatttagagcaaaagtaggaactcagcatagagaggttggagaaggttgacggaccttggcattatgcttgcaattccagaaataaccaccaggagtctccctagtaatgactgttttgatccaaaggatctgtgggctccagacagggcagactgattctgggatgtagtgaaggcttttgtacacctgtaggctattaagggttccctccacacccacgtaaggcagggctggcaacacaatggaaatgtcctacctgcccatcctagggacctgtcgtctgaggctccctaggaaaaagggaaggagttcagacccctcctggggcagcccaaagctcaggaccaagtatgcagttaccctggagctcctgcctggaaggagcactgtgccaggaggaatctgacagcccccaattggagctgtagctctgcatccaattagctccacggtagtggactgtctgctgcctctcttgatatctgtgaatagggctaacgagtcctgcctgcccctgcgcaaactaagagattcattgtgtcggttgtgggggaagctagaggctacgtggtctcccaagtttgtttctgtcccaaaattctctattttgtgctttttctataaaagtacatttctttatgaaaagcaccaagtctaaccaagctctagctctaactcagaggacagactgggacaggaacttagacgccctggagtggctaatttgttggtcagaagatgctgggggttgagaggccagactgggcaggagaggaccccaggaactctagggaaactccaggccccatcaataagccatctgggggtatctgcttcaggagatggggggtgggctccccactgcagaggcagggtggcccctgagagatggcatccttccacggaaggccccacaccgcacgggccgcctctgctctcctgtgtcacctgtctctgctgtttcatcttcctcttctcctctggctacagggcgacagtcccggcccagttcagaagaacctgcacaaccctattgtacagtcactagaggatcttgaagaccaaaaacggaaaaagaagaaagagaagatgggattcggctccatctcccgcgtcttcgccagagggaagcagcggaagtccctcgaccccggcctctttgatggtaccgcccctgattattacatagaggaggacgcggactggtgatacgcgctcccctgcgcctgctgcccgcaggcgtgtctgtgcgtgtgggcgtgtgtgcaagcgagcgtgggtgcgcgtgtggccgtgcgtggggtgcgtgtgcacgtgtgcgctggcacacatgggtgctgggtgtggccgagcgcctctaacaagtgaaaacacgagtgtgaacctctctcccctgcgtcgccacctctgtaaattgatgtacataccgcaaaccgtgtgtgaacctgtcaacttctctgtccgtctttggagcgatacagttgtgttgttaatctggtttattatttttcttcagtgtttggtttttctttttctttttgtttggttcgtcggtttgtttttgtttttgtttttttccccctttctcctcccctcctcctttttatgaaacttgaaaaacttgaaggactgctgtgtaatttggtaaattaaccaaaacttatttgtcactctgtgctttgtaaatgtccctcgtccaaaccgctactccttggagccccgtctggcagaggatgtggtctgtttttgatgtcccccctcccgcccccctggtgtgaacgtgtgggaccagaccctgtcctgggggtgcgcccaagtcactttaaccacaaaacgccatcgtcgtcagggtaagctctgctctctacaaagactcgcgagccgggccaaggggccttgtcttggctgggtttgtcagaggtcaaaccggctcttttaaacggcctaccagtttttaaattgcattgccgtttctttctttatg

SEQ ID NO: 86718 - DNA, 669 bp, Homo sapiens
  misc_feature (1)...(669): n = a,t,c or g
tctccatcttcctccacttccaccctttcttggccattctcaatgattctcttggtggtgatttttttaccatcaactatttcagaggaagtcgacatggacttgaagctgcctgtcccatcactaccgtaggacatgcagaaggaagaaaggcccccacttcccagggagccaaaggaacgaaatcctgtatcaaaagaagaaaaaacacccccaaaagctggaaattcactgaaggcagagaaaaggggtgcagacgctctgcttctgcttccccagcagttcctctgacccccccaaaatattctccagcgggtttcccaagaggtcaaaggagaatgggtcctggccgccgaagaactccctgaagacgtctgctgtgtcgcggaagctgaagacgtactcgaaggggtccttgaagggcctgccgcctttgcgcagccgccctccgccctcgcctcgccatagcggtcatagatatcgcgtttctacgcgtccgacaacacctcgtaggcctcagccacctgcttgaatcttctcaccgcttcctcccttgtcctcggcgtctttgtcggggtgccacttgagcgccagcttgcggtacgccttcttgataccctcggacgaggcctacccgngtactcccagcacctcgtagtagtccactat

SEQ ID NO: 86719 - DNA, 446 bp, Homo sapiens
cccacgcgtccgcccacgcgtccggtttgttagatttttgtaggtactctaacagattaataaagttcccttctattcttattttgtgaaaagttcttttttcaaattgtgaatgagtgttggatgttattaaatgctcttttaacctctattaaggcgatcatgtatttttctcttttatttgattaatgtgataaattatattgctttttgagtgttaaaacaagtttgtgtttctgattatcttttcatatgctgttagatttaattggccagtattttgttagagatttttacatctgtgttaatgaaagagactagtctgtaaatttattttacagaatgtcctttgcaggtttagtattaaagctacactgggttcacaaaatgagtttgaaagtgttctattaatattttttactatgctctaggaaagattgtataaa

SEQ ID NO: 86720 - DNA, 1878 bp, Homo sapiens
  misc_feature (1)...(1878): n = a,t,c or g
ttttttttttttgtgaacaatcaagctttatttttacaaaaatgaaaattgtagcatgtctcaacagccagcctgaggtagggctggctcagaactcactcagaactgctgggttccctttgctctttcttggtttcaaagcaaaaccaggccacagtgccccaggaatgaacccccagccccgagaggttggtcaagggtgaggtctggctggtgccaggaggctattggcagcctcacctttccttccaggaaggggcagaaaggaaccatctgggaaggtgggagcacctcacctcactctgtaggctgtcatggctctaataaggggtataggatgggcctctccaggccagatccttgctctggccaaacagggacgcaaggcccgggttcagccgcactctaaagcagcaggtcctgcctctccaacaggttcctgggagggactgcatctctggtaagctccaaagtcccaggagtcagaagcctctagtgcaaggtgcctgagcactggggtcacaggcccaggagcacagtggggcagtgaggaggagctatcactgcaccctccaggcaagagaagtccctgagtagctggtttccctggcccagaggcaggggtggccctgacggtcatgggttttgaaaatccaggacgtggaggttgtaagacagggcagcatagagatgcttggtggtgagacgcaggcagtacacagggctgctgaggggagtcgacgtcagcgggaaggcgtgcaggcaggccctttgacgccggtcccacagccgtacaacaccgtagtaggaggaacctgtggccagcaggtggttgccatctgtctgcaggcagtacagggtgctgtcgtggggctcctcccactccatgacacatttccggacgctggtgcggaggtcccagtagcgaacataggtgtcatagccacaggacagcagtgtgaaaggggactcatacatgacatccagcaccccagcccctgggggaaagtcactgcccaagtgtgtcatcagctgcccactgttgaggtcccagattctcaggggtgagaagtgcccgcaacaagccgtccctgtcacaaaagagctgagtaatgggctgatagcaatggaccagactcggtcttcagtctggatggtgtgtaagcactgccccagccggcctgaggccaaaggccacaccttggccgtcctgtccctggagccactcacaatgatgccccctttgcaatccacacagttcacctcctgttcatgagccgagtacttgacagtgaaggtgctgtgaatcttatgaatgccaatcttcccatcccctcctgcactaacaatatgcgagttggccagcacaaagtggcaaacgtcctcatcatgcccagcaaagactcccagaggccgacgattcaagctggcaccatctggacggaactggtaggccaggatgaaattagcctgggatatgtacagagaatcatcctctagctgcatccagggcatctgactgcatctccacttcagcagaatcccctctcggcagcgccccagtctccagttctgagacaccttcactcgttccttcactgggacactggtcatcaggtcggtgccgagccgcgtgaagccggagttgagcgaggcccgggctatccggcgccagagcagatcgcagctggtgaagcgccgcagccagtggcacacttgggccaggcggccgagggcccgcatgtccaggtaggagcagatgagcagcagcagctcctccggcaggcgccagagcgcaggccccgcggccgggcgggncagtcgactcccgagccgccttcttcttctncctcctcctccccggccggcggcngccat

SEQ ID NO: 86721 - DNA, 554 bp, Homo sapiens
  misc_feature (1)...(554): n = a,t,c or g
tggttatggggannanaaggggntttgatnnnccatcgatacgccntgtcggtaccggctccggaatatcccgggtgagacaccacgccgantccggttttgggggagaggtttatcaattcattccagtaagtctcctttccacannggtcattaattggaatgcatcagaccnnagtatgctttctattaaacgntcaaacctaaccaanncaatacactgnnngaccaagaaaagggcatnnntcatcttgcactttctatgcanntcgttacctggccgagnngcttcatttggtggcctgcagaaaaaggggctgtggaggtgatacnnaattaaatgggccctggtgtccacacttttttaccttcccacagacntgaattctttgcagtaaccagcttatcagaacattcagattactcagctgaaaatagattacaatccatttgccaaaggctttcgggatgatgggctgaataataagccccagagagatggaaaacaaaagaacagctctgaccaagaagggaataatatttccagttcttct

SEQ ID NO: 86722 - DNA, 415 bp, Homo sapiens
  misc_feature (1)...(415): n = a,t,c or g
cccacgcgttagggaataatcagcggctcacttctgaaacatcatgaatagatcacataactgagtggtgcaaagcggtgtggatatatagatccaacacagttctacattgacctgaaattaattgctgcagcacaatctggcctcccgatgcggatagagagtattaaatgggaattgcctctgcctcgctttatgatgtcaaagaatgatggtgagatacgatttgggaacccaattgaactgcatggaactaaggttcagatgccatatttaactacacagaacaactccttgataagaatgaacgatgaggataatgagtaggaaacgcagactcccaagatgtcttaccacgtatccgctacttcttacccgcctcattaccagacgatgcgcttgagccatggctacn

SEQ ID NO: 86723 - DNA, 1784 bp, Homo sapiens
tccccacctgaacctgtggttaccaatgctatgcgagaagacctggcggatatctgttacatcagggctgtgaccgtctacgacaagcccgcatctttctttaaagagacacctctggacctgcagcaccggctcttcatgaagctgggcagcatgcactctccgttcagggcccgctcagaacctgaggacccagtcacggagcggtcggccttcacggagcgggatgctgggagcgggctggtgacgcgtctccgtgagcggccagccctgctggtcagcagcacgagctggacagaggacgaagacttctccatcctgctggcagctttagaaagtagagtttgaacaactgactcttgatggacacaaccttccttctctcgtctgtgtgataacaggcaaagggcctctgagggagtattatagccgcctcatccaccagaagcacttccagcacatccaggtctgcaccccctggctggaggccgaggactaccccctgcttctagggtcggcggacctgggtgtctgtctgcacacgtcctccagtggcctggacctgcccatgaaggtggtggacatgtttgggtgctgtttgcctgtgtgtgctgtgaacttcaagtgtttacatgagctggtgaaacatgaagaaaatggcctggtctttgaggactcagaggaactggcagctcagctgcagatgcttttctcaaactttcctgatcctgcgggcaagctaaaccagttccggaagaacctgcgggagtcgcagcagctccgatgggatgagagctgggtgcagactgtgctccctttggttatggacacataactcctgggccagaggctaaaaccccaggacccctgctgtccttcccgcagcttcttcttggagtctcagggcaaaccctttcgagcagcacctcccagtggccagaagctgaaatgacagcagtggtactgcctggtaaaagaattggttctgtgacccgggaagctttggttggccttgatttcttctctggaggcttggaaacgcttcctctcttcttctgttcttcacgccccatgcccctgctagcgtattactgttctgtgacttccctgtgacctctgcagaactcctcatcctgcgtttggtctccaggtgtcccctttctgccgtgttcctaacattttgattcctgtcttgaaaaaagcacctgctgcaccgtaagcccagggatgtggcagctgcagtgggcttggctttgtgaggaactgagtgtgtccacgttgggggaacatcatacttgatacacacgtttttatttgcacaaagaaaatgctgtttttggagccagaattttcatgtctgatttatggtgattttcttaagaaccagaactgctggcagaaagggggcacccacacgcttagatagccgatgtcttattagagggcagtttgtggttcctgatttggaaattaacattctccaaacattccagtccaatgaaagttttatccgctttcccatataaaaattcttcccatgagagtgacttgattctcacaatcccgttggagtcgtgtgtgagtcctacagggtgagattcagcattgccatctccaagtgctcttcgtagggaaacagtttctgctcatgacgaggttccacttcccatctgatcccggcccggcctaacttcgtggtgaacagctggcacgtctctgggttgcggacggtaaaggccacgtagacctcaggagcccgctggtgctcccggcaggcagccagc

SEQ ID NO: 86724 - DNA, 934 bp, Homo sapiens
ttttttttttttctacatatggatatcctgttttcccagcatcatttattaaagagactgtccttttcccccagcgtatattcttggtgcctttgtcaaatatgagttgactgtaaatacatgcacttacttctggggtccctatcctcttccattggtctatgtctctgtttttatgccagtactatgctgttatgtttattatagttttgtcatgtaatttgaaatcaggtggtatgatgtttcccgctttgttctttttgctcaggattgccttagctgtgccagatcttttgtaattccatgttgaatcctaggatggtttttctatttctgtgaagaatgtcactggtgttttgattgtagttcacttagggtagtatagacattttaacaatattaatttttatcatccatggcatgggatattttccatttttcatatcctcttcaacttctttcatcagtgttttagttgcctcacagagatttttcacatctttggttaaatttgtattttgatatttttgtagctattgtaaatgaaattgttttcttgattactttttcagatagatctctgttggcatatagaaacactactgatgtttatatgttatttgtatcttgtaattttactaagatgttatttgtatcttaaaattttacaaattttcagttctaaaagttttttggcagagtcttcaggtttttctaaatataagatcaagtcttctgcaaaaaaaaataataataatttgacttcctgctttccaatttggatgtcctttatttctttctcttgcctaattgctttggctaggattcccagtactctgttgaatacatatggtgaaagtgggcttccttatcttattacagatctttgtagaaaggctttcaatgtttactctttctgtatgattttaactgg

SEQ ID NO: 86725 - DNA, 398 bp, Homo sapiens
  misc_feature (1)...(398): n = a,t,c or g
accttgtctnggctgttgacgaggaccggatctagactgacctagaggaagaagaagaccattgccctcgcatgcccctagctcacctgggagctactggaagtaaaaaaggctgaagtcttgcaggactcactggatggacgctattcaactccttccagctgtcttgaacagcctgactcctgccggccctatggaagatccttttatgcattggaggaaaaacatgttatcttttctcttgacgtgggagaaacagacaacaaggggaaggggaagactataaggggaatataaacttttaaggggagaaaagggggaacataccaacgggagcacgatgctaacccccttgccccangctcagcaaggagctgctggatgagaaagggcctgag

SEQ ID NO: 86726 - DNA, 393 bp, Homo sapiens
gaactttctccaagctagaccatatgataagctataaaatgagcctcaataaatttaagaaaattgaaattatatcaagcactctctcaaaccacagtggaataaaaccaaaattaaagggaaccttgaaaaccatgcaaatacatggaaattaaataacatactcctcaataagcattgggtcaaaaatgaaatcaagatggaaattaaaaaattcttcagactgaatgacaataatgacacaacctattaaaacctctgggatacagcaaaggcagtgctaagaggaaggttcatagccctaaacacctacatcaaaaaggctgaaagagcacaaacagacaatctaaggtcacacctccagttacaagagaaacaagaacaaaggaaacc

SEQ ID NO: 86727 - DNA, 1483 bp, Homo sapiens; identical to SEQ ID NO: 60925

SEQ ID NO: 86728 - DNA, 448 bp, Homo sapiens
  misc_feature (1)...(448): n = a,t,c or g
aaacaagagagaagcatgaagtcacatataagggaatcaacagcagattaacagatttttcagcagaaaccttctaggccaggaaagaattgaatgccatattaaaagtgctgcaaggtggggaaaagctcacaaaattgctagccacaaatactatacccagcaaagctatccttcagaaatgaagcagaatgagggaagaaattttgcctccctcagacaagcaaaaactgagggaattcattactactaaatcagccccacaagaaatgcttaagggagtactacatctggaagtaggaggatgatatctaccatcatgaaactacaaaagcataaaacactagtagagcagatacacaaatgagaaaggaaaaggaataaaagattatcactacagaaaaccaaaaaattgcaaagaanaacaatgagaggaaacaaaagtata

SEQ ID NO: 86729 - DNA, 2108 bp, Homo sapiens
gcgcggagccccagccgagcctagccctgtccggccccggaggacttgcaacactccgaggccaggaacgctccgtctggaacggcgcaggcccaggccatggctatgatggggaggagagagcggtgagtgatagcttcgggcctggagagtgggatgaccggaaagtgcgacacacttttatccgaaaggtttactccatcatctccgtgcagctgctcatcactgtggccatcattgctatcttcacctttgtggaacctgtcagcgcctttgtgaggagaaatgtggctgtctactacgtgtcctatgctgtcttcgttgtcacctacctgatccttgcctgctgccagggacccagacgccgtttcccatggaacatcattctgctgaccctttttacttttgccatgggcttcatgacgggcaccatttccagtatgtaccaaaccaaagccgtcatcattgcaatgatcatcactgcggtggtatccatttcagtcaccatcttctgctttcagaccaaggtggacttcacctcgtgcacaggcctcttctgtgtcctgggaattgtgctcctggtgactgggattgtcactagcattgtgctctacttccaatacgtttactggctccacatgctctatgctgctctgggggccatttgtttcaccctgttcctggcttacgacacacagctggtcctggggaaccggaagcacaccatcagccccgaggactacatcactggcgccctgcagatttacacagacatcatctacatcttcacctttgtgctgcagctgatgggggatcgcaattaaggagcaagcccccattttcacccgatcctgggctctcccttccaagctagagggctgggccctatgactgtggtctgggctttaggcccctttccttccccttgagtaacatgcccagtttcctttctgtcctggagacaggtggcctctctggctatggatgtgtgggtacttggtggggacggaggagctagggactaactgttgctcttggtgggcttggcagggactaggctgaagatgtgtcttctccccgccacctactgtatgacaccacattcttcctaacagctggggttgtgaggaatatgaaaagagcctattcgatagctagaagggaatatgaaaggtagaagtgacttcaaggtcacgaggttcccctcccacctctgtcacaggcttcttgactacgtagttggagctatttcttcccccagcaaagccagagagctttgtccccggcctcctggacacataggccattatcctgtattcctttggcttggcatcttttagctcaggaaggtagaagagatctgtgcccatgggtctccttgcttcaatcccttcttgtttcagtgacatatgtattgtttatctgggttagggatgggggacagataatagaacgagcaaagtaacctatacaggccagcatggaacagcatctcccctgggcttgctcctggcttgtgacgctataagacagagcaggccacatgtggccatctgctccccattcttgaaagctgctggggcctccttgcaggcttctggatctctggtcagagtgaactcttgcttcctgtattcaggcagctcagagcagaaagtaaggggcagagtcatacgtgtggccaggaagtagccagggtgaagagagactcggtgcgggcagggagaatgcctgggggtccctcacctggctagggagataccgaagcctactgtggtactgaagacttctgggttctttccttctgctaacccagggagggtcctaagaggaaggggacttctctctgtttgtcttaagttgcactgggggatttctgacttgaggcccatctctccagccagccactgccttctttgtaatattaagtgccttgagctggaatggggaagggggacaagggtcagtctgtcgggtgggggcagaaatcaaatcagcccaaggatatagttaggattaattacttaatagagaaatcctaactatatcacacaaagggatacaactataaatgtaataaagtttatgtctagaagttaaaaaaaaaa

SEQ ID NO: 86730 - DNA, 591 bp, Homo sapiens
gctgcaggaattcgaacgagactcacgcgccacccggggaccgctatgtgtgccactggaccgcattgtcccatatattgacgctgattccaagcgactgtccgacgagctactatgtacttgcggcaataacggtcgcggttatcatgatcagtagctttgcttctgaagaaacggaaatgacagcaagaagttcaaaggtgacagccgaagcgcaggcgtcccctctagagtgatccacatccggaagctccccatcgacgtcacggagggggaagtcatctccctggggctgccctttgggaaggtcaccaacctcctgatgctgaaggggaaaaaccaggtacctgagccgcgtttctccggggtgctcacaccgtgcaggcagggacgaggagggcccagcgctcactgcctccccaacaggccttcatcgtgatgaacacggaggaggctgccaacaccatggtgaactactacacctcgaagacccctgtgctgcgcggccagcccatctacatgcagttctccaaccacaacgagctgaagaccgacagctctcccaaccaggcgcgggcccaggctgccctg

SEQ ID NO: 86731 - DNA, 503 bp, Homo sapiens
  misc_feature (1)...(503): n = a,t,c or g
nggggaggcgccgcctgnntnnncnnnnnaagccttgngnanaggacnngcaannnnngggnnganccnnnnnnncggtgtataagtgttcctttcttctctacacaccttgtttgtacttggaaggnaaaagaaattcgtatcaatatgtcttgtgcggtatttatcaccatgaatcccagatacggaggtggagtagagctcccagataacttaaaatctctgtttcgcccagtggcaatgatggtgccccattatcaaatgattgctgaaataatattgttttcatttggtttcaaatctgcaaattcactctctggaaagctaactaacctttatgaattagcgcgcaaacagctctcacaacaggatcattataattttggcttgagatctctgaagatagttttaataatggctggaacgaagaaacgggagtttaaatgaaagtaatatatactgcaactcagcaattgggtttacaaaactggtcatctcagaaa

SEQ ID NO: 86732 - DNA, 1982 bp, Homo sapiens
atcgatagcgtgtaggaccggcccggaattcccggttccacgggaggcaggaggggaagtcccaacggtgctagaatggtgctgcagtggcagaagacggctcacaagtgaagtctggaagaacaacagggaagacatccatcatttgctccaaagtgtgcaagtcaaatcctggggagaatcatgataaccctgatcactgagcagctacagaagcagactctggatgagctgaaatgcacacgcttcagcatcagtctgcctttgcctgatcatgcagacatctccaactgtgggaactctttccagcttgtgtctgaaggtgcttcctggaggggcctgccccactgttcctgtgctgagttccaggacagcctcaacttcagctaccatccctcaggcctgagcctgcacctcagaccacccagtcggggaaactcccccaaggagcagcccttctcccaagtcctaagacctgagcccccagatccagagaagcttcctgtgccccctgcccctccatccaagaggcactgccgctcactctcagtgcccgtggacctgtctcgctggcagccggtgtggcggcccgccccctccaagctgtggactcccataaagcaccggggcagtggtggagggggtgggccgcaggtgcctcaccagagccccccaaagcgggtctccagcctcaggttcctccaagctcccagtgcctcttctcaatgtgccccagctcacacaccctacagccctcctttcttcagcctggccctggcccaggattcctctcgaccctgcgccgcctcccctcaaagtggctcctgggagagtgatgctgagtccttgtcaccttgcccacctcagcgccgcttctccctgtcacccagtctgggcccgcaggcaagccgcttcttgccctctgcccggagctctcccgcatcctccccagagctgccctggcgacctcgaggtctccgcaaccttccccgaagccgctcacagccttgtgatctggatgcccgcaaaactggggtcaagcggcgccacgaggaagacccccggcgtctgcggccttcgttggactttgacaagatgaatcagaaaccatactcaggaggtctttgtctccaagaaacagcccgggaaggcagcagcatctctccaccatggttcatggcctgtagccccccacccctctctgcttcctgcagccccactgggggttcctcccaggtgctgagtgaaagcgaagaggaggaggagggggctgtgcggtggggtcggcaggcgctgagcaagcggacactgtgccagcgggactttggggacctggacttgaatttgattgaggaaaactaaaactgagaggctacttcctggggccacacagactgactctctcatggctactaacaagtgttcgagttccccaaggctgggggccgagcctgggaatgggggtgagtggagggctccgactcagggcagctggaaatcttctcgctccagcaagctcgaccatgccaagagactggccgggacaagataaacggagctggtggcgggagggacagccccagagcagacccttcctatggcggccctgagtgtgagtatccctgccaccaagagagcaatgggcagggaaggaaggggtctgccgaccccagctcggggaatttcactagcccctttgcttcaaagggcacttgtgtcttagaatttggccagggtggggggttgagtcagcctcctcagagaaactgcgtgagagtgtgtgcgtgcatgggagtgtacttgtggaaaggtgtgtttgcgtagccttagggaaggaaggcaattgctccttaacagcagagtatcatgatacccccaggatcttgagttttttacaggatgttgggtttgctcaaggagtcaagaggagggcaccaagttttccttttttctaaatagctctggaaccaggcttgtgtatt

SEQ ID NO: 86733 - DNA, 5157 bp, Homo sapiens
ttttttttgagctaagtttttttttaatttttcacaaagagctccagaaggcaaatagtttatcacttccccactctgaaatagcacgcaagacagatgatgcaggggaatgggtgtccactctttcttgttctcagagctcctgcagcaggcctgaatgaaccgcaagcggggcccatgcagcgtgtcctctgcaaagtgcaggtgttcagtccacacacagcagcaccagcactgctgatgtcacggttgtctgtccagaagatcccacgttagatcccaagagaaatccagacagggtttagcctccagaggcagagagcgggtgccaggcccagatgcaaaggcctctatactgacgccctcacatgaccctgcaaaggtcaaatgtcaaaggtcaaatgtcttggcttaggactataagggagagataggacaaataatgaggtcaaggaacctctggattgctgaagagatgactttaaaaaaaaagtcacatctgcggctcacagtgctcaccagaaaagaacactgcttgggattctagacctgagcagggagaaacaaaccgggctaaaggagacagaactttcttcacagtagaacagtcctagtctaaaatgctagaatttaagtccaaagtcttttaagaatgagagttcttaaatctgtcagaccagctgacaggggaacaggaaaaaaaaaaattctctattaaacaaaacaccacaaaaatcaacccaaacttccttcaaccccagcaccccagccacctcccaccccattaaaaaagtcattaaagtcatgcacacatgcacacactcaaatatgaaaacaaaaaccagataccccaggaaatcttaggaatcacctaaggaattttcactcgctccccagatgctctttctgtttttctgggggtgggtgggaaaggaagtcacactgacagctaagtctaagcggcacaatttagagttgggtgagttccctttcctccagcggcctagcttgctggtcagtgtagaagggtacccacagtgagtcgggaaggaaggccgaggctggcgtctggtggaaggcaagctgcctcttgtcctaaagtggggacccgcccctcacctggggagatgaggctgccttgactacctatttggtgatgagacagcttggtgatcactttctctagactctgagccatgctgttcaaccttaatgtggcaatcagtatcacatgggcagtgaactgaagaattaggtgtctggcttaaagtgtatcttacactcgtacactaagcttgtgtatgtagcaccacccgcctgtggactctgctctgaagggccctccccatgagtttaagtgtgaagctcagggtttggggtgtgcacggccccccatatggctgcatggtgcatggacagtgatgaggaacggtgctggtatgggatgcctgggagggtttttctggagacaaaaatttacagattgagggcatgagaacataaacttgagggaaaccaccatgatctatactaggatgacagattgtggagtgggaagaaatcgtgtagtccaactctgcattttacataaaatcaatctgtgaagaaagcagaaaggactcttaggggatatcttttgagaaagggtgtccacctgggattctaagagcttccctggttgctggcctaaatcaggtgaccagccctttgtttctgaccaggtttctcacctgagatagagaatcatttgtttccaaatagttcaaatccccccatccacaggcctccccacaagagcctggctgggaaattcaggagaatcagattgccgaaccaatgtgtccacacccaccactcccccgggtgccgtggaagtctgcaacatctgtttctctgccttatcctaaagacaatatcttcgcccattttgtaaaataaataattcaaaatataatgaaaaaactctggcaaggatagttgctggcctgaaaatgtgctctgtctcttagcagtgactcacagaactcacacctgcggtgggttcccaggctaaggggtggagcggagagcgtgaagctctgtagcagcgcgcaaacccgggacagggcaggatgcacagccagtcctcaccctttatatattacatttatctttataaatagagcatcctgactcgagtggccataataaaaaagccaaacattgagttttttccctcaaatacctacacaaactgtcaaatatctactaaattatatccacatggcaaactggtcacctctatatgagaactccaactgccatgatggtcacaggccaagtctcagtcggacccaaatacccacccctactggataacagggactaagatttttttttttaaaaaatctacttttcaataagacttgtgacagaatcctttaaataaaaagccaaataaatatgattttaagtgattgattcctgtcccccaaaagttgcacacacaagttttcaatgtcatataaaacggacaaactagaccaataagtgtggtctagttggcctggctgccttgactacatatttgctgatgtgacagctcggtgatcactttctcttgaacaagactctgagccatgttgttcaaccttaatgtgggaatcagtatcacatgagtagtgaactgaagaattaggtgtctggattacagtttatcttaacagtttccagaaaacctgtctttcagccgtcttgggaaatttgggttgaatttccttatttccttccatggtcaaaaatatgttaatttcgatctatcacactagatcactttggttagatgactgtgaccactaagaacaaaacaaaacagaaaactggagcaaacagatgaatagccctttagaaaaaccagaggatgttgaactgatgtgggccacactcccagggagccttcatagctcatcccttgaaggcacagtgtccagggaggttggcggtggcagggcctctgtgttcttggcattgctgtagatgcggctttgcttccgggacttccaggcatgtgtcctatcccagtcggtggccactgtctcattgtcccagatggtggaggtctccgtgtcactcaggtaccccggctggcctgtgtagtgcgtagggtagatgagcaagggttctgcagagaaggctttcaggtccctggattcataatactccttgtactcggctacgggatgcttgttgtacatgactggcagaaactcatccactggcagcatcttcccaaaaggattggctccaaccagcttctgtgctccttccagagagatgacgtagcccagggtccagtaggaatagtcggcttcgaccaggtttgccacattgggcactgctttctctggctcctttacttgcatcctcttcctaccaatataaatcagttcccagtccagctgagcctggtcaatgttatccatcagcttcatcagcttcttcttaaactgatgctcaaaacgcacatcgtcttcaattacaagagtcttctctagctctcgatcaattacctctttccagactgagtagtggctgagaaagcagccgatttcaccccttgttagaggcctggaggaatagggatctcgatagccaggcagcatttcaatattcagtgccttcagctggcttgtgttgagtgcctttccatccacagcctcgacaatcttgacctcaatctcctgttcatacagtgtgcgcaaccaccggtccccgccctgtccctttctgcgtttgaggtttatcatgaaaatctcatcaaatcccatcttgtctggatatttagggacaactgagacatactgggagggttccattggaggacggtcaatcattgcttcaatctgcacatggatgaggttctcgatgtcttcctgcagtgtctgatggggcttcagggggatgggcaggtacccatagtgctctctgttgcagaggtacatctggatgcctgcttgcctgctggagaaggcaaagacaatgatgtcatcaaaggtccaggtgtagtcctggtgtggggggtagaaagtcagcttgtccgaggcctccttcctgaggtcaattaggaaggtggagtggaccatggggacggggaagcagcctgtcctcttccattctcgaatctgaaccgtagtctggggtcctcttatagaagcccttaggggtgattccgcaccagaaattagaatacaggccccgagactccagcatgggggccacaatagttttgttttctgcaatcagtagattgagggtctgtggattagtcaggaaattgtcaacatctatgaacagaatgtagtctgaccatttttccctcgcagttcgaagggctgcctgtcgtagtttcatcacatgggcaaaccgggaggttggccagtgctttggtccaatttcatcagggtaagactctggttcatccataggcctccactccacatagtgatagagtctctgtacatttttcaaccactccctgaatatttctgttgtattatccacattgtgatcagtggctgcccagatggccatcctgctcttggggtagtccagccgctccaggcagccgaggaagtgcggcagcgtgtgcgccgcgttgcgggcgaggaccgccacgagcaccgtggggctctgcaggggcgactccgggaaaaccaccggctcctctccgtcgtcctccgagtcccgctcggcgacgaagcgcgctcggcagccttcgcggagcagggctgaggagaggagcagtagcgaccaggcgagggtggcagcagggcgcgcagccatgttccgggccgaggcgggcggcggggaagtcctggcgcgagcgcccggctgggctgcgtgagggcggcggcggctgccggggagcaaggggctgcgaggggcggccgggggatgcggcttgccgcggccggccggctcacacactggcctcggcggctgcggttcccaggaccctcccgccgccgctgcaccgcccaggccccagtgcgggtgcgcagcgtacctgcagccgctggcgctcccctgcgcctcgggctcgcagacagtagtggccgaggggctgtgtgccctgagtcctgaggaaagttcctctagtccaggttccgctcgtacagc

SEQ ID NO: 86734 - DNA, 2742 bp, Homo sapiens
attcccgggtcgacgaaaacgtccggccgcccgcagggctgctctggccgggacccgctggccgggagacgcgaacctgccggaccaccgcgcggggacgacggcggccatgagctcgcggaagctgagcgggccgaaaggcaggaggctcagcatacacgtcgtgacttggaacgtggcttcggcagcgccccctctagatctcagtgacctgcttcagctgaacaaccggaacctcaatcttgacatatatgttattggtttgcaggaattgaactctgggatcataagcctcctttccgatgctgcctttaatgactcgtggagcagtttcctcatggatgtgctttcccctctgagcttcatcaaggtctcccatgtccgtatgcaggggatcctcttactggtctttgccaagtatcagcatttgccctatatccagattctgtctactaaatccacccccactggcctgtttgggtactgggggaacaaaggtggagtcaacatctgcctgaagctttatggctactatgtcagcatcatcaactgccacctgcctccccacatttccaacaattaccagcggctggagcactttgaccggatcctggagatgcagaattgtgaggggcgagacatcccaaacatcctggaccacgagtgagcctggcctcattatctggtttggagacatgaactttcggatcgaggactttgggttgcactttgttcgggaatccattaaaaatcggtgctacggtggcctgtgggagaaggaccagctcagcattgccaagaaacatgacccgctgctccgggagttccaggagggccgcctactcttcccgcccacctacaagtttgataggaactccaacgactatgacaccagtgagaaaaaacgcaagcctgcatggaccgatcgcatcctgtggaggctgaagcggcagccctgtgctggccccgacactcccataccgccggcgtcacacttctccttgtctctgaggggctacagcagccacatgacgtacggcatcagcgaccacaagcctgtctccggcacgttcgacttggagctgaagccattggtgtctgctccgctgatcgtcctgatgcccgaggacctgtggaccgtggaaaatgacatgatggtcagctactcttcaacctcggacttccccagcagcccgtgggactggattggactgtacaaggtggggctgcgggacgttaatgactacgtgtcctatgcctgggtcggggacagcaaggtctcctgcagcgacaacctgaaccaggtacgtcaccagcaccaggtttacatcgacatcagcaatatccctaccactgaagatgagtttctcctctgttactacagcaacagtctgcgttctgtggtggggataagcagacccttccagatcccgcctggctccttgagggaggacccactgggtgaagcacagccacagatctgagccaggatgggagtgaatcccaggcggaggccagagctggcagccagctctgcctttccactgccgggagtgctgggggcccagcctggccccctgaagagacagccaagtgtcgtccacatactcctcccagagtgagctctaaccaggctcatttgctctctccactactcatctctggaattagccgcttaaatacaggtttttgttgctgagatgtgagtgaaaccagctagtgtgtcaacagtgaagacctggggacagttctgcgtctcatttctggattcctaccccctcttctagtcttgcccaagtagtcctgccaggcacatgccccatttggcacaggcctgcattcttgtcgtgccgtcctgggcctcaggctgtctgggaggggagatgctcacatttgtacaggctacatagactggtgcaagcagtgctggattccaggagtcttggcatctcatagcttgtccccgtgaggagtgagcagagggtctgggatttctgctttcagcaaaagcagtctgactcagtgggcagaatggaggggcccctctagccaggctcttacgccatggttatgagcaggttgatgagggtccttcggccagcacaaccttcctccctactcacggcatggagtctgactgcatggaagttccagatcctgacagagagaactgggaaggatccaggttcgcttccgttggtagcttgagtcccatgcctccaccctgccatctgaggaaggggtgacaagtggtcaaggagctgtggccacagacttttccagggtggtccttggcaggtgaggtgcgtctgtgccacccttgtcaggagccattgacgacgggccccccctggaccccccgggacctcaagagtgggggcaggcagaagggagaaccagctcaagacattttggaggatctggccctggggttcttcaaagaacaccctctaggggctttggggacatggcctgtccccacatccagcacttgcctccgccatggtcactcggcagcccttttcccaggagaagacacctctgggagcctgctcagtgcttgtcctgccatcctgtgtcctgggactgagggttactccagttgctttgtgttgcatactctcccccgcaagcctgtgtatgaagaattgtcccctggcttccagcaggccatggctggctgttttgtgactgttacattgtgcaggggtaattattagcgtggcttttacaaaaaaaaaa

SEQ ID NO: 86735 - DNA, 670 bp, Homo sapiens
ctggattctcatttggcctctcatccagggctgcagccaagatctctgatggctcccagtactatgttctgctcatcatcactgatgggggtcatttctgacatgacgcagaccaaggaggccatcgtcagcgcgtcctcattggcaatgtctatcattatcgtcggtgtaggaccagccatgtttgaggcaatggaagagttggacggtgatgatgtgcgcgtgtcctctaggggacgctacgcagagcgggacatcgttcagttcgtcccattccgagactatgttgaccggtcggggaaccaggtgttgagcatggcccgactggccaaggatgtgctggccgagatcccggagcagctgctgtcctatatgcgcaccagagacatccagcctcggcccccaccccctgccaaccccagcccgatcccagctccagagcagccctgaggattccacatatccaatgcctcacagtctgcaagcctgctcacccactgcttctgctttaagccagaggcacctggaaccctggacttcactgggagggccaacttggaggatcagtgctggctgacaagccctccgcctccttgcctgcagagggcctggcactatcaccacctctctgccttcatgccaataataaagctgatctttattccaaaaa

SEQ ID NO: 86736 - DNA, 2519 bp, Homo sapiens
  misc_feature (1)...(2519): n = a,t,c or g
ttcgtgccgcaatacatttattattttatcacatatttacattccagtaggcagcctgtccccctgtccaacaaggccctttggtcctcactggtcggcctgctccagacccccaggtgcaggcgcgtgtccggagtcgaggctccgcgatgtcagacgttcagcaggaggggccggtgctcctcgtctgcagcgtcgctgggaggaatttcataaatgacaaacagggaggagtacaggcagcccaggaaggacacgaggctggagaagtacatcaccccgttggcactgcccacggccgaggtcaggggccccaggaccagggagaccagaatctgagccaggaagtactggcagctcagcagagagatgtccacgcccatgccccgccgggtgccgtccgcactggaccctgcaaacttcttactctgatagtaatcgcagagcagcgagtaaggcaaggtgcacagggtggaaaataaaatcccgtaggttatgcagagcgacaggaccacgtagaggttcctggagagggtggcaagcccggtccccaggccgaaggcgagataggcgatgaagtagagggtgcggacgctgaggaactcctccagcttctccaggatagctgagtagaaggcagcactgaaggcgtagatacacatgccccagcagcccatggtcacgccgctgttgtacttctgatacgcctctgatgtgtgcggggccttggggtccccctgaaacaccacctcgcccatgaagtctgtgtagaagagcaacatcccctcgaatgagagccaccccaggaagtggttgacgcagagggtgcgtagcgccttgggcatgttgcagatggtggagcagaggcgccccacggacagaggctgctccgcgcgctcgctggagcccgtcagctcgctctcatacttcacgccgttgagcaggatattggccacctgctgactgaaggtcacattccttctcctgctggtttcgggaccccctcctccggctgcgtccgggatggccaaggtctgaggtctcttcagaatccctgatgaccttggcttagaggtgtccaaggagcccaccctcagaatgtccccgtcacagccggaggtcagggcaccctctctgccctccagaagtccacggtcctggcggtagaagccgtcgggggcccgggggaagctgacgctgatgggcggcctggggacgctgccagggatggccaggtagctgtcgtggccgcccgtgaagcagtcaatgaggacgctgtctatgttggccgtgccaaaggatgaggcgaactcgctgatgcccgtcagggagctgtccctgctgatgaagctgccgtacttgggcgtgagggggctgggcggcgagatggggctggagaagttggtggccgtgtgcgacgggaggctgtcgccagggccttcctctggcaggacgggcggggacgggggcagcgggaggctggggctcttcatggctgcccgcttctcactcggcggccgcagcggcctctcagggatgctgaccagggtcaggacggtggtgacgctcagggtgaccgcagtgaagaggtaaatgactcggaactgtccccccagggccctcccgaagcccgttttatcccagtggattccgccgaggacgtatccaaagcctcctccgagacctgccaggagggcgtggatgttcaggcctcggtcctggtctgcggggctgcacacgtccatcatgtaggcgtggctggggttgtccgccgagtcggcgctaaagtccatcagcaccacaccgcacacggtcagcagcaggccccacttgtggttcccggtcacgtcagccagggcgatgccaatgtcccggccattcagcaagagcgagaggcccagcagtgcccctatagccaggacaagaatgaaagggcgtctccttccaaaccttgaggtacaccggtcactccaagcacccaacagaggctgcagtaggaatccgaggatggggctgatgaaccacaccaggctgtagagctggtcgggcaggcccatctgcaggagcaccggggtcacgtacgccgtctccatggcgtagctgaactcgatgccaaagagaatgcagccgttgaaaagcagctcccggaaggacctctgggggtgcaggtccccgaagtccaccagctcaagcgggcacggggtgttggggggcgggggtggggagggacgaatgcacttcctcctcttggggtgtcgtttgaagttgttggcccggtgactgaggtgtcgtgtcacggaccccgagtagcccgtgacctgggacctccagaagtcctgtggggccacgctggggaagagggcatctcccggcggggtgctgctggctgcggggatcatcgtggggagggctggaaagcgtcaaagtgggtggagacggcaggcatcccacgaaatcgtcgacccgggnnnncggnccggtngtcntcggacggtctcatgtttcatttnnnggtcgtg

SEQ ID NO: 86737 - DNA, 917 bp, Homo sapiens
ttttttttttttgtgtttagatagttaacatttattaaggtcttacaaagtgccaggcatattctacaagctctacatggctttatacttcatttcattcttacaacaagccctgagatagatcttatcttaaaatttccacattctaaaacactctttaagcggggggcggggggagcagaggaaagtgcataaaatataaatttacagcttaacaaattattataaaggcaaatcaccataaagatcaagaaacagaacagatcagaactccaggaaattcccataaggtccttgccccaatcacaacctctttcctctctcccaaaacaaaacaaaacactcttcatgacagttttaggctggttgctttcttactttcctttataggcttttaccccttcaaatatagatgcccaaacactactgtttctggagctttatataaatagaactataatgcatatatccttctatatccagctcattgcccttacaattatgcttctgagattcaacctggttgcatgcggcatcggttcatcattctcagtattgtgttacagctttccattctacgactttacaagaaattatccttttactgtcggtggacatttggactgtttccagttggggacaattatgaaaaatgttgctaagaacatgtttttaatgtctcctggtacatatgtgcacacacaaggtatatatgtaggagaggaattgctggctcatagattgtgtatattttcaacttcactagataccaccaaactgtatatcaaagttgtaccaattcccacttccaccatcaatgtttgagagttcctgttgctccacatcctcacaaacacttgacattgtcaacaaagcttcataacttttgcttgaggttttgtacgtctattattaca

SEQ ID NO: 86738 - DNA, 383 bp, Homo sapiens
ctgtcacatggagaattcatgcggtatttgatttaaagagtttcagtttggttggggggagggaagtgacagtccaagtggcctgatgttgtgtaggtgccctcttaagatgggaaatatggtaccaggagggaaggcctgtaagtttagctgccgtcggtgttgtaagaattaccatgtaggggcctttccacggggggagagacctcttgcctggaggtcttttactagtacctgatctcctggggttattatggctggactgtctgggctgagcggtccgggctttggaaggctgtggtcggtgtgttctcttagcagctcccttaacagggtgaggtagggcaggtacgtgccaagaggtggggtattcacagggagct

SEQ ID NO: 86739 - DNA, 413 bp, Homo sapiens
aatttttcatcatcatactgtaaacaatagacacctttactcttttcagagtggcactgaatcctttgtaaggtgtgtcatccacactgccagttagattctatagtctctataacctggataatctttgggtataatgacctatgaaatgaattgggagggccatctgtgggtctgtttttaaacaggtgctgtcccacactttttctgaaagtcccttccatagaggataagcgtgtaccattcgttcaatcagcttcttccaaagcattcattctgaggtcacttgctgccattctttacataccagctctgctgcacacagagacctggcatcgaaataactttttctgctatgtgatctaagccttgatctggtaagtggtaaagtcctgctgcaacatgggctttgg

SEQ ID NO: 86740 - DNA, 394 bp, Homo sapiens
  misc_feature (1)...(394): n = a,t,c or g
aaacatactctaatttttttgatgactataatttacagatcaagagcccccagggccggctaccactgcggctactgcgattccaaggagggcaaagcgtgctgcggcatgtgggcacattccatgacggggcaggattatcacgatctcatagaccgaggatggctaataagtggaaaagatgtgaacaaacctgtcttgaatcaaacatgaggacctcatttctcggtggggggccgacctttacaatttcagccttcaaaatctcacaagaagggggtgaaaaaaatgttgaaatttctggctaaaggggaggttcccaaaggaagttgtgaggatgagccatggattccacaatggatgatgctgttgcgggtgactttgcattgataan

SEQ ID NO: 86741 - DNA, 724 bp, Homo sapiens
gactctggcccaagtggggaagctgaggcagagtgcagagggggtcatgcagtgagtgggtggggtgcaggagacagagaggggctgggggcgtggggtgggggtgtctgcctcttccctccacctcctcccctccttagcagctgaagactcagccctgaggtctggggcaatggaagtcaagacacccgacccctacatcctggggtaggcccgactcagcatcctgtcccagcttcagccccacactcatttctggcatagaagattctgccgaggcagctctttcctctcggggtctgccaggggtgcctcagctggttcctgctcccaggcctagccccgaagccttaggggccttctcagccttagccctgggtactggggtgaagttggcaggggagagcttgacacttcgcctccctgatggccatgctgagggacagtggtgaccctggtcacttggtgctggtgtaggggcctgtgcccttccagggccagtgagacagccttctactcccccgacccagagctgagtccgaggaccccaggcccacctcctggccctcttggaggtctgtgctcttacctcccagcccccaccctgcgggagagcagccccagcgcctcatctccccaaaggcggcagatgcttgattctcctgccctctttcttccttccctcgtatttatttatttatttattgcttgtgctaaactcgtg

SEQ ID NO: 86742 - DNA, 871 bp, Homo sapiens
tgtgctggaattcctagaattctgcctatcacaacagttaacattgattctgtagatcattttgagaactgacatctttaacagcagtctgccaatctatgaatatggtatatctctacatttatttagatctttttcaattcctcatcactgttttgcagggttttttgtttgtttttgagatggagtttcactcttgtcgcccaggccagagtgcaatgatgcaatctcagctcgctgcaacctctgcctcccgggttcaagtgattctcctgcctcagccccccaagaagctgagattacaggcgcccgccaccacgtccagctaattttttgtatttttagtagagacagggtttcactgtgttaggccaggctggtctcgaactcctgacctcgtgatccgcccacctcggcctcccaaagtgctgggattacaggcgtgagccaccgtgcctggccggttcatgccatttctactcatatttcattggtcaaaacaaggccaagcttgacgacattagggtgagaagtctttcaccctaatctcctagggacaggccagatagcaacggctttagaaagggaagggcagaggctattgataataaagactatagcaaggactaatattaggcttatatgtatcaattgactgttatcagttataacattgactattaaaatactgaaatattctagtactacctggtaaatagctgctgtcccaaacctcctgaccactcccttcccctgggatcccttgggacctcctattcacaaaccagcaactgaagggttaacacctagcacagacgtatacctccaggatcctagctgcatttctaattctgcttcatctatgcttgag

SEQ ID NO: 86743 - DNA, 386 bp, Homo sapiens
cccacgcgtccgtctatattgactcctactttgacttcgagcgctttaaaaatgactaaaagaaggaggaattgaattgtacccacatctgcaagtacacgcacaagtgtggcggatactgggtcatacactgattccttcagggagagatacagacactacttttcacttagcgcttacgtttttacaaaaggtgtacaataaacgggatcaggaacctgatgttgtatgaactgccgtcatatacacacttttacagtgagatctgagctatgctgagagccaacaacggaggagaagaggcgcactgggacctgctctgttctttactccaaatatgatgcccacaggttagctgccgagggtgctgtacagcggccaccaca

SEQ ID NO: 86744 - DNA, 1834 bp, Homo sapiens; identical to SEQ ID NO: 60784

SEQ ID NO: 86745 - DNA, 4413 bp, Homo sapiens; identical to SEQ ID NO: 64348

SEQ ID NO: 86746 - DNA, 821 bp, Homo sapiens; identical to SEQ ID NO: 61154

SEQ ID NO: 86747 - DNA, 350 bp, Homo sapiens
tctacttcctcctgcttccccgccgccgccgccgccatcatgagggaaatcgtgcacttgcaggccgggcagtgcggcaaccaaatcggcgccaagttttgggaggtgatcagcgatgagcacggcatcgaccccacgggcacctaccacggggacagcgacctgcagctggaacgcatcaacgtgtactacaatgaggccaccggtgaggccccggtcccttccccgaccgccctccggggaccccgcgggccctgccttgggtgacgccctcccgtccccgcaggcgggaagtacgtgccccgcgccgtgctcgtggatatggagcccggcaccatggactccgtgcg

SEQ ID NO: 86748 - DNA, 1998 bp, Homo sapiens; identical to SEQ ID NO: 75405

SEQ ID NO: 86749 - DNA, 423 bp, Homo sapiens
aacaaatttttaaatattgaagttatcaagtatcttctcataccacagactagaactaggaatcacagactagaactaggaatcagtaacaagaaggaaatttggaaactgtgcagatacatggaagttaacatgctcctcaatgaccattggtcaatgaagaaattaaggaaataaaaaaaaatttcttgaagcaaatgaaaatgcaagtacaacataccataacctatgagatacagtataagaattgctaagaggaaagtatataccaataaatgcctccattaaaaaaaaagatttcaaataaacaatctgaagagtgtacctcaaggaactagaaaagtaagaacaaaccaaaccgaaaagtattagaagaaagattattaaagataagcgtgaacaactatacactaacaaattggg

SEQ ID NO: 86750 - DNA, 829 bp, Homo sapiens; identical to SEQ ID NO: 58707

SEQ ID NO: 86751 - DNA, 407 bp, Homo sapiens
ctgacgcgtggatggatctgacaccatatgttctctgctcctggttaatgacaatgagggctggaagctgaataaatgacaacaggagtggtctgggcccatgtaaatgatcctcccttgaaaggaggaacagctttcatcatttgttccagctaagccttgcatgcattatagatctggtgctaagcagcgggaaagatctcataagtaaggctgtatgttctttctgtctctcctcttctgctgttcttggcttgtgggttgtgatcgcgatgctaactggaaaattgctataagccagttgtctctaagttgtagaagcgaattagaaaaaccataaaatcctctggcctatgcacattgtccctgttttgtgaaaacattaaagggtaaataaaaaggaacga

SEQ ID NO: 86752 - DNA, 1421 bp, Homo sapiens
cctcgtgccatgagcatttagaaatggagaccacttctggtgaattgtcagatgtttccaatgatcccaccacatcgtgtctgtgtagctagtgccccaacaaaagaagcaattgacaataccctgcttgaacacaaagaaagaagtgagaatataaatcttaatgaaaagcaaattccttttcaggtgcctaatattgaaagggacttttagacagtcacagcctaaatcctatctttgccattatgaactggctgaggcccttccacaaggaaagatgaatgagacaccaactgagtggctgcgttataattcaggaatccttaacacacaaccaccattaccattcaaagaagcacatgtcagtggtcatacttttgtaacagctgagcaaatcctggctccattagctttaccagagcaagcattattgatcccactagaaaaccatgacaaattcaaaaatgtaccatgtgaggtctaccagcacattctgcagccaaacatgctggccaacaaggttaaatttacctttcctccagctgccctcccaccccctagcacacctctgcagcctttgcctttgcagcagtccttatgttctacctctgtaaccactatccatcacactgttttgcagcagcacgctgcagctgctgcagctgcagctgcagccgcagctgcaggaacctttaaagtgcttcagccacaccaacagtttctttcccaaatcccagctctcaccagaacctcattacctcagctctcagtaggaccagtaggaccgaggctttgtcctgggaaccagccaacttttgttgctcctcctcagatgccaatcattccagcttccgttcttcatcctagccatctggctttcccatctttaccccatgcactctttccttcactgctttccccacaccctactgtcatccctttgcaacctctcttctagtcatcaccataatgggaaaaaaatactcttgtgaaaactattgctatatgcgttaagtgttcatctatgtgggtacatggctatttaactggtggaaataaactggccgatacatggcgtcattggtttgaaatcatttactgtaagtgcaatgatgcaaataaatccctaagtttctgatatataatattattaaagcactgaataggtttgaaaatccaatacaatatatgcctatatattaaaatgatgcccttaagagtatgtataatgtacataaaatatatttatagtactctaatttatgttgtaaagtatgctcccttggtttttcttaatctttgtgtatttgcacctatttaatgtttagacaaagctgatggcactatgttttgtatcatgttccttgaaactgtaaattcagtgaaaaatatctcttgcaataaatttttgttaactattt

SEQ ID NO: 86753 - DNA, 3290 bp, Homo sapiens
  misc_feature (1)...(3290): n = a,t,c or g
cttttcgggattctgataataaaatattgccagctgcagctcttgcatcagagcactcaaagggaacctcctcaattgcaattaccgctcttatggaagagaagggttaccaggtgcctgttcttggaaccccatctttgcttggacagtcattattgcatggacagttgatccccacaactggtccagtaagaataaatactgctcgtccaggtggtggtcgaccaggctgggaacattccaacaaacttggctatctggtttctccaccacaacaaattagaagaggggagaggagctgctacagaagtataaaccgtgggcgacaccacagcgaaagatcacagaggactcaaggcccgtcactaccagcaactccagtctttgtacctgttccaccacctcctttgtatccgcctcctccccatacacttcctctccctccgggtgttcctcctccacagttttctcctcagtttcctcctggccagccagccacccgctgggtatagtgtccctcctccagggtttcctccagctcctgccaatttatcaacaccttgggtatcatcaggagtgcagacagctcattcaaataccatcccaacaacacaagcaccacctttgtccagggaagaattctatagagagcagcgacgactaaaagaagaggaaaagaaaaagtccaagctagatgagtttacaaatgattttgctaaggaattgatggaatacaaaaagattcaaaaggagcgtaggcgctcattttccaggtctaaatctccctatagtggttcttcgtattcaagaagttcatatacttattctaaatcaagatctggttcaacacgttcacgctcttattctcgatcattcagccgctcacattctcgttcctattcacggtcacctccataccccagaagaggcagaggcaagagccgcaattaccgttcacggtctagatctcatggatatcatcgatctaggtcaaggtcacccccttacagacgctatcattcacgatcaagatctcctcaagcgtttaggggacagtctcctaataaacgtaatgtacctcaaggggaaacagaacgtgaatattttaatagatacagagaagttccaccaccatatgacatgaaagcatattatgggagaagtgttgactttagagacccatttgaaaaagaacgctaccgagaatgggagagaaaatatagagagtggtatgaaaaatattataaaggttatgctgctggagcacagcctagaccctcagcaaatagagagaacttttctccagagagatttttgccacttaacatcaggaattctcccttcacaagaggccgcagagaagactatgttggtgggcaaagtcatagaagtcgaaacataggtagcaactatccagaaaagctttcagcaagagatggtcacaatcagaaggataatacaaagtcaaaagagaaggagagtgaaaacgctccaggagatggtaaaggaaataagcataagaaacacagaaaaagaagaaaaggggaggaaagtgagggttttctgaacccagagttattagagacttctaggaaatcaagagaacctacaggtgttgaagaaaataaaacagactcattgtttgttctcccaagtagagatgatgccacacctgttagagatgaaccaatggatgcagaatcaatcacttttaaatcagtgtctgaaaaagacaagagagaaagggataaaccaaaagcaaagggtgataaaaccaaacggaagaatgatggatctgctgtgtccaaaaaagaaaatattgtaaaacctgctaaaggaccccaagaaaaagtagatggagaacgtgagagatctcctcgatctgaacctcccaattaaaaaagcccaaagaggagactccgaaggacttgacaatactaaatcatcatcttcctctcagaaggatgaaaaaatcactgggaacccccaggaaaagctcactctaaatcagcaaaagaacaccaagaaacaaaaccagtcaaagaggaaaaagtgaagaaggactattccaaagatgtcaaatcagaaaagctaacaactaaggaagaaaaggccaagaagcctaatgagaaaaacaaaccacttgataataagggagaaaaaagaaaaagaaaaactgaagaaaaaggcgtagataaagattttgagtcttcttcaatgaaaatctcgaaactagaagtgactgaaatagtgaaaccatcaccaaagcgcaaaatggaacctgatactgaaaaaatggataggacccctgaaaaggacaaaatttctttaagtgcgccagccaaaaaaatcaaactcaacagagaaactgggaagaaaattggaagtacagaaaatatatcaaacacaaaagaaccctctgaaaaattggagtcaacatctagcaaagttaaacaagaaaaagtcaaaggaaaggtcagacgaaaagtgactggaactgaaggatccagctcaactctggtggattacaccagtacgagctcaactggaggcagtcctgtgcggaaatctgaagaaaaaacagatacaaagcgaactgtgattaaaacgatggaagaatataataatgacaataccgcgccagctgaagatgttatcattatgattcaggttcctcaatccaaatgggataaagatgactttgaatctgaagaagaagatgttaaatccacacagcctatatcaagtgtaggaaaacctgctagtgttataaaaaatgttagtacaaagccatcaaatatagtcaagtatcctgagaaagaaagtgagccatccgagaaaattcagaaattcaccaaggacgtgagccatgaaatcatacaacatgaggttaaaagttcaaaaaactctgcatctagtgaaaaagggaaaaccaaagatcgagattattcagtgttggaaaaggagaaccctgaaaagaggaagaacaggcnctcagccagagaaagagagtaatttgggaccgtctgaatgaacaaggaaattttaaaagtctgtctcaatcttccaaagaggctagaaccgtcagataaacatgattccactcgtgctttcctccaaataaaggactttcactcccaatagaggacaaaaaaactggactttggacaccagagggtttttcaagtttcccaaacgttgggaggttggnaaaggattggattttaaccaggacgganagganttttcctttcttcggggntttaaggtttttnggcttttggggggcc

SEQ ID NO: 86754 - DNA, 377 bp, Homo sapiens
ctgaagatagatcgccattttgaacgacaccgcatctatccgcactagaaagtgcatgaccaaccgactacttcagaggaaacaaatggtcgttgatgaccttcaccccgggaaggcgacagtgcctaacacagaaattcggtaaaaactagccacattgtgtcaacaccacaccggatgtaatctttgtatttgaaatcataactcattttggtggtggtaagacaactgcctatggcatgatttatgagtccctggattatgcagagaaatacgaacccagtcatatacttgcaagacatggcctggatgagaagaacaagacctcgagactgcgacgaatggaacgtgagaacagaatgaagaaagtgaggggg

SEQ ID NO: 86755 - DNA, 2170 bp, Homo sapiens
atgccaagaagccatacgggagagagactctgtgaaggtaaagaaggtagtcaatgtgcagaaaacttcagtcccaatctcagtgtgacgaagaagactgccggagtaaaaccatatgagtgtactatctgtggaaaagccttcatgcgtctctcatcccttactagacacatgaggtctcacactgccatacgagctatttgagaagccatataaatgtaaggagtgtgagaagagcctttagtttatctcaaatcctttcaaagacatgaaaggagtcacactggagaaaaaccctataaatgtaaacaatgtggaaaaaccttcatatatcaccagccctttcaaagacatgagcggactcacattggagaaaaaccctatgaatgtaagcaatgtggaaaagctcttagttgttccagttcgcttcgagttcatgaaaggattcacactggagaaaagccctatgaatgtaaacaatgtgggaaagccttcagttgttccagttctattcgagtacacgaaagaactcacactggagagaaaccctatgcatgtaagggaatgtgggaaagccttcatttcccacaacaagtgttcttacacacatgataacacacaacggagatagaccttataaatgcaaagaatgtggaaaggcattcatttttcccagttttttacgagtacatgaaagaattcacactggagagaaaccctataaatgtaaacaatgtggtaaagccttcagatgttccacctccattcaaattcatgaaagaattcatactggagagaagccctataaatgtaaagaatgtgggaaatctttcagtgcacgcccagcctttcgagtacacgtgagagtgcatactggagagaaaccctataagtgtaaagaatgtgggaaagcctttagtagaatcagttactttcgaatacatgaaaggactcacactggagagaaaccctacgaatgtaaaaaatgtgggaaaactttcaattatcctctagatttgaaaatccacaagagaaatcacactggagaaaaaccctatgagtgtaaggaatgtgcaaaaaccttcatttctcttgagaactttcgaagacacatgatcacccacactggagacggaccttataaatgtagggactgtgggaaggtgttcatttttcctagtgcgttacgaacacatgaaagaactcacactggagagaaaccctatgaatgtaaacaatgtggaaaagcctttagttgttctagttacattcggatacataaaagaactcacactggggagaaaaccttatgaatgtaaggaatgcgggaaggcctttatttatcccacaagctttcaaggacacatgagaatgcatactggagagaaaccctataaatgtaaagaatgtgggaaggcctttagtcttcacagttcctttcgagagacatacaagaattcacaattatgagaaacctcttgaatgttagcagatgtggaaaagccttcagtgtgtccacatccttaaaaaaacctatgaggaatgcgcaatccgataggaaactctataatgtgagaaataggagaaagttttcaattctaacagatgctttcaaagttgtgaaaattcccactgaagagagaaatcctgtcaatgtaagtaatatagaaagcgagatacaagatgattcatgtatagtcaggtaccacataatcatgtttcagtcagcaatggaccatataggttggtagccccataagattatataacacctaaaacatttctatcaaccgcaatttagtagcagtagtaacaccatagtgcagcacattatttaagtgtttatggtgctggtgtaaacgtgctgcactttcagttgtataaaagtacaagacagcggccggggacggtggctcacgcctgtaatcccagcactttgggaggccaaggcgggcggatcacgaggccaggagatcaagaccatcctggctaacacggtaaaaccccatctctactaaaaatacaaaaaattagccgggcgtggtggtgggcgcctgtagtcccagctacttgggaggctgaggcaggagaatggcataaacccaggaggccgagctgacagtgagctgagatccggccaacagagcgagactctgtctcaaaaaaaaaa

SEQ ID NO: 86756 - DNA, 865 bp, Homo sapiens
  misc_feature (1)...(865): n = a,t,c or g
atttccagaggccatcagtgggatccatgaccaagaagatggtgaacagtgtaaatcagtttttcattgggacatgaaatccaaggataaggaaggtgcacctaacaggcagccactgtcaaatgagagagcctattggactggatatggggaagggaatgcttggtgcccaggagctctgccagaccccgaaattgtaaggatggttgaggctcgaaagtctcttggtgaggaatatacagaagactatgagcaacccaggggcaaggggagctttccagccatgatcacacctgcttatcaaagggccaagaaagccaaccagctggccagccaagtggagtataagagagggcatgatgaacgcatctccaggttctccacggttggcggatactcctgaagcttgctacggaggcaaggctggggcacagctttcaaagtgatgtgagatacacacaggactatgaacaacaaagagggaaaggcagtttccctgcgatgatcacacccgcctatcatatagccaaaagagccaatgagctggcaagtgatgtgaggtaccatcaacaatatcaaaaaaaaaaaaagggggggcccttttaaaagaacccttggggggcccaatttttaccggggttggaaaggtaaaatttttttctttataggggggcaaataaaaaccaccttgggaattttggaaaagaaccttttttttggggggggaacatattggcccaccctccctccaaaatttaaggcttttagggaaaaaaaaaatttttaaggggaaaagggggaaaaacaacctcaatatccttgctgttaaaaaaattttnnnnnnnnnnnnnnnancncccccccc

SEQ ID NO: 86757 - DNA, 428 bp, Homo sapiens
cttaactggaaagatgagtcccttcattcactattattttctaaaactgccttatttttagccatttcccatttcacataaattttagaatcagcttgtcaaattagaaggagaaaaaaaactttttggaatctcattgaagctgcactgaattatagattattttggaggacagacttctttatgatactgagctttcttttccatgaacataatagatctctccacttatttacaatttgcttatgtccttcaataaattgttcaaatttcctttcataaaagtcttacgaacttttgttgtagatagtcttaggaactttatgactttcttgatgttataaaatggtgttttctaaattacattttctaatcatttattattggtgtacagaaatgcaattagcatggttgcaaagggtagactc

SEQ ID NO: 86758 - DNA, 489 bp, Homo sapiens
agataaataaatttgtagacctctagctatactaaccaaggaaaaaaagaaaaatgatcctaataaaatcagaaatgaaaaaggataaattacaactgataccacagaaattcagaagattatcaaagactattatgaataactatacacaaataaactggaaaacatagagaacatggatgcatttctggaacataaaactgaccaagactgtatcaggaagaaatagaaaacatgaacaggccaaaaatcataatgagattgaatcagtaataaaaattaaaaagttgccaaaaaaagtatagctcaatactggatggcttcactgctaactgaactaacctgtaaagaactaacaccaattctcctaaactgttccaaaatattaaagaatagagaattctccctaagtcattctaggaagccagcattaacctgaagcctaaaccagacaaggagacaacaacaacaagaactgctggccaatat

SEQ ID NO: 86759 - DNA, 473 bp, Homo sapiens
  misc_feature (1)...(473): n = a,t,c or g
aatttgaaaaaatatataaggaacattagaaacacactgctaaataacttgtggttcacaggtgaacttataataaaaattacagattatttagatgggaacaataataaaaatcacagatatagaatatcaaaacatgtaagaacaatcaaaacagtacttagagaaaaaattgtagctttaaatgttaatattagaaaagtataatgtattgaaattgatgagactcatcatgagaagttagaaaaagaataacataataaagtcaaagaaaataaaggaaggaaataagattggaatttaataaactagaaaataaacatagaatgtagaaaaccaacagaatcaaacagtggttttgaaaagacgagttaaagtgataaacctctggcnagactgattaaataaacaaggaanaaattaacaagaatcagtgtctgtatccagccaaaatatattttaaaagcanagaa

SEQ ID NO: 86760 - DNA, 408 bp, Homo sapiens
  misc_feature (1)...(408): n = a,t,c or g
actggcataaggataaacatatagatcaatggaatagaattgagaattcagaaataaactctcacatttagagttggttgatttttgacaatagtgccaaggccattgaataggggaaataatagtattttaaagaaatgttgctgggacagctggatgtccacacacaattgaatacagctggaactctgtttcatatcacatacaaaaaaaaactcaatatgtatcaaaaccctaaaggtaaaagttacaactctcttagaagaaaacatagacatagtctttgggactggattaagcaaatggtttcttatatataacacctaaagtataagcaacaaataaaaaaattgataaattggatttcataaaaattaacaacttttgtatttcaaagagcaccagtgn

SEQ ID NO: 86761 - DNA, 3800 bp, Homo sapiens
ttttttttttttactgtttttacacagtttattcagaagtttaaaagttaaaatgtgggcattttcccctgaaacaaatcatcccctgccactccccaacacaaagactctcccaacaccgcagttccttctctttacccaggcttaccacacattcttgcaaaacacacaggagtcaacaccccaactatttggtaatacaaagagactacaaagtcacacaaaagaatctcatttacttccttttcactagcaggctatgaatgaaagactgagaggcaaacacatcaccttcatccagagttgacacttccctaaccttttttcttcctctaagaggttaaaatccaaagtagtttcactgacaactgtaactctgatattccatttttctcttctgaatggctaagctaggacatactttcctttcaaagctgatcttcagaacctcaagactggcagaaagcaggctcccagctgcagctcggccacaatactttgcaacaggcaaagttcccacataggtgcaaatgatgctttaagagttatcaaaacttttttaaaaaataatgcattaatatggagcctccacatttttctgacgaaattcctctaaaggtggtggcagctgtgaaacagaaggcactttgtgctaaaattcagagggtctctcaagagagaacgccacagcagagagacccaatccgcctaagttgcaggcgaccctttagggtggggaggagtatcccccaggaaggcatctgcaaaggaaaaaattgtaatcatgattccaaggcaaaatggctaaagttgggagagaagaaataccaagagagaagacaaaacatggctgtgccaaggactgaggagtgagctttacaaggacttgtcagctggctctgtacttctattgggctggttccttcaccatttccaaaggggttctggagaccttgcaggaacaggaacagcaccttagccaagagggttccaggcctcctgcctaggcctgggctctcctcgttaggttcccaggaataaattgagttcccattggcagcacttgcaggtattgctagtccacggcaagatctgtcttagggattttctggtacagccgtgaagagaaagtgagggttttccacataatccgggatttcttggcaatgcccaaagactttctgggccttctaagagcaacagtggatcaagctggtaacccccatcaacactcagaaaagcagcatgggtattttagatgggggacaggaggagataaatcaatggattgacagtctttatcttagtaccataaataaagtgcaccatgaatggaggctataagccactcgcctgaggctgaggtatgggtagaaactaccatcaccaccctcagggtggcggatcatttccttcagccagaatcctggctgctgagactgtctttattgctttatttccttagtactatggaacttttagctataaaggaaatacttggtgggcttggcagagagcgtgtcacaaaattacaggaactggctgatattcgatgactatacacgacaatctcaataatgttggatgatggctgtttttccccttcattctgatgaacttaggaaaactcaagttatttttaaaacacctatcaaattggctcatgatgcttctcttccaaagcaggatagctgtttatggccgacgtagtagaaatggttgtctttgtttacagtttttcagatgcattatggaagaaaatcctcttactaccacatttcaggagactttactatgacatattggtgggttccatcaacttcttggaagctcttcaagagtgtgagaggaaaagcatgatgttatacaaagaactctgctccacataggattccgtggcaagagtactattttgctgctttcatgtaggaaggtattgccccccttgcagtcaggccctcaaagcgcttgtacgtgtaattgatgaagacccagtctttgttcttgtagtcagtctcaggatgattacttgtggccactgttggcttaagaatatcagattctggaaactcatcgaagtttgaggtatcatcaatgcttttgatttcaatagatattgcagcaggtctctctctgatatgttcccagtcaacgccttcaaaaaaagagttactttttatttcctcaactccaggagctccaattctatgttcccattcacagcagaacctcaaaattagatccttggctttctcagagatgggaacttctggaggaaaagtcaaagtttctttccagttcatcaccttcttatatgtctcttgaggggtctcagaacagaaaggtgggtagccgatgagcatctcatacatgatcaccccaagcgaccaccaatcacagagcttgttgtacccggtctgcatgaacacctcaggagcaatgtagtcaggagtgcctactgtggagaaggctagctgacgtctatttcttttccaggtttctgctttccttttggaattcatgttctggaaagtgaaatcactggggaggctgtggttcagattcctataaaattctgtcctatgtgcttttttcagtcctgtgcaaagaccaaagtcagaaagtttcacatggcccttgctgtccaaaagaaggttgtctggtttgatgtctctgtggatgaatccaagttggtgaatagagtctatggctaatactgtttctgctatataaaactgagtctcctcttctgtcagagtgtcttttttcatcaacaaggtcatcatgtcccctccaggcaggaactccatgattaggtagaggtttagcttatcctgaaaactatagaacattttcacaacccacaaactgtctgcctccactagaatgtcacgctccgcacgaatgtggccaacctgctctttttcaagcatatctgctttacggagtattttcattgcatacacatgtcccgtatctttcttctgaacaagccgtacctcaccaaatgctcctctgcctattacttttaaggactcaaaatcttccaatccaagtcttgttctcttcaaacgaagaaactctgtttccttccgagcatgtgctgatctccggagtcgtttctcctcatcttttaggccttcttcttccatcaccttttctaacttcttttgtctcatttctcgttcttcatgttgagcgataaggttgctataaaaattctccagtgtcactttggtcattgtcaccctttcctttgtgtggttactcatggatgagcaaggtgttgagcctgtcattgccatggctgctagaaacaaagaaaagaagaggtgttagatttggagttagaatccacccattgtgcactctcctaccctattggtaggaatgtaaattggtgcaagttttctggaggacaaacaggtaatatgtaacaaaagccagagaaagagaatacttagtgaaaataaatataaattactgtcctatgacccagaaatcccacccctaggtataaagactaaagaaaccgtcacacaggcttctaaagtgacatacacaggatgttcagcacagagaggatgttcatcatgccttaatttgtgttatgggaagttggaggcacttaagtaagaaaataaagagctgtggctgcataggaaataccatgcaacaaccagaaaaccagaagcaactttacctgtacctgtaagtcacacaaatatatctttttttttctttttgagatggagtttcgctcttgttgcccaggctggagtgcgacaggatgatcttgg

SEQ ID NO: 86762 - DNA, 5116 bp, Homo sapiens
gagaaggaaggcatccagtgggaagctaaagaggacaattcggagggtgaggagatcctggaagaggttgggggagacctcgaagaggaggatgaccaccatatggaattctgtcgggtctgcaaggatggtggggaactgctctgctgtgatacctgtccttcttcctaccacatccactgcctgaatcccccacttccagagatccccaacggtgaatggctctgtccccgttgtacgtgtccagctctgaagggcaaagtgcagaagatcctaatctggaagtggggtcagccaccatctcccacaccagtgcctcggcctccagatgctgatcccaacacgccctccccaaagcccttggaggggcggccagagcggcagttctttgtgaaatggcaaggcatgtcttactggcactgctcctgggtttctgaactgcagctggagctgcactgctcaggtgatgttccgaaactatcagcggaagaatgatatggatgagccaccttctggggactttggtggtgatgaagagaaaagcccgaaagcgaaagaacaaggaccctaaatttgcagagatggaggaacgcttctatcgctatgggataaaacccgagtgggatgatgatccaccgaatcctcaaccacagtgtggacaagaagggccacgtccactacttgatcaagtggcgggacttaccttacgatcaggcttcttgggagagtgaggatgtggagatccaggattacgacctgttcaagcagagctattggaatcacagggagttaatgaggggtgaggaaggccgaccaggcaagaagctcaagaaggtgaagcttcggaagttggagaggcctccagaaacgccaacagttgatccaacagtgaagtatgagcgacagccagagtacctggatgctacaggtggaaccctgcacccctatcaaatggagggcctgaattggttgcgcttctcctgggctcagggcactgacaccatcttggctgatgagatgggccttgggaaaactgtacagacagcagtcttcctgtattccctttacaaggagggtcattccaaaggccccttcctagtgagcgcccctctttctaccatcatcaacttgggagcgggagtttgaaatgtgggctccagacatgtatgtccgtaacctatgtgggtgacaaggacagccgtgccatcatccgagagaatgagttctccctttgaagacaatgccattcgtggtggcaagaaggcctcccgcatgaagaaagaggcatctgtgaaattccatgtgctgctgacatcctatgaattgatcaccattgacatggctattttgggctctattgattgggcctgcctcatcgtggatgaagcccatcggctgaagaacaatcagtctaagttcttccgggtattgaatggttactcactccagcacaagctgttgctgactgggacaccattacaaaacaatctggaagagttgtttcatctgctcaactttctcacccccgagaggttccacaatttggaaggttttttggaggagtttgctgacattgccaaggaggaccagataaaaaaactgcatgacatgctgggggccgcacatgttgcggcggctcaaagccgatgtgttcaagaacatgccctccaagacagaactaattgtgtcgtgtggagctgagccctatgacagaagaaatactacaagttacatcctccactcgaaatttttgaaggcactcaatggcccgaggtggtggcaaccaggtgtctctgctgaatgtggtgatggatcttaagaagtgctgcaaccatccatacctcttccctgtggctgcaatggaagctcctaagatgcctaatggcatgtatgatggcagtgccctaatcagagcatctgggaaattattgctgctgcagaaaatgctcaagaaccttaaggagggtgggcatcgtgtactcatcttttcccagatgaccaagatgctagacctgctagaggatttcttggaacatgaaggttataaatacgaacgcatcgatggtggaatcactgggaacatgcggcaagaggccattgaccgcttcaatgcaccgggtgctcagcagttctgcttcttgctttccactcgagctgggggccttggaatcaatctggccactgctgacacagttattatctatgactctgactggaacccccataatgacattcaggcctttagcagagctcaccggattgggcaaaataaaaaggtaatgatctaccggtttgtgacccgtgcgtcagtggaggagcgcatcacgcaggtggcaaagaagaaaatgatgctgacgcatctagtggtgcggcctgggctgggctccaagactggatctatgtccaaacaggagcttgatgatatcctcaaatttggcactgaggaactattcaaggatgaagccactgatggaggaggagacaacaaagagggagaagatagcagtgttatccactacgatgataaggccattgaacggctgctagaccgtaaccaggatgagactgaagacacagaattgcagggcatgaatgaatatttgagctcattcaaagtggcccagtatgtggtacgggaagaagaaatgggggaggaagaggaggtagaacgggaaatcattaaacaggaagaaagtgtggatcctgactactgggagaaattgctgcggcaccattatgagcagcagcaagaagatctagcccgaaatctgggcaaaggaaaaagaatccgtaaacaggtcaactacaatgatggctcccaggaggaccgagattggcaggacgaccagtccgacaaccagtccgattactcagtggcttcagaggaaggtgatgaagactttgatgaacgttcagaagctccccgtaggcccagtcgtaagggcctgcggaatgataaagataagccattgcctcctctgttggcccgtgttggtgggaatattgaagtacttggttttaatgctcgtcagcgaaaagcctttcttaatgcaattatgcgatatggtatgccacctcaggatgcttttactacccagtggcttgtaagagacctgcgaggcaaatcagagaaagagttcaaggcatatgtctctcttttcatgcggcatttatgtgagccgggggcagatggggctgagacctttgctgatggtgtcccccgagaaggcctgtctcgccagcatgtccttactagaattggtgttatgtctttgattcgcaagaaggttcaggagtttgaacatgttaatgggcgctggagcatgcctgaactggctgaggtggaggaaaacaagaagatgtcccagccagggtcaccctccccaaaaactcctacaccctccactccaggggacacgcagcccaacactcctgcacctgtcccacctgctgaagatgggataaaaatagaggaaaatagcctcaaagaagaagagagcatagaaggagaaaaggaggttaaatctacagcccctgagactgccattgagtgtacacaggcccctgcccctgcctcagaggatgaaaaggtcgttgttgaaccccctgagggagaggagaaagtggaaaaggcagaggtgaaggagagaacagaggaacctatggagacagagcccaaaggtaaaggtgctgctgatgtagagaaggtggaggaaaagtcagcaatagatctgacccctattgtggtagaagacaaagaagagaagaaagaagaagaagagaaaaaagaggtgatgcttcagaatggagagacccccaaggacctgaatgatgagaaacagaagaaaaatattaaacaacgtttcatgtttaacattgcagatggtggttttactgagttgcactccctttggcagaatgaagagcgggcagccacagttaccaagaagacttatgagatctggcatcgacggcatgactactggctgctagccggcattataaaccatggctatgcccggtggcaagacatccagaatgacccacgctatgccatcctcaatgagcctttcaagggtgaaatgaaccgtggcaatttcttagagatcaagaataaatttctagctcgaaggtttaagctcttagaacaagctctggtgattgaggaacagctgcgccgggctgcttacttgaacatgtcagaagacccttctcacccttccatggccctcaacacccgctttgctgaggtggagtgtttggcggaaagtcatcagcacctgtccaaggagtcaatggcaggaaacaagccagccaatgcagtcctgcacaaagttctgaaacagctggaagaactgctgagtgacatgaaagctgatgtgactcgactcccagctaccattgcccgaattcccccagttgctgtgaggttacagatgtcagagcgtaacattctcagccgcctggcaaaccgggcacccgaacctaccccacagcaggtagcccagcagcagtgaagatgcagactgataccacctccaccgctgagcagtgaccttcctcactttctcttgtcccagcttctcccctgggggcctgagagaccctcaccttccttctgcccatcttccatgttgtaaaggaacagccccagtgcactgggggaggggagggagtgaggggcagtggtgcccttcctgcagaagagacatgcagcagtagcgctggcgccatctgcaggagctggcgggctggccttctggaccctggcttctccccactgtaacgcctgttacacacaaactgttgtgggttcctgccaggcttgaagaaaatgatctgaattttttcctccttttggttttattttgttggtttattttgtgttttcttttctcctttttggggggtattcagagtgggctgggcccctgggcgagacacagctacctctgttggcatctttttaataccaggaacccagcggctctagccactgagcggctaaatgaaataaagtggaaaaaaaaaaaaagggaaaaacccaaagccttaaaaacccccagcaaattttttgatgaaaattgaaaaaaaaagtttccttgtaaaaaaaaaa

SEQ ID NO: 86763 - DNA, 6807 bp, Homo sapiens
cggacgcgtgggattgagaaacgatttgcctatagtttcctccaacaactcattcgctatgtggatgaagcccatcagtatatcctggagtttgatggtggcagcagaggcaaaggagaacatttcccttatgaacaagaaatcaagttctttgcaaaagtcgttcttcctttaattgatcagtatttcaaaaaccatcgtttatacttcttatctgcagcaagcagacctctctgctctggaggacatgcttccaacaaagagaaagaaatggtgactagcctattctgcaaacttggagttcttgtcaggcataggatttcactatttggcaatgatgcaacatcaattgtcaactgtcttcatattttgggtcagactttggatgcaaggacagtgatgaagactggcctggagagtgttaaaagtgcactcagagcttttctggacaacgctgcagaggatctggagaagaccatggaaaacctcaagcagggccagttcactcacacccgaaaccagcccaaaggggttactcagattatcaattacaccacagtggccctgctgccaatgctgtcgtcattatttgaacatattggccagcatcagttcggagaagacctaatattggaagatgtccaggtgtcttgttatagaattctgactagcttatatgctttgggaaccagcaagagtatttacgtggagaggcaacgttctgcattaggagaatgtctagctgcctttgctggtgcttttcctgtagcatttttggaaactcatctggacaaacataatatttactccatctacaataccaagtcttcacgagaaagagcagctctcagtttgccaactaatgtggaagatgtttgtccaaacattccgtctttggagaaactcatggaagaaatcgtggaattagccgagtccggcattcgctacactcaaatgccacatgtcatggaagtcatactgcccatgctttgcagctacatgtctcgttggtgggagcatggacctgagaacaatccagaacgggccgagatgtgctgcacagccctgaactcagagcacatgaacacacttctagggaacatattgaaaatcatatataataacttggggattgatgagggagcctggatgaagaggctagcagtgttttcccagcctataataaataaagtgaaacctcagctcttgaaaactcatttcttgccgttaatggagaaactcaagaaaaaggcagctacggtggtgtctgaggaagaccacctgaaagctgaggccaggggggacatgtcggaggcagaactcctcatcctagatgagttcaccacactggccagagatctctatgccttctaccctctcttgattagatttggggactataacagggcaaagtggctaaaggagcctaacccagaagcagaggagctcttccgcatggtggctgaagtgtttatctactggtcgaagtcccataatttcaaaagagaagagcagaacttcgttgtacagaatgaaatcaacaatatgtctttccttattactgataccaagtcaaagatgtcaaaggcagctgtttctgatcaggaaaggaagaaaatgaagcgcaaaggagatcggtattccatgcagacctctctgattgtagcagctctgaagcggttactgcccattgggttgaacatctgtgcccctggggaccaggagctcattgctctggccaaaaatcgatttagcctgaaagatactgaggatgaagtacgagatataatccgcagcaatattcatttacaaggcaagttggaggatcctgctattagatggcaaatggctctttacaaagacttaccaaacaggactgatgatacctcagatccagagaagacggtagaaagagtattggatatagcaaatgtgctttttcatcttgaacagaagtctaaacgtgtgggtcggagacattactgtctggtggaacatcctcagagatctaaaaaggctgtatggcataaactactgtctaagcagaggaaaagggctgttgtagcctgcttccggatggcccccttatataatctgccaaggcatcgggctgtcaatctctttcttcagggatatgaaaagtcttggattgaaacagaagaacattactttgaagataaactgatagaagatttagcaaaacctggggctgaacctccagaagaagatgaaggcactaagagagttgatcctctacatcagctgatccttctgtttagtcggacagctttaacagagaaatgcaaactggaggaagattttttatatatggcctatgcagatattatggcaaagagttgtcatgatgaggaagatgacgatggtgaagaggaagtgaagagttttgaagaaaaagaaatggaaaagcaaaagcttctataccagcaagcccgactccacgatcgtggcgcggctgagatggtgctacagacaatcagtgccagcaaaggtgaaactggaccaatggtagcagctactctgaaacttggaattgctattttaaatggtgggaactccacagtacagcagaaaatgcttgactacctcaaggagaaaaaggatgtgggcttctttcagagcctggccggcctgatgcagtcatgtagtgtccttgacctaaatgcatttgagcgacaaaacaaagctgaaggtcttgggatggtgacagaggaaggatcaggagaaaaggttctgcaggacgatgagttcacctgtgacctcttccgattcctgcaactactctgtgagggacacaactcagattttcagaattatctgagaactcagactggcaataatacaactgtcaacataattatctccactgtagactacctactgagagttcaggaatcaattagtgacttttattggtattactctgggaaagatgttattgatgaacaaggacaacggaatttctccaaagctatccaagtggcaaaacaagtctttaacactcttacagagtatattcagggtccttgcactgggaatcaacagagtttggcacacagcaggctgtgggatgctgtggtcggctttcttcatgtgtttgcccatatgcagatgaagctgtcgcaggattccagtcaaattgagctattaaaagaattaatggatctgcagaaggatatggtggtcatgttgctgtccatgttagaaggtaatgttgttaatggaacgattggcaaacagatggtggatatgcttgtggaatcttccaacaacgtggagatgattctcaaattttttgacatgttcttaaaactaaaggatttgacgtcgtctgatacttttaaagaatatgaccccgatggcaagggagtcattttcaagagggacttccacaaagcgatggagagccataagcactacacgcagtcagaaacggaatttcttttgtcttgtgcggagacggatgagaatgaaaccctcgactacgaagagttcgtcaaacgcttccacgaacctgcgaaggacatcggcttcaacgtcgccgtccttctgacaaacctctctgagcacatgcccaacgatacccgacttcagacttttctggaattagcagagagcgtcctgaattatttccagccctttctgggccgcatcgaaatcatgggaagcgccaaacgcatcgagagggtctattttgaaatcagtgagtccagccgaacccagtgggagaagccccaggtcaaggagtccaaaagacagttcatatttgacgtggtcaacgaaggcggagagaaagagaagatggaactctttgtgaacttctgcgaggacaccatctttgaaatgcagctggcggctcagatctcggagtcggacttgaacgagaggtcagcgaataaggaagaaagcgagaaggagaggccggaagagcaggggccgaggatggctttcttctccattctgacggtcaggtcggccctgtttgcgctcaggtacaatatcttgacccttatgcgaatgctcagtctgaagagcctgaagaagcagatgaaaaaagtaaaaaagatgaccgtgaaggacatggtcacggccttcttttcatcctactggagtattttcatgaccctcttgcacttcgtggccagcgttttcagaggctttttccgcatcatttgcagcctgctgcttgggggaagcctcgtcgaaggtgctaaaaagatcaaagttgcagaactgttagccaacatgccagaccccactcaggatgaggttagaggagatggggaggagggagagaggaaacccctggaagccgccctgccctccgaggatctgaccgacttaaaggagctgacagaggaaagtgaccttctttcggacatctttggcctggatctgaagagagaaggaggacagtacaaactgattcctcataatccaaatgctgggctcagtgacctcatgagcaacccagtccccatgcctgaggtgcaggaaaaatttcaggaacagaaggcaaaagaagaagaaaaggaagaaaaagaagaaaccaaatctgaacctgaaaaagccgagggagaagatggagaaaaagaagagaaagccaaggaagacaagggcaaacaaaagttgaggcagcttcacacacacagatacggagaaccagaagtgccagagtcagcattctggaagaaaatcatagcatatcaacagaaacttctaaactattttgctcgcaacttttacaacatgagaatgttagccttatttgtcgcatttgctatcaatttcatcttgctcttttataaggtctccacttcttctgtggttgaaggaaaggagctccccacgagaagttcaagtgaaaatgccaaagtgacaagcctggacagcagctcccatagaatcatcgcagttcactatgtactagaggagagcagcggctacatggagcccacggtgcgtatcttacctattctgcacacggtcatttctttcttctgcatcattggatactactgcttgaaagtcccattggttatttttaagcgagaaaaggaagtggcacggaaattggaatttgatgggctttatattacagaacagccttcagaagatgatattaaaggccagtgggatagactcgtaatcaacacacagtcatttcccaacaactactgggacaaatttgttaaaagaaaggttatggataaatatggagagttctacggccgagacagaatcagtgaattacttggcatggacaaggcagctctggacttcagtgatgccagagaaaagaagaagccaaagaaagacagctccttatcagctgtactgaactccattgatgtgaagtatcagatgtggaaactaggagtcgttttcactgacaactccttcctctacctagcctggtatatgactatgtctgttcttggacactattaacaactttttttttgccgctcaccttctcgacattgctatgggattcaagacattaagaaccatcttgtcctcagtaactcacaatggcaaacagctcgtattaaccgttggcttattagctgttgttgtatacctatacactgtggtggcattcaattttttccgaaaattctacaataaaagtgaagatggtgatacaccagatatgaaatgtgacgatatgctaacatgctatatgttccacatgtatgttggagttcgtgctggaggagggatcggggatgaaatcgaagacccagcaggagatgaatatgagatctatcgaatcatctttgacatcactttcttcttctttgttattgtcattctcttggccataatacaaggtctaattattgatgcttttggagaactaagagaccaacaggaacaagtcaaagaagacatggagaccaaatgcttcatctgtgggataggcaatgattacttcgacacagtgccacatggctttgaaacccacactttacaggagcacaacttggctaattacttgttttttctgatgtatcttataaacaaagatgaaacagaacacacaggacaggaatcttatgtctggaagatgtatcaagaaaggtgttgggaatttttcccagcaggggattgcttccggaaacagtatgaagaccagctaaattaaactcagacccaatcacctctaaaaaccaaaaccctacccctctctctccctctctcaatttctctgctctcttggaaacattttgctgattttgtgaattgccagcgttgtgtgttttctgggagcatcgaagctctgtttcggaagagctgtttcctccccccaccttttgtatttactttgagactaaagactgaagaataatctaaattcatactcagacaaaaaaaggaattctggaaagaaaaccattctggacactgtcataacacacatagatagattttcttctgagactcccggagtcttctcgagctacgagaccttcacagagacacgtggcagccacactcacccagcctctttatttcaccatcctggaaggaaactgtctgtctaatggtcacagagcactgtagcacttaacagattgccatggacaccagttgcgaagggaaatagtgccttactatatgtgggttgagctatgcagaagatacgtgcatgaaaaaacatctttattttctttatgtcgacctttcttttcttagattgattttgtgaggttttttttttttcctttagccttttctttagggggggagggtaaaaaaagcagtttgcccttaaaaaaaaaa

SEQ ID NO: 86764 - DNA, 473 bp, Homo sapiens
  misc_feature (1)...(473): n = a,t,c or g
cgatgccnccactgagatcccagtccagtgcggcggaattcgaggaagaccaggtctagcatcacagccccgtcgtcctgagcctggccaagctgtgacttgggtttgtgtggaacagtagggagcagtggggcctgcagtgggtagggaggcggccgtcttgcgtggggtggctctgagctgttcctgcaggtgcaggggagcccccatgacttctcggtgccctgagattccagatcccagtgcagattctagggtgcagcacgaggtgcggcaaagaagcccgggggtgtcctgccaggggatgtcctgcttgggggtgctcggcccgggggtgcttggcccaggggtgtcctgcctgggggtgcccagccccgggggtgcctggcctgggggtgctcagctcagggtgcactgatcatgtatgaggaggccggcactcangggcactgggccactccccgccccattag

SEQ ID NO: 86765 - DNA, 4199 bp, Homo sapiens; identical to SEQ ID NO: 73225

SEQ ID NO: 86766 - DNA, 1465 bp, Homo sapiens
agcccatggactctgggtccccgaaggacatctcaggaaccccctagttctctactttgagacatatgcggtggctggggtcactctgagaagtgtcactttggacttgtcccttgcgttgggtgatggagtcagacaccaccagcagtggatggccaagcttcaagggcaccttcttagcagctctgtgggctgtgggcaaaagactttcctgttctcccttctccatattagggacccagggaagtgcttgctgcttccagcctcgctgatggctctgaggagcaggtgatggctgtggcattggtgagagaaagggacctgtcatttccaggggtgggtgatgctgtggtaaaccccacaaggtggcacttgcctgcccagcctgagatgctgtatgagggcggtgagggaaggatggagacgctgaaggataagaccctgcaggagctggaggagttgcagaatgactcggaggcgattgaccagctggccctggagtcccctgaggtccaggacctacagctggaacgggagatggcactggccaccaaccggagcctggcagagcggaacttggagttccagggtcccctggagatcagccgctcaaacctctcggatagataccaggagctccggaagctcgtggagcggtgccaggagcagaaggcaaagctggagaaattttcttcagcactgcagccagggaccttgttagaccttctgcaggtggaaggcatgaagatcgaagaagagtccgaggccatggctgagaagttcctggagggcgaggtgcccctggaaacgttcctggagaatttttcctccatgaggatgctgtcccacctgcgccgggttcgcgtggaaaagctccaggaagtggtgaggaagcccagggcttcccaggagctggccggcgatgcccctccaccccgttcaccacccccggtgcgcccagtcccccagggaacaccccctgtggttgaagagcagccgcagccaccattagccatgcctccctaccctttgccctacagcccatcccccagcctgcctgtgggccccactgcccatggagccctgccaccggcccctttcccagtagtgtcccagccctccttctacagcgggcctctgggccccacttacccggcagcccagcttggacccaggggtgctgcgggttactcctggtccccacagaggagcatgccgcccctccctatgggttcccaccaccgccggggcctgcctggcctgggtattagacacactcctggccctcggcccctccctagtcccacccacgctcaacctttggcccagccatcgccgagattcgagggtcaactggaagtggcgttggtgctccctgtggacttgcgtcggcctacgtgccatccgcgtgacgctaggtcagcgctgccgggtctttaccaaatgtgcttgcttctcctaagat

SEQ ID NO: 86767 - DNA, 476 bp, Homo sapiens
  misc_feature (1)...(476): n = a,t,c or g
aganagaacctgataacantggnaactgatngccatagntagagcctactganacagcaccagattgtcaccgctatgcctcctttcactctgggagtcttccagaggtcttgcactctggagagcatgctcaggtttccccagctctacaaaatcacccagaatgccaaagacttcaacacaagggtaaataaggttgatctcagaattgtcacctcaaaaaggccctgccttccactgctgagttgtgggcaactgactatgatagattgacggcatttactagaacgctggagggacgcgtgaaaactttgcatcctgcaagccatgctggaatgctagctcgtaatattacagaggataatgctgacatggncaaacttgaatataatcttataagagttgttgtctgcaatctctatccctttgtagagacagtggcttatccaggcgtaactgttgaagaagctgtgnag

SEQ ID NO: 86768 - DNA, 516 bp, Homo sapiens
  misc_feature (1)...(516): n = a,t,c or g
actgagatcactaggccgagtggtggaattcgttcgactttggaagccaggaggtgaagggccccgctgcgcaagaccagcggttctgcgagtttccggaaagggtgacgggggaagggcagaccccatgccctgggtggtggggagctgacagggcaggggcccttggctgagcccaccccgctggctcccagatcagggtgggcctgaggcaggcagccgacctgaggcctgggggcaccgtggacccctatgcccgggtcagcgtctccacccaggccggacacagacatgagacaaaagtgcaccgaggcacgctctgccccgtgtttgacgagacctgctgcttccacatcctgcaggcggagctgccaggggccaccctgcaggtgcagcttttcaacttcaagcgcttctcggggcatgagcccctgggtgagctccgtctgccactgggcaccgtgggatctgcagcatgttctggagcactggtacctgctgggcctgtcngctgtc

SEQ ID NO: 86769 - DNA, 2081 bp, Homo sapiens
tttcctctcccgcatttttttccccccgcccgtttaaaatttattgtcgtgcccaccaaaaaacatatatctttacccgggcggggtggaggcattttttttttattcggcccccccccccctaatattatctggttttttgcttcgttttgtgtgtgtgtgtgtttgtatacatttaactttgccttgacaagaaccggtttatttggagtctctgaccgggtgacgccctctcccaaggacaggctgctggggatgggtgtggtgctggtgggggccttctgcctggctgggagcgggggcggctgccctgccctcgctgccaccctctgccctccctgactctggggatctcctcttctctgtgctggtggctgcctgggcctcttgcccccatctcggcacaggtttccgtgccctcctcgcccctgatgggtctggtcgagcgcctgctctgtggcttcatctgcagggttctgggcccagcagggctggggccaagttcaggggctgggaggtgttggacagtgggcaggggtggtcgggagtgccctgtgtgcctgggaggtccgtgaccactgtccgcctcagtccctctctgctggctcagggtctgcaggagtgtggtagtctgagcccctgcttggcagcccctctccaaccggtgccccagggagccacggcccagggcacttgggggccaggcctggtgaccaggaaagcagctgctggcacaagcgggaagggggctggtgggtgttttcctgtctgtcatctgcagtccttcagccccaggagagcaggcagcgaccctgctagtctccacaggccacagagctgcacacgcagtggctgaacacctgcagggtgagtacgagccgccggccaggcgtgctgggatcggggcagggcagctccagctgctgctcataggagtggagggggcggcagcagctgcagcgggcatccacctgctgggtgatgatgttgaagctggcagcggaaatgcaggcgccctcacagcgggttaccgtcacgttcgccatgcaccccttgaacgtgatctcctcctgctgctcccgcacactgcagaccccgggtgaggtgggcgtaggtgtcccgagagaagataccggggcagaagcaggggtgcttccatgggcagtgagggagctggtcaggaaccgtgtggtaggcgacaaggtgggaccagggtgcctggtggtaaggttggtgactggagaggtggggatacccgtcacccccgaggtgagtgacacaaagcctgatgtgggaactcgggtggtgagagaagtggaccgcgaggtggtggactgagaggagaaggcaggggcggtgtgggtgctggccgtggtcctgggcgtggacggaaatgcaatggtgctggaggctaggtggctggatggggtgggagacacggtaacagtggatatggggagtagagcagagagggtgaaaggagaggagatagtgtgggggagagtggccctaatggtagtagaggcagctggagaagaaggaaaaagaggagatgcagaccctgatccagtcgtgggatgagtggacaatgaggagtgtgaccccgagctcagggttgtggagtgcacgggggcggacacgaaagaggaagatgtgccaacagaaggcgatgaagtctggggagaggagtgggaggagggcacataagaagaaacagtagagggggcagaaggactgggagaaaatgaggaggacagctgattagttgtggaaacaggagtggttgcagaactcaagtgggggagttgtgtggtgataggtgatgacggtggccttgagctagagttctgaggcagccaagacgaccaagacgaggaggatatgaaggaagaagaggctgtagctgtgctgaatgagctgtgggtttggctggtcccactggtggtcactgtcattggtggggctgtgtgggtggaccctgtggccttgagcgttgttggtggaggaacggtgcctgttggcgttgagtggatggaggcagaagtggccatctgtgtgtgggtagtgatgatgactgtgtg

SEQ ID NO: 86770 - DNA, 871 bp, Homo sapiens; identical to SEQ ID NO: 66029

SEQ ID NO: 86771 - DNA, 880 bp, Homo sapiens
gctggtctcgaactcctgaactcagatgatccacccgccttggcctcccaaagtgctgggattacaggcgtgacacgcacgcccagcctgtttttctgagacacggttttgctctgttgctcaggctggagtgcagtggcaccatctcggctcactgcagccttgttctcctaggctcaagcagtctgcctcagcctcccgaggagctgggactacaggcgttggcaccacacccagctaatttttgtattttttgtagagatgaggtctcgctagttgccaaggctggtctcaaactcctggactcaagcgatcctcctgcctcggcctcccaaaatgctgggattacaggtgtgagccactgtacctggcctccctttgtgctcttgatctcagggtcttctctgggctctccatgtaccagttacctccgatgggtgaaggtcgggttggggcatccccggggagcaccacttttgcactcggcaggctgtttcccagcgctccatctgctccgtcccacagcagaccgatccatgagcagctccctctcagcctctcagctccacacggtcaacatgcgggaccctctgaaccgagtcctgggtgagttccccacccctgctgccgaacctggggctaagctggacgagtccctcttctcatggaggctgggagaccttgtcagctggaaggggccttgcggtgcccctcccttccctctccatgcccctcattgttggctgtcctggcccccaggctcctgtctagttccccctcctcccctccccaattgccttttatattttctctctctgacaccccattttggggacatgctcagcatgtggttcttttcccttttcagtcccaccatctc

SEQ ID NO: 86772 - DNA, 487 bp, Homo sapiens
  misc_feature (1)...(487): n = a,t,c or g
aggggacaannntttgannnccctcgtagaacactagtcagtgtggtggaattcgggcagtaagaggaagctgtcgacactcaacatctggctgcaagagcacagctacaaccctggagagctgtggggggacatcgaggacatcatcatcaaaaccatcatctcagcccattctgttctacgccacaactaccgaacctgttttccccagtatctgaatggaggtacatgtgcctgttttgaaatccttggttttgacatcttgctggaccacaagttgaagccctggctgctagaggtaaaccactctccaagctttaccacggactcatgccttgatcaagaagtaaaggatgcacttctctgtgatgctatgacccttgtcaacctccggggctgtgacaaaaggaaggtgatggaggaggataagcggcgagtcaaggaacggctnttccagtgctaccgacagccacgagaatctaggaan

SEQ ID NO: 86773 - DNA, 826 bp, Homo sapiens
atgagaccatagcaatggagggcattcccgaagtccttgctcccgctcctgcggaggaggtgtggtcaccaggaggcggcagtgcaacaaccccagacctgcctttggggggcgtgcatgtgttggtgctgacctccaggccgagatgtgcaacactcaggggatgctctgtgcagacacatgtgccgggccattggcgagagcttcatcatgaagcgtggagacagcttcctcgatgggacccggtgtatgccaagtggcccccgggaggacgggaccctgagcctgtgtgtgtcgggcagctgcaggacatttggctgtgatggtaggatggactcccagcaggtatgggacaggtgccaggtgtgtggtggggacaacagcacgtgcagcccacggaagggctctttcacagctggcagagcgagagaatatgtcacatttctgacagttacccccaacctgaccagtgtctacattgccaaccacaggcctctcttcacacacttggcggtgaggatcggagggcgctatgtcgtggctgggaagatgagcatctcccctaacaccacctacccctccctcctggaggatggtcgtgtcgagtacagagtggccctcaccgaggaccggctgccccgcctggaggagatccgcatctggggacccctccaggaagatgctgacatccagtgtgtaaaaaagcagattcccgggtcctctgcatattccctgaatcaggacttccctgtgttgggcctgagaaaccgcaccgtaaccaacacaggcttgcggcactggccagatgtgggcatcgagggggcag

SEQ ID NO: 86774 - DNA, 467 bp, Homo sapiens
agctgctcccattgattccctactcagtgtggtggaattcggcagggcgggccaggtgggcggggcctgggcttagagcggacaggacgggaaagcgctggggcaaattccagttcctgtcctggagagggctgctatgagctgggaggccctaagactccgaggccgggtctggctggtgggaggtttaggattaggggcggggctcgagcctaactgatctgcggcctccaaacagcgtctggaggagatcatgaagaggactcggaagtcagaagtttctgaaaccaaggtcagaattcccccgaagggcagtgctgggcgtggggggcagggtgtgaaaaggaggctgcggaaaggcatccatggccacggagagcgaggctgtcagggaggccgctgcggcccgggcaaggggagggccgaactcagtccgaagtggctggggccggctgtcccttgagcct

SEQ ID NO: 86775 - DNA, 433 bp, Homo sapiens
  misc_feature (1)...(433): n = a,t,c or g
aattttcatttcctatatgatccagccattctacgcctaggcatttatccaacaggaaaggaaatgcgtgtccttaggaagacttgtacacgaatgttcacagaagtttatttttaacagccccaaatagaaaacagtttacatgtccatggacagatgcgtgataaacaatggtggtgcatccatgagatggaacaccactcagcaatagaaggaatgagctacttacatatgcaacaaaatggataatctcaaaataattatgctgagtaaaataaaccagatcacaaaagagtacactcaaatgtgtcactgcatttatatacaactgttagaaaatccaaactaatctgtatatataacagaaagcagattggcggtggtttgaaagcagggcagagagaattccnccncgcgagtgagacgacgtcat

SEQ ID NO: 86776 - DNA, 805 bp, Homo sapiens
ccgcgtggtggaattcgtctcgggggtggcccagctgaccgcaggctcccacactctccagagcttcacctccctggccgacgctgccctcctagtgctgggccagagcctggaggaccttccgaagaagatggccccacttcagccccctgacactctagaagaccccccgggttttgaggccagcgatgactaccccatgagcagggaggagctgctgagccaagtggagaagctggtggagctccaggagcaggcggaggcgcagcgccagaaggacctggccgccgccgccgcgaagctggacggcaccctgagcgtggacctggccagcacccagagggccggctccagtaccgtcctggtgcccaccaggcacccccatgccatccccgggtccattttgagccacaagactagcagagaccgtggctctcttggccacgtcacttttggcggcctcagctccagcactgggcatttgcccagccacatcacgcacggtgaccccaacactggccacgtgaccttcggctccaccagtgcctcgagtgggggccacgtgaccttcagacccgtcagcgccagcagctacctgggctccactggatacgtggggtccagcaggggcggagaaaacacagagggtggctctccacgcatcctgtgtccctgtctctgtagctccttactccccaagagccccccagtgctgacaggtgtgggaaaagtcagggcgaagacgccaggttcagcatgggaaaatgggactgtggaaataaagtatatgtgtggaaaaaaaaaa

SEQ ID NO: 86777 - DNA, 1200 bp, Homo sapiens
cgcttctccttctcccccggccccctagatggcccttccctgacctagaaagagggagacagagtttcataggggaggcaaaatggagactccgtggcttgggggtggggggaatggaggcccaaagggtaggaaggagacctagaaagaggggtgagatggagacccagggagaagtagtggcaaagaaagatggtgagatggggccttgcaaggctataaccaaattcaaatcctggctctgctagttactaatggggtgattgggcaagtcatttaacctctctgtgatcttgggaaaatcacttaacttctttgggccttactctccttatggacaaaaaggggatgacaacaggcctggcacacagggtgtttttcaggattatgaaagttaataaaactgctgaggtcaatattttgcacataataagtgctcaataaaaattagccttcactcctattatagcatacatattgtgtgcaaccagatggactggctggggcagtgattaaaatgacttattctactcttccccccacccgcccagggaggcccctgcctcttggttctcaggcacattgagccctggaagggcctcctgcagttggctgtcaatgctgctcctcacttacctctcctccacagagctgaaggtcaggcccaggacagtgagacctgactccttgctcctaccagcctactatggcttaagacccagggccagggtcccgttgatgtaacagagcagaggaccagcagatgaatggacaccttgaagcagaggagcagcaggaccagaggccagaccaggagctgaccgggagctggggccacgggcctaggagcaccctggtcagggctaaggccatggccccgcccccaccgccactggctgccagcaccccgctcctccatggcgagtttggctcctacccagcccgaggcccacgctttgccctcacccttacatcgcaggccctgcacatacagcggctgcgccccaaacctgaagccaggccccggggtggcctggtcccgttggccgaggtctcaggctgctgcaccctgcgaagccgcagcccctcagactcagcggcctacttctgcatctacacctaccctcggggccggcgcggggcccggcgcaaagccactcgcaccttccgggcagatggggccgccacctacgaagagaa

SEQ ID NO: 86778 - DNA, 1337 bp, Homo sapiens
acaggaacactcattccttatgctcaatgactttttctcactcctacatgctatcaacataaggaggagtgccccagggggctgaccttagcgggaggaacgacaggctctccaccgatcccattcttaccctggaccaggtctcacctgcggcttggggaagtcacagaaagacaagtttcgtacaaccccagaccttttcttttggtagtcaacaattggtcacattgcacatttcaaggttacagaggcccaccatacacatgcggggcaggaggagataaatcttgcttggggctaaacaataaagctacagcgagtgttccagaagttgaccacatctggaagcaagaagacagactctggaagaagcaccctagagactccaggaacccccttcactcctgggctttcgggactctacagcgtggggcctctttctcagacatcgaaaggcctccttttctggaccacagtggagcgatgtgcaggtcatcggctaagctgggcgggtcggggagggcagggggagtacagttccttcggatcccagcaaaggtagactatcaatggccaagggttcagaggcaggaaaaaaaggccgtttctggggggttggctggggacactccccttcccttctctctccgattaaatataaaagccgatgatgatgaagattgaaaagatgaggaaaatggcagccgtgtctcgggtatcctcccagcggaggcctttcatggaccgatactcctgccgtttgcgaagggcctcccgccgggccctcaggcgccgttcccgctccagttgttccccatagtgggcctggtagaaggcgtcaaagttgaacatcgtgcggttggcgccgggggaggcccgagaaccgtcgtgggtccgagaggtgggcggcggggtacgcggcgagccggggtcgggtgccgggcgtcctggagggcccgaacgccaggtccgcgcaggtcctcgtcgctgagtaggccgcgatcatacttgcgacggagggtggcactgcccagcaccacgtaggcctgggagatgcgcgtgaagcgctcggcggcctccgcgctcccggagttgcggtccgggtggtagagaaagcactgacggtagtaagccgccttgatttgggcctgcgtggctgtggaggggacgccgagcagatcatagcagcgccgtgcgcgaatacgagcagtcgccctgggaataagtcctcgctcctaggcccaggctgggtgcagaattttgtggaaagccacgggcctgcagcaacctccaaggtaacagccgctgccaccatcgccagcgcatggctgccatgt

SEQ ID NO: 86779 - DNA, 1226 bp, Homo sapiens
ttttttttttttttactcatttttagggctttttatgtggccttcaaagcacgttgcaaacaaatccctttcactcctcagaggaggagccattaggaaggtagggggcgacaggcacagcctacagcctctcctcaggaggacagagggggtcattgcatttgagccccctgccagtcatcttcgggggctcctgagggtccaggtccaacatgtttcgagggtctgcagcacatccacgggcgctgtaggacttccaggcctgcatgttacagctcttcaggatggctcccaagctgcctgccaagggcctacttcgaaagtttgggggaacccccttgcccttttttcctttcgtatatggcatgcatcgtcttgctcccactttcacttggggagaccaagctgctgggccaagcaactttgttggatgttgcccgggaatgcctgtaatctaatgcgcgtgggacgttgggagtagacagaaaccagaggcttcttaatgtcgactgcctttaaagcttgcgtcaggggctccacggctggctccatgaggcgggtgtggaatgcgccactaaccggcaacatcctggtgcgtctgaaatgaaacttagaggaattcttctggagaaaccgtagagccttcagcaaattccatggctccggcaaacactagggctgcaaactctcccacactgaatccagcagcagcaacacagttctcaatcaccgagggctgcaggtgatgtagtttctcgacagcggccagcgatgccacgaagatcgcgggctgacagtgcacggtgcggtccagggtctcctgcggcccgtgcaggctcagttccagcaggtcgtagcccagcacgcggcgggcggcggcgtagagttcgcggacgcgcgggtagttgagcagaccgcggcccatgcccaccacctggctgccctggcccgggaagagcagcacggagcactggcccggcattcgccgctccgtcgccgcccagggcgcctcctcctccgccccggtcgcatctcgcagcagctccgctacaccctgggcgcccggcggaggcaccgggaagctcgaggcgccgcggcggtagctggcgcccaagcccctgacccacgctacccgtgcgacccggacgctcatggtcggacacctgcccgcgcgcgttaccgtggcgaccgaggcccgactgcggcggcgcggcgcagcgtggtcc

SEQ ID NO: 86780 - DNA, 1945 bp, Homo sapiens
ttttttttttttgtaacgacagcttattctttaataaaagtcaggggtgtcagcagcgtcactggtaagacatgatggcgctccacgactgaccagcagcgctgggaagggacacgcagaacccaccttccaaccacgcccaacacatcacagaaatgcctgctcgtttgttttgattcatatacaaagttacaaagtatttcctgccccaaattcttaacgaaaatgaaagaaaaccctagaatgcggtggttttacaagtatattagcccagaacatcctaggcagctgcgcgggccgcgggtgcggcagggcgcagggcagcacccagagccccggccagcgcgaaacggacgcaggcgcatccccagccctccgtggcgtctcagcagcagatcacccaggcctggcccggtcgggcttggtgttgcctccgaagtcgagacgacggtgctgctcagttatcttccgcctttccgcactatggtgggcaggcgacactgctgcggggcaggcttaaggtccttctgcggatctgtcttcttgctcgcagggatgcacttcaagggtctcagcaccggcactcttccatttgttccagatccaagcacgggctggagccgtggggctggagtaagacgacagtctgaccactcccgaaagctttagtttgggcagttccatgacataggccggtcctcgtctcttgggacggtcctcctcttgctttagggactgtttctgctttctgccctccttggaaatctggcagctgttactgagtggttccggtgccacagggtgctccggaaagccagcttttctgtggctgcccagagcccgcttctctgttttcctctgttcttggaagtaggggtgctgcagggcctggtgggcggcgattctctcatcgggatcataggccaccattgcgtgcaggagggagaggcattgtggggacaaattggttgttagtagaggtattcctgatccctttttaaaaggaaaatcaaaattcatagctctcgactgtttgaacttggtgaggatcttctgagcgggtgtgccgatgacatcgtggatttttgagatttggtccagttcatttactccaggaaagaggggctgcagactggcgatctcgtagaacacacagccggcgctccacaggtccatcttgtacgtgtagaacccatcagtgaggagacactccggggcccggtaccagcgggtggagatgtattccgtgtacggctgcttggaatagacactccggcaggagccaaagtcccctaatttcaggacatcctttattagtatattttctggttttacatctctgtgaaatattccatttctgtgaatatgatccagggacttacataactggtacatatagtgcataatttttttttctgataatgggtatcttctccctcgtattagctcataaatattcatgtccataagttcacatattagtgcaagagaaccagattttctgtcaaaaaccacttcatgcaacataagaatgtttgggtgcggattcaggcgcctcagtgcttggatctctcgtaggttgttgacttgctcaatactttcaaagcgctgcttcatttgtttacatgcatagtagtttccatctctcaggctttgcatcttcataacttcagaaaacgttccctctcctattttgccaattgctttatagttcttcatcttggatgcggaagccggtgacaaccccttgccgacactggacggaaaagaaggaagcaggaaggttgtccccctgctttccacttccctgaggcggggtcccgcactaggatctccgtggtggtccctcgaaggagagcgttagagatcccgccgccatgttgtgtccctgtcaccctagcaaccgtcaggccctgaacgccatgagctgtcgcctgcgcatgcg

SEQ ID NO: 86781 - DNA, 489 bp, Homo sapiens
  misc_feature (1)...(489): n = a,t,c or g
cgagggggaaggaaaccctatcgtagaccctagacagngcggnggaattccgctgccagtcgccgccctctctcccgcgcgcgcccggcgcttcggctccgctccctgtgcggcatttaaacttccctcttagaactgcttttgtggcatcccataagttttgattccaaggaatggaaccttgggccatgcggtgagtgttacagcttttagaagccgtgggtcacggaagagaaccgtggaacctagcgactagtgttcagcctggttaggatgaacctgggcacttagccatgcaggaacaatgacgagcctctagcccgatcgggagtggcaatgggcgcctcactggatcagaagcacagtggacaccctgccggatccggagggttggaagtcagtggcgagtctccgacatcggcattcagccctggtggatgaacccattaaaagagccagtaaatcctgtggaaaatggccttcagtgat

SEQ ID NO: 86782 - DNA, 2003 bp, Homo sapiens; identical to SEQ ID NO: 75762
  misc_feature (1)...(2003): n = a,t,c or g

SEQ ID NO: 86783 - DNA, 3115 bp, Homo sapiens; identical to SEQ ID NO: 65601

SEQ ID NO: 86784 - DNA, 653 bp, Homo sapiens
  misc_feature (1)...(653): n = a,t,c or g
cggccgcgtcgacggttaagtggttgcctcttggcatctgttgaatgattgggtaggatagttgaccattaatgtctgcatcagggtcatgtgcagtcactgaaatgacagatgtaccaatgggcggttctcacaatagacttgaaaatatctccaggaggaaagctaggaggattgtcattaaagtccctcacgtgaataaccactgacattgtaaatgaacgaggagggcttccttgggcttttgctggtatatttaaattatacaaagactgtgtttcaaagtccagttttttggcaagaaaaatactcccagggtttgggctaatgctaaaagttccgtggttgttagtcccacgaatactgtaatataaatcagcattgtcacctgaatcggaatcagttgcaggaacagaggacaccagtttaccaattctcatgttttccaaaacatcaaacaaagagtgttggttttaaggaaaagaaggggggatttggcattttttcattttaaaaatattaaatattttaaaagtacccccgttgtaatttggaggggggaaatggccccttgaattccactgggtttggatttaacaagaggaaataaaggcagggggggtggttttcataagcctaaatttggccaaatn

SEQ ID NO: 86785 - DNA, 625 bp, Homo sapiens
cggccgcgtcgacggtaaagtggttgcctcttggcatctgttgaatgattgtgtaggatagttgaccattaatgtctgcatcagggtcatgtgcagtcactgaaatgacagatgtaccaatgggactgttctcacaatagacttgaaaatatctcccggaggaaagctaggaggattgtcattaaagtccctcacgtgaataaccactgacattgtaaatgaacgaggagggcttccttgggcttttgctgttatatttaatttatacaaagactgtgtttcaaagaccagttttttgacaagaaaaaaactcccagggtttgggctaatgctaaaaggtccgtggttgttagtcccagtaatactggtatatacatcaagcttgtcaccctgatccgaatccagtgcagaaacagaggcaccaattcaccacatcttattgttttccaaacatcaacaaaagaatgttggattaagggaaagaaggggctttggcttttttctctgaaaaagaaaaatttaaggtccccgttgaaattgggggggatggtgcctgaaatcaacggtttgaaaaaaaaagggaaaaaggaagggggttttttcctttggttatttggccaaagag

SEQ ID NO: 86786 - DNA, 431 bp, Homo sapiens
cgacccacgcgtccgatgagctttagaattaaagcgcttgagcttgcagtgcatcagataaaattttatatttgttcaaacagaaatgatattatgattgcataagccttaaaatgaattgtgttatttgctctaataataagaaaattccaaatcaattattgaaatataatacacacaattacggaagtacagataccctcgcatttaagtcaggctcattttgctgaacgtgatgtttgtggcattcaggcttcctaaaagttgcatgttatgttggtcagtttatatgaagtatcaagaacaagcaaaaccatggagacagaaaataaaatagcgttgctaatgcctaagggaggttgaaataggaggtgtccactaattgctagaatgtttctttgtgtcagtgatgaaaactttctatatttcag

SEQ ID NO: 86787 - DNA, 2625 bp, Homo sapiens
atgtcccgcagcgcggcggccagcggcggaccccggaggcctgagcggcacctgcccccagccccctgtggggccccggggcccccagaaacctgcaggacggagccagacggggcgggcaccatgaacaagttacggcagagcctgcggcggaggaagccagcctacgtgcccgaggcgtcgcgcccgcaccagtggcaggcagacgaggacgcggtgcggaagggcacgtgcagcttcccggtcaggtacctgggtcacgtggaggtagaggagtcccggggaatgcacgtgtgtgaagatgcggtgaagaagctgaaggcgatgggccgaaagtccgtgaagtctgtcctgtgggtgtcagccgatgggctccgagtggtggacgacaaaaccaaggatcttctggtcgaccagaccatcgaaaaggtctccttttgtgctcctgaccgcaacctggacaaggctttctcctatatctgtcgtgacgggactacccgccgctggatctgccactgttttctggcactgaaggactccggcgagaggctgagccacgctgtgggctgtgcttttgccgcctgcctggagcgaaaacagcgacgggagaaggaatgtggggtcacggccgccttcgatgccagccgcaccagcttcgcccgcgagggctccttccgcctgtctgggggtgggcggcctgctgagcgagaggccccggacaagaagaaagcagaggcagcagctgcccccactgtggctcctggccctgcccagcctgggcacgtgtccccgacaccagccaccacatcccctggtgagaagggtgaggcaggcacccctgtggctgcaggcaccactgcggccgccatcccccggcgccatgcacccctggagcagctggttcgccagggctccttccgtgggttcccagcactcagccagaagaactcgcctttcaaacggcagctgagcctacggctgaatgagctgccatccacgctgcagcgccgcactgacttccaggtgaagggcacagtgcctgagatggagcctcctggtgccggcgacagtgacagcatcaacgctctgtgcacacagatcagttcatcttttgccagtgctggagcgccagcaccagggccaccacctgccacaacagggacttctgcctggggtgagccctccgtgccccctgcagctgccttccagcctgggcacaagcggacaccttcagaggctgagcgatggctggaggaggtgtcacaggtggccaaggcccagcagcagcagcagcagcaacagcaacagcagcagcagcagcagcagcagcaacagcagcaagcagcctcrgtggccccagtgcccaccatgcctcctgccctgcagcctttccccgcccccgtggggccctttgacgctgcacctgcccaagtggccgtgttcctgccacccccacacatgcagcccccttttgtgcccgcctacccgggcttgggctacccaccgatgccccgggtgcccgtggtgggcatcacaccctcacagatggtggcaaacgccttctgctcagccgcccagctccagcctcagcctgccactctgcttgggaaagctggggccttcccgccccctgccatacccagtgcccctgggagccaggcccgccctcgccccaatggggccccctggccccctgagccagcgcctgccccagctccagagttggacccctttgaggcccagtgggcggcattagaaggcaaagccactgtagagaaaccctccaaccccttttctggcgacctgcaaaagacattcgagattgaactgtagcccgagccgccccacccactccatcatctccaggtgccccacgcctgggggtggaggcacaacctctcccctaaccctgctccctggggctgcgcccctcaacaccctctcaacacccccctccctcaaccaccccgacaaccactacagaaccaacattgtgacgcccaggttgcaacaggatggaattcagggacggacccagcctggctaagggaaccatttcactgccggacttaggctggcaatgcccccttccccaaccccagacacaggggttggccacaatcccactgaatgcccttggttcacactccatttcccagtttctgttgacccccaccttccagtgttggacaggatggaggggggacacttgcttaggggctctcctgggccccacaccagtgcccaccccaaatctggtcgtctcctccccccatgcacagcacaagctaagggctgccctctgcccacacgctgcgttcactgccaatgctgtactcacctccatcaccctccaactttggggcccatgtcttccttgggccaaggtctcatgggggctagggccaagttgggggcccaggaggcggggagggaggaggaggagaagatgcgcagttacctcatgtcggtgcccgctggggaggggtccgggaagaaggggaaggggtgcctggcgggtacttttctatcttttatttccagattttttttgtatctaaacttgaagatttgtattatacaaggacagccaataaaggaagaatataatggtgaaaaaaaaaa

SEQ ID NO: 86788 - DNA, 724 bp, Homo sapiens
gtatattatattaattggttttcatatgttgaacccactttgcattcctgggataaatcccactttgtcatggggagatttatatggtattggatttaatttgctagtattttgctgaagattttgcatctatattcataagggatattggtctgcaatttgtctttcttgtaatatccttggctggtattggtaaagggtatttttttactcaagttatttttgtagcgtttctgctggatctgccttcatatccatacaagacaatcactctaatcttttatagtcatatctcacttttactgatgtttttagtttatgaaaaatgatattatccagttttattacccaccataatcatatttagtttcaaatagcccttaattaactctttctcaacataattgaaaaataatttaaaaatcacaatggtaacaataagtgcatgggctgtgctggggattgttccaagcactttacaaggattcattcatttaatctttacaaccatacaaacacgcattacaattatggtcatttcacaagtgaggactgtgacaaagagaagcaaagtaacttcccacggaggtaaagtaactagtttgcaggtagttacttgatccaggattcaaactcaggcattgggattcccaagtccatgctcataaccactgtttcagcatttagagttttcaaaaaggatgtgttttcagtactttaagaa

SEQ ID NO: 86789 - DNA, 397 bp, Homo sapiens
aatagattaaataacttggataacattttaaattctgtgaaagacttaaactactaaagttcactgaagaaaacatataaattgtaatagcactatagctattaaagaaattgagttttcaattaaaaatttttccacaatgaaaattctaggttcaaatggtttcagtggtgaattctgccaaatatttaaggaggatgtaacgccagttccacacaaactgttttttttaatagtggtttcctatcaaatcactcttctactgataacaaaatcaaagaaaatccaaagaaataaaactacagacaaatattcctcagcagaatagacaaaaatattctatatgccagcaaatacaatcagaaattaaaagtaagaaaaaaagtctcaaaaacta

SEQ ID NO: 86790 - DNA, 397 bp, Homo sapiens
tcagattgactgttaaaaattaatctacatctaaaacatgtctaaagacagcaagaaaatttaaaagaaaaaggttgaaaaagatataccagactaatactaataaaaagaaagctgaagttagtcaactgactttaagttgaaaagcattattacaaagaaagtcacaatatattgataagaggagcaactcaccaggataatgtgacaattcaaaaattacacagagctaataatatagcctccaaatatataaaacaaaatataataggcttacaaagataaattgataaattcacagttatacagggagattttctctttcagttatggatagatcaagcagataaaacatatagtagattcaaacaataacagtgagcaaagtggatgcaaa

SEQ ID NO: 86791 - DNA, 427 bp, Homo sapiens
tttcgtcagagaagctgaggcctgaagcaactcagtctcccccaggtgcagtgactgcagctggaacagcacatagctgagaacagcacagagcagaggaacagcacagagcaggggaacagcacagagcaggggaacagcacagagcaggggaacagcacagagcagggagcagcacagagcagggagcagcacagagcagaggaacagcacagagcagggagcagcacagagcagggagcagcacagagccaaggaacagcacagagcaggggaacaacacagagcagggagcggcacagagcagggaacggcacagagcagaggaacggcacagagcagaggaccggcacagagcaggaaacggcacagagcttgggagcggcacagagcttgggagcggcacagagctgggagcggcacagag

SEQ ID NO: 86792 - DNA, 433 bp, Homo sapiens
tttcgtggagagcgggtgatcacactccggaggtgaggcggaactctgaagtgagggtgtgcagcttggtagggattggggtcccttccggggcccatcggcccctggtggtgttaatggcccttctggcctacgcgcgtgtcatgaaccctgccgagagggccggggctgaggccctcaggccgacccggactcttgggcgcggtctcttgaggtggggccggggtgagcagctgagtccgggtgccccggggaggcccctctgcccgatttcgcagcgctgcccatcagcttcagcggaggcctgattcctgaggtgctctgactggaaggaacctccgagatcggagagtcttccctgtctcctgttgatgctcccattgcactgataggtaaattgatccctaaagaagaggctagtctgagatatata

SEQ ID NO: 86793 - DNA, 438 bp, Homo sapiens
tttcgtggaggcccgggaggtggctgaggggtccaggcggcgggacgactctggccttttgaagaccggggtgggtgctctctaggaaactctacagagaagaatgtcagatgcagcagaagctccccgagaagcaacaggagaaaatggagaaacagaaatgaaagaagaggaggaacctaatccaaattataaagaagtagaagatccacaacaggaatcaaaagatgacacaatagcatggagagagtctcaggaggaggagaggaaaaccggcgaggaggaaggggaggaggaggagaaagaggaggaggggaaggaggacaaaaagattgtcatggaagaaactgaggaaaaggctggagaagtccaagagaaggaggcttcaggaatacaggaagaaaccacagtagagccccaagaagtcacagcgtccat

SEQ ID NO: 86794 - DNA, 424 bp, Homo sapiens
tttcgtgtcacccatcaagcccaaaatgtggagcgagtcctctttagatgaaccctatgagaaggtcaagaagcgctcctctcacagccattccagcagccacaagcgcttccccagcacaggaagctgtgcggaagccggcggaggaagcaactccttgcagaacagccccatccgcggcctcccgcactggaactcccagtccagcatgccgtccacgccagacctgcgggtccggagtccccactacgtccattccacgaggcaccggagctccagcctggagtcccagggcaagctcctgggctcggaaaacgacaccgggagccccgacttctacaccccgcggactcgtagcagcaacggctcagaccccatggacgactgctcgtcgtgcaccagccactcgagctcggagcactac

SEQ ID NO: 86795 - DNA, 1992 bp, Homo sapiens
ctcccgggtcgacgatttcacgacataggaggcgcggagcgggcggcggcggcggcggcccgaggaagaggaggaggaaatccaccaggcctgccagcggggtcactctcagcacctggagcatctgcttttctacggggctgagcctggagcccagaacgcctcggggaacacggctctgcacatctgcgccctctacaacaaggagacctgtgccaggatcctcctgtatcgaggtgccgacaaggatgtgaagaacaacaacggacagacccccttccaggtggcagtgattgctgggaattttgagctgggggagctgatccgaaaccaccgagaacaggatgtggtgcccttccaggagtcccccaagtacgcggcccggcgacgggggcccccaggcacagggctgacggtgcccccggcgctgctgcgggccaacagtgacaccagcatggcgctgcccgactggatggtgttctccgccccgggggccgcgtcctctggggcccctggccctacctcagggtcccagggccagtcgcagccctcggcccccaccaccaagctcagcagcgggaccctccgaagtgccagcagcccccggggtgccagggcccgctctccatcccgagggaggcaccctgaggacgccaagaggcagccccgaggccggcccagctccagcgggacaccccgggaagggccagccgggggcacggggggctcagggggccccgggggctccctgggcagccgcgggaggcggaggaagctctactcagcggtacccggacgctccttcatggctgtgaagtcctaccaggcccaagccgagggggagatctccctgagcaagggcgagaagatcaaagtacttagcatcggggaaggaggcttctgggaaggccaggtcaaaggtcgtgttggctggttcccctctgactgcctggaagaagtggcgaatcgctctcaggagagcaagcaagaaagccgcagtgacaaggcaaagagactcttccggcattataccgtgggctcctacgacagctttgatgccccaagcttaatggatgggattggcccagggagcgattacatcattaaggagaagacagtcttgctgcagaagaaggacagtgaggggtttgggttcgtgctccggggggccaaggcgcagacccccatcgaggagttcacccccaccccggccttcccggcgctgcagtacctggagtcggtggacgagggtggcgtggcatggcgagctggactgcgaatgggagacttcctcatcgaggtgaacgggcagaatgtggtgaaggtcggccaccgacaggtggtgaacatgatccgccaagggggcaacacgctgatggtgaaggtggtgatggtcaccaggcacccggacatggatgaggcagtgcacaagaaagcaccccagcaggccaagcggctgccgcccccaaccatctccctgcgttccaaatctatgacctcagagctggaggagatggagtacgagcagcagccggcgccggtgcccagcatggagaaaaagcggaccgtgtatcagatggctctcaacaaactggacgaaatcctggccgcagctcaacagaccatcagtgcaagcgaaagccctggtcccggtggcctcgcgtccctgggcaaacaccgacccaaaggtttctttgccactgaggtaggcggcctggtgtggggaggaactgccaggggggaggcggttcacacaccaacctggagcctttctctttccaaaaccctcctgacgcctctgtgctttaggctggtcctgggggggcgacacacatcctaggggttcctcctttctcccaactttggagacctcctttcctccttatcccctttccctcaaatcccatctctgtccttttctctctccactttccacccctgctattatacttgagctcttgccccgcctctttgtgtccctctgcgtcccat

SEQ ID NO: 86796 - DNA, 1973 bp, Homo sapiens
  misc_feature (1)...(1973): n = a,t,c or g
ggaattctgattttcctcatccgcagtctcaaggggaagccaggacaatgagaacagccacttggcacaggagtcactgaaaggcccccagggtgggatggtggggagataagaaccgtgagagaagttggcacaaaggagttatgggacaaagggtccaagataggcagaaaagaaaatgttgccagttgatggggaagaaaggaagtcggagggctcagacactgagggggacagaacatctccatgtgcagtctcatctcttatagtcagcaacaggtatccacggggagggccctacatcatctgctaccctgaaggatctggaggtaggaggctctgggcggaggtgcagtgaccccgcaggccagccctccaacctcctcccgcagcggggactgggtgcccctctgccagctgagacagcccacacacaacccagccctaatgatcgttctctctacctctcccccaagtcctcctccgcctcctcctctctgcatgcgcgtcagagcccgtgccaagaacaagcagcagtcctgaactcgaggtccataaaaatcagtcgactgaagaacaccatcaaatctttgaaacaacagaagaaacaagtggaacatcagctggaagaagtaacgtgatttcgtttcctcgcgacatgactgctgggtttggggggcactcagacatagaggccccagtctcgtctcacccactcccagcctggggaagaaggctgacccctcagattccaccccatccccacagggcccctgataacctggtcccatgggtgggcctgtcctggggcattggtggcattctgggggcatgtctcttgctgtgccatctctgcctccccctggtaagagctctgtcttcctcttcctacaggaaaagaaagcaaacaacgagagacagaaagccgaaagggagctagaggttcaaatccagacattgatcatacagaaagaggaactaaatacggacctgtaccacatggaacgttctctcagatactttgaagaagagtccaaggacctggctgtccgcctgcaacattcattgcagtgtaaaggagagttagagagggctctctctgctgtcatcgccacagagaagaagaaggcaaaccagttgtccagctgcagcaaagcacatacagagtgggagttagagcagtccctacaggaccaggcactgctgaaagcgcagctgacacagttgaaggagtcatttcaacaactccaattagaaagagatgagtgtgctgaacatatagaaggagagagggcccggtggcatcagaggatgagtaaaatgtcgcaggagatttgcacattaaagaaagagaagcaggatatgcgttgggtagagcagctggagtggagcttgtccaaactcaaaaaccagacggctgaacccttgcccccggagcccccagcagtgccctctgaggtggagctgcagcacctgaggaaggaactagagagagtggcaggagagctccaggcccaggtcaaaaacaatcagcacataagtctcctgaaccggcgacaagaagagaggattcgggaacaggaagagaggcttcggaagcaggaggagaggcttcaggagcagcacgagaagcttcggcagctggccaagccacagagcgtcttcgaggagctggtgcgttgccccaactggggagcctgccctcctccctagccctccgggcctttgtttccccacctctaaaatggggcagtgtagccctcgcgtgaaaggttacttctaaaggcacctgtgagccaggtggctgtgggagaaaagggtgnntntnntatnntnnntnnannnnttttagtgttatgtatgtatattntaatatntattatttttatttatattttttttttgttaaattttttttttgtataataaattatataaaaaatataatttattttaatattaatttaaaaaaa

SEQ ID NO: 86797 - DNA, 613 bp, Homo sapiens
tttcgtatctggcagcccatggaggatggatgggagcacggagaggctggaggcaaggagaccagccgggaggctgccgtggtcatccaggcaagaaatgacgaggcgtccctccctgatggcgggcagacagcacggatggagcgcccagcagagtgccaccgtggccaacccagtgcctggtgccaacccggacctgcttccccacttcctgggggagcccgaggatgtgtacatcgtcaagaacaagccagtgctgcttgtgtgcaaggccgtgcccgccacgcagatcttcttcaagtgcaacggggagtgggtgcgccaggtggaccacgtgatcgagcgcagcacagacgggagcagtgggctgcccaccatggaggtccgcattaatgtctcaaggcagcaggtcgagaaggtgttcgggctggaggaatactggtgccagtgcgtggcatggagctcctcgggcaccaccaagagtcagaaggcctacatccgcatagcctatttgcgcaagaacttcgagcaggagccgctggccaaggaggtgtccctggagcagggcatcgtgctgccctgccgtccaccggagggcatccctccagccgag

SEQ ID NO: 86798 - DNA, 487 bp, Homo sapiens
  misc_feature (1)...(487): n = a,t,c or g
tgatgggtnnnnnnnntttgaanccgatcgaatgncggtacgcctgccggaattgccgggtagacgatttcgtagactcaactctactgtggcagctcttggttctcctttgtcgccagaatgggtccatggtggggtctgacatcgctgagctgctaatgcaagactgcaagaagctggagaagtacaagcggcaggcccctgtggccaacctcatcaacctgaccgatgaggactggccagtgctgagctctgggaccccgaacctgctcacgggagagatcccccccagtgtggagacacctgcgcagatcgtggagaaattcactaggctgctctactatggaaggaagaaggaagccttggagtgggccatgaagaaccacttgtggggccatgctttgttcctgtccagcaagatggacccacagacctacagctgggtcatgagtggcttcaccagcacgctggcgctcaatgacccacn

SEQ ID NO: 86799 - DNA, 2676 bp, Homo sapiens
atggaacccagcttgggacagggaatggatttgacttgtccttttggcgtctccccagcctgtggagcccaggcctcttggagcatctttggggctgacgcagcggaggttccgggcacacgtggccactcccagcaggaggctgccatgccccacattcccgaggacgaggagccccccggagagccacaggcagcccagagccctgccggccaacagggtcctcctaccgcaggagtatcttgcagtccaactcccacgattgtcctgactggggatgccacttcaccagaaggagaaaccgacaaaaacctggccaacagagttcacagtccccacaagaggctttctcaccgacacttgaaggtgtccactgcctccctgacatctgtggaccccgcggggcacatcattgacctggtgaatgaccagctgccagacatcagcatctcagaggaggacaagaagaaaaacctggcgctgctggaagaagccaagttggtgagtgagcgattcctgacccgccgtgggaggaagtccaggagcagccccggagactccccatcagctgtttccccgaacctcagccccagcgcttctcctacatcctctcgaagcaactcacttacagtccccaccccgccagaaggggatgaagccgacgtctcttcacctcaccctggcgagcctaacgtcccaaagggcctagctgacaggaagcagaatgaccagaggaaagtgtctcagggcaggctggctcctcgtcctcctccagttgagaagtccaaagagattgcaatagaacaaaaggaaaacttcgatcccctccagtaccccgagaccacacccaaaggcctagctcctgttacaaacagcagtgggaaaatggccctgaacagccctcagcctggccccgtggagagcgagctggggaagcagctcttgaaaacgggctgggagggcagccctctgccgagaagtccaacccaggatgcggcaggagtgggtcccccagcctcccaggggagaggcccagctggagagccgatggggcccgaggctggctccaaagctgagcttccacccactgtgtcccggcccccgctgctgcgagggctttcctgggacagyggccctgaagaacctggcccccggctgcagaaagtgcttgccaagctgccactggcagaggaagaaaagcgttttgcaggcaaggccggcggcaagctggccaaggcccctggtctcaaagactttcagatacaagtgcagcccgtgcggatgcagaaactgaccaagctccgagaggagcacatcctgatgagaaatcagaacttagtggggctcaagcttccagaccttagtgaagcagctgagcaggaaaaagggcttccttctgaactctccccagctattgaggaagaagagtcaaagagtggcttagatgtcatgcctaatatttctgatgtgctgctgcgcaaactgcgggtccacaggagtctccctggaagtgcccctccactcactgaaaaggaagttgagaacgtgtttgtgcaactgtcctyggcctttagaaatgacagctacactctggaatctagaattaaccaggctgaaagggaacgcaacctgacagaggagaacactgagaaagaactggaaaacttcaaagcttccattacgtcctcagcttcactctggcaccactgtgagcaccgggaaacctaccagaagttgctggaggacatcgctgtcctgcaccgcctggctgcccgcctctccagccgagctgaggtggtaggcgccgtccgccaggaaaagcgcatgtcgaaagcaacggaagtgatgatgcagtatgtggagaatctaaagaggacgtatgagaaggaccatgcggagctcatggagtttaaaaagcttgcaaatcagaattcaagccgcagctgtggcccctctgaagatggggtccttcgcacggcacggtccatgtccctcacgctgggaaagaatatgcctcgccggagggtcagcgttgctgtggttcctaagtttaatgccctgaatctgcctggccaaactcccagctcatcatccattccctccttaccagccttgtcggaatcacccaatgggaaaggcagcctacctgtcacttcagcactgcctgcacttttggaaaatggaaagacaaatggggacccagattgtgaagcctctgctcctgcgctgaccctgagctgcctggaggagcttagtcaggagaccaaggccaggatggaggaagaagcctacagcaagggattccaagaaggtctaaagaagaccaaagaacttcaagacctgaaggaggaggaggaagaacagaagagtgagagtcctgaggaacctgaagaggtagaagaaactgaggaagaggaaaaggrcccaagaagcagcaaacttgaagaattggtccatttcttacaagtcatgtatcccaaactgtgtcagcactggcaagtgatctggatgatggctgcagtgatgctggtcttgactgttgtgctggggctctacaattcctataactcttgtgcagagcaggctgatgggccccttggaagatccacttgctcggcagcccagaaggactcctggtggagctcaggactccagcatgagcagcctacagagcag

SEQ ID NO: 86800 - DNA, 427 bp, Homo sapiens
cttcctaagacccaaagaggcgccgggacccccacatcctgctttggggcagacaagcaggtttggaccctgggctgtcgaggaagggacgacgtacagccgcccccacctgctgaacttcccagcccttcatatcgggcctcccctcactcctcagcctgggttcggaaggtctaccaggggccgacctgacggcggtagggcgagtaggatgagtcagcggctggctggactggggaggccccccctccatggtgggccaagctggacaccccaccgcagctggggcaggcctgcctgaggctggaaagccccatgaaaagctcacaggcaggcactgtaatgaacggggtggacagccaggcactgagttatgaacagggcgtggacaggagcctatgcccaccccagccctgcgtgtttctgt

SEQ ID NO: 86801 - DNA, 425 bp, Homo sapiens
  misc_feature (1)...(425): n = a,t,c or g
tttcgtgatggcctcacgcatccgtgttttcccagcactggagctgactcttcaaaatagatacccagaagtggggtcgcaggaccaaaggtgagagcaggaggaatgtgttaggttttgcaacgtccctccagaaggctgatgccagtttgcattcccaccagcagcgtatggggtgcccgtttccccagacccaccaacagactgtgttgtcgtccattagagttgttactgtctgataagtgagaagtgatgtctcagcagcatgtgagtttgcatttctgtacttaggagtgaatccgaacatctttcgtatgtttacaggccgttcttttatctttttggcaaattgtgtcttttcctattttctatcaggtcgtttttaaagagttctttgtatgttagatgggttaggcctttgtctn

SEQ ID NO: 86802 - DNA, 502 bp, Homo sapiens
tttttggtaataatcttttatttgagttcattttcaaaaccattaggccttcgtagtagaggccccctgtaaaaccagcccctcttgcacccttaatgaggttagccctctccactgtctacatacacagtataatctggaaaaaacagtgggattcccacatgtttagtgcatgaaaaacaggccagactcagtcattttccataattgaccggggttctgttctgttcttttacagcaagcacagccagcatctctgcccctctgccctttagctccttacattggtagggcctctctccagtgtgaattctctgatgttgcttgagttgtgagctcactctaaaggcctttccacatactttgcactcatagggtttctcaccggtatgaattctctgatgtcgtataagagttgagccttgattaaaagccttcccacattccttacattcatagagtttcctgccagtatgaacagtctgatgttgaatcaactgag

SEQ ID NO: 86803 - DNA, 410 bp, Homo sapiens
  misc_feature (1)...(410): n = a,t,c or g
cttttgtttaatactanaaattataatgccataagcaaataatttcttggctatagagtagattaggcatggaccaccaaagcactttggtactaaagatggagatggggtggtgtatgtactatcagtggtattaatttgcaagtagggaaaagatacagacaagatttaagagctaaaactataaaactcgtagaataaaatatagtagatcttcatgactttgggttaggcagagtcttctcagatatgataccaaaagcacagttaacaagagaaaaaatagataaattggactttcagaaacttaaaagctcttgtgcttcaaatgtcaccatcaagaaagtgaaaaaataactcacagaatgggagaaaatatttgaaaatcatatatctgacgagacttgtat

SEQ ID NO: 86804 - DNA, 1361 bp, Homo sapiens
aaaggagaaaagggcacagatgccataatcataccagtctgcgctcaatgctaatcagccagactaagttgagctgagtcactttcctatcggctttagtttcctcacctgtaaaatgggacaatagcaccaaactgctgatgcatggtgcatgctagggttagtgactaagggagagcccatgcttctgagcacaccctcaactccctccccgcccagacccacaaatcaccaacatgccaactctgtgtccaaatgttgctttatctttcggcacgaaagatcttcacagtatcaaaagtaaagaattggaaaaaaacaaaataaaaacaaaaacaaaaaaaccaaacacaaagagagcagtgttgggccagcagtaccatcagccctggcccttaggccagcccagtccacgggctctgagtgtggaggctgcgtagcaccaggaagcggctctgctgaggtcaaggggccccagcacagtgtggcatccgttcagcttttggttggtccaggatggtggggagcacagagggtcttggacgggtaggtggggcacacggagggaaaaattatacgccttcagctggcagtcagggcctcaggatgccctgaagcagctcagcctgggcagggcctcactgagctgtgctaggagtggttttcttgaggctgaagttggtccagttcacagcaactttctgacgagtctgctttgcagaatccaaacaaaacctcttaaagtactccacctctcggtcagtctcatccatctccaccccgtccatgtccttgggcaggaacacatcgtccaaggaggaggctggcttctcctgcttgttgcggctccggcggctgcggcccttgccctggggcaagctctgtggccttgctgggcctgggggctgcacagactcctgctcctgaggccgtgccttggcctcgcctggccagtttcgccaggagctgcccttctccttctcagttttgggactgccagcccaacctggtcctggccggctcccccggctcccctctccagcctcagcacagctgcctactttgggaagctctaggaccctgcctggctgcttggggccagcgacctggcccttggcactgggaacctctaggctggctgggggccggggggctgggcttgcctcgctcttcttggcctgactgccctgcctcttgcccttctgtggcttcccacctgaggaggctggcttctcctgcttgttgcggctccggcggctgcggcccttgccctggggcaagctctgtggccttgctgggcctgggggctgcacagactcctgctcatgaggccgtgccttggcctcgcctggccagtttcg

SEQ ID NO: 86805 - DNA, 389 bp, Homo sapiens
acaaaaatttcctcaatcctaactaatcaaattcacattatgtaaaaatgattatatgtcaaccaggaaagttatcctttgttcctgacagtataacatgatttatccctgaaatccaaaattaatttaaattataaaagccaatcaatgtaagaaatcatcatattcatagaaaaaggacgaaaactagacggtcatctcaatagttgcagaaaaagcatttgacaaaatcaaacaccgtttcataattaaaaacaaaaactcaaccggctgtgataagtccacatctaatatcgtatttcatggtcaaagactaaatgctttttcctcctttcagcttgtaaatctctttagttccactgttcttgcaccattattgagttgtgtgg

SEQ ID NO: 86806 - DNA, 392 bp, Homo sapiens
  misc_feature (1)...(392): n = a,t,c or g
tagtttgattgaggagtctaattcatttacatattatataattattaatagaatggaaaaacatagtttatgcaaatggtaaccaaaagagaatggagctcgctattttatatcagacaaaatagactttaagtaaagaaaagttacaagagacaaagaaggatatataataataaacaggtcaatttaataaaaaatagcaattataaatatatatgcatccaacatcagagcacctaaacatatagcaaacatttgcagaactgaaggaaaaaatagacagcaatataataatagtaggagacttcagcaccttatgtttaaaaatgggaagagtgttcagatggaaaatcaataaggaaacagcagacttgaaaaatattgtagaccan

SEQ ID NO: 86807 - DNA, 395 bp, Homo sapiens
catgacctgccttcattctgcaaaagcatttcattattagtctagctgcagcttcagttgtgaagagggatttgcattaattggaccggaagtggtgcaatgcacagccttgggggtatggacagccccagccccagtgtgtatagctgtgcagtgtcagcacttggaagcccttaatgaaggaaccatgggctgagactatcctttcactgcttttgcctatggctccagctgtaaatatgagtgccataccgtctacagagtgaggggcttggacatgctacactccagaggctgttacctgtgtaatggacactttacaacatgagaagctatttcgtgtgagccgttggagagaccctgtcactgaagcgtgtgatgttcttgattcttga

SEQ ID NO: 86808 - DNA, 406 bp, Homo sapiens
tgttttttcatttatttttcagatagttcattattggtgtacagaaactactgatttttatgtgtgttgattttgtatcctgcaattttactaaatttgtttattagttttacagtttttttggtggagcctttagagttttttatatatacgatcatgtcatccacaaacaggaacaatttgacgtcctcttttttaattggatatcctttatttctttctcttgcctgattgctctggctaggacatccagtactgggttgaataagagtggtgaaggtgggcatccttgtcttgttcccatattttagaggaaaagcattgagttttttcttattcaatgtgatgtcagctgtaggtttgtaaatttggcctctattgtggtatgttccttctatagctaatt

SEQ ID NO: 86809 - DNA, 410 bp, Homo sapiens
tggagtcttggacttaatgacattttaatccattgtattttccaggtgttcatgcagaaacacatggaccaaacggataccgctaaacagatccttaaagcttctaaatgtcaacagaaaaagaatatacatatatatacgcatatatacatatatatatgcgtatatacacatatatatacatataggtgtacgcacctatatgtacatatatgtgtatacacatatatacatatatgtatatacacacatatatacatatacatatatacatatatacatatatacacacatatatgagctgtgtgtaaacacataaaaaattctgggggacaattcaggaacaaaatcaggaataaaacaatagaaaatatttgaccatacagaatttgaaccccgacaaatggata

SEQ ID NO: 86810 - DNA, 423 bp, Homo sapiens
gaagacttgacagagaatgggcaggagctcatgaggaccctggctcatatcaagggccataaaggaggtgagagtgggcagtgggcaagagtaatgggagaggccttttccaggagagttgggggcagagagcaggacctgtctcttcccactggatttggctgtgagtaggggtgaggaatggtgctcagcggggctcagcccacacagggagggatggaagagggccagggaggggtccttcctggtccgagttcctcacttggactggaatggagaagtcactgctgggtaggggcaggcagccttgcattccctccaggagattagggtttgtgagatcaggaagccagcagcaccaggggctttaggcatttctacacatatgggaagctcttcctctctcccaacctggagactcag

SEQ ID NO: 86811 - DNA, 1427 bp, Homo sapiens
atggtgccaacatctgctcagcttttgagtggggtcaacagtggattggtccgcgccaaagactccatcaccagcttgaaggaaaagaccaaccgggttaaccagcacgtgcagtctctgcagagcgagtgttctgtgctgagcgagaatctggagagaaggcggcaagaggcagaagagttggaggggtactgcattcaactcaaggagaactgctggaaggtgacccggtctgtggaagatgctgaaatcaaaaccaacgtcttgaagcagaattctgccctgctggaggagaagctgcgctacctccagcagcagctgcaggatgagacgccgcgacggcaggaggccgagctgcaggagccggaggagaagcaggagccggaggagaagcaggagccggaggagaagcagaagccggaggctggcctctcctggaacagcctgggccccgccgccacgtcccagggctgccccggcccgccagggagtcccgacaaaccctcgcggccacacggcctggtccccgcaggctggggaatggggcctcgggctggcgagggcccctacgtgagcgagcaggaattgcagaagctgttcaccggcatcgaagagctgaggagagaggtgtcctcactgaccgcccggtggcatcaggaggagggggcggtgcaggaagccctgcggctgctcgggggcctgggcggcagggtcgacggcttcctaggccagtgggagcgggcacagcgcgaacaggcacagacggcgcgggacttgcaggagctgcgaggtcgggcggatgagctgtgcaccatggtggagcggtcagcagtgtctgtggcttcactgaggagcgaactggaggggctgggcccactgaaacccattctggaggagttcgggcggcaatttcagaactctcgaagagggcctgacctctccatgaacctggatcggtcccaccaaggcaactgtgcccgctgtgccagccaggggtcgcagttgtctacggagtccctgcagcagctgctggaccgagcactgacctcactagtggacgaggtgaagcagaggggcctgactcctgcctgtcccagctgtcagaggctacacaagaagattctggagctggagcgccaggccttagccaaacacgtcagggcagaggccctgagctccacccttcggctggcccaagacgaggccctgcgggccaagaacctactgctgacagacaagatgaagccagaggagaagatggccactctggaccatctacacttgaagatgtgctcccttcacgatcatctcagcaacctgccacttgaggggtccacgggaacaatggggggaggcagcagtgcaggaacccccccaaaacaggggggctcagcccctgaacaataaatggcctctcatgctagcaa

SEQ ID NO: 86812 - DNA, 485 bp, Homo sapiens
  misc_feature (1)...(485): n = a,t,c or g
agtggttnnngctgataccctaatagatntgcctagtcagtgtggtggaattcgcgccgaggagggccggctgctggccgagagcgcggacctggtaacggagctgcagggccggagccggcggcgcgagggcctgaaccggcggcaggaggaggtgtgcgacgacccggaggagctgcgggggaaggtccgggagctggccagcgccgtccggaacgccaaatacttggtcgtctacacaggcgcggtaatcagcacggtagggagggaggcggaggcgtaccccaggacggagtatgagctccagtaatcgcgaaaaactcgcctttaaagcagctgtaaggttttttctcttaaagaaacgaaatgaccaaaacttacctaaggtaaacgctttttaaacgcttggcctctgtgttacagccagttaaaaaaaacaaggagtagagatacgaatggggtgtagtagccgactgctcgcaggc

SEQ ID NO: 86813 - DNA, 462 bp, Homo sapiens
  misc_feature (1)...(462): n = a,t,c or g
acttgatcttcatagccntaggccangncgnggaanncgcagncattgtcatccagtgtgccttccggatgctcaaggccaggcgggagctgtttgttctcaggattgaggcccgctcagcagagcatctgaaacgtctcaacgtgggcatggagaacaaggtggtccagctgcagcggaagatcgatgagcagaacaaagagttcaagacactttcagagcagttgtccgtgaccacctcaacatacaccatggaggtagagcggctgaagaaggagctggtgcactaccagcagagcccaggtgaggacaccagcctcaggctgcaggaggaggtggagagcctgcgcacagagctgcagagggcccactcggagcgcaagatcttggaggacgcccacagcagggagaaagatgagctgaggaagcgagttgcagacctggagcaagataatgctctct

SEQ ID NO: 86814 - DNA, 403 bp, Homo sapiens; identical to SEQ ID NO: 84574

SEQ ID NO: 86815 - DNA, 418 bp, Homo sapiens
ctttgccctattttctactcaggggctacacttgaggttggccgactgaccttgcagccatatgacctgaaactgtgccaaacacacattaccttatttgaagaagcggatgactgagtttattttctgttctgctttcaaaatctcctcccttagttcattaagcctgtctatttcattttgtacttcatcaatatgttcagttgcttcctgctgttctttttctctcttcggcaagtctagagaggctgatgatgtctcttccagtctcagaacaggaggtgggcttggtttcttcttttgaggtgggcgtggagactaccatttatgggccatgctgctaggaaaggccaagaaccagaccacaagtctccttgctcatcaggaagaagctcagaaaactctgaaagtaatttag

SEQ ID NO: 86816 - DNA, 662 bp, Homo sapiens
ttttttttttttttcttgagtcaatatgatttattgttttcctcttctgccattaacattctagctactgggtaagttgttctccatccttgggatctcatggttgggaggagaggtctgggttccctcccacaaaactctcaacgatagaatagaagcacagctgccctcagttatctcacggctgctgctgtaaccaacatggagttccatatccactccaatcaaaaccagaaaaatctccacactgctggggactggcctctggaaagtatcctcctccaccaatgcagtggtgctcagtgttacatccggtgaccctcattccagcacacaaggcgttggctgctctctcgttattaaataccctgaactgaacaaatcccgcagtgaattcccgctggccatagggtgagtaataagatgctgttttctgggcgtcgccaaaatcatagaccacagggatcaccgggccgttgtcagtccaacactttccttctccatatttcactggatatttctggtagatgcccaacaaattatgtcccagtgtctggaggaaaccagtgtccgtgcggtacctcagcagggagcctgtttctccagtgctgcatgggggacttattgggcacgtgccagatgcccagtcctttggcctgaat

SEQ ID NO: 86817 - DNA, 394 bp, Homo sapiens
cggacgcgtgggtgacagataaagaatcatatcatggattgtaaggaagctcagtgagatccaagacaaagttgaaaatcaacacaaagaaacttctaaggcaatccaggaaatgaaggaagagataaacatctgtaaaagaaatcagtcagagcttttggaattgaaaaactcactcaaggaattttaaaatacaattgaaagctttatcagtagactggaccaaaagaatttcagagcttgaagacgagtctttggaactaacccaatcagacaaaaataaaaaagaattttaataaatgaacaaaatcttcaggaaatatgggattatgtaaagcaaccaaatgtacaaattattagcattcctgagagagaaggagaaaaagcaaacacg

SEQ ID NO: 86818 - DNA, 1513 bp, Homo sapiens
tgccaggggatgggaaataaattctgctaaaattcagagaccttctacatcagtgaaatttctaggagtccagtggtgtggggcctattgagatatttcttctaaggtgaacaataaattacctcatttggtccctcctacaaccaagaaagaggcacaatacctagttggcctatttggattttgggggcaacacattccttatttgggtatgttactccagcccatttatcaaatgattcaaaaggttgtcagttttgagtggggtccagaaaaggaaaatgctctgcaacaggtccaggctgctgtgcaagctgctctgtcacttgggccatatgacccagcagatccaatagtgcttgaggtgtcagtagcagatagggatgctgtttggagcctttgcgagacccccataggcgaatcacagcggcacgctgtaggattttggactgagaccttgccatcttttgcagataactactctccttttgagagacagttcttggcccgttactgggctttggtggaaactgaacatttgactatgggtcatcaagtcaccatgcctgaactgcctatcatgacatggatactttctgacccatctagccataaagtgggtcatgcacagcagcattttgtcatcagatggaagtggtatatatatgatcaggctcaagcagccacccttgtaatcgcaaaatgggcccatgaacaaagtggccacggtggcagggatggaggctacacaaggactcagcaatatggacttctactcaccaaggctgatgtggctatggccactgctgagtgcccaatttgccagcagcagagactaacactgatccctcgatatggcaccattcctcagggtggtcagccagctacctggtggcaggttgattatattggacctcttccatcatgggaagggcagaggtttgtcctcactggaatagacacttactttagatatgggtttgcctatcctgcatgcaatgcttctgtgaagactaccatccatggactcacagaatgccttgtccaccatcatggtgttccacacagcattgcctctgaccaaggcactcactttatggctaaagaagtgtggcagggggctcatgctcatggaattcactggtcttaccatgttccccatcatcctgaagcagctgggttgacagaatggtggaatggccttttgaagtcacaattacaacaccaactaggtggcaatactttgcagggctggggcaaagttctccagaagcccatgtatgctctgaatcagcatctaatatatggtactgtttctcccatagccacgattcatgggtctaggaatcaaggtatggaagtggaggtggcaccactcaccatcacccctggtgacccacaagcaaaattcttgcttcctgttcccatgacattatgttctgctggcctggaggtcttagttccagagggaggaacgctgccaccaggacacacaacaatcccattaaactag

SEQ ID NO: 86819 - DNA, 1930 bp, Homo sapiens
gcagcatggcggcgggggcggctgaggcagctgtagcggccgtggaggaggtcggctcagccgggcagtttgaggagctgctgcgcctcaaagccaagtccctccttgtggtccatttctgggcaccatgggctccacagtgtgcacagatgaacgaagttatggcagagttagctaaagaactccctcaagtttcatttgtgaagttggaagctgaaggtgttcctgaagtatctgaaaaatatgaaattagctctgttcccacttttctgtttttcaagaattctcagaaaatcgaccgattagatggtgcacatgccccagagttgaccaaaaaagttcagcgacatgcatctagtggctccttcctatccagcgctaatgaacatcttaaagaagatctcaaccttcgcttgaagaaattgactcatgctggccccctggcatggctgtttttattggaaaggggaacttccttccaaggaaccacgctgtggtttcagcaagcaaatggtcggaaattcttcacaaacataatattcagtttagcagttttgatatcttctcagatgaagaggttcgacagggactcaaagcctattccagttggcctacctatcctcagctcctatggttctggagagctcataggaggacttgatataattaaggagctagaagcatctgaagaactagatacaatttgtcccaaagctcccaaattagaggaaaggctcaaagtgctgacaaataaagcttctgtgatgctctttatgaaaggaaacaaacaggaagcaaaactgtggattcagcaaacaaattctggaaatactaaatagtactggtgttgaatatgaaacattcgatatattggaggatgaagaagttcggcaaggattaaaagcttactcaaattggccaacataccctccagctgtatgtgaaaggggagctggtgggaggattggatattgtgaaggaacctgaaaagaaaattgggtgaatttgctgcccaatacctgagaggagaaaattaataaatcttaaacttggtgcccaactattacggggtctggctctgtcacccaggctggagtgcagtggcacgattatggctcattgcagcctcgacttctcggggccaagcgatcctcctgcctcagccttctgagtagctgggaccacaggcgtgcaccaccatgtccacctaattttttatttcttgtagagatgaggtctcctgcctcagcctcccaaagtgctggaatttacaggagtgtcggctgtgccccttgtgatggatgaggaaaggtatccacctttctgaatcagacacaagctgcagtagcttcctgatgcctcattcaccaggatgggtaactttaaagacaagttttataactggcatcccatctggtttcagagtcttgggggcttttttcatacagctttgtctgatatttagagacattcagattcagaagccatgagttcagttagctcatgggccgggcacgtgcactgactcactggctgcagccagaacacattgagggagtcttggtgcaacttaggtcactgtaaggttctagggctgggagctgggatttgaaccaggatctgtcagcgcagccccagtgctgtgcttgaagcctcgtgccacactggctttgaggtagcacgctgcaagttagtgagtggagttgcccaagtctggggcttatgaaatgacctggtatttttatgttcctgttagaaatggtgtggctttcacaaattaagtgcccaggctgggcacaatggctcgtgcttgtaatcccagcactttgggaggcggaggcaggcgggttgcttgagctccggagcttgagaccagcctgagcaacatggcgaaacctcatatctacaaaaaataaaaaattaactggtc

SEQ ID NO: 86820 - DNA, 440 bp, Homo sapiens
acgcaggtccatccggcgatgctgggtctggacgagctcgggaggagtggttgtggccattgcacacaggcggatctgaggttcggcgacgccgctggtcgcgacccgggacaggacaacgacaggaacaccgccgagcccgcgttcccccccccgcccagagtcatggcggcagcagccgctctgagggcgcctgctcagagcagtgtgacctttgaagacgtggctgtaaacttttccctggaggaatggagtcttcttaatgaggctcagggatgcctgtaccatgatgtgatgctggagaccttgacacttatatcctccctgggtaaggtactcatacttaactgtgacctgagttagtctctgcccctcccctttattcctcttggtaataacgtctttctcacgtcaggactgtggcacagcttcattctcca

SEQ ID NO: 86821 - DNA, 563 bp, Homo sapiens; identical to SEQ ID NO: 67355
  misc_feature (1)...(563): n = a,t,c or g

SEQ ID NO: 86822 - DNA, 417 bp, Homo sapiens
acgcttatggcgataaactttattcttaataatgcttttcactgtatctggtaggttttgatatgccgtggttccttttcatctgttttaagaaatttttaaatttccttcttaatttcttcattgacccactggtcattcagaaacatattgtttaatttccaagtctttgcatagcttccaaagttcctcttgttactgatttctagttttattccattgtgatcagagaagacacttgatataatttttttttaaattttttaaaacttgcttcgtggcctaacatatgatccatctttgagaataatccatgtgctgaggcaaagaatgtttattctgcagccattggatgaaatgttttgtaaatatctattagggccatttcatctatagtgcagattaagtcctacgttt

SEQ ID NO: 86823 - DNA, 561 bp, Homo sapiens
  misc_feature (1)...(561): n = a,t,c or g
tttcgtgggcttatcagcacgcacaccatgcatagctccttaaggacggtgcgacacatgaaaggtgccactgggattctttccctgcttgtggccccgcccccaggtagagcatcacctgcaagtggaggaggtgcgaattcgacccgccgttgggtggggcagacgacccctgcccgtgacggaggggctggtggaagtcaggcttcctgacggctggtcgcaagtgtgcgacaaaggctggagcgcccacaacagccacgtggtctgcgggatgctgggcttccccagcgaaaagagggtcaacgcggccttctacaggtgaggggccgcgggcgccgggcggagcaggccgggattggggtgctccctgatgaatagccttgggagacatctgagcaggtccggggcacgggaggacccgggggtcgggacgcgcgggaaaatatggaggccgttgcaaagctggagagttgggaaatcttgtgggaccacgagaattccaccgcntggcctaatgtctacaatgctacaatnnnnnnnccgtctnnnttnaaactc

SEQ ID NO: 86824 - DNA, 1602 bp, Homo sapiens
ttttttttttttttgcagattctggaaggttctcaggtctttatttgcctgctctcaacattccagggaattgaccttatttaattaacccatcaacctctcatagcaaatattttgagaaaacaaattttatattcagattcttattttccagtaggaaagtaaaaagttgcagctcagtgcacgtaaagttgagacagagatggagacatccagcccccccctttctgggaccaagaaagatgacttggggaggaaacacaggtcagcatggggaacaggggtcacagtggacacaagggtggtctgtctcctccacctcctcacattatgctaacaggggacgcagacacattcagggtgcctttgcaggaaagagatgccagagggctcttggaagtcacaaaggggagggcgtggaagaaatcctgcatcttcagtccctcacaaggacagcttgtctcagggctttttcaagcctgtggagagaacacataaaagcccctgggcactggtcgctggcacgccaggccctgaagagtaagctccctccttttcccacctgagctcttcctgcttacacatcacagcagcgaccacagctcccgatgaccaccaactgctagggacagcccaagcccagcaccaatgcccaccgatggggggacggtggaactgggaagaccgctccccatcttcatagtggtgaggggcttcggcaggcccctcatgctgtacatggcatgtgtatctctgctcttctccagaaggcaccacccacagctgcccactttctggaaggttctatctcctgctggtctggtctccacaagctcagtgttcctgagtttggtcctcggcatccccgctgccaggtcagtgtgatctccgcagggtagaagcccagggcccagcacctcagggtggcctcatggtcagagatggggtggtgggtcacgtgtgtctttggggggtccgcgcgctccagcgtgtccttcccgttctccaggtatctgcggagccactccacgcacgtgccctccaggtaggctctgtcctgctccgccacacgggccgcctcccacttgcgctgggtgatctgagccgcggtgtccgccgcggtccaggagcgcaggtcctcgttcagggcgatgtaatccttgccgtcgtaggcgtactggttatgcccgcggaggaggcgcccgtccggcccccacgtcgcagccgtacatgctctggagggtgtgaagacccggcctcgctctggttgtagtagccgcgcaaggttccgcaggctctctcgggtcagtcttgtgtgttggtcttgaagatctgtgtgttccgggtcccaatactccggcccctcctgctctatccacggcgcccgcggctcctctctcggactcgcggcgtcgctgtcgaacctcacgaactgcgtgtcgtccacgtagcccactgagatgaagcggggctccccgcggccgggccgggacatggcggtgtcgaaatacctcatggagtgggagccggcccaggtctcggtcagggccagggccgccgagagcagcaggaggacggttcggggcgccatgaccagcatct

SEQ ID NO: 86825 - DNA, 414 bp, Homo sapiens
cgcagcagccgggcggggcgcgagcggagcgctgactggggagggaggcggggagcaagggaggcgcgtcggtctgggaagtcgcgcgcactcgctgctcctgggaccgacgtttaactcttgccaagtctcgtcgcagccgccgcgggtggcgggccttgggcttcccctgaagcatgagccctctcgcccgcagccaccctcaccgcgtggcccgcggacagtgcgcgccggggtcccgggtgcacaccctcaggataccccgtgcccagagttcgtgcgcccgaggaaggtaccgcttgtgggggaagccccagggctgcccccggaggagaggtcacgaggatggcggagagacacacccggtttacaggagtccagagtacgtgcgccttcatacgacgacataactct

SEQ ID NO: 86826 - DNA, 425 bp, Homo sapiens
  misc_feature (1)...(425): n = a,t,c or g
attttataattggattttttgttattgttgatttttaggacttcttcatatgttctgtatattaactctttattagatacatgatttgtaagtattttctctcattctatgggttgccttttcactttgttgattgtgacttttgatacaaataatttttatattttgatgtaatccattttatctatttttattgttggtaccagtgattttagtgtcatagccaagaaatcaatgccaaatccaatgtcatgatgagtgatacagtttcacctctttcatttgggtctttgatacattttgagttaatttttgattatgatataaggcaagagtgaaaattcattatttttgcacgtggatatccagtttattcagtaccgtttgttgaaaagactgttcttttaccactgaatggtgttgan

SEQ ID NO: 86827 - DNA, 827 bp, Homo sapiens
caaaaatatcctcaactgatttatcatttttttgacaaaagtacaaaagcagttcaatggagaaaggataacctttttaacaaatggtcctgggacagttggataaccataggctaaaaagaaaaacttcaacttacacttcaataagaaattaactcaagatggaccataggcttaagtatacagtgtaaactataaaacttttagaaaaaaacacaggaaaaaatctttaggatctagagctaggtaaaaagttcttaaacttgataccaaaagcataatgcataaaaggaaaaaaagtgtcaaaaatgtggtgatactgtggtgctggcataaggattgacaagtagatcaatgaaacaaatagtccagaaataatcccacactaccattgtttgttttttttgaaaaaggcaccaaagcaacccaataaggaaaggagactgtttttcaacaaatggtgctagaataacttgatatccacatagaaaaagaatgaacctcaaccactacctcataccataacaaaaattaattcatgatggatcatagaacagtatgtaaaagtcaaaaccacaaagcttttagacaagagattatatccatgacttaggaattaacaaagctttctcagacagatagaagaaaataatcataaaaagaaagaaatggtaagttagacttcatcaaaattaaaaacttctcatcaaaagattccattaagacaatgaaaaggcaaaccacagattgggagaaaatattcaaagaacatgtatctggcaaaggacatataaagaagtcctataatataaatatatataaaaaaa

SEQ ID NO: 86828 - DNA, 826 bp, Homo sapiens
ttaccagcctgtcgctgcggctgcgtggcgggttgtccaagtaaccacggtatttgtcgctgtctaagagcatctgaaagacaggtgtgcgtcatgcacttgaagcacctgaggaccctgctgagccctcaggatggagctgcaaaggtgacctgcatggcttggtcccagaacaatgccaaatttgctgtctgcacagtggaccgagtggtcttgctgtatgatgaacatggagaacggagagataaattctccaccaaaccagctgacatgaagtatggcaggaagagctatatggtgaagggcatggctttttctcctgattccactaaaattgccataggacagactgacaacatcatctatgtctacaagattggagaagattggggtgacaagaaagtcatctgcaacaagttcatccagacggtaaagttcagaccagtccctggaaccttaggatgaacaaacatatatcagtatatctacttataaatacagccaggagttgcatttctaacatctgaatgtgacttttcctactgcaaggatggtgcttcatggctgttcatggtcatctgctgtcttccttagagccctgctgtgtccttccctataggagattgagagtgctgtcacttgtctgcaatggccggcagaatacatcattgtctttggactggctgaagggaaggttcgtttatcaaacaccaaaactaataaatcatctaccatctatgggacagagtcttacgtggtgtccctgacaacaaattgctctgggaaaggaattctctctggtcatgcagatgggtaccaacgttag

SEQ ID NO: 86829 - DNA, 407 bp, Homo sapiens
tacctctgtctcatgaaaactcactgaggcagagtttgatggtaccattgcttaagccctcttcctgagtccatatagaccgggtcctatttcttgtcttggagatccaggtgagcatgtccctcggctgaatccaccccgggataagccttgatttctcctacccccagtcccccaggatggctgcctctggtttttggggccctttccccactcttgagaggcaacaacatggggactctgggcgatgactgcctttgggttccaggtgcggttcctggagcagcagaatcaggtgctagagaccaagtggaaccttctacagcagctggacttgaacaacttgaggaagggacctgagcccatttatgagggctacatcactacctgcagaagcaggtggggag

SEQ ID NO: 86830 - DNA, 407 bp, Homo sapiens
tctacttgtaaactggtcatttctttgttgcattgttcccataaactttttgtaaagattccgtgctttcaccattcttccatttaatcttcaccataaatttgtatttgttcttgctgcaatttcagcagaattacttttctaatagagattcatttcaagctgatgtgtgagcagcagcttctcagtgtttcagttgaggtcctgtcagacatgttaaacaagtagtacgagtttattttggtgcaaaaaatttttgaacactttgcctagttctttcataatacatattttccatgaatgatttgaagatcccttgtatattcaatacaggttaaaaaatacacccggtgatatgcgcgcctgtgtgcgcgcgcgggttattaatgtgcgtttatgtaaatgcg

SEQ ID NO: 86831 - DNA, 449 bp, Homo sapiens
  misc_feature (1)...(449): n = a,t,c or g
nttcgactagcgtacgctcgccgnaccggnccggaattnccgggncgaccnnnnncccgcaagcccttcactgagtaaatatttcgctaatatttttcttgcatctgtagctttacttttctctctaatagtctcttttcatgagcaaaagtatgtaattttgatgttatcacatttttcatttatagattacgctctttgtgtcatctaaaatttccttgcctaaaccaaggccatatacagttctagaagttaacattttacacttagttatatgagttaatttttgtatgaggtatgaggaatatgtagagggttattattttgcatttggatgcgttactgttccagtatcacttgtttaaaagactatgttttctttattgaattgcctttgctccttttttaaattgaaaacatcctcaaaaaatttttaaaacaggtatggg

SEQ ID NO: 86832 - DNA, 398 bp, Homo sapiens
  misc_feature (1)...(398): n = a,t,c or g
cggacgcgtgggtgctgattttctgccttatatttttgtcagttatcaagagtgaagtgntgaaggctccagccataattgtggatttgtctgtttatcctttagctctatcgatttttgctttttgtattttgaggctctgttgtttggtgcatacatgtttaggattgttatgtcttcctggggattgaactgtttgtcattatgtaatgtccttttgtctctagtagtttccttccttctgaaatttgcttcatctgatattaagatagccactcctgctttcttttcattaatatttgcatgattaatgttttccattcccgggagagaggaggtgaganagtttagggccaacttgccccacctctaaccacctcacgccatgtcgtgggtgg

SEQ ID NO: 86833 - DNA, 414 bp, Homo sapiens
  misc_feature (1)...(414): n = a,t,c or g
actccatcatctattacctgaccactgtaagcccctgatttaactggtggactgcaatggcattttgaatccccaggaattaatgtcaattcagagacagtgtctattaatacatgaaaggtctggatatttcctttcaacaatgcacagtatctctaattaatggctacaggtccctttgggaaaggattaaaagatttattgtatgtacttggaatagttgtacagggatctggttccccttcagtcagggggctctgggtctgtgaactgagacaggtctggagactggtgagagtccataactctccacaagttagatttctgcctaccaggcctaaaagttttttcttctccatanatcaaacagtattcttgtgggctgcccacctatnattgtcctaggggtactgg

SEQ ID NO: 86834 - DNA, 381 bp, Homo sapiens
aagcaggataaataccacacacatacgcttacttacgtggacatgtagtattcaagctgcttagaatgaaaggtaaaaagaaaatctctaaggcacccggagaaaaaggtaacattatgtatagagaacaatgataggaagtttgtgtgatggctgacttttcgaaactatggaagctaggagacagtggaatgacactttggaagtgctgaaagaaaaaaactcagcccagaaatctgtgcctaatgagaatgtttttcagaaatgaaacagaaatagtctttcataggcaaacaaagactaggaattcattgccagtagacctactctacaagaaatgttaaagcaagttcttcaggcagatggaataaatgaaggaag

SEQ ID NO: 86835 - DNA, 408 bp, Homo sapiens
tctgtttaaaacttttgttcttttttaatgtcaaaaactggtctatttactgtcttattgaattgcaagaatgcttcatatattctagatacaagttctttaacagatatatgtattataaatgtttgttcccagactatggtttgtcttttcattttcttaatggtgtcactcaaagagcagaagttttaatttttataaaggccagtgtatcagtattttccttttgatgagtgctttctgtatctagtttaaaaaaaactttgcctaccccaggttatgaatattttttaattccagaagcttgatcatttcagtatttacatttaggtctttcattgacttcaagttattttttgtatataatgtaaggtaggagttaaagctcactatttgctatttagatgg

SEQ ID NO: 86836 - DNA, 412 bp, Homo sapiens
gcgttacgcctggcttatttcactcggcgccatgtttgcattgtttatccctgtcgtaaagcggatctgtgactcattccttttcatgcccgaattatattccataatatacatattccatattgtatattatggaatatacaagatagatatattatgtatatctatatacatatacaatatacaatatagatatattatgtatatctatatacatatacaatatacaatatagtacatgtatatacaatatgcaatatagtacatgtatatacaatatacaatatagtatatgaatatacaatatacagtatatacaagatacaatatacagtatatacaatatacaatatagatatattatgtatctattccattctatcatatatcccgcatcatttgtacgtgccac

SEQ ID NO: 86837 - DNA, 2035 bp, Homo sapiens
ttttttttttttttaacaacttaaataatttttattacaaaaggaagaaaagaccaaaacatccccaaaattctcccatgggcttccccctccactccaataaataaggtatgggagactgaccggcggagggggtggggatcatggttcagcagaagggggagcttagccgggggggtggcaagcacatccaacccacctcccccagtccccggcactacggtcacattggccagaacacagaactctgcccacagacagcaacagtctctggatgtgtcttgaggagtgtggccggggaggaatgtcatacctcagaatggccgggatggctgccccacccctgtggccttcccagttctggacagcatcgggtccagccagatccatgctggctcccagggaatttagcagcatcaactgaggcgcaagcccacccaaaggggcctaagatggatggaatgggccctccccaatgggggaggcaagagtattgaaaacttcgtagtgagagcaggcttgagttgggagtcgccgtgccagccttcaaggtctctaggagagaggggtcaacaaccatcccctcgccagctcagcttgcagctctatgactacaccacgacgcgggtgggggacgctggtgttgcccagtcaagtctcaatggtgtatcttcatggcagaggagatggcaggagccagtgtcccccagctcaggtcccttccagggccagctccctcctggctgagaggcttctggacccagtacagcagttccaggagggcagcggtggagtcctttcagctccctgccccggacatgcccagtgggtggaagctgccctcttctagcaggagacgccccaggcggtagagcagctgggggtaccaatgcacaccctcccccggggtccagctgccccatgccaagctgtgaaagagtctcaggggccagaaggccaactgagccaggtggtggtcagccacggccgcgaagcaggatgccaccacatcctccaccaccagtgtcccatgctttgtgagcggggcgtaggccccgagggccacgtgtgtagagacagctgccacgcgggcaggctgcaggcctggcaccccagccaccagcacgtactggccaggctgcacgtggctggcaaatgtggcccggaagcgggctgccggctccgtgtgattgtcagccgtaaagagcaggtgagcgggtgtgagtgccaggcggcgtggggggtcctgagtctcgatgacctgaaaggctctcagcctgtgaggctcgcggtccagtaaaatgatcacatcgctgaaggtggggctcccatcctcccccatggccaacacacggtctcccggcctcacggctgacaaggccacacgcgccccactctccaggcgtacctgggctccggcagggaagcagccgcccgtcttggctgcggccgagtgctcggacttgacggagcaatgcacgtgggcctttgactcgtaatacacccagtcaaagccggcctccactgccaagcgcgccagcagtccatacttattgcggtcgcggtctgatgtggtgatgtccaccgcgcggccctcataatgcagggactcctctgagtggtggccgtcctcgtcccagccctcggtcacccgcagcttcacaccgggccactggttcatcaccgagatagccagcgagttcaggcggtccttgcagcgctgggtcatgaggcggtcggcgcctgtgttctcctcgtccttgaagatgatgtctggattgtaattgggggtgagctccttgaagcgctcggagctgcgagcgatcttgccttcatagcgtccgctggcgcccagggtcttctcgggcacattggggctgaactgcttgtaggcgagcggcacgagtttgcgtggcggtcgccggcggctgcccaccacccgacccggcccgcagccccatgccgccggcaccaccagcagcagcaacaggaccaggcagaagtgcagtcggggccggagccgggcgggagacat

SEQ ID NO: 86838 - DNA, 406 bp, Homo sapiens
  misc_feature (1)...(406): n = a,t,c or g
aatggccatggcgaccgcgaccgggtgttggcgctggcccaggccctgccggccgaagatgtgcagttttattaccagatgggtttgagcggccggcgcgacctgccgctggcgccggacccgcgaggcggtttcgagatggtgctgctgcgcatgctggcgttccgtccggccgacagtacggcgccgccgagaccgccgctaaagccagtggggatcagccaggccacagttgattccgcacagaatggtgctgnnnnccacacnngcngntggcncggccaacgatgcgccagccacactttgtgcggaataaaatgtggggcgggatgcccgccctggctgtatccgcgcgcattgtggtgtgcgactgtcgggccgacagaacgccccatgcgcagcaaca

SEQ ID NO: 86839 - DNA, 4360 bp, Homo sapiens
ccgcgctctctgatcagaggcgaagctcggaggtcctacaggtatggatctctggcagctgctgttgaccttggcactggcaggatcaagtgatgctttttctggaagtgaggccacagcagctatccttagcagagcaccctggagtctgcaaagtgttaatccaggcctaaagacaaattcttctaaggagcctaaattcaccaagtgccgttcacctgagcgagagactttttcatgccactggacagatgaggttcatcatggtacaaagaacctaggacccatacagctgttctataccagaaggaacactcaagaatggactcaagaatggaaagaatgccctgattatgtttctgctggggaaaacagctgttactttaattcatcgtttacctccatctggataccttattgtatcaagctaactagcaatggtggtacagtggatgaaaagtgtttctctgttgatgaaatagtgcaaccagatccacccattgccctcaactggactttactgaacgtcagtttaactgggattcatgcagatatccaagtgagatgggaagcaccacgcaatgcagatattcagaaaggatggatggttctggagtatgaacttcaatacaaagaagtaaatgaaactaaatggaaaatgatggaccctatattgacaacatcagttccagtgtactcattgaaagtggataaggaatatgaagtgcgtgtgagatccaaacaacgaaactctggaaattatggcgagttcagtgaggtgctctatgtaacacttcctcagatgagccaatttacatgtgaagaagatttctactttccatggctcttaattattatctttggaatatttgggctaacagtgatgctatttgtattcttattttctaaacagcaaaggattaaaatgctgattctgcccccagttccagttccaaagattaaaggaatcgatccagatctcctcaaggaaggaaaattagaggaggtgaacacaatcttagccattcatgatagctataaacccgaattccacagtgatgactcttgggttgaatttattgagctagatattgatgagccagatgaaaagactgaggaatcagacacagacagacttctaagcagtgaccatgagaaattacatattaacctaggggtgaaggatggcgactctggacgtaccagctgttgtgaacctgacattctggagactgatttcaatgcccatgacatacatgagggtacctcagaggttgctcagccacagaggttaaaaggggaagcagatctcttatgccttgaccagaagaatcaaaataactcaccttatcatgatgcttgccctgctactcagcagcccagtgttatccaagcagagaaaaacaaaccacaaccacttcctactgaaggagctgagtcaactcaccaagctgcccatattcagctaagcaatccaagttcactgtcaaacatcgacttttatgcccaggtgagcgacattacaccagcaggtagtgtggtcctttccccgggccaaaagaataaggcagggatgtcccaatgtgacatgcacccggaaatggtctcactctgccaagaaaacttccttatggacaatgcctacttctgtgaggcagatgccaaaaagtgcatccctgtggctcctcacatcaaggttgaatcacacatacagccaaggcttaaaccaagaggacatttacatcaccacagaaagccttacccactgctgctgggagcccctgggacaggagaacatgttccaggttctgagatgcctgtcccagactatacctccattcatatagtacagtccccacagggcctcatactcaatgcgactgccttgcccttgcctgacaaagagtttctctcatcatgtggctatgtgagcacagaccaactgaacaaaatcatgccttagcctttctttggtttcccaagagctacgtatttaatagcaaagaattgactggggcaataacgtttaagccaaaacaatgtttaaaccttttttgggggagtgacaggatggggtatggattctaaaatgccttttcccaaaatgttgaaatatgatgttaaaaaaataagaagaatgcttaatcagatagatattcctattgtgcaatgtaaatattttaaagaattgtgtcagactgtttagtagcagtgattgtcttaatattgtgggtgttaatttttgatactaagcattgaatgactatgtttttaatgtatagtaaatcacgctttttgaaaaagcgaaaaaatcaggtggcttttgcggttcaggaaaattgaatgcaaaccatagcacaggctaattttttgttgtttcttaaataagaaacttttttatttaaaaaactaaaaactagaggtgagaaatttaaactataagcaagaaggcaaaaatagtttggatatgtaaaacatttattttgacataaagttgataaagatatttttaataatttagacttcaagcatggctattttatattacactacacactgtgtactgcagttggtatgacccctctaaggagtgtagcaactacagtctaaagctggtttaatgttttggccaatgcacctaaagaaaaacaaactcgttttttacaaagcccttttatacctccccagactccttcaacaattctaaaatgattgtagtaatctgcattattggaatataattgttttatctgaatttttaaacaagtatttgttaatttagaaaactttaaagcgtttgcacagatcaacttaccaggcaccaaaagaagtaaaagcaaaaaagaaaacctttcttcaccaaatcttggttgatgccaaaaaaaaatacatgctaagagaagtagaaatcatagctggttcacactgaccaagatacttaagtgctgcaattgcacgcggagtgagttttttagtgcgtgcagatggtgagagataagatctatagcctctgcagcggaatctgttcacacccaacttggttttgctacataattatccaggaagggaataaggtacaagaagcattttgtaagttgaagcaaatcgaatgaaattaactgggtaatgaaacaaagagttcaagaaataagtttttgtttcacagcctataaccagacacatactcatttttcatgataatgaacagaacatagacagaagaaacaaggttttcagtccccacagataactgaaaattatttaaaccgctaaaagaaactttctttctcactaaatcttttataggatttatttaaaatagcaaaagaagaagtttcatcattttttacttcctctctgagtggactggcctcaaagcaagcattcagaagaaaaagaagcaacctcagtaatttagaaatcattttgcaatcccttaatatcctaaacatcattcatttttgttgttgttgttgttgagacagagtctcgctctgtcgccaggctagagtgcagtggcgcgatcttgactcactgcaatctccacctcccacaggttcaggcgattcccgtgcctcagcctcctgagtagctgggactacaggcacgcaccaccatgccaggctaatttttttgtattttagcagagacggggtttcaccatgttggccaggatggtctcgatctcctgacctcgtgatccacccgactcggcctcccaaagtgctgggattacaggtgtaagccaccgtgcccagccctaaacatcattcttgagagcattgggatatctcctgaaaaggtttatgaaaaagaagaatctcatctcagtgaagaatacttctcattttttaaaaaagcttaaaactttgaagttagctttaacttaaatagtatttcccatttatcgcagaccttttttaggaagcaagcttaatggctgataattttaaattctctctcttgcaggaaggactatgaaaagctagaattgagtgtttaaagttcaacatgttatttgtaatagatgtttgatagattttctgctactttgctgctatggttttctccaagagctacataatttagtttcatataaagtatcatcagtgtagaacctaattcaattcaaagctgtgtgtttggaagactatcttactatttcacaacagcctgacaacatttctatagccaaaaatagctaaatacctcaatcagtctcagaatgtcattttggtactttggtggccacataagccattattcactagtatgactagttgtgtctggcagtttatatttaactctctttatgtctgtggattttttccttcaaagtttaataaatttattttcttgg

SEQ ID NO: 86840 - DNA, 413 bp, Homo sapiens
  misc_feature (1)...(413): n = a,t,c or g
cggacgcgtgggctggaaacaagaaggaacattatataatgataaaagaatggatccacctggaagacaaaatgatcttatgtacataccaaataacagagcctcaaaatacacaaagcaaaaactgatagaactgaaagagaaacaaataaatcatcaattatatttcaggacttcaatgtcctctctcaacaacaaatagaactactatacagaaaatcatcaagaatatagaagattgcgccatcacaatcagcaaatagaatctaattgaaatatatagaatactccatccaacaacagcagaatatactttttatctcaagcaaccgaagaacattcaccaaaatagatcatatcataggccataaaaaatgcttagcaaatttttacagaatgtgttatccataacn

SEQ ID NO: 86841 - DNA, 2169 bp, Homo sapiens
gggggcaccagaagccagcagtggggttgcacacgcgcctcttcacgaggtggaaacaagatggaggattcggcctcggcctcgctgtcttctgcagccgctactggaacctccacctcgactccagcggccccgacagcacggaagcagctggataaagaacaggttagaaaggcagtggacgctctcttgacgcattgcaagtccaggaaaaacaattatgggttgcttttgaatgagaatgaaagtttatttttaatggtggtattatggaaaattccaagtaaagaactgagggtcagattgaccttgcctcatagtattcgatcagattcagaagatatctgtttatttacgaaggatgaacccaattcaactcctgaaaagacagaacagttttatagaaagcttttaaacaagcatggaattaaaaccgtttctcagattatctccctccaaactctaaagaaggaatataaatcctatgaagccaagctccgccttctgagcagttttgatttcttccttactgatgccagaattaggcggctcttaccctcactcattgggagacatttctatcaaagaaagaaagttccagtatctgtaaaccttctgtccaagaatttatcaagagagatcaatgactgtataggtggaacggtcttaaacatttctaaaagtggttcttgcagtgctatacgtattggtcacgttggaatgcaaattgagcacatcattgaaaacattgttgctgtcaccaaaggactttcagaaaaattgccagagaagtgggagagcgtgaaactcctgtttgtgaaaactgagaaatcggctgcacttcccatcttttcctcgtttgtcagcaattgggatgaagccaccaaaagatctttgcttaataagaagaaaaaagaggcaaggagaaaacgaagagaaagaaattttgaaaaacaaaaggagaggaagaagaagaggcagcaggctaggaagactgcatcagttcttagtaaagatgatgtggcacctgaaagtggtgatactacagtgaagaaacctgaatcaaagaaggaacagaccccagagcatgggaagaaaaaacgtggcagaggaaaagcccaagttaaagcaacaaatgaatccgaagacgaaatcccacagctggtaccaataggaaagaagactccagctaatgaaaaagtagagattcaaaaacatgccacaggaaagaagtctccagcaaagagtcctaatcccagcacacctcgtgggaagaaaagaaaggctttgccagcatctgagaccccaaaagctgcagagtctgagaccccagggaaaagcccagagagaagccaaaaatcaaagaagaggcagtgaaggaaaaaagtccttcgctggggaaaaaagatgcgagacagactccaaaaaagccagaggccaagtttttcaccactcctagtaaatctgtgagaaaagcttcccacacccccaaaaaatggcccaaaaaacccaaagtaccccagtcgacctaaagtcagtgattcaactggaaggaaacctcaatgctgcctccagagctttttggaaatactcagatcctggccgcctttgtaaccttctctaaacgtcaggcctggacttaaaagattttttaaaacctccataagtagtccaggggcggtggctcacgcctgtaatcccagcactttgggaggccgaggcaggcggatcacaaggtcaacgagatcgagaccatcctggccaacatggtgaaaccctgtctgtaccaaaaatacaaaaattaattgggcatggtggtggacacctgtaatcccagctactagggaggctgaggcaggagaattgcttgaacctgggaggcggaggttgcagtgagccactgcactccagcctgatgacagagcaagactcagtctcaaaaataaataaaaataataaaacctccataagtaatcctgacatattgttcctgggtataatctgtttctaaattgtccttctgtgtatttgctaatgtaatagagggaaaaatagagtgcttctctgtggttgttcagcactttaggtagccaaggtgagaggattgcttgaggcctggagtttgagactagcctgggcaacttggtaaaaccccatctctacaaaaaa

SEQ ID NO: 86842 - DNA, 543 bp, Homo sapiens
  misc_feature (1)...(543): n = a,t,c or g
tcgttcttaatagatcaacttcagacgtactcacttattatcttcttcaattcacttttaccatccacactttgacacgagggcggnnnnnnnnnaattgaaacctcgagaaccgtccgcangnccnaccggnccggaatcccgggacgacccacgcgagcgccggcctccggacggtcgggggcaggccttgcgctatctgcgaacgcacctgactcaggtgggcaccccggagctacggaggggccagcgggctcccttgcccatgcgtctgggagcgcgcgggggacgtggcgagtgcggggccggggcagccatggctgggagaggaccgtgggtgcggggggatgtgcgaaccccgtcccggctctgcattcctgcgcctctgcgccccgagggaccggccgggtctctgcactgggaccgaaaacgggctcctccccgctttcttcccctaagggctgaaaatgagtctctggaagaggaaacccgatgggatgatgcctggagtctctccctctctcatcaaagtgcaatcggcat

SEQ ID NO: 86843 - DNA, 901 bp, Homo sapiens
ttttttttttttgcaggcctgtgtgtcactttcaggcccttcctcatttattcataatatgtgtagccacgaggtagcatttcctttggcatcctggagaaacatgtctcacttagggttggacctgttagttaatagttctgcagcttctggtatttggtagtctgcccgttgatttacaaaatgcctcactgtgattgtcgctacagtcaccacattcagagctagaaccatgaaggaaaacagatgcacactgttgaaaggctggtttggagtttcttccgcatgtgtttcatgctgaaatcctgaattgccactttgcacttcgatcccttttcagacgaatgggtcctatgatggaatctgttttccatttatatgaagaaatgtctcgtttgcttctggagacacaaccttgattggcagcgagactggtggtcactgctatcacatatcaaaactttacactgcagatacacagagctcatacttctcaagaatttaaaggcattaaactggaatctcccatagtgtccaaataagggatacacctttacaagtttcatctcgactacatccactcttgattaggtcgtaggttggagatgcaaagtcagaggtgggagaggctctacaggtatcaagaaacaccaccaaatttggatctgaggtgtgcagactaacttgaacaaaaagagtttggttcaaatccacataatatggtgattcaagtatagtcttttcaaatgaattggattcaaaaagagccatgctggtgttatatttgcccagtgcattttgactttgtatcacatcatcttctgttatgtatcttatctcccctgtagaattatgtaatacaaagtcaaaaagagccatgctggtgttatatttgcccagt

SEQ ID NO: 86844 - DNA, 369 bp, Homo sapiens
aaaaagaaaaggacaaggaatatatacaacaaccagaaaacaacaatatgacaggaacaaagcctcacgtatcaataataatcttaaatataaatgaactaaattctccacttaaaagttatagactggctgaatagattagaaaacatgaaccaacttttgctactaataagaaactcaccttaccagtgaagacacatatagactgaaagtaaaggaatggaaaaagatattccacataaaaggaaaccaaaagcaagcaggaatagctacatttatatcaggtaaaatggactttaagtgaaaagcagtttaaaaaaagacaaaagtcattatataatcataaaggaatgaattcagtaagagaat

SEQ ID NO: 86845 - DNA, 1771 bp, Homo sapiens
ggcacgaggattgtaggacagcctcagattgctattactggacatgatcaggggctgttagttcaagaaccagatggactaatggttgcaactccagctcagacgcttaccgacactcttgatgacctgatagcagctgtgagtaccagagtgcccactggttccaacagttcttctcagaccacagagtgtcttacacctgaatcctgttcgcagactacaagcaatgtggcttcccaatcgatgcctcctgtgtatccttcagttgacattgatgcacatactgagagcaatcatgacacagcattaacactagcttgtgcaggtggtcatgaagaacttgtatctgtgctcattgcacgggatgccaaaattgaacacagagacaaaaaaggtttcacaccactaatcctggcagcaacagcagggcatgttggagttgttgaaatccttttggataaaggtggagatatagaagcacagtctgaacgaactaaggatactccgctttcattggcatgttctggtggacgtcaggaggtggtagacttgctgctggctcgaggtgcaaataaagaacataggaacgtatctgattatacaccactgagtctagctgcgtctggaggatatgttaatatcattaagattctgcttaatgctggggcagaaattaattcaaggactgggagtaaactaggtatttctcccctgatgttggctgcaatgaatggacatgttcctgcagtaaaattgctgctcgatatgggttcagacattaatgcccaaatagagaccaatcggaacacggctctcaccctggcctgtttccagggccgagcagaagtagtgagtttgcttctggaccgaaaagccaatgttgaacatagggcaaagacgggtcttacccccttgatggaagcagcttctggagggtatgcagaggttggaagagttcttcttgataaaggagcagatgttaatgctccccctgtgccttcctcaagagatactgctttaacaatagcagcagacaaaggtcactacaaattttgtgaactcctgattcataggggagcccacattgatgttcgtaacaaaaagggaaatacgccactttggctggcatccaatggaggtcattttgatgttgtgcagttgctagtgcaagcaggtgctgatgtggatgcagcagataaccggaaaatcacacctcttatgtcagcatttcgcaagggtcatgtaaaagttgttcaatatttggtaaaggaagtaaatcagttcccttctgatatagaatgcatgagatacatagcaacaattacagataaggaactgttgaaaaaatgtcatcaatgtgtcgaaaccattgtgaaggctaaagaccagcaagctgcagaagcaaataagaatgcgagtattcttttaaaggaacttgatctggaaaagtcaagagaagagagcagaaagcaggctcttgctgctaaaagagaaaaaagaaaagaaaagagaaaaaagaaaaaagaggaacagaaaaggaaacaggaagaagatgaagaaaacaaacctaaggagaattcggaactaccagaggatgaagatgaagaggagaatgatgaagatgtggagcaagaagttcccatagaacctcctagtgcaaccaccaccactacgattggaatctctgcaacatctgcaacattcacaaatgtgtttgggaaaaaaagggccaatgtggtgacaactcccagcaccaatcggaaaaaaaaaa

SEQ ID NO: 86846 - DNA, 410 bp, Homo sapiens
  misc_feature (1)...(410): n = a,t,c or g
cccacgcgtncggagtgatactgtattttacaattcaagtctcatttttcattgatggtgcataaaaaagtaattgtcttttgtacattaaccgtttattctgaaacctaattgcttattagtttcaggttttttttcttgtcagtttctttggatattctccataggtaaatatgtcacctgaaaacaaagacagtttaatttctccttttccaatttatctaccttttcttttctttttcattgcattagcttaaacttcctgtataatgttgaaaagctgtggggacagagaacagtcttgctttttccctgatcttaatggaagagatttgtgtttctcaccattatatatgatgttagctataggttttttatagatgttccttaacaagttgaggaagtccttg

SEQ ID NO: 86847 - DNA, 416 bp, Homo sapiens
  misc_feature (1)...(416): n = a,t,c or g
gaaaggaatttcctcagccttataaagggcatctgtgaaaaatagctaacatacttaatagtgaaacaccaaaaagttttcttctaagataaggaataagacaaagatatctactctcatcacttctattcaacattgtactggaggttctagcaagggcgcttaggccagaaaaagaaaagacatctatattggaaaggaagaagtaaaaccatcaagatggcatgattttttaaacatagaaaatcctgaggaatgcacaaaaacacttggagctaataaatcagttcagcaaggtggcaggatacaagatcaatatacaaaaatcatggcatattttttcacaagcaacaatctaaaaatgaaatttanaaacagttcgatttaatttagcatcaaaaagagtgaaatacttn

SEQ ID NO: 86848 - DNA, 392 bp, Homo sapiens
aatcaatccaactacatatatgtgcatatcatgaccaaggaggatttgtcccaggaatgtaagcttgccttaacatttgaaaatcaatgtaactcagcattaatgactgaactataatgttaatgactaattatgaaagaaaaaccatatgaacatttcaatagatgctgaaagagcttttgacaatatccaacattcattagtgattaaaaaaaaacaaacttccagcaaactagaaatagaagagaactcctttaaactgataagaggcaccaaaaaaaaacattagctctaatgtcgttcttaactgtgtaagactgaccaccttcccagtgagatcaggaataggcaagggtgtcacggagagttatttagcattctactggagattg

SEQ ID NO: 86849 - DNA, 848 bp, Homo sapiens
tcagagcagagcaaggctgagccctgggggtaactgagcttagtgttactcatggagacaggagccaggaagcgcaggcctcccggcccatcggtgcagcctgacttggcgtggacagccccacctccacgggcagcgcccacgtcctcttcacacgggatgatctctacaacccatctggcagctttctccttgctgtgtgagtcttgggcctggtagaagtcaggagtgtacacttggttttttgaggagcagctcagagcttcaaggcagttacaacaataaagctcactgcacactgtgaatatgtgccccagagcatcgcagttttgaggatgggagtgagactagcagttcagaggcacggtgccagagtgtcacagttcctccctcccccaaagccagcttgtacttgaacctgtcgggagggttctattagtttcttatggccgctgtcacaaatacccacacacttagtggcttaagacaacacaaatctatcatcttacagttctgaggatagaagtatggaatgggtctcactgagatcaaatcacgatattgccaggggctgggcgcgatggctcacatctgtggtcctagcactttgagaggtcgaggcgggcggatcacctgaggatcaggagatctagaccagcctggccagcatggggaagacctggctctactagaaatacagaaggtacttcggggggtgaggcgtcaagcctggggacacccactacttcgtagggtgaggggcgaaaattgcatgcacccgggggggggggttaaaagagcttagatttcaccggcctcaacctgaggactcatgagaatgcccaagg

SEQ ID NO: 86850 - DNA, 2490 bp, Homo sapiens
  misc_feature (1)...(2490): n = a,t,c or g
cgaaaagaaagtgggggactctaaagattttctccttttaagaaaaaatagttccggctggggagtacaaaatggagtgtaaaaagggccttgggccccagggaggcccctgtggactaaggggagttcatgcaccccttctttccccagaggggctggactcaggtgagtatgggggtgggggctcctgcacttcgacacaggcagcggaagggttttctccccattccctctgcactcccaacttgagctatactttttaagaaagtgattcaccctgcctttgcccccttccccagaacagaacacgttgatcatgggcgatatttttcattgtgccaaaaagttgccatgaccgtcattaaacctgtttaacaccaaataataaggaaaataaaacaaaaagttcgggcatggtgcagaaactcactccaaataaattacctaccaaaatatataatggtggaaatattccaaaattccatattttgggatttatacacaaaagataaacaaattagaggccaagaggctgccggaagggaaaaacggggcctggaaaggccgttgtgaggaatgagcttggcctaaagaggccactggcaggcagtagctggacctgccgaagtggccgaaaggcaggagctttggacgggggaggccgcagtgaggcgagagctagctgggcgtggagagtccactgtgaggccaaggccaaggccgggcccgtgcaggcctttgagaggcaggaggccgggccttgtcgaggcctgcagaggccaccaaaagtcaaaagcggggcttgggaaggccgccgggaggcatgagctgggctgggccgaaagaggccactgggaggcaggaggagctgggcctggagaggctgctgaaaggcaggagctttcgcctgaggatgccacagtgagacaccatctgggtctggaaggttccactgtgaggcagaggctgggcgtgaagaatctgctgtgaggcagatgttgggattgtagaggccgacgggaggcagaggctgggcctggaggggccaccaagatgcaggagctgggcctggagaggctgcaaagaagcatgagctgggcctggtgaggtcgacttgagaaagttcagggcctggagagaaggctgggaggcaggagctgggtctaaagaggccattgtaacgatggagctgtgcctgtggaggctgttgtgaggcagtaggctcatctgcggagactgccgtgacgtagggtatgggcctaaataggccattgtgagtcatgagcttggtctgtagaggctgactggagaaagttctgggcctggagaggctgccgggaggtaggagctgggccaaaagatgtaagcacatttgcatttattaggcactttatttccattattacactgtaatatataataaaataattatagaactcaccataatgtagaatcagtgggcatgttaagcttgttttcctgcaactggatggtcccacctgagcgtgatgggagaaagtgacagatcaataggtattagattctcataaggacagcacaacctagatccctcacatgcacagttcacaacagggtgcgttctcctatgagaatctaatgctgctgctgatctgagaaggtggagctcaggcgggaatgtgagcaaaggggagtggctgtaaatacagacgaagcttccctcactccctcactcgacaccactcacctcctgctgtgtggctccttgcggctccatggctcaggggttggggacccctgctcaagtgcatcagaaacgacccttcttcccacaccagtcttcacagtggtcaagtgcagcaaccacttagctcccaaggcatgtgcctcagctggcatttcgtcacaatcaacagtaagtggtagcttgagtcactgtgaggtcacctactggaaatcaccagcatcccatttcccactggcaaagagctcagcactgcccaaatcccatctgtgtgggtttatctcctgggacccttcctaacatattagtcagagtccaatcaggaagcataaaccactcaaaagtttaaagtggtaaaatttaatacagagaattattcattataacaggtgaacagcataatgagagattgactagcacaaagtaaagagaactctagagaatataggactagcccaggccaggcacggtggctcatgcctgaaattccagcaatttgagaagctaatgcaggaggattgcttaaggccaggagctagagaccggtctggacaacacagtgagaccctgtctctatccaaaagaagaaaaaagttagctgggggtggtggtgcacacttgtagtcccagctattcggaatgcggaagtttgagcctgccaggtcaaggctgcagtgaggcatgattatgccaatacagtacagcctggtgacagagcaagaccctgtctcaaaggccaaaacgccaatganttacaccgcactttc

SEQ ID NO: 86851 - DNA, 400 bp, Homo sapiens
  misc_feature (1)...(400): n = a,t,c or g
cccacgcgtccgcccacgcgtccgcccacgcgtccgctttctaccttcataacctcctacttatgaatcaagaactaaattctggagacaagatgaaggtactacttaactaccatgacccctgctgactctgcttctgtggaaaccaataacttctctttcttcataaccccagnggtcactatttgaatgaagtgggattccaaacattttggcattcagtcttctgttttcagcccaggttggttttcattttttaaccacaggagatataaaagaatgatttagtaaatcataatagcagttaagtctgaagctgttcatcagcttctccttcacaagtttgggtatcagctcctcagtctcttttgctttcaccatttacaggcttcacttattg

SEQ ID NO: 86852 - DNA, 423 bp, Homo sapiens
tttcgtcgagctcttaggacgtatccgcctccatcctcccccggccggggctgcccgaggtttcgggattcctactggggatggccgggcagaggcgaagggatcacggcctccgtggtaggccgggacgggctccagggcgaagggcgaacgctggcctagggttggggaggcgcacatctggtgctgctgttgggaaggcctcggtttctgacccggccatacgtcctgatcccgggagaagctgcttttcctcccgggccggagccgcggctgggccaggagctcagactgcgagcccgaggttggtgggcgctgggggtgcccggcggagaaaggatttctttgtcattgcctttttggcacggcctgactttaccatacgtggccgggaagcatctggacacagcattaaaaaggctt

SEQ ID NO: 86853 - DNA, 815 bp, Homo sapiens
ggatcaagcatgaattgcaagcaaactgctacgaggagggagcctgctgtcactggagagagggggctgaggatgctgcaggggtgccctccttggtgtctccaggatctgatcatactgccttggcagaaagtgtgcctggtggacctttgagctgtgggaagggaaagcacagtgtgggcatggggcttaggggccagcaggagacagacatcaagccattacacaagtcaccacacactctggccatcagggctgcaaggcaggtgctcgagcagaaggaacagcccgaggcccagggctgtgcaccagggggtgaaggaagtaacagatggctccagctgggtgagcatgggcagaaaggggtgcccgagggaagcggggaagtctatgggaaccaggtcacggccagtgcaggagagcagactccatcctgcaggctgtggggagccatggaagggcttttggcaggacatggccactctgcaggagggatctgttgacctggctgtggagaacggagcggggacaagaggagggtggaagtggcttgggagacggtgagttgtgggctggggcaaggcacagggatgaagaggggctgtgtgtgtgacacactcagctatggaagaagccagtgctgttgaccccacttgggcatctctgtgggacccatgaggtaccttggcccactttggtggagtgcaaggccctggcagcccgagggaggcagagcaccaggctccaactcggagaccacccagctctggggacttcccaaggctgggcagagggggactccaccctggggaagg

SEQ ID NO: 86854 - DNA, 480 bp, Homo sapiens
  misc_feature (1)...(480): n = a,t,c or g
cggattcnacnccgcncagccgaccannnnnaaatgagaactaggccgtagcaccggcccggaancccgggtcgacgatttcgtcagaaaggtaaccagagctgcctcccccgtgccttggggacacccccagngacctgcccaggtgcagagcctgctccacctcctgcaggcctcagcctccgtcctgcccttgtccctccctccctgtcccgngagaatatggctcagccagaggatcctgtttcctcggctgttaacacccgagtaaacgcatccccgcctgccccccaggattggggaggactaagcaagctgactccccggtgtgcctgaggctgtcagccctgctgctacaaccaatatccctcctccagacgcgcggccggctcccgcaatgggcagaaaacggcctccgtctcaccgcagaacatgtgtaaagggggggacgtgtctgtgtgctggtaacacgttttttag

SEQ ID NO: 86855 - DNA, 2251 bp, Homo sapiens
ttttttttttgcatctgcacagactgtttttattattacctattgtaaaacatcaggttcactcaggagaaatatacgtgtaaacatttgctgtctgtcatgacaggtttggttgttggtggtgtcattttaagaaatagcaggtgcagctccatctcccgagtggggtttatggccaacagtctgaatctaggacgtgtgctcctggtttgcagcgctgggcaggcagtgtttttttgtcgtggtggttgttgggatgtttcagaaacacattttaaaaagaaagagatcagcagcgaaaaaccatatggctggctacatctttggattactggactccaggacgcccaagccaaacctttcaaaccggggtacaactttgctgctgttaatgtcagctgactttcagaagtgtccagggtgggagagccgccggttcagcttgggaagtttctccagcatgtccatcagcaggctgaagactgggtctctcctgcaggtcgaaagcccagcaggccgacagattctcactgacttccttccccaagctgacagaagtcaggacacgcttcattccttccccgcttccaatctgccagatggatgcctctgcagcctggttcttcaagggccagtctcttgcttgcagctcataccaaacagtcccaaatgcatagacatcagcagctttggagaatggcagctgatcctcgtccttcccgggggtcatctcgcgtacaatctcaggggccagatagcacagccagtcgtgggacagctttagctggttctcacgccgtccctctggggaccacgcctgagatcccaaaacagcccgaagtctgtgatgaccaccttgcccgttgtcatagaagacgtttctagatttgagatctttgtgtacgatgcccttggcatgaagatatcccatgcccttgatgatctcctgagcgatttgcctcgtcttgttgatgtccagagacgtcttggggtccctcacaaacgagtgcaacgtccgccccttgcagaagctggtgataatggccaggtggggcgggttcatgcaggcccccatgaagagcaccacgttctcatgccgcgtctgccggtagttcatcacctctttcttgaagagcttcaggtggtcctggttgtggccgtccatctccagcaggcgaatggccacctcgccatgccagcggccgcggtgcacccggccccagcggccctgcccgatgggctcgcccagctctacctgctcgaaggggatgtcccactcctgcaggtacacgctggtctggctggccttgcgagagatggggccccgccagggccggcgagagctcggcaagtcgtccacctcgtcctcatcgtcttctgcctctgacttgccagcctctggctcctcagcctccgcttcgtgagcttccaacacatctgctttcggctggtcatcgagccgggtaccgtcggcagcttcagggagcggggctgcgtgtgcaaaggctgaaatgtctggaaagataaactgcctgtcctatgatgaatgaagtagggcagctggggaagttgaacctgctgttcccgctggccagggtgaggggttgggggggcgtggtggcgctggatgggttggatgatgtcgggaagggcgccggtgaggagggtgtggagaaggtggtggaggaagggttgctgctggagtccaggtgattcatggccggagggtgctccttctttgtcagtgctttggggagggttccaaaatggggttcggctgctctgtccaccgggttgttgatgtccgaggggacagattctgtcctccgaagccgagttagtggcaggaaggatattctacaggcaggggcttctttggtacatttgttgtgacacttcaacctgcaatgcttgcacttcactccaaatatcatgctcttctggcacacgtggcagacctgcgacagccaggacttggtggagaacctgtgcgtcaccgacagcccgatatccctccgtaccatctgtggggatccatgcgagagatcaaacctcatcgaggagacgtcatcaatgcggttccccagctgagactcatgggacttgctccgggtgagtgtggggaagctgggcagcagctggaagaccttgcggctgggtggttgttgggatgtttcagaaacacattttaaaaagaaagagatcagcagcgaaaaaccatatggctggctacatctttggattactggac

SEQ ID NO: 86856 - DNA, 426 bp, Homo sapiens
tttcgtcacatcttaatgaaactcttgaaaactaaaaggaaaagtcttgaaagtggctacagagaaatgatgtgttgtatataggggaacaccaatttgaatggcagcaaatttttcacctgaaacaatggaggtcagaaggcagtggcacaatatttttcaagttatctcaagaagataactatcaattacaaattctatctctggtgacgatatccttgaggaatgaaggagaaataaagacatttttacacaaagaaaacagagaatttgatgctagcagacctactctcaaagaatggctgatggaagttctccaaacaaaggaaattataacagaagacatggaacttcaaaaagaaaaaagaacaatggaataggtaaaagtaggaataagaataatagactatcttcaacagttttaga

SEQ ID NO: 86857 - DNA, 413 bp, Homo sapiens
tttcgtgagaacctaaaagccttattcagatcatcaagcagagcatcgtggagctcaagctgcaggcggaggacagcttcgtgctgaaggtggtgcagctggaggagctgctgcaggtccgccactccgtgttcatcgtcgggaatgcgggcagcggcaaatctcaggtcctcaccctggccagcaacgagcggatccccctgaaccgcaccatgaggctggtgttcgaaatcagccacctgaggacggccaccccagccaccgtttccagagccggcatcctctacatcaacccagccgacctgggatggaacccggtggtgagcagctggatcgagaggcgcaaggtgcagtcggagaaggccaacctgatgatcctctttgacaagtacctgcccacgtgcctggacaag

SEQ ID NO: 86858 - DNA, 824 bp, Homo sapiens
tctgtagatccctagtccagcgtggtggaattccacctgggcagacaccttctctctgctcttggctcttgccgttgccctctacttgggctactactgggcatgtgtgcttcagacccacagggctttttgtgccagcaatactgaagatctagagacagtcgtgaaccacataaagcatcgttatccccaagctccactgctggccgtgggcatctcttttggagggatactggtgctgaatcacctggcacaggccaggcaggctgcagggctggtggcagcactgactctgtctgcatgctgggattcctttgagaccactcgctccctggaaaccccactcaactcactgctcttcaatcagcccctcactgctgggctctgccaacttgtggaacgcctatcctatggtaagacctgcaggcccgtacaatccgccagtttgatgagcgctacacatctgtggcctttggatatcaagactgtgttacctactacaaagcagcaagccctagaaccaagatagatgccatccggatccctgtgctctatctcagtgcagcagatgaccccttctccaccgtttgtgcccttcccaaacaggccgcccaacactccccgtacgttgcgctgctcatcacagcccggggtggccacatcggcttcctggaagggctgctcccgtggcagcactggtacatgagccgcctcttgcatcagtacgccaaagccatcttccaggacccagaggggctgcctgacctcagggctctcttaccttctgaggacagaaacagctgacaagagtaccatttggggtc

SEQ ID NO: 86859 - DNA, 441 bp, Homo sapiens
atgttgactattggcggacggggtctcaaaggcgccactgagcgtgcgcagaaccgacccctgcagccctttaggctgcggtgccaaagagtcggtcccgaagcggaagtgcttgttggggccaggctttgtaacggtctcctgagcagcgagcagaaaatctgttatcgagagagacacagtgacctgcccctaaaggttcatgcgcatccctcagacccctctttagacgcgccccgcttctccctctgccctctccccttgcccaagccccgaggtgggggcctggtgtgaatgctccggccgaagtgaacctgcacccccgcacccgaaggcctctttccggcttctgggcaaggcggccccggtgagctcggccgtcacacatctctgctttttcccaagaagagcaggaaatggccaaaccccagaaaaaaaaag

SEQ ID NO: 86860 - DNA, 2579 bp, Homo sapiens
gggtctcggatggcaggagtgggtctggaagcccctcacccacgcacatttccccctcctacagcctgagcccttacagccacgatggggacagcctgtctcgctcccaagaccacattccactggctgccctgccactgctggccacctcatcctcccgctaccagggcgccgtggccaccgtcattgcccgcaccaaccaggcctactcagccttcctgcgctcacctgagggtgccggcttctgtgggcaggtcgcactgattggagatggtgttggtggcatcctgggctttgatgcactctgccacagtgctaacgcgggcaccgggagtcggggcagcagccgccgtgggagcatgaacaatgagctgctctctccggagtttggcccagtgcgggaccccctggcagatggtgtggaaggcctgggtcggggcagcccagaaccctcggccttgcctccccagcgcatccccagcgacatggccagtcctgagcccgagggctctcagaacagccttcaggcagcccccgcaaccacctcctcctgggagccccggcgggcaagcacggccttctgcccacccgctgccagttccgaggcacctgacggccccagcagcactgcccgccttgacttcaaggtctctggcttcttcctcttcggctccccactgggcctggtgctggctctgcgcaaaactgtgatgcccgccctggaggcagcccagatgcgcccagcctgtgaacagatctacaacctcttccacgcggccgacccctgcgcctcacgcctcgagcccctgctggccccgaagttccaggccatcgccccactgaccgtgccccgctaccagaagttccccctgggagatggctcatccctgctgctggccgacactctgcagacgcactccagcctctttctggaggagctggagatgctggtgccctcaacacccacctctactagcggtgccttctggaagggcagtgagttggccactgaccccccggcccagccagccgcccccagcaccaccagtgaggtggttaagatcctggagcgctggtgggggaccaagcggatcgactactcgctgtactgccccgaggcgctcaccgcctttcccaccgtcacgctgccccacctcttccacgccagctactgggagtccgccgacgtggtggcgttcatcctgcgccaggtgatcgagaaggagcggccacagctggcggaatgcgaggagccgtccatctacagcccggccttccccagggagaagtggcagcgaaaacgcacgcaggtcaagatccggaacgtcacttccaaccaccgggcgagcgacacggtggtgtgcgagggccgcccccaggtgctaagcgggcgcttcatgtacgggcccctggacgtcgtcacgctcactggagagaaggtggatgtctacatcatgacgcagccgctgtcgggcaagtggatccactttggcaccgaagtcaccaatagctcgggccgcctcaccttcccagttcccccagaacgcgcgctgggcattggtgtctaccccgtgcgcatggtggtcaggggcgaccacacctatgccgaatgctgcctgactgtggtggcccgcggcacggaggctgtggtcttcagcatcgacggctccttcaccgccagcgtctccatcatgggcagcgaccccaaggtgcgagctggcgccgtggacgtggtcaggcactggcaggactccggctacctgatcgtgtatgtcacaggccggccggatatgcagaagcaccgcgtggtggcatggctgtcgcagcacaacttcccccacggcgtcgtctccttctgcgacggcctcacccacgacccactacgccagaaggcaatgtttctccagagcctggttcaggaggtaggactgaacatcgtggccggttatgggtctcccaaagatgtggctgtatacacggcgctggggctgtccccgagccagacctacatcgtgggccgtgccgtgcggaagctacaggcgcagtgccagttcctgtcagacggctatgtggcccacctgggccagctggaagcgggctcgcactcgcatgcctcctcgggacccccgagagctgccttgggcaagagcagctatggtgtggctgcccccgtggacttcctgcgcaaacagagccagctgcttcgctcgaggggccccagccaggcggagcgtgagggcccgggaacaccacccaccaccctggcacggggcaaagcacggagcatcagcctgaagctggacagcgaggagtgaggcccacaccagcctggacctgggttatttattgacacacccaaggggcccgaggggctgcgtgtgggaggctggggacccagacttttggccccagcgctggcccccccagccccacaccctatatctccgtgtgctcctcggtgttacttccctttcatatgaggggacccagcgccggggggagggaggagggcgtgggcatgggcgcagaggcttttccagtgtgtataaatccatgaaaataaacgccacctgcacccc

SEQ ID NO: 86861 - DNA, 2012 bp, Homo sapiens
tttcgtgcgggagatcagaggtcccgccgtcccgcgcctgacctcggctgaggacaggcaccgccatgggccacacgcacacagcccggagttgcagcggaccggcagagattacagcctggactacctgcccttccgcctatgggtgggcatctgggtggctaccttttgcctggtgctggtggccacagaggccagtgtgctggtgcgctacttcacccgcttcactgaggaaggtttctgtgccctcatcagcctcatcttcatctacgatgctgtgggcaaaatgctgaacttgacccatacctatcctatccagaagcctgggtcctctgcctacgggtgcctctgccaatacccaggcccaggaggaaatgagtctcaatggataaggacaaggccaaaagacagagacgacatcgacttaggcctgatcaatgcatccttgctgccgccacctgagtgcacccggcagggaggccaccctcgtggccctggctgtcatacagtcccagacattgccttcttctcccttctcctcttccttacttctttcttctttgctatggccctcaagtgtgtaaagaccagccgcttcttcccctctgtggtgcgcaaagggctcagcgacttctcctcagtcctggccatcctgctcggctgtggccttgatgctttcctgggcctagccacaccaaagctcatggtacccagagagttcaagcccacactccctgggcgtggctggctggtgtcaccttttggagccaacccctggtggtggagtgtggcagctgccctgcctgccctgctgctgtctatcctcatcttcatggaccaacagatcacagcagtcatcctcaaccgcatggaatacagactgcagaagggagctggcttccacctggacctcttctgtgtggctgtgctgatgctactcacatcagcgcttggactgccttggtatgtctcagccactgtcatctccctggctcacatggacagtcttcggagagagagcagagcctgtgcccccggggagcgccccaacttcctgggtatcagggaacagaggctgacaggcctggtggtgttcatccttacaggagcctccatcttcctggcacctgtgctcaagttcattccaatgcctgtgctctatggcatcttcctgtatatgggggtggcagcgctcagcagcattcagttcactaatagggtgaagctgttgcttgatgccagcaaaacaccagccagacctgctactcttgcggcatgtgcctctgaccagggtccacctcttcacagccatccagcttgccctgtctggggctgctttggataatcaagtctacccctgcagccatcatcttccccctcatgttgctgggccttgtgggggtccgaaaggccctggagagggtcttctcaccacaggaactcctctggctggatgagctgatgccagaggaggagagaagcatccctgagaaggggctggagccagaacactcattcagtggaagtgacagtgaagattcagagctgatgtatcagccaaaggctccagaaatcaacatttctgtgaattagctggagtaggagtctgggagtggagaccccaggaaacagcatgaggtgcttactcaggaagtcaggacatttttggcctttggcttaacttccagatgctcagtcggcttggggaaggactgaagggcagctgccaagacctcagttacctcctgacctgagggtggagagtggcaggaagcaagcatgtttgctgtgcacttaggaaaggctggtgagccagagggactgatcaggccccattcactctctactcattaaaaggtcctgagccacgaagcgcttcccattttgaactttctgtcctcacagattctgtttgacagaatctaagggccatcagggaactcttttcatcttgcaaagagaaaaagccagtctttccagaataaatattcatctgtttgaaaaaaaaaaaa

SEQ ID NO: 86862 - DNA, 424 bp, Homo sapiens
tttcgtgagaccttcgagtgagccgggccctgagggtgggggatgcaccgaggcccgagggtccgtccactgctgcggttccgaggctcccccgccactctctctctgcccaggttctgctggtgggaagggatgggacccctctctgctgccccctcctcccctccacactgcccatctctgatgtctggccctggggaatggcaccagttccagcctgggaatcaacccagttcctgagtgcccatcccaccccgcggttgcctctcctcggcacccttgattgggttttgcactaaagaggtcagctgggccaatgatattgctccagaccgagacctacccaccttcccccggaagtgtcccaagaggctccgaaggcctcccctccgagcccagctctcctgtctcctccacagccagg

SEQ ID NO: 86863 - DNA, 435 bp, Homo sapiens
  misc_feature (1)...(435): n = a,t,c or g
tttcgtcgcaatacatcgtgcagtcaaagacaaagatattcttataagcagcaagggagaagcaactcacacatgcaggagattctcgataagattatcagcaaatatctcatcanaaactggggaggccagagggcagtgtcccagtgtattcaaagtgcttaaagaaaaaaaactgtcaactaagaaatcctttggccaaaagtaagggagaagtgaagacattcccagacaaacaaaagccagggagtttgataccactagacctaccatccaagaaatgctaacaggagtcctgcagggttgaaatgaaaggacactgacagtaacctgaagctgtgtgaagaaatagagatctcagcgaaggtaaatattatgattgcaacgacaatgtgcaattccactttttgttttctacatgatttaagaaactan

SEQ ID NO: 86864 - DNA, 1086 bp, Homo sapiens
tttcgtgctctgtgctggcgcctgctggccactgagggacagggacacgtgccacctgctcatctctgccctgaggtcaccccgtggtccctccacgtgcccatctctctgcagtgccctcctcgcctgtgcagcccgcccacccacaggctcacccctcctgccggctgccagaggccccctccagcagggcctctctccgttgccccagcttcactctctccctcagcacctgccctgctggaggccccagccctccgtggacagcaggggccacgtggagcccgggccgctcacccgccacccagtgctggccgccttcttggtgccaaacccccttcccccacccagagactgggcagctgtgtctggttcgttctttgcactaaccacatttgtcatctctagggcaggctggggctgcgggctgagggggaccgctggcaccccccttccctcccttcttggttccatttccatccatgacaggtacagcatcccaggagcccggcctgaggggctggacccgagccggctgtgaacatccctcagcccctgctgtccccccttgggactaaccactaacctcacccccaaactccacgggtgcccctagctggcccagagccggcagtgtgagcccaagtccgggctggagccgaggccggagcagctgtctgggaggcaaggctgcagtagcgtttcttcatggggtgctccagggggtgccacagaccgacaggcagcccaagggcctggacacccctccccaggcaggtgctgccccaggaggactgtcctcgggaatgaacctcccgcgggctttggactgaggtccctgtggcctcggtctcctccccatgaagtgggagcgaggctccccaatggtgcttttggctttagtgtacgatgtttgctgtgcttcccgccgtggagggcagagccaccccacatcaggatcggacgtgctacccctcccggtcccggccctggcccagccagcccagccctcgaggctcgatgcctgtgccaaggccaggggcagccagagggcagctggatggccacgtgcaggggtcaaggctg

SEQ ID NO: 86865 - DNA, 414 bp, Homo sapiens
tttcgtgaaaaactgaaaaattttttattcatcaaagatattgaatcagttaaaaaaatcttggcaaccaagaaagctccaggctgagttctaccagacactcaagtgacagctgatgctaaccttaaacacattatttcaaaggaccctcaaataaagaatagtttccagcttgtttatgaggataacataaccttattagcaaaaccagacaaggacacattgagaaaggaacattacagaagagttttgatcacgtacatatgcataagtactatacaaaatatttctgaaggaatggaaaatgatattttaggcaaagatgaaccataagaaaaccaagatgacagtcacatcggacaaaatatagaagataaaacataaggagcacattatgtcgtatatcgatagaag

SEQ ID NO: 86866 - DNA, 2464 bp, Homo sapiens
cgcccccgggagaccaagagaagggggaaatggggctgggggccgtccccgggagacaggcggccttccgagagggactggagcaggccgtgcggagtgggcattgcttgatgggcaggaagttgagtgttccttgcaagggtgctgtggcaagaggaggcctggtgtatttggcagcgttcctgaggctggacatgatccacctgatggctggccgagtaccccagggagctgatcgaatagcagtcaaggctgagatggaggccgtttttctggagaacctgaggcatgcagctggggttttggctcaggaggacctcgtgggactgctggagcccatcaacacccgcatcactgacccccagtacttcctggacacgccccagcaggcggcagccatcttacagaaggtaggaagacccaacctccaattacaaatggacatattccactggcagatcatggatgggaacctgacaggaaacatccgggagttcctgcccattgttgggcatgtgcaggtggcacaggtcccaggtcgaggggagcccagcagccccggagagctgaatttcccctatctgtttcaactgctggaagatgaaggctacaaaggcttcgtgggctgagacacagtagagggcttgagttggctacgttcatactgggataggcggggccacccagaggctggccagtgagggcccgcacaccacccacgtgcctccagacagcgagtgacatcccatctcctcctctgcattaaagatgacctgctgaacattgtcatatgtctctgtaatggggtggtgggacacatagtgtctaacacttcagtttctctgctgcttccctcccattgagaagccagtgccagggttgctgtgaagatgggagagcttctgaacccacctcattaaaggatgagaaacccagggtccgagagcaaagggacttgacggtggccgcaagtgcttcaaaggcagagctgggattggaacccaggtgtcatctcgatgggaatgtccagcagtgatgtccaagtgggaagtgaagacccgaaggctcaagggacacaggtggctgacagtggtcaaaggctagggggcaggattcaggcagaggagctctagggggtgtttgccaccctgtgtgaactcccgagactctaccaggggggccgaaaggagtaccccagaagggcccaaggggtcctcggggttgacctgactctctggagtcctggatgggtcagtggctgtgggtgtttggggagggcggttcctgctgccaggctggggcagcagaccctcaagacatagttacaaagcctttggtgtcactcagtgtctggcttgccctggggcccagaagggctggtcagtcctgcctctggcaggcaatctggtaggcccatgattcaaggaacagtgacattcagtggtccagtccactccctcagaggaggcgggtccagagggtgaaacaggctgtgttgatgacagactccaggtggtggtaggtggagaccagttgggcaggggggctctcgctgtcctggggctgtactgggaagggctctcggaaaaccactgtcagagacgtctttcctaagtgggagtccagaaacactagcacaaagcagtcagtgaacttctgattcagcacaaccaggtactgagttcccaagtctgggctttggaaatggcgacagctctgggggaagcggcttaggagaactttgatcaggctctggtaccaggagaccgtcatggataggaagcagtccagctgggggtcgatgtccccaatggatttggcatggactgcttctaggagttcctccagctctgccagggccaggcgcccccctagccgcagtcgatcaggccccggtggctccagcaagaagaggcgcttccaaagggtgtcccgacggcagtgccctccagccagccgcaccagctgagccagccgtgctcgtgccatgcccacctctgcagccagtggtgggaacagaggagccggtccaggcgctagaataagccctgaggcctccccagggctgccagctgaactcccaggagcctctggctcagggggcagtctgggtggcttccggaagcggcgcatgtcagcagtgagcctggggaagagctctcgctggctggtgagcaccacgaagaactgtagccgcagaacgtgccgctcagcctctccttgctcctcaaagggtgcagcacagtgacagacaagcagagacacatcaaagtcatcctggtgtcgaagtccctcagagtccaggtaggagccagaactgtgccatgccgacaccagggcatactcgttgtgttctgggccccctggccgggccattcgcaatggcttcatgtggtaagagctggcgtgatcagccacgtagttgtatagctggtgggcagcaatgagtggtgtggggagctcc

SEQ ID NO: 86867 - DNA, 2879 bp, Homo sapiens
cgggctgtccggccagggtggttggtggtaaggattcaggctccgtcctaacgaggccgtggcctgaggctcagggccccccgcccctccctcccagcccaccagcgtcacctcccagccccgagctggaccgcacaccttgggacacggttttccacttcctaaggacgagccccagactggaggagaggtccgaggaggtgggcgttggactctttgcgaggaccccggcggctggcccgggggaggcggccgaggcggcggcggcggcggccgggggcgacacggcggaggagcaggacctatcggaggtggagctgagccccgtgggctcggaggagccccgctgcctgtccccggggagcgcgccctcgctagggcccgacggcggcggcggcggatcgggcctgcgagccagcccggggccaggcgagctgggcaaggtcaagaaggagcagcaggacggcgaggcggacgatgacaagttccccgtgtgcatccgcgaggccgtcagccaggtgctcagcggctacgactggacgctggtgcccatgcccgtgcgcgtcaacggcgccagcaaaagcaagccgcacgtcaagcggcccatgaacgccttcatggtgtgggctcaggcagcgcgcaggaagctcgcggaccagtacccgcacctgcacaacgctgagctcagcaagacgctgggcaagctctggaggctgctgaacgaaagtgacaagcgccccttcatcgaggaggctgagcggctccgtatgcagcacaagaaagaccacccggactacaagtaccagcccaggcggcggaagaacgggaaggccgcccagggcgaggcggagtgccccggtggggaggccgagcaaggtgggaccgccgccatccaggcccactacaagagcgcccacttggaccaccggcacccaggagagggctcccccatgtcagatgggaaccccgagcacccctcaggccagagccatggcccacccacccctccaaccaccccgaagacagaactgcagtcgggcaaggcagacccgaagcgggacgggcgttccatgggggagggcgggaagcctcacatcgacttcggcaacgtggacattggtgagatcagccacgaggtaatgtccaacatggagacctttgatgtggctgagttggaccagtacctgccgcccaatgggcacccaggccatgtgagcagctactcagcagccggctatgggctgggcagtgccctggccgtggccagtggacactccgcctggatctccaagccaccaggcgtggctctgcccacggtctcaccacctggtgtggatgccaaagcccaggtgaagacagagaccgcggggccccaggggcccccacactacaccgaccagccatccacctcacagatcgcctacacctccctcagcctgccccactatggctcagccttcccctccatctcccgcccccagtttgactactctgaccatcagccctcaggaccctattatggccactcgggccaggcctctggcctctactcggccttctcctatatggggccctcgcagcggcccctctacacggccatctctgaccccagcccctcagggccccagtcccacagccccacacactgggagcagccagtatatacgacactgtcccggccctaaagggggccctgtcgccaccaccccccgcccagcccctgcccccagcctgtgtgccctgttccttgcccacctcaggcctggtggtggcagtggaggaggctgaggaggctgaagaggctgacaggtcggggggctttctgtctggctcactgccctgatgacccacccgccccatccaggctccagcagcaaagccccaggagaacaggctggacagaggagaaggaggttgactgttgcacccacactgaaagatgaggggctgcaccttcccccaggaatgaccctctatcccaggacctgagaagggcctgctcaccctcctcggggaggggaagcaccagggttggtggcatcggaggccttaccactcctatgactcctgttttctctctcacagatagtgagggtctgacatgcccattgccaacctatgccacagtgcctaagggctaggccacccagagactgtgcccggagctggccgtgtctcccactcaggggctgagagtagctttgaggagcctcattggggagtggggggttcgagggacttagtggagttctcatcccttcaatgccccctccctttctgaaggcaggaaggagttggcacagaggccccctgatccaattctgtgccaataacctcattctttgtctgagaaacagcccccagtcctcctccactacaacctccatgaccttgagacgcatcccaggaggtgacgaggcaggggctccaggaaaggaatcagagacaattcacagagcctccctccctgggctccttgccagctccctcttcccttactaggctctatggcccctgctcagtcagccccactccctgggcttcccagagagtgacagctgctcaggccctaacccttggctccaggagacacagggcccagcacccaggttgctgtcggcaggctgaagacactagaatcctgacctgtacattctgcccttgcctcttaccccttgcctcccagtggtatttgaataaagtatgtagctatatctgcccctattttcctgttctgcagccccccaaatccacatgtaactcattactgtctcctgttatttatctcagtagtcccctctcctagccactctagcccctattaactctgcattaagcattccacataataaaattaaaggttccggttaaaaaaaaaa

SEQ ID NO: 86868 - DNA, 3420 bp, Homo sapiens
atggacttgtacagcaccccggccgctgcgctggacaggttcgtggccagaaggctgcagccgcggaaggagttcgtagagaaggcgcggcgctcatagaggccgcctggccgctgctctgagggagcgcgggggccgcctcggtgctgctgccccgcgggtgctgaaaactgtcaagggaggctcctcgggccggggcacagctctcaagggtggctgcgattctgaacttgtcatcttcctcgactgcttcaagagctatgtggaccagagggcccgccgtgcagagatcctcagtgagatgcgggcatcgctggaatcctggtggcagaacccagtccctggtctgagactcacgtttcctgagcagagcgtgcctggggccctgcagttccgcctgacatccgtagatcttgaggactggatggatgttagcctggtgcctgccttcaatgtcctgggtcaggccggctccggcgtcaaacccaagccacaagtctactctaccctcctcaacagtggctgccaagggggcgagcatgcggcctgcttcacagagctgcggaggaactttgtgaacattcgcccagccaagttgaagaacctaatcttgctggtgaagcactggtaccaccaggtgtgcctacaggggttgtggaaggagacgctgcccccggtctatgccctggaattgctgaccatcttcgcctgggagcagggctgtaagaaggatgctttcagcctaggcgaaggcctccgaactgtcctgggcctgatccaacagcatcagcacctgtgtgttttctggactgtcaactatggcttcgaggaccctgcagttgggcagttcttgcagcggcacgttaagagacccaggcctgtgatcctggacccagctgaccccacatgggacctggggaatggggcagcctggcactgggatttgcatgcccaggaggcagcatcctgctatgaccacccatgctttctgagggggatgggggacccagtgcagtcttggaaggggccgggccttccacgtgctggatgctcaggtttgggccaacccccatccagcttagacccttaaccagaagacccctgaaaaacagcaagagcctcaatgctgtgtacccaagagcagggagcaaacctccctcatgcccagctcctggccccactggggcagccagcatcgtcccctctgtgccgggaatggccttggacctgtctcagatccccaccaaggagctggaccgcttcatccaggaccacctgaagccgagcccccagttccaggagcaggtgaaaaaggccatcgacatcatcttgcgctgcctccatgagaactgtgttcacaaggcctcaagagtcagtaaagggggctcatttggccggggcacagacctaagggatggctgtgatgttgaactcatcatcttcctcaactgcttcacggactacaaggaccaggggccccgccgcgcagagatccttgatgagatgcgagcgcagctagaatcctggtggcaggaccaggtgcccagcctgagccttcagtttcctgagcagaatgtgcctgaggctctgcagttccagctggtgtccacagccctgaagagctggacggatgttagcctgctgcctgccttcgatgctgtggggcagctcagttctggcaccaaaccaaatccccaggtctactcgaggctcctcaccagtggctgccaggagggcgagcataaggcctgcttcgcagagctgcggaggaacttcatgaacattcgccctgtcaagctgaagaacctgattctgctggtgaagcactggtaccgccaggttgcggctcagaacaaaggaaaaggaccagcccctgcctctctgcccccagcctatgccctggagctcctcaccatctttgcctgggagcagggctgcaggcaggattgtttcaacatggcccaaggcttccggacggtgctggggctcgtgcaacagcatcagcagctctgtgtctactggacggtcaactatagcactgaggacccagccatgagaatgcaccttcttggccagcttcgaaaacccagacccctggtcctggaccccgctgatcccacctggaacgtgggccacggtagctgggagctgttggcccaggaagcagcagcgctggggatgcaggcctgctttctgagtagagacgggacatctgtgcagccctgggatgtgatgccagccctcctttaccaaaccccagctggggaccttgacaagttcatcagtgaatttctccagcccaaccgccagttcctggcccaggtgaacaaggccgttgataccatctgttcatttttgaaggaaaactgcttccggaattctcccatcaaagtgatcaaggtggtcaagggtggctcttcagccaaaggcacagctctgcgaggccgctcagatgccgacctcgtggtgttcctcagctgcttcagccagttcactgagcagggcaacaagcgggccgagatcatctccgagatccgagcccagttggaggcatgtcaacaggagcggcagttcgaggtcaagtttgaagtctccaaatgggagaatccccgcgtgctgagcttctcactgacatcccagacgatgctggaccagagtgtggactttgatgtgctgccagcctttgacgccctaggccagctggtctctggctccaggcccagctctcaagtctacgtcgacctcatccacagctacagcaatgcgggcgagtactccacctgcttcacagagctacaacgggacttcatcatctctcgccctaccaagctgaagagcctgatccggctggtgaagcactggtaccagcagtgtaccaagatctccaaggggagaggctccctacccccacagcacgggctggaactcctgactgtgtatgcctgggagcagggcgggaaggactcccagttcaacatggctgagggcttccgcacggtcctggagctggtcacccagtaccgccagctctgtatctactggaccatcaactacaacgccaaggacaagactgttggagacttcctgaaacagcagcttcagaagcccaggcctatcatcctggatccggctgacccgacaggcaacctgggccacaatgcccgctgggacctgctggccaaggaagctgcagcctgcacatctgccctgtgctgcatgggacggaatggcatccccatccagccatggccagtgaagctagaactctcaggaccccaaactccacctcttggattggccctggctgctgccacacacatatccaagagctcagggccagttctggtgggcagcagagacctgctctgccaagttgtccagcagcagagtggccctggcctgggcatcacaagccagtga

SEQ ID NO: 86869 - DNA, 388 bp, Homo sapiens
aaacatttaggcatgcaaaaaaactttaaccataaagtgctatctacgtgttcgttattattagttgctagcattgtcaaactcatttgtgcagaatgtatgctgcttatttaatatttgaatcatcagatttaaaagttttactttgtaaaatagttttcctttcatatgttattgaggcatattgtattattgtatttatttggggttaactagctttcctttcctgaagtagtccctattttgccataatttattttggttttcttagacaggtattttaaataaaagcatttaagactatatatttatctattagtttagctttagttatgtctcacaaattttaatacacaatattttatgtcaaatgttattgaaattatat

SEQ ID NO: 86870 - DNA, 1354 bp, Homo sapiens
tctaaagagcttttatttctttctagagaataaggaaaatgatactctgcagaatttctatttcttttgtaattatctcaggggaaggtagttattaagtgttcactgattaggattaatgtttccaatttttgtcaagaacagaatgtatgtattactaatttaaccataatttcaatcaaaactgtgtcattaaaaatgttggcagtcatgcatttcctgcatggttatgaattttttcatgtatctatagtatttttctaacagtctaattttaattcattcactttctcacgaaaatgtattttttttccatttcagcatgtagtacttgtgttaccttttcacgaggcccacactcctccaaggaggctgctgattgtctctaaactgattacctccatttgttctttccttgatcttacagtgtccatcagcttcctatgattgaagaaaagcttccacttgtaataaaccaacttctctcatccagttatcaacatagaccaaaaaaaaaaaagaaaaaaaagggccaggcgcaggggctcatgcctgtaatcccaccattttgggaggccaggggggccaaatcacttgaagtcaggagttcaaaaccagtctggccaacatggggaaaccctgtctttactaaaaatacaaaaattacccggaaatggggggggcgcgcctatagttccagctactcaggaggctgaggcaggtgaattgcttgaatccaggaggcggaggttgcattgaaaggaaatcatgccactgcactgggcggcagagcaaaactctgtctcaagaagaaaaagaaaaaagaaaaaagcggagtcgttctgtgagtgaaaacactgaattccaccggttcctgatcatattgcctttatttcattcattcattcattctggaaatggggataaatagcccgtttgtctttcctgcaggtttgttacgatggtgaaggcaatttagaaggaactatttagtggaggataaaagtgttttgtaaatgttaagatgcattgttttgtttctgtcctgctgcccaattttctctcagcccaacacctgcctctatttggttcttaggttacacattaattccatttgcttagtaatttaaagaatgtactgtagtacaccaataagctaacaaactcgggcccttgaccccaagtcaccagtgtcacctagattcaaaaaccaatataacgagtcaagtatgaatgcacaatattttagctaagccctttctgtcccacctctaatgaatccacatgctgccccagggcttggcacatgctggtaaagtaagcaggctttgctccctcctgctccctggttttg

SEQ ID NO: 86871 - DNA, 389 bp, Homo sapiens
  misc_feature (1)...(389): n = a,t,c or g
atttggttaattgctctctcaaattcataggaacaattaaagattgaaaagcccagaccattttagttatacaagcagaaggatacttttatttattataaagctctaataattaaaacaatattgcatagtttcaggtgtcagcaaatagacaaatgcaactgaatagaaagcctagatacagactcacatacatttggatatttggcaaatggtatgggttgcattancatcagtaagaagacaggtattattcaataaatgaggcaaagactattggcgatccatatggaggaagataaaattagatccctattaacagtcctaggtggaaggacctaaatatacaaagcaaaaataaaactattataagaaaacataggagaatg

SEQ ID NO: 86872 - DNA, 1717 bp, Homo sapiens
taataaatattggaagaaacctgggaaacatgtcgagttgattctaagagtgttagatccaacagggtaggctatcacactccatttgtttaattcattgatatagatgcacttaccagagagtctggatttcatggtttagcttgagcagcaggaggtgactcaacatttgcctacatttgatgaggtggagatgtcagagcttccctgctatgatttgggggagagaatccaaagatgtagggagacaggaatgtcacagtggatttatcatgtgtgacttacacgtctaccaccaagcacccattcctaaccatgagaaggcccagaagacacttctttactaagacattgagaaatagaatagtgaggggagcatctgcctctctaaaagctctgtgcttgctttcctacataggcaggtgtgaccctaaggatgttgtcattgagatgagcttcctggtatcagtggggtgatgggatcctgaagtgcctccggataattgggagcacttaattgtcagagataaggtgggcacatttaccacgaagggcggcagagatgtaatcagaatgcctttggccactgggattcttggcaatggctaatgaatgatggtatctctaggaacaaaattgttgggctgcctactcaagtataacagaaaaaaattctgggtctggtagccagaaacctgatttgaatcaccacagcagagagtcacggcctctcccctagctcttaggactgagtcagttcacagccccagggcccctttatgaactggggtgtgagggtgtggggggatttcccccaaagaatgaactctgcagccctgctgcaagtacctactgtaagtctcccctcctaggcccctactcagaagccctgtgcctatttacagagtgactgtgcacctggggaaagcaaactacccccaggccttctgagatgactgaagcattggctctgaattgatgttcatgcaccggggacccaaaagtgacaagcgtggccactagtcaaaatgggagattaatggtgggttaaggtgacagataccttactaaaaagttttttttggttggttttgtttttgtttttcctaatcctgggatgcgtactcaattagggaaaaaaaaaaaaagaaaaacagtttttttgtccaattgagttattttttctcctttaatatgttaataaagtagaatacattgagagagttgctgatttgagtcatctttaaattcctgggataaaccctactaggtcataacgtgtttggccagcaggaatcctcctgcgcggtctcagtaaaacgtgtgggtggacaagtgcggccgggtgtcccacccacataccgctggcagccgcactctggtgaccggacagtgagacgccctcctgtcgtgtgcctccagcgccctctactgacacagcttagcattttgtcagctggcaagaaaaacgttcacagcaagcatccactttcacaaagcaaagaggtggatttggagctgacaggcagtaaattggtaactgccacaaatgagttttttttttttaatcatcaactgggaaatttactctgtaggtttctgggaaacaagctttatcaacttcaggaagtatctttttttcttgttaaaagtttttcttctcatcaggatgagtactcaattttgaaatggatttttttttcattaatggaaaggg

SEQ ID NO: 86873 - DNA, 775 bp, Homo sapiens
gggatgcgcacgcgtgcgaaagcttcaacaatatattagatcaagcagaaaaaaaagtcttagagctagaacacaggtcttttgacataactcagaaatagaataaaaaatgagcaaagcctttgtgacatatgggacacaataaagcaactacatatctaaattattgggatcccagagggttaagagaaaatgaaagagtgagaaaacctatttaatgaaataatattaataggtgaaaacttcccaaatctcacaagagatttagacatctatatataggaggccctgatagcctctaaatggatacagtgcaaaaaggtattctctatggcacattatagtcagactctctaaagtcagataattctaaggacagcaagagaaatgtgtgtaagcaactataaaggaagccccatcagactaacagtggatttcagcagaaaccttacagatcaggagaaaatgagataatatgttgacagggctgaaggggaaaaaaagtaagccaaggatactatgtctagcaaaattatccttcataaatgaaggagaaataaagtatttccaagacaggcaaaagctgagagaattgatcaccactagactggccctacaagaaatgctcacaagagtcctaaacatggaagtgaaaacatgacatttaacactatgtaaaacacacaaaagtataaaactcactggcaaagcaaacacacagatgaggaaaagactcaaatgctaccactacagaaaactaccagagtacaatgcc

SEQ ID NO: 86874 - DNA, 451 bp, Homo sapiens
  misc_feature (1)...(451): n = a,t,c or g
attcgagatcatagaccacgtggtggaattcaaggcatacatacaaagaagtaaatagtctctttggcagatgacatgacataattgtttatgtaataaatttttaaggaccctacaaagcagttactggaactaataagtggctttagcaagattgcaggacataacggcaatattttaaaaatcagttgtatttttatatactagcagcaagcaattataaattaaacttttaaacaattcaatttataatagtgttttaaaaaaatactcagaaataaactgaaatgatgtgtaagacctctacactgaaaactataaaatattgctaagagcaatttttaaaaatctaaataaatggaaagttctatcatgtttatggatcagagaactctacgatgttaagatatcaattctcctcacattgatctatagagtcaatgtaatccan

SEQ ID NO: 86875 - DNA, 653 bp, Homo sapiens
agcaattagttctcgtataaccctgcaagatttatcaagagttgcacagaaaatacatgaacatttgtagatttggctgtgcgaccttggtccattattaaccaggtaaaggtattcaaagaacaatgtcttcagcacagaaaaatgttgttgggaaatgctataaatgtgtttgaagccagacaacagaagccaagaggtggcagaatgcatgcagttattaccagacccacccctttcagcaacatgcaaatgaagcagccttcacctcaacacttagcagcctcagctggtagcagggtttcagctgtttctagggcttagtttggtacacattcaactcagctattggcagaaaaagtaccagcaaggccacatttggatttggaaaaataaataaaccttcagaaatcttagtgcaagctttggcagctcaaataacatctgcatttaacttcagcaattctggcatcacagtacccgttggttggacatacaggatgtctaatcctgtctctgtaggttttggaacaggagggcagctctttcagttgaagaaacctccaactggaaacaaaacaagaaaaatgatggcctgccagtgtctgcgaatgtctgctggtgtattcttccgctggtgtgttcttccgctg

SEQ ID NO: 86876 - DNA, 418 bp, Homo sapiens
atcccagtcagctaacactggcagctcaggacattcagaccatccagcaggacacagatcatccaacccggctgatcctgagatgagaccaagctgctgctgaggacgatagccctgctctggtcactccagaggctgaccagtctatgcatggctgaagcttgaaacaagccctgctctagtcacactggcagctgactagtctactcacagccaaagcttaaggacttaccaagccaagtgatgtagttaaaaatcttaagactagtagttttcctgtaatactacctgttttcctattgttctgtctctgtattcaacctttttcccaggtaaggacctcttttgtctttgctggatatgaatatgctgtacattgttttgttgttgttaccccccataaccatgctagaagaaa

SEQ ID NO: 86877 - DNA, 462 bp, Homo sapiens
  misc_feature (1)...(462): n = a,t,c or g
catcgagtacgataccactagncggcggcnncncaactgaaccaacagcgcatgcctcgcacagggctccctgctcaacatgcgctccttcctgggcgttggcgctccccacgccgcgccccatggcgctcaccttcctgcacctccaccaccgcagccgccggtcgctattgccccgggggcactcaacggagacaaggcctcggtccgcagcagccccacgctcccagagagagacctcgtccccaggccagattcgccggcacagcagttaaagtcgcccttccagccgctctctggccccgcaagagggaacgccgcggatcctagcagccctcccgtccgcctgattaaaggtcttcttttacttttgcggnggggaggggggaggagttggggaaggaaggaatgtggcaccttccaagaccttcattaccgactgcggggaccaccaaaagagat

SEQ ID NO: 86878 - DNA, 434 bp, Homo sapiens
ggaattcctcgggaggcctacctgctggagcacagccacaatgggggaccagttcattatgctgagctgcgagtggcctggcggcgagccccctgccacgctgggctggcttgacgaacagcagcagcccctgggcggcagcagctcctcgatggccgttcacctcctgcaggcccaagaagatctggctggcagagagttcacctgccggggcactcacctgctcaggacccctgacccccactgccacctccagctggcggacccccccttcagcgcctacccagcggtgttgggtgcagcaggcacgggaatggtggtagcaacggtggcctctctactggtgttccagtatgctgcccggcacccagagactttcccccgccttggtcaattgcttgttcccacggagcaaaggcaccaacagaggggtt

SEQ ID NO: 86879 - DNA, 1016 bp, Homo sapiens
atgaaagcccagtccacagcctccatgcccccggcccggcccgccccgcgcgcgtttcctgcgccgcagcccggacgtcgagaagatacccttcgcttaaaggccctgcgatgtccgcggccgccctcctgcaggaggtgctcggaggcgcgccgcgtccctcgggcctgggtgaggcggcggctccaggcaagacccggtcgtttcgcccccgggacttttacttgcggagtccgcgttcctacggcaccaggccctgaaaaagcccccagtcatcgcctcggggttcggcacggccagacccgtggtcctgctgcctccgcccgagccacccgtgaagcgcagagcgcgcggggtcttggagagctcgcggcacgcggctcccaggcgggtcttccacttgggaagggagcgcgaacagagccaggagggccctgcatggccaaagagaggaaggccagctccgtctccgcagaggacggctacatggaggccagcagcgggcggaggaaagtgaggatccgcagcaacttcgtgagcgagagcggggcccgcgaggcgcgggaagcggcggggttaggagcccagggagaacaggagagctggccgcccagcgacgcgcgggaggccgcctggcaggcgctgctgccctcccgcgtgatccccacgtccatcgaagagatcatcgcctctctgcagtccgaggcccagctggcctccgaccagaccatcaaagagctcatacggagcgtccttggccagaactacgacattacaatggaagtaggtgaaccaaaacaagagtaacatttttcccaaatgcaatttgggttacattacatatgtaagagtagtttattatggataatatttcagtgcataaggtgtcatgtattataacacaaaaacactggggtgttattcaacttctttgcattttgtttgaattttccatttgaatttttgaattttctgtcttatcctcttttcaaagtgaaggaaactgagccatgatc

SEQ ID NO: 86880 - DNA, 2055 bp, Homo sapiens
ggaaggggctgtccacatcctaatcctcaggggaagcagctgaggggcagagagccagggactggcccagggcagtgtggggctgggcggccagccctgttggagcactggctgccccatggggcaggagcagccgcctgcttttgggtgctgaagtgggcagtctggtggggccggtggcggggccattcgaggctcacccatggtttcaccactgagacctgcacatgccccttccccccttatagagggagaggtctggggggcttcagagctgccccagctgccgaccttccctgctcctcctcgcagctggtgaaccgactcgtgtactctggcagcgcggacaggaccgtcaagtgctggctggcagacacaggggagtgtgtgcgcacgttcacggcccacagacgcaacgtgagcgccctcaagtaccacgcgggcacctggagggaggcccagcgcgcgctgtgtgtccgcagtgttcacgggcagcggggacgttgcgcccgggccttcgacgcgcagtctggagagctgcggagggtgttccggggccacacattcatcatcaactgcatccaggtaggtccctctgcccttctcggggccgccgccgtgggagggaaggtgccccgccccgatccatccacgcgggcagcggtgtcccccccgcctaccgcgtcaccggtgacgcccgcccctgcgcccgcagtgcacggccaggtgctctacaccgcctcgcacgacggcgccctgcgttctgggacgtgcgcgggctccgaggtgccccgcggcccccctccgcccatggcagctctcgcggctcttcagcaacaagcacctgagcggggtgctcttcagtcccttgatggtgccactttctgcatccatgtgccccggttggcccgggtgccaggagagaagctgcaggtgacagtgtctgccgtggagagctcatcatctcgctgcagagagaagcacctgctgcaggagcagccccttcaagtggagcagccccttcaagtggagcagccctttcaggtagagcagcatgcgcttcatagtcttaatgcagaagatacttcatcagagacggccggggccgccagggatcacctgctaggtgatgggcgggtccgccctcgggcgcggatgaacaggaaaatgggcctgttgggaggcaagcagatcggtgcaggagaacccgcagaaacggcaccatgcactgttctccgggtgagacttaagcacacacagacctcgggggtggccaggtcttgctgcgtcccggagccattggggcctgtggctgccacaaggggcatacctaccagagaggacctttccatcgtgctgaagggacggttccggtggcgcaggccagagaaccgccttgagtgctgcctgcgggcagtgctgccggccggccctgagcctgcacagacgttcacactgactcctgcttgccgaagacactgctgcttggtgatgctgcgctctggcctgagcagcccctcactgacacgtcagctccagtccccaccttatctccccacagcagagaatggagcatgcatcaagccatccagagaaacccagtggggcatggacccaaaacacgggcgctgcactcactttgcatttttatagcaacacacattggggtaatttctacttccattgcacagagagctttgcgagatgttgaggacataaagatggccagatggccattttcgctctggtttctgacagcctgagagacacggtgagtgagagagtctgatcccctgaacccaggcctggttcccttccagccacaccactgtcgccttgctatgaatgaagaaacaaggtgtctgctttagataaattgactgaggaggagttggctaagggaggaaggacaggagctacccataggacatatgggcaggaacacaaggacagggtaaggccgtgatcagcatcaaggacacctgaccagttgtgcacaccattgtgctggcatgggctgccctcacctgcctgctacacgcccatgcccactcc

SEQ ID NO: 86881 - DNA, 594 bp, Homo sapiens
cggaattaattataaacctaaagtacattaccgctgacttttctgttttatctctttagttaccttcactcatatgctttatttcttcttaccatgttgagttactcttcagtgttttatcatttttgctggaagaactctcttcagcatttcatgtcgggcaggtctgcaggaaatgaacttctttctgcttttgcttatttggaaatatcttagtttcaccttatttttggagggatgttttgctgcgtatagaattcttggctgacagatttttttcccccctctttctgttagcactttaaatatgtcatcccactgacttctggcttctatagtttctgatgaaaaaatgctgataatgataatctaaataatctaatgaggattccttgaaccagatgagtctcttcttttttgctgctttcaaaatttctgctctctttgaggtccacaatgtgtcttgacatggatatctttgagtttatcctgcttttggagtttgttgagcttcttggatatgtatatttatcatcatcatattagggcagttttcagccattgtttcttcaaatgttttgttaactttggaaa

SEQ ID NO: 86882 - DNA, 404 bp, Homo sapiens
  misc_feature (1)...(404): n = a,t,c or g
cggctaggcaggagcggggagccctcaggtggacagacacagaggtccaccctgcggncgccttttccctcttgtggtacagagcccttagccagtgggagggggaaggccctgcctcggggaagaggtgggagctctgagagggtccggagtgacccctgctccacagtgagcctgagctgagaaaactgcagtgtggcctctggcccagggaagggctgctgaggccaggggtcagggagcggccgagccttccaccccgggaaagggctgggagagcctatagaaggctgctccgtgggggtgggcagggcgctctcccaccccagacccttgaggcctgggtccttgggctgcctctgagacaggctggacaggaggcctcggagccccctggcctcacc

SEQ ID NO: 86883 - DNA, 379 bp, Homo sapiens
aaaagatcaagttatctttgtattcgcatcaaccatgaaatggatcccctggacaggcagcacagtggattggaccgagcagtcaggagctgttcaagcttttcccaagtgaactcacactctgggttggactcacgctcacctcaacctatgagatgtctgtcctgcagaattggagaagatggctccatctgtgtgctgtatgaaagccccaccagcagggggtagcactcaaaacagcaccgacatacaaatggtagacagctgaataaactgtaaggacgaatttctcttgggcagaaccagcccttccaaaaactacagtatgatgactgtatcaggttaagatggatcatcttatcctgatctagttctagaa

SEQ ID NO: 86884 - DNA, 1686 bp, Homo sapiens
ctccgctcaactcttacaaaagaaggattaatggaatctatagagaatcacagaaagctaaaactagtcattaaaagcttgcccaaatcaatttcataattggtacataattataataataaaaataattttaaaatggcatttattttgaacaatgtataaccattcattctcataatggtgaaaaacggccttaataaaggattaaaagctggagagagacggagggattctcagagcaccagcccaagtgaagattgctgcttactgcaatggaaaagggagacagttagcattgggttaatatttaccatgttttactctctgggataggcattttatttacaatatctcttatgggaatgttttatttatttcattttctctagactgagatccttgcagagaaactgacatgcacaaaaaaatgtcctttgagttaaattgggcactttataagagatccagatttctccccaagtagagaaatttgcgcagaatgtggaagacaaactacccattggaaacacatgcaaaatcactcagtagggatactctcctaaccctgggcaagtgaggtcttcttgcagtaaatagtttccactgaggatggacttagaatgaagctaccttgaggggacacgtaggctactagtattcaggaacaacctgccagagacaatgcaggaagtgtgtgtgaaatgaccgaaaagataagagggtagagaaaccctaatggaaggacagatagtgtgaataaaggtagattctgaaaagaatgagctagcacattgtgtaaagatgaggagagaattagggctctggaggagagatctgaggaaaccacacagaatatagcacagagagatacaaagaagaagaatttggatgagtcatgaaaagcttggaggacaggctgagaaggtcccgcagtgtctaactgaattctagaaggaaaggctagggagactggaatagaggccatatgtggaggaatgtgggtgagaacttgctaaactgaggaaaaacactcttccccaggtggaagaggcacactgagttcagagtagtgatggtaaataacaaccacatccaccactagacactctttggtgaactatagggtattaaagacaaagagaaaaattctaaaagcagactgggacaacaaatctgtatttgtagcaggaaaaagcatgaggttcaggttttgactgtactgcttgctgcctgtgtcatcttaagtaggtcacctacctgcttcgagcctcagaggacatctgtcattggctaatgggagtagaagtggctaataacaagaacaatgactaccacacgaggttttgtgagccctgaaatatttccagagaataaatgtaaaagcattttaagtcattaaacaaatgggccgggcatggtggctcacacctgtaatcccagcactttgggaggccaaggcgggtggatcacctgaggtcgggagttcgagaccagtctgaccaacatggagaaaccctgtctctactaaaaatgcaaaattagccgggcatggtggctcatgcctgtaatcccagccactcaggaggctgaggcaggagaatcacctgaatgggaggcagaggttgcagtgagccgagatcgcgccattgcactccaacctgggcaacaaaagcgaaacttcatctc

SEQ ID NO: 86885 - DNA, 399 bp, Homo sapiens
ccgcgcccggcctgttgttattatttttaatagttttgtcttttattcttcatagcaaagataggagttgtctatctatcacagttataatattagagttttctaaatttgtctgtgtacttagttttaccagtgagttttataccttcagatgtttgcttgttacacattagcatccttttctttcagattgaagaaggtgcctttagcagttgttatataagacaggtctggtgttgatgaatttccccaattttcatttgtctgggaaagtctttcctctcttcttcatgtctgaaggatagttttactggatgaagtattcttggttgatgtttttttccttcagcactttgactgtcatcccactccctcctagcctgtaaggtttttgccgag

SEQ ID NO: 86886 - DNA, 394 bp, Homo sapiens
tctttataaaaaaatcagttgttcataaatgtgggcctattttggcctctgttttgtttcattaatctatttgtcttcacaccagtaccacactgtcttaattattgtagctttataatgagtcttgaaatctagtagtgttagtcctccaactttttaattttttacaaagttgtttgagctattctgggtcctttgcatatccatttggagtttagaatcagcttttcaagttatacaaaacagcctgctgggatttttgactgagatattgatagtcagtttggagagaattgacttcttaacaacattaagtctgggtcttccaaaccaagaacatgttatttctctcaatttatttatattttttaaaatttctctaggcagcgttttg

SEQ ID NO: 86887 - DNA, 386 bp, Homo sapiens
ttcaaaaagggaatgcccctcaaattttaccatggaaaaccaagagtctacggtgttacccggcatggtactagtgttgttgtaaacaaacaagggcaagattgttgccaaaataattaatgtgtataatgagcatattaagcactcaagagccaagatacctccccgaaacacatgaaggaaagataggaaaagaaaaagaagggagccaaagagaaatgtacctgagttcaactgaagcaacagtctgttccacctagagaagcgcactttgtgagaacaaacggaaggggcctgagctgctggaacctcttccctatgaattcatggcataataggtgttttcaagataaaaggcttctagactattaaaaagtatataaaaa

SEQ ID NO: 86888 - DNA, 397 bp, Homo sapiens
gttagcagcagcctgtggctctgaagaagtagaatcacacgtggtcctggaatctgagatttcctacagccctcaggaagagggcacagtatagtaaggaagaccaggatcgtccatgaactccacagtgagtttcactgggctgttcctcctaggagttctaatgtaaaatatgatgcccactgaaagtaatttagaacaaagtcttaaccagtggagaaccaaaatagtgttgttctgcgaactcttcctcagctctgggtggtatttggcatttgtaagagctgtgattcttaattggtggttagatgccatgccaaaattgttattgatttgctttgaaatttcagatcatcttaaaggtgggcatgagagtctttatcacagagggattaaa

SEQ ID NO: 86889 - DNA, 1524 bp, Homo sapiens
gctcctgctacctccctttccggcacccttcagagggaccctcagtctggccttgcaagcatggactcttctgaggagcacgctgggtgccccgcccgagggacatgtcccgtgttcctggccatgagtgcagggactgtccgctacgccccatcaggcctgtgccctgtacttgaggggaacttgagagaagagccctggggcacagacagcccaccccagccagaccagggcctcccgccgccccttgcagctgtcccggtcccctggaagagcacggacccctgccaaggccacagggagtccccaggagccctggtggagacctctgcaggggaggaggcccaaggccaggagggccccgcagccgcccagctggacgtgttgcgcctgcgcagctcttccatggagatccgagagaagggctccgagttcctgaaggaggagctgcacagagcgcagaaggagctgaagctaaaggacgaggaatgtgagcggctgtccaaggtgcgggagcagctagaacaggagctggaagagctgacggccagcctgtttgaggaagctcacaagatggttcgagaagccaacatgaagcaggcggcatcagaaaagcagctgaaggaggctcggggcaagatcgacatgctgcaggcagaggggacagccttgaagacgctggtcattacgttcacaccagcctctcccaaccgcgagcttcacccccagctgctgagccccaccaaggccgggccccgaaagggccactctcgccacaagagcaccagcagcaccctctgccccgccgtgtgtcccgctgcgggacacaccctcaccccatacagagagggcaaggaggtggacacaatcctgtttgcagagttccaggcctggagggaatcccccaccctggacaagacctgccccttcctggaaagggtgtaccgagaggacgtgggcccctgcctggacttcacaatgcaagagctctcggtgctggtacgggccgccgtggaggacaacacgctcaccattgagccggtggcttcgcagacgctgcccacagtgaaggtggccgaggttgactgtagcagcaccaacacatgtgccctgagcgggctgacccgcacctgccgccaccgaatccggctcggggactccaaaagccattactacatctcgccatcttcccgggccaggatcaccgcagtgtgcaacttcttcacctacatccgctacatccagcaaggcctggtgcggcaggacggaggcttatggcgcggcccaggcctgaaggggagctctgagacagagcaaacacccacccccttgtggccatcctgtgccttgttcccggtggcctccctattggactactaggaggggctggcagggcctccatagcacagaattgccccaaagccttgttaagatgagtcaagacccctcccccgcttcctcccttcctttcccccttcctccctcccccttcacaaaggcctcccttgtcaccttccctcccac

SEQ ID NO: 86890 - DNA, 416 bp, Homo sapiens
agaacttccactacctgaattcaaaacttattataaagctacagtaatgaagactgtaatactggcatagaggcagatatatcgatcaatggaatcaaatagtccacaaataaacctttacattatggtcagttgattttcaacaatggtgctaaaacaatccatggggaaagggtaatcttttcaatgaatgatgtgggagggaaaaaaaagaactttgattcttacctcacatcacacataaaaattgatttaagtggatcatagacctaaatataaaagctaaaactataaatttcagaagaaaaagaggaaaatcttttgatattaagttaagcaaagtttgcttagatatgacgctaaaatcgtgatctataaaagaaaaaattgatagttgacataatagaaatttaaaa

SEQ ID NO: 86891 - DNA, 1956 bp, Homo sapiens; identical to SEQ ID NO: 65914

SEQ ID NO: 86892 - DNA, 884 bp, Homo sapiens
ccgggtcgacccacgcgtccgcccacgcgtccgcttttgaaaatgtctcagtcattattgttgtatttttcaccttcatgacttgttttttatatttttaatgttttcattgatattcttatttttctgattttataaattgtatatgtttctatttcactcattgagcattattcaggttaaacttttaaattttgaatatcttcattatttatagttgttttctgaaaattttcaaattttttaattgggccatgttgccctagtattttgcctacattgtaatattgttatttgaacatgaactaaaagctatttgtcacaatctttacaatgttgccttgtcctcacatagtctgaaaccagttgtctttgatagagattatgggagcctctcatacatgttgtaagggtgcgtcttgcctagaattttgtgtttattcttcacttaaaagagtttgcccatgattcttcttatggctgctaatcacttgctctacctgttccctgtcctaccaataacgtagaataaaaacataacccactgactaaaaaacatagaattttctgatgcccaaaatcgttcaaaaaaagctaaaaaaggaaactgaattgcgagccggccccaggggcggtttctttactgggggtgctcctgacaggggctggtcctccagaatttttttgtgggcaggttaaagggcagggcctttccgccgggggccgaaggctacttatataacaggaaaaacttggcacgagggccgaccccttcccagggggggaggaaggaaaactggggcccacacttcctttcctggcgaagtgtggggctatacccaaggggacagggcctcagtcgcctccggactgggggcaacaat

SEQ ID NO: 86893 - DNA, 4747 bp, Homo sapiens; identical to SEQ ID NO: 66227

SEQ ID NO: 86894 - DNA, 470 bp, Homo sapiens
ctggggagccacctgcagtctgggtccccttgcggtgccactgcgatctctctagagcctcctcttcctcctgccactggggacatctctgcccctctgcttccctcggaagctggttgtgaagccgggccagtggctgcggggacagctcatggccctggaaagaccccactggcatgcggcacaacatctgctctgagaactgcaggaaaaggccgggcagggcacccctgccatcctgccagtgaagtttacgggtctcggaatgagtgtggccaaggggcaaaggggaggagggagagggggaggtggggttgcctgagagtgcccgccccaggacagcagcccgtagctcagccccaagagcccggcaccgagcttcgagctgcgtggccccgaagaggggctcagtcacctaatgtgatgaggggacggcagagcaaaggcttgtctgacagtgaccgtcgtgg

SEQ ID NO: 86895 - DNA, 846 bp, Homo sapiens
cttccccaccccatcacctttctagcccacagccctcccctccagcacacagctgctggatgtggccactctgcacagacacctgcctcagcttagaatgcccctctccattgtccctgagcactttcagtgtctggcatagagtaggagctccccaaacaagtggcagatgaatgagtctctccatgaagctctcagagctccccatctcctgagggggagaagtcatctccctatcctctgtactccagcagccctgtggatggaactgtgcttagtacttttcagagcctgccttctgctgcaggaatccatgaatgtgtttctcctcaagcatggggactgggactgcaagctttttctctttttggccctcacagagttctgtcccagacactctgcaaattgaattaggcctgaaccatcagtaaaagaactgtctcttccttgagggcagaagagtaaatctgatgaggttatcttttccctctcctgtagcctagaggttttctctcttgggctgcccccaaccccttgcattaaatctgggatgtgcagagctagggagtgtttggggatgccagtagagaggtggtcacgtttataaaagcagaaagtaagggcgcttcctgattggtccatcagagtctgctggtgacagctgcccacctgccttaattgtgtcctgtggtccatgcatgtggcctgtccctgtggaacctggaaaggctgcaggcaaaacctcaatctcctgaattccggcggaagaaggctctaggcaacctaagaacaatgagtggggaacacctgggaactgtgacagctggggatatcatccccccaagc

SEQ ID NO: 86896 - DNA, 1670 bp, Homo sapiens
ttttttttttttgaatgaaaacccatgaaatttaaatgtgacattgggggagcctcatccttccctttttaaccaccccacccatcccagcctgttgtgagttgggtgagggctgcccccagtctccggtcctgcgggctctcgggtgccatccatgttcctttcgagctcagtccagccctcctggggctcgtctctctgtgaatctccttcttgcgtattcatatagtgccttgcttgcgctcctgcagggctcgtcctgcccgggcccagggaagacttgggcaaatgttaggggctgttgggctgatgggtgttacaaaaccccccccctggctgggccatagctgggaaaacttggaggccagaggcttgttgggtagggacttaggttccccttgggtgaatgtctttcagggcatgaaaagcttacgggcccccctcaaagcaagattaagtgaatagtcaaagttttacaacagccagtttttggccaaggtctctctttggatgacaccccaatgggcacatgggggcaaaaactttccttgaactctctgagccagagttgccagttgcacatcaggagaagggaccagggggagggagggaaagaagactgggctgactgggggcgcaatctggggtgtctttgtcgcttcatgtgctctgctttgtcaggctggagtgagccgtgtccctgtctggccccaattccttggccaccagcctgttggacacggaggtgcaaactcctcattcgcttcccctagttggcgatgaacaggacgaagccaccttacttgatacaccgtgaaagggacgaaaagtgaccaacagcagttctgagacccaggaggcatctgacaccgtcgacagagaccaggggtctctgaacttgcagggtaagaggttgtaccacatcttggatagaaaatggccaggaactgaagcgcaggagcccctcccggccattggtggcctcttcctcagggaatagcagcagaggagtggggggaagcctcgtggaagcacagaatctcttgagtgactccaccaactccccccgcccattcatctccatgaagccccgagaccagcacacaaagctggggggactattgagtagaggctgggaaccaggagaagagaaagcaagaagaaaaatattgaggaaaatgaaaaaaaaaaaactgacatgttgggtagaggatcggggttaggggtaaggcctcagtatcctccatgcggaacgcgagtggggacaggggggccttcagctgggccccagggaaccgccccgtggcgctctcggcctcgctctcactcacggtgctacaggtggtaagcaaattgactatgttgtggtcgaaaggtgtcacatggttggaaatgaggaccctgacactgtgatcccggagtccggagtcctcctgccgggccacgagccctagcaccgcacacatggtccgcactacgaatctgcgaaggacgctgtctggcagcgcgcagctgaccaggaagacgtggatcccgagaaagaggcgcaggacgaggaggcagaacccgactggcgcgtagagcagcagcacgagcagtaggaagcagtcacccggaagccggtgcgagtcaaagagccgctccggccccggccctgagggaagctccat

SEQ ID NO: 86897 - DNA, 429 bp, Homo sapiens
tcgaaaccaagcagctggtgacgcacagggactgagggtaggcctgcgggggagagggcgggaaaggccctcacagcagggcccagaggaagactgaccccaggctgagcaggagctgtacgcacagggcccaggggctgccggctgccaggaccaccgcattgcagaggtctcccttgcagcaagagatctgggagtccacaacggcacttaacctgccctctgccctggcaccccagggactcactgccaaagacgctcactttctgggagacacagaccccatccaggaaggggcacgagaccacgctgcaggaggccccttccaagaccgccaagcatctgtagcagcgcagaccctgagctgggagagagggcaagaaaacacacccctggtggagatttaagatgcttatggacccatgcgac

SEQ ID NO: 86898 - DNA, 420 bp, Homo sapiens
aagaccatctagatcagcgacatgaagtaccacatttttcacatgatgatgcagtatctgtactacggaggaacagaatccatggagatccccaccactgacatcctggagctgctgtcagctgccagcctgttccacctggatgccctgcagaggcactgcgagatcctgtgctcccagaccctcagcatggagagtgccgcgaacacctacaaatatgccaagatccacaatgccccagaactggccctgttctgtgagggcttcttcctcaagcacatgaaggccctactggagcaggatgccttccggcagctcatctacggccgcagcagcaaagtgcagggcctggatccactgcaggacctgcagaacaccctggcagagcgcgtgcactctgtctacatcacctcccgggtg

SEQ ID NO: 86899 - DNA, 411 bp, Homo sapiens
  misc_feature (1)...(411): n = a,t,c or g
caaggggacaaacaagagcccattgagctacacattacaggtgcccacaggactgtatgggcctagagacaagcagggaagaagagcactcccctcctctccaggcaggagtgaaggaccctcatccccaggacgaggcagggctgctgatacacagtaagggcaggaggagtttgtgtggaacccaaagattcacttgggggcctccttgtttcccttgtcccattgtaaatgtgaacagaatcgtccagcaacccagtctgacagcggttgatttccaaaggcccagacccctcaggaggaagattggagccgcatttccaggaaatttaccaaggcctccctcccgtgctctgtcattctcagcagcattggtgcagaggccctgcttcccatgggctgttcccagcn

SEQ ID NO: 86900 - DNA, 419 bp, Homo sapiens
ccaaatttgtggtctgtatatgcacgcttgtggaatgcattttggagtactcaaaacaacacagaagcagggctcaaaagattggaaaatttaataggaaatgctaatgtcagcgtgtattgtatcatagaaggatttcaaaaagagcagtgccacatagaaaatgaatgtgaatgtattttccaaggagatccgtgtccaaaaaaataataagcagctatttatcatgatgcaagacttcaaaacatagttaataatcatgaaaatcagctagctcttatggactatctctgtgcaattgcccataatctatccctataatacacttttcaatatgtcaaattttctttttagtttttaaatcttttggggttttccccctactatttaaaattgtcagtattattttttacaattca

SEQ ID NO: 86901 - DNA, 2149 bp, Homo sapiens
ttttttttttttagtttgtttaaagactttatttgaaaccaatgtcacagcacgttagtcataaaaatcatcagaatcatcggtgttatggtttctggggcgtaaagcagcctcaatttctgagttactgtcatcagactcatcccagagggcattagattttaaattgatcacgggtttctttttgttttcatgccttgacaaaggacttccttcactagatgaaaaaactagcttccgaagcaattttgttagctgtctttgtctcggaatgcaccgctgcccaatattcaaacctgacaaagtgtgacacagaaggcatctgtctttttgaaacctgttttcagttttgatttgtattatccctgaagggtggccttcttcagcaactggataggcttctgtttctgtgattggggataatctgcagccacattttctttcttggctcttgtctccacagccacttgaaacttcttgttcccttgtaggaacactgttgagccatacagcaggtttggcttcctttattccactattgtcattcagaatagatggcaagctgcaagatgattcactactgtgaaatagctgacctacggccacactcttctgtaagggcttttctcaataatgctgttgcctgtgccctcggtacgtctgagtctggtgtttgtccaggttctcttgttggtgcgttagtggaggattccttttctgaatcaggagagcttagggtttgcaaaatacaatttttttcagtggatagggcaactctttcttgctcagcatggattaattttaaggcctctattccatcttctccctccatcttgccacctggatttggctgtggttctgggctctctaaaatcagatcatcttcacttattgaaatggtaaggtcactgctggtgctcccaactttccctcctcctcttccctgcatttttctgaagggcttttgtgactttggttccctgtgagcaagatgatctgaaacaccttcccaaggagaatgcttctcttgagaccacttattttcagattcacagtattctgaaactggtatcggagagactggcgggctggctcttttttcctcaacttcaatatgttcccgtgtcagtatttctccctctgatccgctggaactgtcacactttaaatcagtggttctgttctctggacttaatctttcccgtaacggggaattgagttcagcagactttttgccttcagataaattactcttgccatgacgtgtgttacttcctatctccaagcaatgagtttgttcctcctcagacaatacactggctgtgactggcgttttctcaccaatctgaagagatgcctttccatctatgttgtcagacttatttaagcactgtgtgtcattactagtttgtactacacagctgtctgtcacattactgctctgggctgtctgtcggtgtgaatgtgggtcaggaattgaaaagttctttgtgggctggggagatttgtgctctgtactgaaatctctcatgcttaagatggctgacatttggcggcccataaagattgttgctggttgatacaatcctcttgacatggctgttcctgagttaatcccctcctgcactgcaaccttttctctgtcttcatctgtcagttcctcttttagtcccaggctatcttttgagcatagcatcttcttaatttgagtctcatattcgagcttcagtttttgaagcttctctgtatttgtggtgaagtgtacaacatgagcttggacacgctcaaatcgctttaaatattcttggtttcgagtatgagccttcttttcagattcacatatttccttcagataattctttagttttacatatttcagcttaactctgcatgtatcagactgattatattcataaagtttcttttccaggtccaatctcttcttttcactgtcccgcagcccgtgctggagttggcccagcctctcgtagtagtcgggactcgacaggggcacggccgatgcgagggtccggctcatgctgctgccgctgcgccagctcagcacagcctctgggtggccgttcggccggggttgccgaagaagaccgccccaccatgcaccgcgggtaaacaccgcgccgggccgcct

SEQ ID NO: 86902 - DNA, 890 bp, Homo sapiens
atccatactggagagaaaccgtacagatgaaatgtgtgtggtaagatctttagtaataattcacaccttgcacagcatgagagaattcattcatgagagagttcttacaaactgagtatggcaaactcttcatgctaagttctagcattaatcaacatcagagattccatactaaagagaaatcatagcaatgtatgtgaatcaggtctcttgaggcctgccaaatgactagatatcaaaacatacatcttggatgaaaccatacagatggattatgtatgctgaggctattattcaaggaccattactatggaacatgataagatttacacaagcgataattcagtctctagttctccaatatttatgatactgcatgctgcagaaaagtcacagctccaaatacgttgaatctcatgacgcgatgcatgtcgaaggtccaagggcatgtggaaatggtcagttatattcaggcaattaaaaaacctaattatatggggttttttgaaaaggctactttacattttatgactttcatcctcaactctgaaatcacttcatgtgacttctttacagacctttcactgtggtctcttgaatcagtaggatgctgggcgcggtggctcccgcctgtaatctcagtacttttgggaggctgaggcgggcggatcacgaggttaggagatcaagaccatcctggctaacatggtgaaaccccgtctctactaaaaatacaaaaaattagccaggcatggtggcagacgcctgtagtcccagctactcgggaggctgaggcaggacaatggtgtgaacctgggaggtggagcttgcagtgagctatcacgccactgcactccagcctgggggacggagtgagactctgtctcaaa

SEQ ID NO: 86903 - DNA, 411 bp, Homo sapiens
agctgccttgggtctcgcgctccgcagagcgttccgacactctccggcctcgttctgccgcctccgcgcgctctccccgtgcggccaccgcgccccccaagcttgcctccttcttgccggacttggggccgcgcgccctgactccttcccctcccgcggacccgcgcactcccggcgcggcctctcccccacgcaggccaccgtgcactctgtggcctccccctccttccccgctctcctcgcgcttctctggctccctagctgtcgcgctctcctcggcgagcgcgctcccggcccgcgcgctccgggctccggtttctcccggctcctgtcagtgcggtgactgcgctgggaaacatggcgaccgagggaatgatccttactaaccacgaccatcaaatccgtgtcgga

SEQ ID NO: 86904 - DNA, 427 bp, Homo sapiens
ctttccccctgaaatcagggacatggcaagaatgcctactttcgccacctctattcagcattattctgtgtgttctaggtaggacaattaggtaaggacacaaaaagacaaccaaattggaaaggaagacataatgcttacttcctttcacagatggcatgatatacataaagtaaaacgaagaattttttaaatgattaaaaataaattcaccagagttgcaggatacatggttaacatgcaaaatccaattgtatttctatatactaacaatgaagagtctgaaaaaggaaattaagacaatttcatttataatagaaccaaataataaaatacttttggacagatttaacccaggaactaaaaatacaaaacattggctgaagaagttaaaaaaagacctaaacaaatagaaatacatcaagtt

SEQ ID NO: 86905 - DNA, 595 bp, Homo sapiens
tatgagctacagatgaatacacaatgagtgattctaagtctgtttagtatgaacaaatagaatttggtataattattcctcatagtgatattagaaataggctatatactgttagtagatttaaaattagagtaatttgtattacaccacagcctattaattttagtaatgtggctgcaagaactgtgggtgcagcatttggggcttctacatatgcttttggtaatcaaagatggaggatataaaggggtgggttttttcgttgtttttcctttgtttttactatgaatgctataatgccttctatttataggagactattcagaagtttggtagtatttgaattcagtagtaggttattaagatatttaatgaatccatggtgttttagatatagattaattctatgagtaggggtaaagagccaatcagtgtatacaacaggaaatgaaagtcctgtgtttaatcattctgtttggttttctcattgggtagtaacaattacagcttgaattagagttgctccaaagagactacagaatacaattagttctatgatggtaaatgtcatgattaggaatatttgtagaaaaac

SEQ ID NO: 86906 - DNA, 1155 bp, Homo sapiens
  misc_feature (1)...(1155): n = a,t,c or g
aagggtacgggcagattgagattacagaaggatcccactggttgccttgtgtgaggacccagggagaagggggaggctgtccctgtttgagtaggagatgagagctactggtggctatgagtggaaagaagtgagcagaggtgagcagaaatcccaaggactggtgatgataggatgatggtgggaaccaggatgggctttgggcagaccctgacccctctctctgcctgtcggcccaccagataataatccctgtgttcctgggcgagtcagtgccacccgagatgttggcggccactttggctgagctggacggatgcctgcagctgctcgaggacaagttcctgcgggaccaggccttccttactgggccccgtatctctgtggctggcttggtggcaatcacggagctgaggcatgagagtgccatgggcccatcagtgctggctgctgagtctttgaaagcggacccacggtggcagcatggtgcccaacacgtggaggctgcagtgcgggaggacctcttccaggaggccctcccagctgtcctgaaggccaaggacctgcctccagtagaacctgctgttaaagagaatctgaagaccttaatgcagcttttcttgctcttttcttccgccagagctgtttccgttcctctgcccgccatgccgttcctggagctggacacgaatttgcccgccaaccgagtgcccgcggggctggagaaacgactctgcgccgccgctgcctccatcctgggcaaacctgcggacgtaagcgtgggccgggcagcacggggcgaggggaggttggtgggccaggggtccggccctgtccctgctccgcctccccgacagtgaccccgaatcttttccccagggaccactccccactcctttcctcacgccaagctctgactttccgtgctccacgatcccgcggctccccctccgcacgtctttcccttgtcgccctccccagtcatgacccgggcgtgaccttcagggaccgcggcccgtatcgggatccctgccccgcgaacaatgagagtttcggctttcgcgcgctcgggtcccgtccccagaggtagcccggccggcganttccnccgcnctggcctagtgtatgcagtccaattnnncccccgtcccgccc

SEQ ID NO: 86907 - DNA, 1008 bp, Homo sapiens
gagtttggagcaggagtttaataggcaaaagaaaagaacagctctccatcacagagaggggtcccgagcgggttgccaagtggtagtaaaattgtcagggtttttataaatgggctactgaggagggggctcatgagcagaggaggtcttatcctcctagggtccagtggtttggttgggaccaggtgtgccttctatatagagcagagtttttttaaatcatctcttagcgccattcgctgaggacatagatggactcttattctgtgtttctttgtcttgcttatctgggagggagagtttctgtgtctgttcccacacatcttcttgcagctgcagacatccacccaagtctgtttttagctcctcaatcttactgcgctgctgctaggggaaactgggtgacgatttcttctggctgcttcctgctggagagtggcgttgtgtggggaacagcagctagggctcctcctggggttgatttaagggtccctcgtaggagggcagtttcattttcggctccattttcagcaccatctgaagcttgatggtttctgttcacaatcatgtttaggttctccagttttctctgggagaaagtggctgggctcaggcaagggcaggttttcagctggactgcagatccctttagcagcaaagcttggtatttgaggaggcaattgtttgtcagccagagactttccttagaggacaacagtcctgttacattgtgtggggttaaacagttatttcccatggttaacccagtggcctctgacaccagcaaagcctccactgtaactgcttggaggcaggctgaccatcctttggccaccaagttttaagttccttgcttaagtaactcactggctgttgagctggacctcaagccttagttaaaacttccagggccatttccttcctttttgttacatagagactgaatgctttccccatggaaagactgagggctggtatgttatgttatattatgttatgttatattat

SEQ ID NO: 86908 - DNA, 418 bp, Homo sapiens
ggcaatggaataagatagagagtccaggaataaattattgtgtatgtggtaaaattgtctttagcaggggttccaagtccactgaatggagaaagaacagtctcttcaacaaatagtgttgggaaaactggatatctacaggcaaaagccataaagtggaacccttacatgatacacaaaaattatgcttaccttacacaatatacaaaaataaactcaaaatggattaaaaactgaactgtaagacctaaaactatcaaacttctagaagaaaacatagaggaaaggctttatgacatgggatttggcaatgatttgttagatatgatgccaaaaacataggcaatgaaatcaaagatttcaaagtttgatgtgattacattacatcacactttaaagcttttgtccatgaaagtac

SEQ ID NO: 86909 - DNA, 557 bp, Homo sapiens
gaccttgataacgctcgatcacccttacgccaagcttggcacgaggctaaatttcctcctatgttatcttctaggatttttatagttttacattttacatttaggtctgtgatctattttgaattattttttgtgaagggtgtaaagtttgtgtctagattcatattttttctttcagatgtccattttcctttcctcaccgtattgcctttgctcctttgtcaaagataaattgattatatttatgtgagtttatttctgggctctctattatgttctgttgatctatttctccattcttttgcaaataccacactctcttgattactgtagtttgaagtctccaagttgggtagtgtcagtcctccaattttgttcttcaatattgtgttggctattctgggtgttttgcctctccatataaatgttagaatctgtttgtcagtatccacaaaataacttgctgaaattttgattgatattgtattgaatctgtagatcatgttgggaagaactgacatcttgacattgagttttcctgtccataaacatggaat

SEQ ID NO: 86910 - DNA, 416 bp, Homo sapiens
cgaattcgctacataaggaaccagagacccatcctgaagaagcagagatatttgactttttggacacagaattcaaaacagctgttttgaggaaactcaaagaaattcaagagaacacagagaagggattcagaattctatcagataaatttaacaaagaattgaaataattaaaaagaatcaagcagagattccggaccggaaaaatgcaactggcaaactaaagaatgcattagagtcctttaatagcagaattaatcaagcagaagaaaggattagtgagctcgaacacaggctatttgaaaatatacagacagaggaaacaaaagaaaaaaagactgaaaaacaatgaagcacacttaaaaggacctagaaaatacctctgaaaggacaagtctaagacttattggccttaa

SEQ ID NO: 86911 - DNA, 1483 bp, Homo sapiens
tttttttttcttgatcaggtctacggtagggttttccagtgttatttcaaagtaaagcaatttatgtatcaatcttatcactagccactatcacttggctctcttagcaagtcagaaagaacataggtcacagcaactagagcaagagcagcatttacctttactgaactgtccaactgcccctgataagatctaatgtcattaggagctcaagaatgaaaaaaaaaaaacagcacttacaaaggaggacggtattaatgacaaagaatccccatggtttggtcacattagaaacacaacgccttcattcttcatcaatatttattgggcgcctattatgtgcaaggcactacactaggcgctggggaagatacaaagataaatctgacagactgccctcaaagagcttacagtctagtataggagcatacagtctctggagaagatattttaagtgtaactaacctcccccatcccacccccacaaaaaaaaaagaaaaaacctactagacttggtttcttccatttacttttagtttagcagcttcacgtaaaaagcataaatctgaaagtcttttaaaatgcatacttttactggtaaacaaaattcattttcattagaaaaaatgctgaatatttattgcaattaagaaaaatcttcagccgggcacggtggctcacacctgttatcctaacactttgggaggccgaggcaggtggatcacttgaggtcaggagtttgagaccagcctggccaacatagcaaaaccccgtctctactgaaaatacaaaaattagccggacgtggtggcgggcgcctgtaatcccagctactccggaggctgaggcaggagaatcgcttgaacctggggggtggaggttgcagtaagccaagatcgcgccacttcactctagcctgggcgtaagagcagatctccgtctcagaaaaaataaaaaaatttaaaaaggaaaagaaaaatcctcaaacatatgttcagtattttcatgaatttttttatgaatgactacattgtgaagtaaacaatttcccaaattgcatcaaaaacatgcaacaattttttgaaacatctctttaaactactgaaagtcacacatgtaacatatacaggcttctctctgctaaaagcaaggaaagttttgaaatgaatatatgcttgtttgctaccaatgttcacagctcatggttttcccccatgaacccacttcatgtcaatgcaaagtattataaaataatacctccattgacatatacccgaaagatccaaagctctagatctctaagcttcagatagaaaaaaaaatagtgaaaaatgttcattatcaattaatagctgggctttaagattatcatcttagagaaaaagcccagcttttcatctctaagatgaaatctttaaaaagcccatctatcatctctaagatgataatcttaaagcccagccatgaattggctgacgagacc

SEQ ID NO: 86912 - DNA, 446 bp, Homo sapiens
gcggtggaattcctgcaccaggccccagctgctcctctgtctggaaggagtaagacgattttgttgctgagatgcacggagccccccggctgacctttccctgtgccagtgagtacctgtggcatgcaagggagaaagcctatcaggaccacaggagaaaggtccagagcgcccagccgctggtagacacccgcgccccgctgacgttccgccatctccacctgaaactcaagaggctgaagctggaggaggaacggctctccgtcatcgagagggacaaccgcctgctcctggagaaggtggcctctgtcatgaggaccaggggacagactgacagcaaaaacaactccaagcacaggagcaggaagtgaaactggattagcaagcgcacagccaagcctggaccctaaaagagaagtgaggaacagattcagaggtaaggattc

SEQ ID NO: 86913 - DNA, 441 bp, Homo sapiens
  misc_feature (1)...(441): n = a,t,c or g
atcgtagacatagagcaccgcggnggaattcgatgacccaaaagttactgccgcttccctagaaatgtccacataaaccaccccttgatctgcacgcagttaaaagtgggtataaatatgactgcgacactgccctgagctgctgctttctgcctggggggcagccccgctctgcaggagctgtagccctgccgcttccatacctcccattcacccttaaatccttccctggccaaagccaagaaccctcacaggctaagccctgctgtggagctcacctgctctgcatcaagatgtcgtaagagttcttgacatattctagacacaagccccttatcagatatctaatttgcaaatacatttttccattttgtgggcagtcagacagtttcttgctggtgtcctttgaaacacaaaagttttaagtttcgatgaaaccca

SEQ ID NO: 86914 - DNA, 482 bp, Homo sapiens
gcgcgcttgattcatatcactagtcagtgtggtggaattccaaggatatagaaagtaggtgcaaggggataggtgagagtttgatatcctgataactgcaggaacttttgtacacatggttgcatgtctgccggaattggtagaaagtgttagaaaaatagactggggccaggtcatgacgggccttgtatggcgtatttggaaatggactctgtcctttagatggtagaaaacaatacaaagatttaaagttggaaagttacatgattagggtttgtttttgggagatcaccattgtataataataacatggaaaataaactgggaggagccaaggttagagattgaggagacagacatgacatgatgaaaaccttgaagcagtgttctgtttgataggtaatttgcatccatcaaacagtttttcagacatctacaatatccaagtggcataaagctctcagctgagccagatagttagg

SEQ ID NO: 86915 - DNA, 475 bp, Homo sapiens
  misc_feature (1)...(475): n = a,t,c or g
gtagttgcccgggttttnnncctgcnangcaacgagatctngcaannccncnnanagacacttttaaatttccgtgctaaagtacacacctttctttatgagcacttctctgtggtaatatgtgcatttctgttcttcatgagcctgggaaggataaaagccaaaagaatgcttgctcctgtgctacaccttggaaaccataattagtgtcatttttattttggccgaccctaatagagactcgcctgctaatgtcaatgcatgagaagaatgagggaatgacagaaatggagaattcaaagggaaggttgcccactgtttaagaaaaagccaagagactgcttttgagtgacatttatccagcagttagtaacttatttcagtatctcccagagagaaacatggcacagtttcactttcactctacccagctcttactgccagacatcctttagaacacgctcacaaacactag

SEQ ID NO: 86916 - DNA, 2639 bp, Homo sapiens
tgtcgtccccgggcaggaagagctcgtcgcggtatctttttgtcttaggggaccaagctccagagggcgggcgcccgagccgtgcggggagcgggcggggcagccatgctcctgtctgggggcgatcctccggcgcaggaatggttcatggtgcagacaaaatcgaagcctcgggtgcagcggcagcggctgcaagtgcagcgcatctttagggtcaagctgaacgccttccagagccgcccggacaccccctacttctggctacagctcgaggggccccgagagaacatgggcaaagccaagatggaagttgaactatctttgctgcacactaactgtgagcagtaccctgagagttggttgcggtcagtgcctggagttggctcctatggacccactgttaaaatttcgggaattgtgcaagaatacctgaagggcctgtgcagcccagagctgtggaaagaggttcgctacccaccgatcctgcactgtgccttccttggggcccaaggcctcttcctggactgcctctgctggagcacccttgcctacctggtgcctggcccccctggctccctgatggtgggcgggctgactgagtctttcatcatgacacagaactggctggaggagctggtggggcgactgcgctggggccctgcccctctgctgaccccccgggggatctgggaggctgaggtgacccgggcctttggggccctggtctggatccgtggtgaccagcatgcaggggacctactgcagctgcccccagcggtccaggagctgctgctgagcctggtgcgggatgctgcgggcaaggaagacatcatcgagtggctcagccgcttcggcatctctgactcccactccgatccggaggttctaatctgccctccccagcagcagaaggaagccccagccatggtgtccgtgggagagagtcctggaccctttgtggacatggggaccctccagaacaggggcccagaaaattcaaagagattatctagcctgggagccactgggtccctgatcacagcccagagcacaccgcaggaggcagcaaaccagctggtacgggtcggttccaacaaccaaaatggtatggacagtgctcaagaggaagggacagtgcaagccaccagcagccaggactccacgaaccacacacaagccttgttgaagcaaaggcaggtccagaagatagaagataaactcctcttccaacctccagtatcagccctgggtgtgtgcccaccctggaaggcctggaccccggggccagcctttgggccattgtggccgggggctattgctgcaaccttctggaggatcaatgagctgcattctctacatctggcctggctcctgtcccaggcgtgcttcaatttccccttctggcagagacctctgggccccattcagttgaagctgccagggcagaatcctttgcccttaaatctggagtggaagcagaaggagctggctcctctgcctagtgcagaaagcccagctggtagaccagatggggggctgggaggagaagcagccctgcagaattgcccaaggccagagatttccccaaaagttacgagtttattggtggtccctgggagctcagatgtaaaagacaaagttagctcggatctcccacagatagggccacccttgacctctacaccccaactacaggctggaggtgagccgggggatcaagggagtatgcagttagattttaagggactggaagagggacccgctccagtgctgccaacagggcaagggaagcccgtggctcaaggggggctgacagatcagtcagtacctggagctcaaacagtgcctgaaactctcaaagtgcccatggctgcagcagtgcccaaagctgaaaatccctccagaactcaagtgccatctgcagctcccaaactgcctacatctcgaatgatgctggcagtgcacacagagcctgcagctcccgaagtgcctttggctccaacaaagccaacagctcaactgatggccacagctcaaaaaacagttgtgaatcaaccagtgttggtagctcaagtggaacccacaactccaaaaactccccaggctcagaagatgcctgtagcaaaaacatcacctgcaggtcccaaaacacccaaagctcaagccgggcctgcagctacagtttccaaagcacctgcagcttccaaagcacctgcagctcccaaagtacctgtgacccccagagtctccagagctcccaaaacacctgcagctcagaaggtgcccacggatgcagggccaaccttggatgtagccagacttctgagtgaggtccagcctacatcaagggctagtgtctccttactgaagggccaggggcaggctggaaggcagggtccccagtccagtggcaccttggccctcagcagtaagcaccagtttcagatggaggggctcctgggggcttgggagggggccccaaggcagccacctcgccacctgcaagcgaacagcacagtgaccagcttccagaggtaccacgaggccctgaatacacccttcgagctgaacctgtcaggggaacctggaaaccaggggttgcggcgagtggtcatcgatggcagcagtgtggccatggt

SEQ ID NO: 86917 - DNA, 425 bp, Homo sapiens
tttcgtcgagggttaggtttccgaccctccgcgtggcccacagctcataccttttcgggtgtccccgggtgtcaggcgagagcggtcctggggggcgctgggtgcccacccggtgaatggccgcctgagccggggaagatgcttcatctgcccctgcccagatccggaagaacggtgaatttcccccgcagctgggatgaaagcagctccatcagtagtggactcagcgatgcctcagacaatctcagttcagaagaattcaatgccagctcctcactcaactccctcccaagtactcccactgcttctcgcaggaactcaacaatagtgctacgcacagactcagagaagcgctcactggcagaaagtgggctgagctggtttagtgaatcagaggagaaagcccctaaaaaactggagtacga

SEQ ID NO: 86918 - DNA, 2032 bp, Homo sapiens
aggggttgatatgaatgctgctaggcttttattccacaaacttatacaacctgatcatccgcagatatctcagcaggtggcagcttagtttggaaaagaatcttatttcctaaactgactagctccttacctgatgttgaggcattgaggttttatcttactctaccagaatgtcccctgatgagtgattccaccaatttctcagcaatagcaattccctttggtacagctcttgtgaacctagaaaaggcacccctgaaagtacttgaaaactggtggtcagtacttgaacctccactattcctcaagatagtagaactttttaaggaagttgtggtacatcttttgaaactctacaagatcggtattcccccttctgaaagaagaattttcaacagttttcttcatactgcattaaaggttttagaaatactacatagggtaaatgagaaaatgggacagattatacagtatgataaattttatatacatgaagtacaagaattgatagacataagaaatgattatatcaactgggtccaacagcaggcctatggaatgttggcagatatccctgttacaatctgtacatatccatttgtatttgatgcccaagcaaaaactactctgttacagaccgatgcagtcttacagatgcagatggctattgatcaggcccacaggcagaatgtctcctctctttttctcccagtgattgaatctgtgaatccctgcttaattctagtggtgcgtagagaaaatattgtaggagatgcaatggaagtccttaggaaaacaaagaacatagattacaagaagccactcaaggttatatttgttggagaagatgctgtggatgcaggaggggtgcgcaaagaatttttcttgctcatcatgagggaattattggatcctaaatacggcatgtttaggtattatgaagattccaggctcatttggttttctgataagacatttgaagacagagatttgttccatttgattggtggtatctgtggcttaacaatttataattgtaccattgtggacctccattttcctttggctttatataagaaactactgaaaaagaagccatccttggatgatttgaaagaactaatgcctgatgttgggagaagcatgcaacagttactggattatccagaagatgacatagaggaaacattttgtcttaattttacgatcacagttgaaaactttggtgcaacagaagtgaaagagctggttctaaatggtgcagacacagctgttaacaaacaaaatcggcaagagtttgtcgatgcttatgtggattacatattcaataaatcagtggcttccttatttgatgcttttcatgcgggctttcataaggtctgtggaggaaaagtccttctgctctttcagcctaatgaactacaagcaatggtcattggaaatacaaattatgattggaaggaactggaaaagaatacagaatacaaaggggaatattgggcagaacatcctacgataaaaattttttgggaagtatttcacgaattaccattggaaaagaagaaacagtttctgttatttttgacaggtagtgatcgcattcctattcttggtatgaagagtctgaaactagtcatccagtccacaggaggtggtgaggagtatctcccagtttcccatacttgttttaatcttgtggatcttccaaaatatacagaaaaagaaactctacactctaaactgatccaagctattgatcacaatgaaggcttcagtttaatataactttggagttataactattcagtttagtgcaaaagcattaaactatttgtgtttttcttgtggtgatgaattcagcaaggtgacagaggtactattataattcttacttgcagaatgttcaatctacgagtgttcatggaagccaaaaaatattaaaggaaaatgaacaaactgttaatattattgtacagaaccatggattttttttgaccatcttctaataaacatagcaagtattatgaataaa

SEQ ID NO: 86919 - DNA, 488 bp, Homo sapiens
  misc_feature (1)...(488): n = a,t,c or g
actggtccaccaggggcgttggagnatccntcgaanaccaccggnnnnnnnntggtggtcgacgatttcgtgtgaaccgggtcgcggcggccgttgctcggggtgagtgaggggcggcagggctctgagcctggcggggtgcggctattcccttcgcggaccagattacaccactgcgagggcacctgcagcgccgggatctgagtgcgaaactccgagcggaagctggtctggcaggtcctctggagcttggggccaggcgggggcgacttgggggagccatccttgggctcccagacggagtaggttcaattctgagcccggataccccggcgaggttggacgggatagccgtgacagggagtccccgggcggggacaaggtccgcctctcacctgggtcctcagcaactgacacccggagtgggtgtctggaaggtctgctcatcaaatgaatgactgcatttaatcagatcttcaactactgtg

SEQ ID NO: 86920 - DNA, 673 bp, Homo sapiens
tgtcgtgtattgcgccgcttcgccattcgtgtagttgtttcagaactccctccagcagctgcgtgctcaagcccttgtgtgctggtgagaggttggctgccagaagggggatggcccgctgtccccgccaaatgcaggccctcagaggtcccagcatgctgctctctggccaggccttgggacttcttccgagacagggcatggctcagccagtcctctttctcctccttggaggctcgcagcttggaagcctggctggctttggcaggggaccctgcaccttcagttggtggctttgccctggaggggggcagcccagctggcgtggagtgctggctcgcaggaggaggcactgagggcgtgacaggcactgaactttcccgatgggcctctctggtgggtgaggcagggaacaggtccaagtcctcgtccttgaggcccaaccagtcagctcctcccttcctgggctggatggggctggaagccattggagggctctgtttggagcctggttctcccttggggtctgcgccactgtctgcgaagaacctgacagactgccggcgggactgccggccctcagaggagaccacagtgggctgataggctccaaaggtgaagtcctcgtcaccccacatatcttcactgtcctgtggcctctggtacttcttgt

SEQ ID NO: 86921 - DNA, 539 bp, Homo sapiens
tttcgtggcagggcgggtaagttgttttaggggcccggttcgtgagggactgctaaggaagaggctgcatggcgcggtagtcccccgagtggaggtcggctgcccctgggaaaccagagagtcggagggagtccatctggagcggccaagtaggtcggggaagggccgcgcctgacgtctggccgcaggtagccacgttccctccgcccccggtgcagcttcagggcttgcaccctgcgtccctctgtggtccttcgagagggtctgggcggggactatgggtgggcgcgcccaggaattgtcccttcggcctctcgtcctgcccctcccccccaccatccagtctctccttggaatatactcttaaaatctttcggatggagttctttggagaaatgggtttcctggagtgtcaggtgatcattgatgttgattgtttctgaaatgtttatttaggcatcaaaccaacatgcctaaataagtttttcatttctacagcgcctagattcattcctagcacatagtaggccctaactcag

SEQ ID NO: 86922 - DNA, 413 bp, Homo sapiens
tttcgtgcccccaggacccctggggagagggcctcgctgggctggccctgcagggaccatggaatccagagctgaatccccccatcctgcggcaggtccctccagacttcagggaccaggaagctatgcagatggtgcctaaattctgcttcccttttgatgtggaaagggagccccccagccccgccgtgcagcatttcaccttcgccctcacagaccttgccggcaaccgcaggatttggtttctgccgcctgcgggcgggtacccagagctgtctctgcatcctcagccacctgccttggttcgaggtgttttacaagctattgaacacagtgggagaccttcctaggcccaggaccaagtcaccgaggcagaggaacttcttcaaaatctgtttcagcagtcccttgcg

SEQ ID NO: 86923 - DNA, 1228 bp, Homo sapiens
tccttcttccacacggtgctggagaacagcctggcctgtgagaccctcgtggacaacaacctgcgggtcaccaactggaaccgcaagctgggctgcaagtgccagtacaagcacattgtggactggtgtggctgctcccccaacgacttcaagccacaggacttcctccggctgcagcaagtctccagacccaccttcttcgcccggaagttcgagtcgactgtgaaccaggaggtgctggaaatcctggacttccacctgtatggcagctacccccccggcacgccagccctcagggcctactgggagaacacctacaacgcggctgatggccccagtgggctcagagttgtcatgctcactgcttacacagccttcgcccgcctcagcctgcaccatgccgccactgctgcacccccaatgggcaccccactctgcaggtttgagcccaggggcttgccgtccagcgtgcacctgtatttctatgacgaccatttccagggctacctggtgacgcaggcggtgcagccctcagcccaggggccggcagagacgcttgagatgtggctgatgccccaagggtcgctgaagctgttggggcgcagtgaccaggccagccggctccagagtctggaggttggcactgattgggaccccaaagagcgtcttttccggaactttggggggttactggggccgctggacgagcctgtggccgtgcagcgctgggcccggggccccaacctcacagccacagtggtctggatcgacccaacctatgtggtggccacatcttatgacatcacagtagatacggagactgaggtcacgcaatacaagcccccactgagccggcccctgcggccagggccctggactgttcgactccttcagttctgggaaccgctgggtgagacccgcttccttgtgctgcccttgaccttcaaccgcaaactacctctcaggaaagatgatgccagctggctgcacgcagggccaccccacaacgagtacatggagcagagtttccagggcctgagtagcatcctgaacctgcctcagccggagctcgcggaggaggctgcccagcggcacacacagctcacaggccctgcgctcgaggcctggacagacagggaactgagcagcttctggtccgtggctggactgtgtgccataggcccctctccctgcccctccctggagccctgcagactgaccagctgga

SEQ ID NO: 86924 - DNA, 414 bp, Homo sapiens
tgcacacgcaggaacatgcttcggttgatccgtccaccctggcacgcttttttccctcggcacgtggtccccacgctgtgcctgcccagctcggagcccagaggcccccgcagctccccacaactttatggtgcagggacctgaggcctcccctggctcagtccctttcccagggtcaggggtccatgtattgaaccaggacgggaggtgccttccccctgagctctgtccctgctgaacctggaaggcagcgcccggtggcggctcagacccccagagccttttttgaggtccgacactcctttgctccccccagggagaccccctggcctggcccccagctatcggtgcctcggtttcctcccctgaaaggtggggatgtaaaaagtgcctggcctgtggtagacgcgcccg

SEQ ID NO: 86925 - DNA, 500 bp, Homo sapiens
cgacccacgcgtccgggggcgcgcggtcgggggcaggttgggccggaagaggggtccgggccggcactgaggcgggaaggggtggcatcttccttactttgtccatcctccggactcgcgatcttccttccggagccatgtcagaaggagtggacttgattgatatatatgctgacgaggagttcaaccaggacccagagttcaacaatacagatcagattgacctgtatgatgatgtgctgacagccacctcacagccctcagatgacagaagcagcagcactgaaccacctcctcctgttcgccaggagccatctcccaagcccaacaacaagacccctgcaattctgtatacctacagtggcctgcgtaatagacgagctgccgtttatgtgggcagcttctcctggtggaccacagaccagcagctgatccaggttattcgctctataggagtctatgatgtgggggaggtgaaatttgcagagaatcgagccaag

SEQ ID NO: 86926 - DNA, 1578 bp, Homo sapiens; identical to SEQ ID NO: 86451

SEQ ID NO: 86927 - DNA, 415 bp, Homo sapiens
gggggactaatcccctagagtttgagttcttgtggggctttagagcccacagggaaatcacaaagatggaagccctgaagtttgtgtcagatgcccatgatgaaaaaccctggagctggccagaagaatataataaggccctggaaggtgacaaaaccaaagaaagaagcctgactgctggcttaaagttctggtcggaggacactatgaatgataaggcaaatgatttggtccagttggctattagtgtcactgaggagatgctgcctatacatcaggatgagctattggctcacactggcaaagaatttgaggatgtgttcccaaatatcctcaatagagctactctaattcttgatatgttctatgggttggctctgattgaagttgataccagtgagcacatctacctcct

SEQ ID NO: 86928 - DNA, 486 bp, Homo sapiens
ccttcgaaatacagataccctctgaccacgcccagccgggcacgaggataagactctggttccttcttccccatcctactaataataatactctcattccttcttcctcatactactactaatactctcattccgggtgtcccccctactaataataatgctctcattccttcttccccatcctactaataataatactctcattccttcttcctactactactaatactctcattccttcttccctcctactaataatactcgtattacttcttcctactactactaatactctcattccttcttccctcctgctaataataatactctcattccttcttccccatcctactaataagaatactctcattgcttcttcctcatactactactaaaactctcattccttcttccctcctactaaaaataatactctcatttcttctttcccatcctactaataatactacatctaatccctcttcc

SEQ ID NO: 86929 - DNA, 1033 bp, Homo sapiens
  misc_feature (1)...(1033): n = a,t,c or g
ttttttttttttcctgcaaaaaacatttattcacaggtgggctggggtcagctgaagatttattcacaggtgggccagggtcagctgagcgtggaagtgctgggcacagagtttcacccggccgtcccagcaggccctgggctgggataaaactccagtgggcaccggctcgggccccttcttcttcaggtcccgctcaaagatctcgtaggccgtgagctccagcagtggcgcgatgctgacctcaggcatggacagggcctggttgatgacgctggcggctttggacacctcagggtggtagtggcgctggagggcctgaagctcccacagggagctctccaaggcccggctctgggctgggtcctcctctccagggtcgtaggggtcggcgtccaactcagggccgtgtggacggtgcacgaggacccggcaggcagggtgccggcgcagcaggttacagatgaaaggcaggaccatgagcagggcctcagggggagccgtcagggccaggcgggccagccgcttggcgaaggcggccaccaggtaggcggggaggtgggaggaggacaggaagaggtcagccaggtggaagaagcgggcgcggtacttgacgtgaaagacagaggggtccaagaggccgtagagcttccggtagaagtcagggtactccaggttgtgtttgtgaatcaagatgaacagcccgttcaaggccaagaggctgagggcccccccttgacctgaaaggaggggtggcccaggagctctcccaagcgattgcagcagctgtgatagcggtgtctcatccacaccttgtacttccgtgtggctccctgggaccctgtcatgaccatctcctcagagggcagctggcccacaaacagctctccccgctccagcaaggccccgaaaagacggctgcacgtgcggactgcttcctggatctcctcctggtcctcagactgcagcacggccaggatgtcgaacacggcgttggcctcactgcggctcgcgaattccggnnnntggactg

SEQ ID NO: 86930 - DNA, 537 bp, Homo sapiens
ttctcaaagtcatgtatgaattcagtgcaatctcaatcaaaatctcaccatatttttgtagtggaaattgacaagctgatgctaccatttacaaataaaaatgcaaggggccaagaatagccaaaataatcttaaggaagaagaaaatggaagttttacctcaccagataataagatttactctaaagctacgataattaaaacagcgtgttcttagtgtgaagatagacaaatagaagaatggaacagaatagagtctaaagaagaactcaagggccaaaagtagccaagaagaacagatctggaagacattatccctccagatatcaagatctcttataaagatatgtggtatcgacgcaaggaaaggcaagctgaccaaggcaagctgaccagtggaactaaacaaagtccagaaacaggttcacacatatagtccatccggtgtgtatctttgtgtgtgtgtatttcacaaaggcttaaagtaatgtgtcttcaataaatggtgctacaattcaaaagagcgtaactatatgt

SEQ ID NO: 86931 - DNA, 425 bp, Homo sapiens
ccggaatgcccgggcaacagttccataaaagcaacaagaccaagcaagatacatgaaatataaagcaacaactaaagggagaaatgcaatacccacttttcaataatagataaaactaccaggcagacgatcaacaaggaaatagaagacttaacactataaagcaactagaccttatagacacctagagaacattccacccaagaacatcagaatacatactcttcacaagtgcccgtaaaacattttcaaagataggccatgtattaggccataaaacaagccttataaaattaaaaggattgaaatcatacaaagtatgctctcccctcacaagggaattaaatgagaaattattaacagaaggaaagttgggaaattcacagatatggaaattaaacaacaaactcataaataatgaatgg

SEQ ID NO: 86932 - DNA, 5583 bp, Homo sapiens
  misc_feature (1)...(5583): n = a,t,c or g
gcggccgctctttgccagggagggtggcatctatgctgtgctggtctgcatgcaagaatataagacttctgtcttcggtgcagcaggctgggctggcggcactgaagatgctggccgtcgccagctcctcggagatccccacttttgttactggccgagattctatccactctttgtttgatgctcagatgaccagagagatcttcgccagcatcgactcagccacacgcccgggctctgagagcctgctcctcactgtccctgcagccgtgatcctgatgctgaatactgaggggtgctcttctgcagcgagaaatggcttactcctgctcaacctacttttgtgcaaccaccacactctgggagaccagattataacccaagagctgagagacacgttgtttaggcactcagggatagcaccaagaacagaacctatgcctaccacacgcaccatcctcatgatgcttctcaatcgctactcagagccgccgggcagcccctgagcgtgcagcactagagacccccatcatccagggtcaggatgggtcccctgagctactgattcgatccctggttgggggcccatctgcagaactactcctggacttggagcgtgtgctgtgccgtgagggcagccccggaggtgccgtgaggcccctcctcaagcgcctccagcaggagacccagcctttcctcctgttgctgcggactctggatgctccggggcccaacaagactctgctgctgtctgtgctgagggtcataacccgactgctggatttccctgaggcaatggtcctcccctggcacgaggtcttggagccctgcctcaactgcctgagtggccctagcagtgactccgagattgttcaggagctgacctgcttcctacatcgcctggcctcgatgcataaggactatgctgtggtgctctgctgcctgggagcaaaagagatcctctccaaagtcctggacaagcactcagctcagctgctgctgggctgtgagcttcgggacctggtgacagagtgtgagaagtacgcacagctctatagcaacctcacctccagcatcctggccggctgcattcagatggtgctgggccagatcgaagaccacagacgaacccaccaacccatcaatatccccttctttgatgtgttcctcaggcatctctgccagggctccagtgtggaagtgaaggaggacaagtgctgggagaaggtggaggtgtcctccaacccgcaccgagccagcaagctgacggaccacaaccccaagacctactgggagtccaacggcagcaccggctcccactacatcaccctgcacatgcaccgtggtgttcttgttaggcagctcactttgctggtggccagtgaggactcaagctacatgccagccagggtggtggtgtttgggggtgacagcaccagctgcatcggcactgagctcaacacggtgaatgtgatgccctctgccagccgggtgatcctcttggagaacctgaaccgcttctggcccatcatccagatccgcataaagcgctgccagcagggcggcattgacacccgggttcggggtgtggaggtcctgggccctaagcccacattctggccactgttccgggagcagctgtgtcgccgaacatgtctcttctacacaattcgggcacaagcctggagccgggacatagcagaggaccaccggcgcctcctccagctctgtcccagactgaacagggttttgcgccacgagcagaattttgctgaccgcttcctccctgatgatgaggccgcccaggcactgggcaagacctgctgggaggccctggtcagccccctggtgcagaacatcacctctcccgatgcggaaggcgtgagtgccctgggatggctgctggatcagtacttagaacagagagagacctctcggaaccccttgagtcgagcagcgtcctttgcttctcgagttcgtcgcctttgccacttgctggtgcatgtggaacctcctcctgggccttctcctgagccatccactcggcccttcagcaagaacagcaagggtcgggaccggagcccggcgccttcgccagtgcttccaagcagcagcctgaggaacataacccagtgctggctgagcgtggtgcaggagcaggtcagcagattcctggctgcagcttggagggccccagactttgtgcctcgttactgtaaactctatgagcacttgcagagagcaggctccgagctgtttgggcctcgggcagccttcatgctggctctgcgcagtggcttctctggcgccttgctgcagcagtccttcctcactgctgctcacatgagtgagcagtttgccaggtacattgaccaacagatccagggtggcctgattggtggagcccctggagtggaaatgctggggcagcttcagcggcacctggaacccattatggtcctttctggtctggaactggccacaacttttgagcacttctatcagcattatatggcggaccgtctcctgagctttggttcgagctggctggagggggctgtgctagagcagattggcctctgttttcccaaccgcctcccacagctgatgctgcagagcctgagcacctctgaggagctgcagcgccagttccacctcttccagctccagcggctcgacaagttgttcttggagcaggaagatgaggaggaaaagagactataggaagaggaggaggaagaggaggaagaggaagctgagaaagaattatttatcgaagatccaagtccagccatttctatactggtcctgtcaccacgctgctggcccgtctccccactctgctacctgtaccatcccagaaagtgccttcccacagaattctgtgatgcccttgaccgtttctccagtttctacagccagagtcagaaccatccagtcctggacatgggaccacatcggcgactgcagtggacgtggctgggccgggctgagctgcagtttgggaagcagatactgcatgtgtccaccgtgcagatgtggctgctgctgaaattcaatcagacagaggaggtgtcagtagagaccttgctgaaggattctgacctctccccagagctgctgctccaggcactcgtgcccctcacctcagggaatggccctttgaccctgcatgagggccaggactttccacacgggggtgtgctgcggcttcatgagcctgggccccagcgcagtggggaggccctgtggctgatacctccccaggcatacctgaacgtagagaaggatgaaggccgaaccctggaacagaagaggaatctcttgagctgtcttcttgttcgtattctcaaagcccatggggaaaagggcctccacattgatcagctggtttgtctggtgctggaggcctggcagaagggtccaaatcctcctggaaccctgggccacactgttgctgggggtgtggcctgtaccagtacagatgtcctctcttgcatcctgcacctcttaggccagggctacgtgaaacggcgtgatgaccggccccagatcctgatgtatgccgctccagagcccatggggccctgccggggtcaggcagatgtccctttctgtggcagccagagcgaaacctccaagcccagcccagaagctgtggctaccctggcatctctacagctgcctgcaggccgcaccatgagcccccaggaagtagaagggttgatgaagcagacggtgcgtcaggtgcaggagacgctgaacttagagccagatgtcgctcagcaccttttggctcattcccactggggcgctgaacagctgctgcagagctacagtgaggaccctgagccactgctgctggcagctgggctgtgcgtacaccaggctcaggctgtacccgtacggcctgaccactgccccgtctgtgtgagccccctggggtgtgacgacgacctgccctctctctgctgcatgcactattgctgtaagtcttgctggaatgagtacctgacaactcggatcgagcagaaccttgttttgaattgcacctgccccattgccgactgccccgcccagcccaccggagccttcattcgtgccatcgtctcctcgccagaggtcatctccaagtatgagaaggcgctcctgcgtggctatgtggagagctgctccaacctgacctggtgcaccaacccccagggctgcgaccgcatcctgtgccgccagggcctgggctgtgggaccacctgctccaagtgtggctgggcctcttgcttcaactgtagcttccctgaggcacactaccctgctagctgtggccatatgtctcagtgggtcgacgacggtggctactatgacggcatgagcgtggaggcgcaaagcaagcacctggccaagctcatctccaagcgctgtcccagctgtcaggctcccatcgagaaaaacgaggggtgcctgcacatgacctgtgccaaatgtaaccatggattctgctggcgctgcctcaagtcctggaagccaaatcacaaagactattacaactgctctgccatggtaagcaaggcagctcgccaggagaagcggtttcaggactataatgagaggtgcactttccatcaccaggcgcgggagtttgctgtgaacttgcggaaccgggtgtctgccatccatgaagtgcccccgcccagatccttcaccttcctcaatgatgcctgccagggactggagcaggctcggaaggtgctggcctacgcctgcgtgtacagcttctacagccaggacgcagagtacatggatgtggtggagcagcagacagagaacctggagctgcacaccaatgccctgcagatcctcctggaggaaaccctgctgcggtgcagagacctggcctcctccctgcgcctcctgcgggccgactgcctcagcacgggcatggagctgctccggcggatccaggagaggctgcttgccatcctgcagcattctgcccaggatttccgggttggtcttcagagtccatcagtagaggcctgggaggcaaaaggacccaacatgcctggcagtcagccccaggcctcctcagggccagaggcagaagaggaggaggaagacgatgaggatgatgtgcccgagtggcagcaggatgagtttgatgaggagctggacaatgacagcttctcctacgatgagtctgagaacctggaccaagagactttcttctttggtgatgaggaagaggatgaagatgaggcctatgactgagggggcagatgcaggaaacacctagagcagccccagagtcacggggctgagggggcgggagctgcccctgtcatagggagggggattcccagcgtctgtagtgcttcctgtttgctgaataaaggtctctttctcacacacccnnnnnnnnnnnnnnnnnnnnnnnnnnnnnnnnccttttaagggaacaaattttaaggccnnnnnnnnnnaaagaaaaannnnnnnnnngggggccccaaaattaaattccggggccgggttttaaaaacnnnnnnnnnnnaaaaacccgggggtaccccaatttaaacccctggg

SEQ ID NO: 86933 - DNA, 1093 bp, Homo sapiens
cgactgtggctcggaccaagggaccttcagggccgctagaccctcccaggcgccttgagacccgaggcgccctaccggcccccctccccaggttagcgggccggttgtaaggtctccggcgggcgctgcctgccttcctcccagagggtgtttcctagaaactgataaatcagatcgtgcctctttacccttggctttcgaagcaaattgatgttcacgtctgacgtgggcgcgggctgcgcagggcggcgccagaccccagccgcctcccaggggctagactgagcccggcacaaggggtgtgaaatagaatttattgtggctctgattatgtacacgtgagatggcctggctgggccggccgggctcacatggtttgtacaataaatacatctgtggggcgggctctccgcagccgggaagggccaccgccacggttcagtccagcttccgggctcccagcttcatggggcccttggccaccttcctctcggcgcgtttggcctccatctcccgccgccgctcctcgcgcttcttccgggccagctcagccttgacctgtcgactgtcagtctcgaggccctcccagttgtcctcaccccaagagtctggcctcggctgggtgctgggacgtgcagacagggtagcgaaggggtcgcccttgtcgctggactctgggccaccccagttatactcgctggccagccgtgtaccgtcaggaggtggctcctgggagcttggctcctgccagccctgttcccaggagccctcagcttcccagctgctccagtcggactctggggatttggaggatttgtggtcggagttgctgacctgactagcacggctcacttggcccccggtgctccagtcgtcctgctgggccagcacagactcggcctcctgctccaggctgccccagtcttcgtcgtcccatctgtcagcagtgctgctgtcctctgctgtgtccttgtcctcctcctgcgtctcccagtggcctgaggttgtaggggtggcaggaacaggggtgggggctggggcaggaactccttcaggcgtgggtctttggggaatgttggtttctgctcgtgcc

SEQ ID NO: 86934 - DNA, 395 bp, Homo sapiens
gcgccggggcagggctagctcctgaaaacaggtttgggaaatacccctagagatttagcaaggccagtacccctgggcgtgagggcgtgaggtctacctgcctggcccagctcccagctctcaaaagctctcaaaggtgagatgagggacaggtttctgccaaataaaagccctcatgagcccgagctgagctctcccatgtgggtcctgcccagtccctgtctccaccttagtcagggtgtgcctcgtccctggcctgggagcgcagtgcttacttctgcaggttgtcgggggtgcacacatcctcatcgtacaggccgttcgtgtccagcagagtacctgggggggacgagggggtgacagtggtcgctgcaggcagggcccaggcagcctct

SEQ ID NO: 86935 - DNA, 818 bp, Homo sapiens
ggatagatcgcggtggacttccggccatccagcaggagcaccgtgagaaggagctgcagaagcgctcggaggtggcgaaggattttgagcccgaacgtgtggtagctgctccccaaaggccggggaccgagccacagccagaaatgcctgacacagtcctgcagtcagagaccttgaaggacactgccccggtgctggagggcttgaaggaggaagagatcacgaaggaggaaatcgacatcctcagcgatgcctgctctaagctgcaggagcagaagaagtcactcaccaaggagaaggaggagctggagctgctgaaggaggatgtgcaggactacagcgaggacttgcaggagatcaagaaggaactctcaaagactggtgaagaaaaatacgtggaagaatctaaagccagcaagagattgacaaaaagggtgcagcaaatgatcgggcagatcgatggcttgatctcgcagctggagatggaccagcaggctggcaagctggccccggccaacggcatgcccacgggggagaacgtcatcagtgtcgctgagctcatcaacgccatgaagcaagtcaagcacattcccgaaagcaagctcaccagcctggccgcagcactggatgaaaacaaggatggcaaggtcaacatcgacgacctcgtcaaggtgattgagctggtggacaaagaagatgttcacatctccaccagccaggtggctgagattgtagcaacactggaaaaagaggagaaggtggaggagaaggagaaggccaaagagaaggcagagaaggaggtcgcagaggtgaagagc

SEQ ID NO: 86936 - DNA, 1706 bp, Homo sapiens
gcccggggcaagaccggggatgatgaggatggctccaccgaggaggagcgcattgtgggacgcttcaagggctccctctgcgtgtacaaagtgccactcccagaggacgtgtcccgggaagccggctacgactccacctacggcatgttccagggcatcccgagcaatgaccccatcaatgtgctggtccgagtctatgtggtccgggccacggacctgcaccctgctgacatcaacggcaaagctgacccctacatcgccatccggctaggcaagactgacatccgcgacaaggagaactacatctccaagcagctcaaccctgtctttgggaagtcctttgacatcgaggcctccttccccatggaatccatgctgacggtggctgtgtatgactgggacctggtgggcactgatgacctcattggggaaaccaagatcgacctggagaaccgcttctacagcaagcaccgcgccacctgcggcatcgcccagacctactccacacatggctacaatatctggcgggaccccatgaagcccagccagatcctgacccgcctctgcaaagacggcaaagtggacggcccccactttgggccccctgggagagtgaaggtggccaaccgcgtcttcactgggccctctgagattgaggacgagaacggtcagaggaagcccacagacgagcatgtggcgctgttggccctgaggcactgggaggacatcccccgcgcaggctgccgcctggtgccagagcatgtggagacgaggccgctgctcaaccccgacaagccgggcatcgagcagggccgcctggagctgtgggtggacatgttccccatggacatgccagcccctgggacgcctctggacatctcacctcggaagcccaagaagtacgagctgcgggtcatcatctggaacacagatgaggtggtcttggaggacgacgacttcttcacaggggagaagtccagtgacatcttcgtgagggggtggctgaagggccagcaggaggacaagcaggacacagacgtccactaccactccctcactggcgagggcaacttcaactggcgctacctgttccccttcgactacctggcggcggaggagaagatcgtcatctccaagaaggagtccatgttctcctgggacgagaccgagtacaagatccccgcgcggctcaccctgcagatctgggatgcggaccacttctccgctgacgacttcctgggggccatcgagctggacctgaaccggttcccgcggggcgcaaagacagccaagcagtgcaccatggagatggccaccggggaggtggacggtagcccctcgtgtccatcttcaagcaaaagcgcgtcaaaggctggtggcccctcctggcccgcaatgagaacgatgagtttgagctcacgggcaaggtggaggctgagctgcatttactgacagcagaggaggcagagaagaacccagtgggcctggcccgcaatgaacctgaccccctagagaaacccaaccggcccgacacgagcttcatctggttcctgaaccctctcaagtcggcttcgctacttcttgtgggcacacgtattcgctggctgctccttcaaactgtttgctgctcctgctgcttgttcctccttcttgccctgttcctctactctgtgcctggctacctggtcaagaaaatcctcggggcc

SEQ ID NO: 86937 - DNA, 900 bp, Homo sapiens; identical to SEQ ID NO: 66075

SEQ ID NO: 86938 - DNA, 409 bp, Homo sapiens
ggaggcaggagggtgaggacagtgcaggttcttggcacagccagggtccaggacagtgtcagggcagggccaaggcagggtctgggccttgataagaccagcaacagggctggggctaggccagtgacaggaccagagtcagggcaagggccagagcagtgcaaggccagggtagggccaggcatttcagggtcagggccaggggagaaccagggcaaggtctgaagcagggaagggccagggccaggacaggtccagggcagggccatgacacggccaggggctgcgttagggcaagggcagggccagagcaaggtaagggtcagggccaaggccagggtagggacagggcaagaaatatggcaggaccaggggcaatgccaaggccaaggctgggccagggctgacg

SEQ ID NO: 86939 - DNA, 612 bp, Homo sapiens
acctcattacgcctagcttggcacgaggatcctcttctttctgccaatcctctcccccacgggacacctctctggttcgggaccaatccctccctggggacgtgccccacctgcgtgccggctgagctcaggaacccctgcctgccccccgggtggggctgcggctctggcctcccaggcccatcctcaacagctaccccagccaacaccaaggccacaaggggaccccggcctatgaggcaggaagccaaggtacagagagcagcctggccctcaccagtgcgcaagctggggcagcaaggctgacagttgctgcatgcccagggcagggtgtggtactggcacccaagttcagcatggcagagctggccaacagcttgtccccgatctgcctccagccccaagatgcctacagcccccaggccccttcggcagcactgcctctgcccacctgcctttaagagactccagggctgctcctgtcatgcagcgaaggttttgtctgtttcaaagttcgagactcaacttgagggactgtttttgacaatccccgctgacctccgctcctcgtggcgccctggccctaacacccagcctggcccagggccggct

SEQ ID NO: 86940 - DNA, 843 bp, Homo sapiens
tcctttttcatcatttaacgagcatttattgcacacgtctgttcaagcaccaggctcaggctggaaaccatccaaagcgcaatccctgacctcaggcagctcacagtccagtggggaagccgagaagcaaattaatgactctgaagaagcgcaggcaagtgctatgatcaaggcatgtgtgtgggtagggtgtctgggaaccccaaagtcagcctcaggtggggaggtaagtcaaggaagggtgaggggactgggctcagcctgggtctcggaggagagcggggccagccccggggatggtagagtcaacctgccaggcactgtgcactgctggccaggcccggccaatgagagcacaacttgttcagggtccaggaagcaaccccaggagaacaaagcctcgtggggagggaggaacctggagggtggaaggagtttgggcttttcctgaaggtgatgagagccactgaaggattctgggggaggagacatagggttatcctgggtcatgggggagagagctttgaaaggcagggaggtgggaggccgcagggactctcagaagtggagtctcagagctccttaagaggtgaaggcagccgggcgcgtgtgcacgcctgtaatcccagcactttgagaggccgacgcgggcggatcacaaagtcaggagatcaagaccatcctggctgacatggtgaaaccctgtctctactaaaaatacaaaaatttagctgggtgtggtgcgggcgcctatagtcccagctacttgggaggctgaggcaggagagttgcttgaacccggaaggtggaaaggcggaggttgcagtgagccgagatcacgcc

SEQ ID NO: 86941 - DNA, 404 bp, Homo sapiens
gcccagccaggggtattagagaggccgaggtggggagtggggctgcgatccgctcgtattgaagggggtaggagcaggagggagaggctgagggtgtgaaggggaagggggctgtggcatgtggttggagggaggactggactctgatgaggggtgttgcgaggaggtggggaaaggtcaaaattggagttaagacgtttctggggggcttcgaaagtgttaaattggaggtgggagggggaagggcctaggggagaatttgggtggaaaaggagagaacggaggcttggggaatggagagagtgtcggtgggaggaggtaatggagaaagtgagagactgggaggaataaagtttgggaggaaggggagtggaatgggagatatgacagtggagctgcacggg

SEQ ID NO: 86942 - DNA, 1307 bp, Homo sapiens
gggaagtgcacgcccacccagggggaaacccccccgttatttaccagaaaaaacaaaaattaggttggatgtgttcatacacaactgtattcctactgactggggaggtcaaagtacaagtctcgcccttatcttcggtgcgcttggcccgtccttctcagttttggcacggcaccccgctctttaaggtaagacctttatcataatcatcttcttcacctcttctcccacccttctgtatttcctctccagctctggggagttgacacctgctgtccttccacctttggtctgcaagtctggattgcttagagcagctaagtcaggagagacatgtaaaggggatgctgcttggtcctcctcctgttaatgaaagcacgaaaccttccccctctccttggaagctgactccacccatgtgttcaatcccaccagtcttccctcccaagtctggaagccccacgacctcttggtctcatctggtcacagcaagttagaggtggaaagagctcagacggggcccttctgtttacacatatactgcccatagccaggagttactgacaacactaccagccttctacactacattccttttccaagacttttctgggttagtttgctttccagcccactgatttccttcttattggacaggtcactcttttgcatcccaagcctggcttaggcaagtccctgaggttagtaaacaccttcagtgcccctcagccgagtcccttttgaccatggaataccatcagcctgaggatccagcccctggtaaggccgggactgcagaagcagtcatccctgaaaaccatgaggttctggcaggcccagatgagcaccctcaggacacagatgcaagagatgctgatggggaggctagagaacgggagccagcagaccaagctttgctgcctagccagtgtggggacaaccttgagtcccctctgcctgaagctagctcagctccaccggggccaacccttgggacactgcctgaagtagagacaataagggcatgctccatgccccaggagcttccttagtcccccaggacccgacagcctgagccagatttctactgtgtcaagtggatcccttggaaaggagaacagacacccatcatcacccagagcactaacgggcccttgccctctccttgccatcatgaacatcctctttcttcagtggaaggagaagctccccccgcagaaggaagtgatcacatcggatgagctcatggcccatcttggaaactgcctcctgtccatcaagccccaggagaagtcagagggacttct

SEQ ID NO: 86943 - DNA, 827 bp, Homo sapiens
  misc_feature (1)...(827): n = a,t,c or g
tcaataacaaaaataattcctaacctaaaagttcctttctaacctgaaattcgcctaaatcggttaattgtgctgcttaattaatgggggcgggaaggggcccatggctttccacggcggcggggtgtagggggaagcaggagaccctgacgggcccacagccctccagctttctccttaggtaggtagacaggagtatggggtggggtgaggtgggggcgcctgtgtgtgcgtgtgcatgcggcacaggtgggcaggccccagcttgggagctgtgcaggcaccacacctggttgtgtagggtgtttggatgtgggcactgctgtgcagagcggtgggtcatccttgtgggggcagccacgcttgctgctgggggtgaggctggccacaccataggctacagctggcaccttcttctccagccatggctctgcccctggctggacatggcagatgtgtgttggccagaggatcagagaagtggccacctgtgtgggggcccaggagccctggatctgtccccctcagctggagtcaaaaggcctaactcaaaggtagagcccagttgtgcccagcagggactggttgaggtggggaggagtgtagggggcatgtgaacctagggacctggtctctctgcatctgccgttcttccctggcccacccaagccggttggacccctgtcctgcaaacacacctcccagcaggtggctgcgctcctggcggactcagcaattgnnnnnnnnnnnnnnnnnnnnnnnnngaacggtcagtgaatgattaatgcctgaaggaggggtcttgggggcaaccaccgaatccacca

SEQ ID NO: 86944 - DNA, 420 bp, Homo sapiens
gcgtccgctcaaaaactattgtcatgttccctctaagtcctctctttctcatgttacatatctctagttcctccagccagtcttcagatgacacaatctccatgtctctcacccatattgtattgcctcccttttgtctagtcgttaaatattctacccagaattgaattcagtattttacatatgttctaaccagcacagagtgtaatgggactagtacttaaacaggtcaagacaccctatttcttaatgtactttgagattatgtaagcatttttaagcaatatcgcataccgttggttcataatgaacttacagtccactgaaacactagatctttttgtattaattgttgccaaggtcagttttcttcttgaacctgcacagggactgaggctgctgctactttttcatctcttg

SEQ ID NO: 86945 - DNA, 3081 bp, Homo sapiens
ttattctcccattcggcttcttgaagtatgtgttccactccccaaaatattcattaagcgtcaggccccattaaaagtgtcccttcttcaggatctgaaggacttctttcaaaaagtttcacaggtatatgttgccattgatgaaagacttgcatctttgaaaactgatacatttagtaaaacaagagaggaaaaaatggaagatatttttgcacagaaagagatggaagaaggtgagttcaagaactggattgagaagatgcaagcaaggctcatgtcttcctctgtagatacccctcagcaactgcagtcggtctttgagtcactcattgccaagaaacaaagtctctgtgaagtgctgcaagcttggaataacaggttgcaggaccttttccaacaggaaaagggtagaaagagaccttcagttcctccaagtcctggaagactgagacaaggggaagaaagcaagataagtgcgatggatgcatctccacggaatatttctccaggacttcagaatggagaaaaagaggatcgcttcttaacaactttgtccagccagagctccaccagttctactcatctccaattgcctacgccacctgaagtcatgtctgaacagtcagtgggagggccccctgagctagatacagccagcagttccgaagatgtgtttgatgggcatttgctgggatccacagacagccaagtgaaggaaaagtcaaccatgaaagccatctttgcaaatttgcttccaggaaatagctataatcctattccatttccttttgatccagataaacactacttaatgtatgaacatgaacgagtgcccattgcagtctgcgagaaggaacccagctccatcattgcttttgctctcagttgtaaagaataccgaaatgccttagaggaattgtctaaagcgactcagtggaacagtgccgaagaagggcttccaacaaatagtacttcagatagcagaccaaagagtagcagccctatcagattacctgaaatgagtggaggacagacaaatcgtacaacagaaacagaaccacaaccaaccaaaaaggcttctggaatgttgtccttcttcagagggacagcagggaaaagccccgatctctcttcccagaagagagagaccttacgtggagcagatagtgcttactaccaggttgggcagacaggcaaggaggggaccgagaatcaaggcgttgagcctcaagatgaagtagatggaggagatacgcaaaagaagcaactcataaatcctcatgtggaacttcaattttcagatgctaatgccaagttttactgtcggctctactatgcgggagagtttcataagatgcgtgaagtgattctggacagcagtgaggaagatttcattcgttccctctcccactcatcaccctggcaggcccggggaggcaaatcaggagctgccttctatgcaactgaggatgatagatttattttgaagcaaatgcctcgtctggaagtccagtccttcctcgactttgcaccacattacttcaattatattacaaatgctgttcaacaaaagaggcccacggcgttggccaaaattcttggagtttacagaattggttataagaactctcagaacaacactgagaagaagttagatctccttgtcatggaaaatcttttctacgggagaaagatggcacaggtttttgatttgaagggctctcttaggaatcggaatgtaaaaactgacactggaaaagagagttgtgatgtggtcctgctagatgaaaatctcctaaagatggttcgagacaaccctctatatattcgttctcattccaaagctgtgctgagaacctcgatccatagtgactcccatttcctttctagccacctcattatagattattctttgctggttgggcgagatgatactagcaatgagctagtagttggaattatagattatattcgaacatttacatgggacaaaaagcttgagatggttgtgaaatcaacaggaattttaggtggacaaggttaaatgccaacagtggtgtctccggagttgtacaggactaggttttgtgaggcaatggacaattatttcctaatggtaccagaccactgtacaggcttgggtctgaattgctgaaatcaagcacatattttgaaatggactgtgaaggaaaaggggacaggaacaaaggaccataaataagctacatgttttatttcttcatcgtgttcaccactgtatgccaaggcttttcagttctgtgtctgtttagactgtccgtaatggaatggtaaaactccatgaatttgcactttggtttttgatacctgtggagctgtctgtacgttgggaagtggcatgaaaattttcttaagctaaaatacagacatgtttcaaagggctaaagttggagatgagtagatagggtgaaaaacgggttaaatttgctagcttaattgttttaagaagaaaacagtgtctcataaattgactatcctggcatcacatttaacatgttatctacttaaaaagcatttgtagagctgctgaatttgttttgtgtttttctgtaataatttaatgttacttattatcagaatttctgaaacctttacaaaaattctgatttattccattaatggccagttaaacacgtgggcatttattgttttattgaggaatttgacttaaactgggaatcctgtcatgttgtttatctttccagccttgcctgtttttgagtatgtttgatgtttttaaaattttgtcttctctgtggatgacaggaggctacagcaatttaacctttaagcctcccttttagaggatatttttaaagccttggtttaaaaatttttggtgcaattcatatattaaaattgcaccttaccttgcatacgctcatattctagggttttttctctatttttagggtatcatagtaaatcattagtaaatgagtctgtagttactaaaccctaatggaataattattaatgaaagatttttgaaatataaaaaataaattaggcccaatccaagaataaaccaaaaaggaaacc

SEQ ID NO: 86946 - DNA, 566 bp, Homo sapiens
gatttcgtcttccttggtcatatttttggatgacaatcatctgtttttgtgaggaggaatgggatgggcagtaagagtcagcttaaatcgggctccgtgacagccaacgcagtgaccctcgccccttccttggcagcacatcatgcttgtgcagcggcagatgtctgtgatagaagaggacctggaagaattccagctcgctctgaaacactacgtggagagtgcttcctcccaaagtggatgcttgcgtatttctatacagaagctttcaaatgaatctcgctacatgatctatgagttctgggagaatagtagtgtatggaatagccaccttcagacaaattatagcaagacattccaaagaagtaatgtggatttcttggaaactccagaactcacatctacaatgctagttcctgcttcgtggtggatcctgaacaactagatgttcctagacattttctttatggttccaagtgcaaaacaggtgttcttatctaaaacgtcaattagaaaattatctgcggttgttaatctactgtatatttttgtttggtatatttact

SEQ ID NO: 86947 - DNA, 411 bp, Homo sapiens
tttcgttccagcctctggtgcacatggcttcctccccggcggtggacgtgtcctgcaggcggcgggagaagcggcggcagctggacgcgcgccgcagcaagtgccgcatccgcctgggcggccacatggagcagtggtgcctcctcaaggagcggctgggcttctccctgcactcgcagctcgccaagttcctgttggaccggacggcctgtgtgacttgtggcctccgagggtcctgctcccctcctcatggtctcagcgaatagcggcccttagggctggccccttacatgtgtgagtgcccaaggctgagggtggctggccacctgagtcctgacctgcctcttctcccgctggcaggtacacttcttcaggctgtgtcctctgtgcaggtcctgagcctttgcctcc

SEQ ID NO: 86948 - DNA, 399 bp, Homo sapiens
tttcgtgccacgccacctgcccgggctccgggagcccctccacggagcccaccccagaggctggtagaggtcatgtggggtgggaggaagggagggctaggaggaaccggcagccgctcagcctcccggggtggaaggaggggactccgggaccttgatgtaagcaggctggtcgctgagcaacaatgaaggcctttctctgccagggctggtgcgtcaccatctgggggggtgcccagggtacccccatgccagcctctttgtccggacacaggcatggctgggggaccagggatggtccagctctgtgctggccgccggcagggagggagcctggagcccgtgggagcccgagggcctggcgggaggcggcaggaagtgtgtgctgagccagggcag

SEQ ID NO: 86949 - DNA, 398 bp, Homo sapiens
tttcgtcgcgctgctgcgagaccagccgcggcgtctttggcagtagtgggcgtccttgcgggtccaggagggcccctctcccgcgaccgccgaccacgatgagagcgtgaagaccctctcgaaaggaagggctctgctctacacactggtgtctcctgcggaagggcagctgggcacgccttccagaccgaggttacttgccacagaagtgtttctgggctgcagccctcaaccttggcccaaataaactttctgtattaattttgccttagtgtcgttctttaagtcaacaaggatggccaaggcagtcactaatctcacactcacctgatagccacaggaacaacattttcccagctataagcaaaagttgaaaaatcagtaacccaagatgactc

SEQ ID NO: 86950 - DNA, 388 bp, Homo sapiens
tttcgtggaaaggaggacggagccgtgatgaaatctttgggtagcccggaggaaaggaggacggagccacgtagaaatcggggggtagcccggaggaaaggaggacggagccacgtagaaatcggggtgtagcccggcggaaaggaggacggagccacgtataaatcggggggtagcccggaggaaaggaggacggagccacgtagaaatcggggggtatcccggaggaaaggaggacggagccacgtataaatcggggggtagcccggaggaaaggaggacggagccacgtataaatcggggggtagcccggaggaaaggaggacggagccacgtataaatcggtgggtagcacggaggaaaggaggacggagccacgtagaaatcg

SEQ ID NO: 86951 - DNA, 456 bp, Homo sapiens
  misc_feature (1)...(456): n = a,t,c or g
agcgccatgattcaatcctatgcncngcgnactggnntggaattccnccccgacgatttcgtgcagaggctgccagcccggagctggatttagattccggccttggggaccccagctcccacctgcgccctgccttccagatcaggggaaaaggggcccccagcccctccttgctttctgcttcctccctctgtatctggctgggtgggtgcggggagggttggatccgggcggacccgggccccaccatccctaggcaaggagcctgccctgccaggttcctgaagctgatggaaaagggtccccccgagctcctgctgagccagggcagaccctgccgactaaacactcactggcctgggcgccttcttaccatccaggcctggccacctgctccccgaggtacaatttgtttggtgtttttgacaggatccctgtggggacgcctcacctggg

SEQ ID NO: 86952 - DNA, 388 bp, Homo sapiens
  misc_feature (1)...(388): n = a,t,c or g
aaaatacacctctatactgtataaataagacataccaaatacacacagaaattttaaaaagatagaactaaatatatgggcaaagagataccagtcaagtggaaaaaataaaaatcagggggttaaatctttatatcagataaagtagaattaaacaaaactacatactgtatgcacttacctttagcccagcaatcccacttctgatcatttattctgaaggtacacttccaaccatacaaaattacatatgcacaagattattcattatagcattgtttataattgcaaatagttataaatgtctaaacacaggaaattggttgaaaaactttacatatacacagcagaatacaatacagttgtcaaataagaatgaggaggagcn

SEQ ID NO: 86953 - DNA, 1578 bp, Homo sapiens; identical to SEQ ID NO: 86451

SEQ ID NO: 86954 - DNA, 1235 bp, Homo sapiens
ctcctgggctctatagggccaatctcggcaagctaggggcatacccatggtcccagtcctcccctgccctcaaccataatagtaccagccccttaaccttggcagtggggtcacctctgcttcctcgctcccggcccctcctccagttccatcggggtgccccagctctgtcccggttcccagagaatgggctcccaggaagccaagagcccagccccctgcggggtcgatgggtacctggcacaaccctggagacagtggaggagaaggagaagaaggcatctccaagtcagagccgtggccagctggatctccttgtccccttccccagagcccgagaagtgggagaccctgactctggggttacccccaactcaggcccccttcggcctggcgagcaggccccagaggacaggaggttgtccccaagccaggccgacagccagctggatctcctgtcccgagccctgggtactgggggtgcccctgagttgggttccctcagacctggtgatcgggccctggaggacaggaggctgtccctaaaccaaagccgtggccaatcagacctcctgatgcagtaccccaaggcccagggttccagagtgccccttgaaaccaactcctcagccagacctgccagacgggcaccagatgagcggcggcagaccctggggcacagccagctggacctcatcacaaagttcggcccattccgtggtgaggggcctgggcccaatggtctcccgatatcaagccctgctcgcacggctggagctgggtctggggatgagaaacggctaaccctgggccacagcaagctggacctcatcaccaagtatcatcagttgcacggggccaggcagggaactgagcctgggggtcccaagggtggccatctcaatggtggtaacagtgacctggtcagggatgagaaacggctgaccctgggtcacagcaaactggacctcatcactaagtacaacaagtccaagttcaagcagctccgaagccgctttgagtcctagccaaaggactggcatcgggggtgcactggcaagggcaggcccctcctctgtccaccgagactctggacttgctcaggtcccagactggggaagggaggtgtctagaaacccaggtcagacacactctctgggctcaagattcttgtgtatacacacacacacacacacacacacacacacacaccctatctagtatcttcttgaatc

SEQ ID NO: 86955 - DNA, 401 bp, Homo sapiens
cggacgcgtgggaagacatcctgaacacattgcctcctcatcttcttcctgctcctccacctcctcctctccttgtccttctcctctttgtcctcctgctttccgtatccaagtcttgtacttgtttaaatttattcctaaatattttattctttttgataagtggagttactttcttaatttcatttagattattcattgctattttatagaaatacaatggatttttaaatgttgatcttgtattccgcaatcttgctgaagttgtttaccggctctaatacttttgcggatttcttagaattttctgtagacagatcatgccatctccaaatagagatggttttacttcttcctgtctgatctgaatgccttttatttatttttcccaattgccctga

SEQ ID NO: 86956 - DNA, 417 bp, Homo sapiens
  misc_feature (1)...(417): n = a,t,c or g
gcgtccgtactgaaggatgtgttggttgcttccaagatttggccattataaagttggtataaacatctgggtgtaggtttttgtgcggacataatttttcacctcatttgggtaaacatcaagtgtgattgctggatcttattatgtttagttttataagaaactgctaaactgtcttccaaagtagctgtaccattttgcattcctatcagtaatgaatgagagttcctgctgatccacacccttgttaaaaaattctttccagcatcatctgtagattcacaatcccaaacaaaatcccagcaaattaattttactgacaaactgatttttcgagtttatatagagaggaagaagatccagtatagccagcacaacactgaagaagaataaaactgaaagactgacactctactn

SEQ ID NO: 86957 - DNA, 408 bp, Homo sapiens
agggctcaaggaagccccaagtccagtctgcccagaaccgagcatgtcatctcccccgccaagacgctccaaccgccgcaatccttgtccatcaggcatccaggccaaaaactctggctgcccccacctccccaatggtccccatcaagtaagtaacatcctgctgattttaactcctgtgcagccctcaaatgcacaactgcctcccattcctgcacagtgccccagttcaggccttcaccaccttgttcctgggccactgcccaagtctcccccgactgctgtctggacttctaatacttttccaactccccactcattaaatccatccccctctcattagctggtgtgaattgaggaaaactgagttccagccttgtcatcctcatactcatgacccttccaggc

SEQ ID NO: 86958 - DNA, 332 bp, Homo sapiens
gttgaatttttgcccttgaaaacagctcactgggagaacgattggaggcgaccacttagttgtataaactacctacataatacgttcgcagattagaataatcgctgtctggacgagcaccacgagacacatcttcttgcgagattttttctgatagtagagcaggtcgctgtagctggccaggggctctttctacgagcacctctgagctttccgcattggcttctatgctatcaatcagatcaccctggtcatggatgatcatggccaaatctttaaatatctgattgacatccaaaatgttaggctccggctgacgaattgccgcttct

SEQ ID NO: 86959 - DNA, 371 bp, Homo sapiens
cacgggagggaggcagggaaagaatgaccatacatcaataacagaaaagccatcaagagactttaacaggcacttaataacacaaaatatttagatgcccaatcaagatatgaaaagttcctctaattcattaatcatcaggaaagtgcaaatcaaacccacaattctttaccatcatatattcaccagaaaggctaaaatgaaaaccacagacaaaaccaagtataggtgaggatttaaagcaataacaactctcattcactgctcacaggattgtaaattgcaataatcacctgagaaaaccatttcatgatatttcctaaagctgaacaacacataacctatgacacaacaattccattccttaggta

SEQ ID NO: 86960 - DNA, 878 bp, Homo sapiens
atcatctcaaggtgaggaggctagtgtatccttttcttcctaagccactggttccagaggtcaaggagggaaaagctaggagcagcagccatgttactgtgaattgaaatcaagacagatgctacagagctgccttcaggtttgctctcaggaaacgtctacctgacaaattgtgatctgttttgccttcgtatgtatagagcagaagactggaaatcagaacaattgtttttcaactgctgctactgttgttcttatgtaacttacttttgttctctttgccttaatttcctcattttaaagtaagaatgatgcttatcatattccttttctggcttagtgaagcataggggtatagtcatggagagtgaaaccctaacctcaagataaccattagtgctcctaaactctacaaatacagactgctcaaaggtggctttcaggttgggcgcggtggctcacacctgtaatctcagcactttgggaggctgaggcgggcagatcacttgaggtcaggagttcaagaccatcctggccaacatggtgaaaccccacctctactaaaaatacaaaagttagccgggcgtggtggtgggagcctgtaatcccagctacttgggaggctgaggcaggagaatcacttgaacccaggaggtggagggtgcaatgagctgaaatcacgccactgcgctccagcctgggtgacaaagtaagactctgtcttcaaaataaataactgaaatcgatcagaacaaaaaaaagagggcggcccgtttaaaggaaccaagcttacgacgccggcgtgcgagccataacctttttttagggccccaaaggaaactcccggcccgcgttgtaaacgacggagttggaaaacc

SEQ ID NO: 86961 - DNA, 385 bp, Homo sapiens
taggcgaaaaacaaggagtactggtaaggaataggagaagagggctttgctgggatgggacctttagcagagacttgggggatgtgtgggatcagtgtagggagaggagaggggagcaagccagggagaaaggagcttggccgagggcctacagcacccggggcaaagggggacctggtgcaggctgaggcaggtgagctgagcagaggcagacagggcccagtgcagtgaggaatctgattctcatccagctgcaaaggtaagagttataaggttttaggctaagagtgagatcatcataaagatggccctgactactgcctatgaggagtggagagtaagggggggagggaggacagactgtcagtggaaaagagagaatgtg

SEQ ID NO: 86962 - DNA, 403 bp, Homo sapiens
agaccgtcccgaacgcctgattatttatcacaatggttttgcatttggcattacttcttacaaactgattaaaacgcgacagattaaaatgcaacagacctgaagcaatgcactcggtgcccatgggattcacggatcttcccataggtcctaccagccagaagcagcatgcctgattgatagaacagtggaatggcccaatgaaggttatgcaactgagcctgttgagatctcatgacatgtgaggatggagtgctcttttacaaagtactgtgtctattatgaagcacattcaataggagctgattcttgtatggccagaatacttgggtttgggaaccaagggataagagtgggactggcttcatttactattgcacgtagtgatccacacccaataaag

SEQ ID NO: 86963 - DNA, 389 bp, Homo sapiens
ctaaagaagtcaaatcttccaacatactttctattaaaagccctgcaaatattctttaaaagaatcaacaagatgattctacaacttacatgaaaaagcaaaagaactagaatagctaaaacaattttgaaaaagcaaagttggaagactcgtgctacctgatttagagagaattactataaagctatgttagtaatcaagaacaactggctgtgtatggtgaagagacaaaaagatcaacgagctagaatggagagttcagaaataggcccactcatatacggtcaattgatttttgacaaagacacaaagtcaattcaatggagaaaagatcattttttcaacaaatggtgttggcataactggacatccatagttttaagatgaaa

SEQ ID NO: 86964 - DNA, 440 bp, Homo sapiens
gtctcaaaaatcaatggcaaaggaaaaaatgaataaaattaaaatggggtcaggagaaaagggccatggcacacacaggaggggcagtcagtggctgagctaggagctgaagcaggggaattccttaggtgtcatatctcgtccaacccgtagtcctcctccgggaagtccccaccgtcacgactgctggcttgacaaagctcgtgccgttttttttttttttttttttttttttttttagttaaatacgcacaattttattgattgaagattaggacaaaaacattaaaccaaatacaggacaaagcaccagaggccatagatccccaccatgcatgtcaccaacctctcctcctccaaggtacttaaaaaataggggagaggggaaaaaaaaggtccttcttgacacagacaccatcttcagaatgttaaaaaaaaaa

SEQ ID NO: 86965 - DNA, 376 bp, Homo sapiens
tggtgagagtggacatgtttgtcttgttcaagatcttagagggaagacttttcatcttttatttttgagtataatgttagctgtgggcttatcctatatggcctttatagtgttgactcaaagtgaattaaagacttaaacataagaacagaaagtgcaaagccgctagaagaaattataggagaaaaactacatgacattggtttaggcaataattttttgaatttgaccccaaaaacacagataacaaaagcaaaaataaacagattggattatattagacttaaaaagcttctgcacagtaaaggaaacaactaaccatgtaaagagacaacctatggatgagaagaaaatatttgcaaactaaggccaggtg

SEQ ID NO: 86966 - DNA, 565 bp, Homo sapiens
cacgcgtccgcctaggtaatggaaacgcagtatattttgtaactgatgaaagatttgagtccctatgtaatggagacgcactatattttaaacaggttaaatgaaagaaatccatgtggagacacatcataggaaagctcccaaacaccaaagaccaagagaagattttaaaagcaatcagaggtaggagagaagtcatccagggcagtgccagcagtacagacggccagctgccttctcagcagcagagaaagccagaagactgtggtgttcatcttcaatattgagagaaggaacctattgagtatccaacaaaattatcttttaacatcaaaggtgaaatgacattttcagataaaacagagtttactaccaacagaccatcattaaagatgcttctaaaagacaggattcaggaagaaggaaaaatgttttaaaaggaaagaatgagctgggcgtggtgggtcatgcctgttatcgcagcactttgagaggctgaggaaggaggattacttgaggccaggagttcaagaccagcctaagcaacatagcaagacccctctct

SEQ ID NO: 86967 - DNA, 1360 bp, Homo sapiens
ttttttttttttacagaaaatttttagtaattttattcatttttcatagctttacagcttttatgaaaataatgatcactgtaagtataaaatgaaaattaaagaaaagggataataacccaaaactctccctggccaaaaaaccagttagcatatggcaaatatccttccacacattatcttcaggcatatattcaaaatgaaagggtgatcatttatattaactagatcttaccaagagagccaccagccctatttctcccctaaatacgagttctattcctgttcatggttctgtgttatcatcttgatggatttgttagaaagattcccaagtgtgaacaaacccccttccactctcagtagttttacagggtttaccacccagcatggactagccaaaaacttgaagatgtgcattcagacaaaagttggtaacacatttctcatttctaaagctttttaccagtatggactttctgatgatatgtaagacgtgaacggtgacggaagtccttatcacatatgtcacatttgtatggtttttctccagtgtggactctctgatgggcttcaagacgtgcactctgactgaagcctttaccacactcttcacatttaaagagtttttccctggtgtgaacacccaggtggactcgaagatttgaggggagactgaaggccttaccacactcctcacatatatggggtttctctcccgtgtggaccctctgatgatggcgaagattcaagctcctaccaaagcctttcccacactcttcacatttgtaaggtttttctccagtgtggcctctctgatggtatataaactgcgaactgtatctaaagccctttccacacacatcacatttgtatggcttttcccccgtgtggactctctgatgggattgaagaccagaggactgactgaagcccttaccacagacaccacatttgtatggcttctctccagtatggactctctgatgtacccgaaaatctatggcctgactgaagctcttatcacactgctcacatttatagggtttttctcctgagtgaactctttgatgtgcatgaagatttgatctccaactgaagcccttcccacattcctcacatttatatggtttttctccagtgtgaattacttggtgtagtttaagatttgaactataactgaagtccttaccacacacatcacatctatatggtttctctccagtgtggactcgctgatgggtttgaagctttgaggactgactgaagcccttcccacacgtttcacacttgaatcgtttctccccagtgtggacattctgatggacttgaagatttgaagcctgactgaagcccttac

SEQ ID NO: 86968 - DNA, 904 bp, Homo sapiens
tttttttttgagtacagaggactttattgatggtacacgacaagatagagctctttgtggggtctgcatggaaactgtgaagaggggagattcccagtgtggtgggggactgagcatggcagggactccccagaagctgaaggtctctttcttcctcttgtgctctcactggggctggttgtcgagcagtcttactccttggaggccatatgggccaccaccctgttgctgtagccaaattcactgttgtacgaggaaaatgagctatgacaacagttggtcacatgacgggcaatggctagcccctagcatcgacaagtggaagagtgagtgtcactgttaaagtcagaggaaacaacctcggtgttcagtgtagcccaagatgcccttgaggggccctctgacgcctgcttcaccacctttttgatgtcatcatatttggcaggtttctccagatggcaggtcaggtccacaaccaacacgtttgcagaaggacacggaaggccatgctagtgagcttcctgttcagctcggggatggccttgcccacagccttggcaacaccagtagatgcagggatgatgttctggagagccccacagacatatgccacagtttcccacagaggccatcgagtcttctgggcaggagtggcagcatggattgtggtcacaagtccttccacaatgccaaagttgtcatggatgggcttggccgggggattaagcagttggtggtacagaaggcattgctgatgatcttgaggctgttttcagacttctcagggatcatgcccattatgaatatgggggcatcagcagagggggtagagatgatgacccttttggctcccccattaagtgagccccagccttctctatggtcatgaagatgccagtggact

SEQ ID NO: 86969 - DNA, 651 bp, Homo sapiens
tgattttaggtttttatacttctgaaaacaggtaattacagattctgatcagtttatcattttctttagtcttttattttctgctgaatgctctcaagggaacggatccatacctgtttatcaggctcacctggaagagccaagtcatccactcaggtcttcctctggacctgcataatttcctcatttactagattgggtttcttttatgtgtgggcttttaatgcttggtatctctgggcttcctaatatgtaatgcttagcataataattttagccattattcatttttgtagaaggcttcactagcttcctgcttctcaaatcccttgaaaagatgagatttttttttcgtggagttcacgtctagtaagttggtcttgattttttttttctttcagaaccttctggatttcagctttgccaagcttcctctgtttctgagacacctccatcacctgggttacagtgccccattcccatggaatttcttttccccccccctctgcaggcatttttcatggaaagctcctcatgctttttaattcccgcttatccatttgtggggctttaacctcccacatccaggcctttttggctacaactgcaggatatcccaccatgggggccactgggaaaccaaaagggggg

SEQ ID NO: 86970 - DNA, 3891 bp, Homo sapiens; identical to SEQ ID NO: 65924

SEQ ID NO: 86971 - DNA, 407 bp, Homo sapiens
aggggactggtgggctggagtcccagggggagattattccaagtaggggctccagaaaggtgagtgatgtgtttgggtctatgggaaggttggtggcccccaaagagaggtggctgggttactgctgaacagctatcagggtgatatggctttgcaggggtccagtccatgggcctgacatgttgtagctatgctttgaaggcattttcctggtgggaggccaccgcaggtaaggggagtgaaagggtggctgtggcggctgttccctgtggctggtggccatgggtaagtgaagaggaacgtgatgctgggcaccatgctggtggtgcctggggcagagcctggccttgtggggctgtggagcagggtgaggatctgggatctaggactgctatgcactgggccga

SEQ ID NO: 86972 - DNA, 390 bp, Homo sapiens
caaataaatggaaagatatctggtgttcatagatcaatagaataaatattgccgaaatagctatactactcaaagtgatctacagattcaaggcaatgcctatcaaatttccagtgactttttttcacagatatagacaaaaaaaatcctaaaatttgaaagaaactacaaaagaccttaaagatctaaagcatacttgagcaataagaacaaagtgaaagatattacacatgcttattttgaattatatttcaaagttatggtactggtatagaaataaaccaatggaacagaatagaaagcatagaaataaacccacacatttatggtcaactaatctttgacaaagacaccaagagtacacaatggggaaagggtactctcttgaag

SEQ ID NO: 86973 - DNA, 2678 bp, Homo sapiens
atggggctcaaggcgcgcagggcggcgggggcggctggcggcggcggcgacgggggcggcggaggcggcggggcggctaacccagccggaggggacgcggcggcggccggcgacgaggagcggaaagtggggctggcgcccggcgacgtggagcaagtcaccttggcgctcggggccggagccgacaaagacgggaccctgctgctggagggcggcggccgcgacgaggggcagcggaggaccccgcagggcatcgggctcctggccaagaccccgctgagccgcccagtcaagagaaacaacgccaagtaccggcgcatccaaactttgatctacgacgccctggagagaccgcggggctgggcgctgctttaccacagcgttggtgttcctgattgtcctaggggtgcttgattctggctgtcctggaccacattcaaggagtatgagactgtctcgggagactggcttctgttactggagacatttgctattttcatctttggagccgagtttgctttgaggatctgggctgctggatgttgctgccgatacaaaggctggcggggccgactgaagtttgccaggaagcccctgtgcatgttggacatctttgtgctgattgcctctgtgccagtggttgctgtgggaaaccaaggcaatgttctggccacctccctgcgaagcctgcgcttcctgcagatcctgcgcatgctgcgggatggaccgggagaaggtggcacctggaagcttctggggctcagccatctgtgcccacagcaaagaactcatcacggcctggtacatcggtttcctgacactcatcctttcttcatttcttgtctacctggttgagaaagacgtcccagaggtggatgcacaaggagaggagatgaaagaggagtttgagacctatgcagatgccctgtggtggggcctgatcacactggccaccattggctatggagacaagacacccaaaacgtgggaaggccgtctgattgccgccaccttttccttaattggcgtctccttttttgcccttccagcgggcatcctggggtccgggctggccctcaaggtgcaggagcaacaccgtcagaagcactttgagaaaaggaggaagccagctgctgagctcattcaggctgcctggaggtattatgctaccaaccccaacaggattgacctggtggcgacatggagattttatgaatcagtcgtctcttttcctttcttcaggaaagaacagctggaggcagcatccagccaaaagctgggtctcttggatcgggttcgcctttctaatcctcgtggtagcaatactaaaggaaagctatttacccctctgaatgtagatgccatagaagaaagtccttctaaagaaccaaagcctgttggcttaaacaataaagagcgtttccgcacggccttccgcatgaaagcctacgctttctggcagagttctgaagatgccgggacaggtgaccccatggcggaagacaggggctatgggaatgacttccccatcgaagacatgatccccaccctgaaggccgccatccgagccgtcagaattctacaattccgtctctataaaaaaaaattcaaggagactttgaggccttacgatgtgaaggatgtgattgagcagtattctgccgggcatctcgacatgctttccaggataaagtaccttcagacgagaatagatatgattttcacccctggacctccctccacgccaaaacacaagaagtctcagaaagggtcagcattcaccttcccatcccagcaatctcccaggaatgaaccatatgtaggccagaccatccacattcagaaattcgaagaccaaaggcattgatgggggaagtttgttaaaagtttgaaaggacaggtttcagggactggggaggaagctggacttcctcgtggatatgcacatgcaacacatggaacggttgcaggtgcaggtcacggagtattacccaaccaagggcacctcctcgccagctgaagcagagaagaaggaggacaacaggtattccgatttgaaaaccatcatctgcaactattctgagacaggccccccggaaccaccctacagcttccaccaggtgaccattgacaaagtcagcccctatgggttttttgcacatgaccctgtgaacctgccccgagggggacccagttctggaaaggttcaggcaactcctccttcctcagcaacaacgtatgtggagaggcccacggtcctgcctatcttgactcttctcgactcccgagtgagctgccactcccaggctgacctgcagggcccctactcggaccgaatctccccccggcagagacgtagcatcacgcgagacagtgacacacctctgtccctgatgtcggtcaaccacgaggagctggagaggtctccaagtggcttcagcatctcccaggacagagatgattatgtgttcggccccaatggggggtcgagctggatgagggagaagcggtacctcgccgagggtgagacggacacagacacggaccccttcacgcccagcggctccatgcctctgtcgtccacaggggatgggatttctgattcagtatggaccccttccaataagcccatttaaaagaggtcactggctgacccctccttgtaatgtagacaaaaa

SEQ ID NO: 86974 - DNA, 2171 bp, Homo sapiens
tttcgtaggactccggtgcctccgggtctgggctgggccgcaaagggcggggcctgggcccggcgcgggccgggagcagaggccgagaccctgcaggtgattcctggggctgccagctaaggtcccttatgatttctgctctggctttgcagttttcagcctttcccaagagcagcagaaaatgaacaagttccagggacccatgacattaaaggatgttattgtggaattcaccaaggaagaatggaagttactgacccctgctcagaggactctgtataaggatgtgatgctggaaaactatagtcaccttgtctcagtgggttaccatgtgaataagccaaatgcagtcttcaagttgaagcaaggaaaagagccatggatattagaagtagaatttccacatcggggcttccctgaagacctatggagcattcatgatctagaagcaagataccaggaaagccaagctggaaattcaaggaatggagaactcacaaaacatcagaaaactcataccacagagaaagcctgtgaatgtaaggaatgtgggaagttcttctgccagaagtctgccctcatagtacatcagcatactcactcaaagggcaaatcctatgactgtgataaatgtgggaaatctttctctaaaaatgaagacctcataagacatcagaaaattcacacgagagataaaacctatgagtgtaaagaatgtaagaaaatattttaccacctatcatctctcagtagacatctgagaacccatgcaggagagaaaccctatgaatgtaatcagtgtgaaaaatccttctaccagaaaccacatctcacagaacatcagaaaacacacacaggggagaaaccttttgaatgtactgaatgtgggaagttcttctatgtgaaggcatacctcatggtacatcagaaaacacacacaggggagaaaccctatgagtgtaaggagtgtgggaaagccttttcccagaagtcacacctcacagtacatcagagaatgcacacaggggagaaaccctataaatgtaaggaatgtgggaaattcttctctaggaattcacacctcagaactcatcagagaagtcacacaggagagaaaccctatgaatgtaaggaatgtaggaaatgcttctaccagaagtcagccctcacagtacatcagcgaactcacacaggggagaaaccctttgaatgtaataaatgtgggaaaacattttactataaatcagacctcactaaacatcagagaaacccccaaggggagaaagccttatgaatgcacagaatgtggcaaatcttttgctgtgaattcagtcctcagattacatcaaaggactcacacaggagagaagccctatgcatgcaaggaatgtgggaagtccttttctcagaagtcacattttattatacatcagagaaaacacacaggggagaagccctatgagtgtcaggagtgtggggaaacctttatccagaagtcacaactcactgcacatcagaagacacacacaaagaagaggaatgctgagaagtaagatgagttgggaaattctcttgactgaattaatccttcaaaacaatcagataattcacacaagaggtacaccttatgaatcgcatcaatagagggaaattttcagctacaatctttgctctctctgtgtatcagcaaatacatagagagattctgtacatttatttgggagaaaattttatcatattttaggcttttctaaatattagataatatagatggcagaagtcatgcaaattgtaaaacaggaaggaaacctttcagaagtcatacttttgttttgcaacatagaagtcacacaggagaaaaatcctgtaagtaaaacgaatgtcaagacattttctgtcagggcagccagctgtagacatccaaaagctcacaaatgagaagctccttgagtatctagaaatctctttacacaattggagctcatgtactagagaattcaaagggataactgcaaagacactggtagatatagaagcctttattaagaattgatgtttcattcaatttcagatcactggtacttggatagatattttaaatatttggaaggtgttcaataaaaattcaaataatttgtactgagggaaacagttatactacaaatcatgtt

SEQ ID NO: 86975 - DNA, 4664 bp, Homo sapiens
ttttttttttttgtggttgtgttccaataaaaattttatttaacaaaatatgacagtgggggggccacagtttgcccaaactttgccttggaggacatgcagaggcaccctcagaattcagtgaaaacctgctcccatattgctaagactcatgaagtataatctctcaccttctttctctttcccctgcccaggccctaagttagggttcccatccatataacaaagacttctggtcaggtggcatttgctatctctgggattccctgcccatgaaagccacaaagagatttcttcttttacacaccctgaagcatattatggccccagcaaggctaactaaatcaaactgtggtttaaaaacaaaacaaaccaaccactgtgaaatatttatttttgttttgtagtattaagcatgattaaaccagtgcagaaaaataccaagtacattgggtgaacgatgagctagctgttctagtatttgctttttgtaatccagttaagaccatcagcatatacaacatcatcactaactcaacaatgtagctgcagggtaacatgtggataccctgtgtgctctactggcctccaaaggcattcaggggatcatcaaagatgttggacaccttgtgttcaaatcttggttcaggtgcggcctgtgcagatcggctttttggtttggttgtcttagcctggataccagaggagaagatgtcatccatatcatcatcaaatatagacttggcttccactttctttttggacttttcctttggttttacagttaagtcagcaaagatatcaatgttatcatcaaataaattagattcccaatgttttctccttctctctggttttctgagagggtttaattgcttccgtaggcaaaatatatcatccttgttaagcctcaaaaatatcgttgtgttgttaatatgacatccgtgctgactattgggattttgtctcattcttcttgactttctgatctgtaaagggggtcatcctcatcttccaggagaggaaagggatttgttttctttgctggttttggtttagcagactgaaagagatcatcatcactgctggcctcgcctagagcaggaaacatggggctctttgctttaccacccactggtgggttggcaggattctctgctatctttgccttgggttttgttctctccacagactgagatccagtgcccgtggaaaagatgtccccagaatcaaaaaggtcagcctcccctctggaatgacccagagactttgcaaaggggcttctgtccactccaggcacaggaccaccttcccaaggtgcagcggcagctgccagggcctcctcagtgctgtcttctccactggctgctctgagctgtggccgatggccatttggggaaatggcgccatcagcccactgtgcaatgggtcctctggggacgctcatgtcctcagtctcgctggactcctgagcagccagccgcctagctgcacgggtctgcggtctacgcttccctctcatcttgacacggctcttgtttgcactgtgtaaggtgtctgcctgagctggaagatcaaaactcacaccggcctccccactcccgggaaggacaggcacactttccagaccgtggctccttctgtgttcagatgaaggaaaagccaattctggcaaaacaggctttacttcagagatctgggaagccgctgtgggcagcaaggccgctgggttgatcgctaaatttgcctgaggtgtttctggcttccatatgcctttttctttactaccttgaatggattcaggatgtttctggtttttgaaagagtcaacagagtggtcttttttcactactctctttttctcttgtaccaaaggctgggacttggcagagctgaaaagatcatcatcttcatcatccccaaacaggctcccaactcttggctctaacagcttggtttttttggtgccagcaaaaaggtcaacatctgggtcattgtccttttggagcttgtggctgaaaagcagctcttcatcctggaagacacctgtgctcttggggtgggcatcaggaatcgcagccctttcctacttcttttctgtggagcctgggataatggttttgaatcttccaattttatcctcttcctcatcaaacaagctaagaacagttttggttcttaggcttggttcctttgtcccatggggatgatgaagaaaataaatcagaatgcttgactgtttcctgagcagatctagtcaaaagtccttccttttctgactcagccacatcagttctcccaaattttaatgactccttggcactctcaaccttcttatccacagacttcactccaagttgtgcctccttctcttcttcatcgctgaacagcaaaggtggtgcctcagagacagtctcttttttctttgttgcaggaggaacagatgtgggaggagagccaaacagagagcctccgctatcaacatcgtcttcaaagaggagtgacactctctgggtcttcttttggctgtccttggcaatggcaaaaagatcatcttcttcgtcttcctcaaagagactggtctttttcacagccttggcctcctggctctggagggtcccagaatccctgggttctcctttagacctgctgtcagatgctaagtgggtctgtgaagcaggaatattccactggtcctcctcatcactgctgaacaacagggcagatgctttctttttggagagctcggaggcttttgctttctcttctctctgagcttgtagacacaatgtctgcttcttagcagctgtacccccaaaaagattatcctcttcatcttcatcatcaaacagggaaaccgacgtggggagcttgccaggcagcagagatgcaccttttaagttactcgccctttgagaagaaaacaaatcctcagagtcctcctcatctgaaaataagcctttttgagtctttgtttctgatgagggcttgagatttttgctggaagataaggtaacctttttttctgctcttgctttattttcatctgtctgactcacagtggcttctggcgatgctacggctttttctttgaacagatctccttcttcgtcaccaaagatatcggcagtggattggactttgcgtgttttagaaggtttgctgtggggtgccgagaaaaagtcgtcatcatcatcaccatcatcatcatcaaagaggccagtgggagggggaccataggggcttttccttggagtgggctgctcaggcttctgtggctccttcagtgatggaacggaggcagcaccaaacacatccgtgtctcctaaaaatacagaaacagctcctgctgggattttctttccaggtttggatgatgaagactcctccttaacagaggctccagcttgccgatcctggggggcttccgtgaagaggtcactctcctcgtcctcatcatcaaagagccccttgcccccactgaacaggccacctccagagccaaatggcgagaagtcctcgtcggtcagcttggggggtgcgaataagttatcctcttcatcgtctgaaggagttctcctttccttcttctctttgagtgtcttccgaggttttgcttctcctgagggtaaggttgtcggctcctcgtccactcgacccatggcatcccccttgatgcgggcagccagctcatctgcaaacgatgtaggtctgcttcttttaggtctagtattttcttcaatgtcctcaatatcttcctcctccttctcagagtcagcaaaaaggtcacagccatcatcatcctcttcctcatcactcatttgtgtggtgtgctggttttgttcattgtcactgtgatgggcaaaatcttcatctgactcctcctcttctttctcttcctcagtgtccacaatactgccacgatcactgcctacagagccttcttcactggacagctctccaagacctacatcttcttgttccatgaacagctttgacccaatgagatatggtaaaggacgatcaatgtatagatcctttggttcaaggatcagttccacccgcccattagcatcatcttcctcggagtctgagtttcctgctttgatatcaagttgctcaaaggcactgtccaatacttgtaagccatagttcacagcctcctggactttaggaatgagatctacttctttctgctctcgtgtcttctcctgctctgttttttctgcctcagccttgagtactggctcctccacttcttcatcatatacacgattctcaatgaactgggtattagagagcataaggaagtcattgaagacattatgcaggcgacaatctgtggctttggtttcccgaattagtccgtccacttgtttcttgatttcatgggtcctagagatagtttgctgtgagaattcctgtagaaactgtagtaggcccgcgtcggccgccagcgaccagctctggctgctcctgcggatctcctccatcgaccacggccgctcccacacgggctccgacgctggcgccagctcctggtcgggggtcgtccggttcatcatcctagccgcccggctcggtgggctccgaagctgccagcacacgccgaggactgcagagccccggaagcctagccccagccaagctgcccggggcgtgac

SEQ ID NO: 86976 - DNA, 387 bp, Homo sapiens
ctttgcctatcccaaggtatttgcaagattccaagatattctcatgttttcttccatgtgaatatttaattattccagcaccatttgttgaaaagactattatttcccccctgaattccagtagcacctctgttgtgaagtcaaatgtaagagcgaatgttatttctggactctatttcattgatctgtttgtctgtctttatgcctatactatactgtcttaattattggagcaaagtgttaaaatcaggtagtatacttattcatcaaaattattttagctgttctaggctctttggattttcatattagttctaaaatcaacttgtcaatttctacaaaacgcctgttgctgatgttttgattgggatcatgttgaatatatag

SEQ ID NO: 86977 - DNA, 805 bp, Homo sapiens
ttttttttttttgagacggagtctcgctctgtcgcccaggctggagtgcagtggtgcaatctcggctcactgcaagctctgcctcccgggttcatgccattctcctgcctcagcctcccgagtagctgggactacaggcacccgccactaggcccggctaattttttatatttttagtagagacggggtttcaccgtgttagccaggatggtcttgatctcctgacctcgtgatccgcccgcctctgcctcccaaagtgctgggattacaggcgtgagccaccgcgcccggcctaattttttgtatttttagtagagacagggtttcaccatgttggccaggatggtctcaatctcctgacctcaggtgatctgcccgcctcagtctcccaaaatgctgggattacaggcgtgagccactgcgcctggccttgtcttcacttttgtttttttggttttttttttgagatggagtcttgctctgtcgcccaggctgaagtgcagtggcatgatctccgctcactgcaagctccgcctcccgggttcacgccattctcctgcctcagcctcccaggtagctgggactacaggcgtccaccaccacgcccagctaattttttgtatttttagtagagacggggtttcaccgtgttagccaggatggtctcgatctcctgacctcgtgatccgcccgcctcggcctcccaaagtgctgggattacaggcttgagccactgcgcccggccttcagttttcatatctgttaaagtgaaggatcttaaggagatgattttatgtttatttat

SEQ ID NO: 86978 - DNA, 250 bp, Homo sapiens
ttttttttttttcctttttgcgcgcgtatgtatgtgtgtgcgcgcaaagtatctctatctagggaatgaaaaatgggcgctggcggccggaggggagccctagggaggcagcgggggaggctgcgggtgcgcagggaggcaggcaggccgctcccggccgcaggaggagaagttgccaccctttcagctgttccggcctttataaaggagaagggagagtgcgagaggtgggtggagacagcctttcctc

SEQ ID NO: 86979 - DNA, 533 bp, Homo sapiens
gtccagtgtggtggaattccaaatgtcggcaattagaaactaggtccacccaacatggcaattcctgccctcttctccttgtcaccacctgtgccaagtgtcatgaccgcctccagataactcatacatgttcaggacatcatggcagctcacgtttgcatattaaagggctaaggtgggagggctagattttttgcgggctacttgaatgtcacacctggtcaaaccaatcccctgggccctatgcaaatcagaccccacctcctccagccccccaatataaccaaccacttttccgctgcacaccggatttctcttggttcagactcccctggccccctccgccgtatgggggagctgttttcttctttctaccaggcaccatgcttcacatatgcctggcatttaggagatactgtctacaattgttaattctaaaggggtcttaaggccctcgcagaggccagttaaacactgccccatcacatcacacagcttcctgcacacccccctcaagttagttcaaagtagct

SEQ ID NO: 86980 - DNA, 346 bp, Homo sapiens
aaactcatggaccagggactcagggactcagggactcagggactgaggaacccagggacttagggattcaaggacccagagatccagaaacccagagatccagggacccagggactcagggacccagagatccagggacccagagattcagggacccagggattctgagacccagggatccagacattcagggatcctgacaactagagacccatacactcagggtcctaggagctttgttggggagcggggacatcctcagacagctgggatgtccaggtctctctaacagcccttcccactccagggagccccccagccccgccgtgcagcatttcaccttcgc

SEQ ID NO: 86981 - DNA, 275 bp, Homo sapiens
  misc_feature (1)...(275): n = a,t,c or g
ttttttttttttgagatggagtgtctcactgtcagccaggctggagtgcagtggtacaacctccactcactgcaacctctgcctcctggattcaagcaattctcctgccctcagcctcccaagtagctgggattagagggtgcccacatcacgcccggctaaatttttgtaattttttgagatggagtgtctcactgtcagccaggctggagtgcagtggtacaacctccacttcattgnaacctctgcctccttggatttcaaacaatttctcc

SEQ ID NO: 86982 - DNA, 409 bp, Homo sapiens
  misc_feature (1)...(409): n = a,t,c or g
agaaaatagattttcaaagttatgagaactgtttatttgagttgagcatagtttgtgattttgagggtctctaaaagtattagggcggcagcagctgccgcacggagacatgatggccagcctaaaacagtaaggtcaagttgtttggacaaaaaggctacagtgcgcggtcccgttccttgtgtaagaattccgactgtacagctctgcacttaggctgtgtgtaatgaaaagggttgggatgagttagggagactagtgtgggggcagtctctaaagctgacttcaaggaacggaaagaggagtggggaaaggatttacgatctgtggggtcagctaggtttgcttttgtgaattaatataatggtttagtcaggatggtaaaactaggtatccaaaggcagaagtn

SEQ ID NO: 86983 - DNA, 1270 bp, Homo sapiens
gcggccgcgtcctgcgtcaggccttcgcctaggtggcgcgccacgccgacttcctggagctggcgcctgacgaggtggtggcgctgctggcggaccccgcgctgggcgtggcgcgcgaggaggccgtgtttgaagcggccatgcgctgggtgcgccacgacgcgccggcccgccgcggccagctgcgacgcctgctggagcacgtgcgcctgccgctactggcgcccgcttacttcctggagaaggggggagggcggacgaagctgctgcaggcctgcgggcgagtgccgcccgctgctgtccgaggctcgcgcctgcttcatcctgggccgcgaggccggtgcgctgcggacccggccgcggagattcatggacctagctgaagtgatcgtggtcatcggcggttgcgaccgcaaaggtctcctgaagctgcccttcgccgatgcctaccatccagagagccagcggtggaccccactgcccagcctgcccggctacactcgctcagaattcgccgcctgtgctctccgcaatgacgtctacgtctccggaggccacatcaacagtcatgatgtgtggatgtttagctcccatctgcacacctggatcaaggtagcctctctgcacaagggcaggtggaggcacaagatggcagttgtgcaggggcagctgttcgcggtgggtggcttcgtacggcctgtaggcgctctgcatcagcgtggagcgctacgaccccttctccaacacctgggcggccgccgcgcccctcccggaggccgtgagctcggcggcggtggcgtcctgcgcgggcaagctcttcgtgattgggggcgccaggcagggcggcgtcaacacggacaaggtgcagtgctttgaccccaaggaggaccggtggagcctgcggtcaccagcacccttctcacagcggtgtctcgaggctgtctcccttgaggacaccatctatgtcatggggggtctcatgagcaaaatcttcacctatgatccaggcacagatgtgtgcgggggaggcagctgtcctccccagccctgtggaaagctgtggagtcactgtgtgtgacggggaaggtccacatccttggcgggcgggatgatcgcggagaaagcaccgataaggtcttcacctttgaccccagcagtgggcagggtgaggtccagccatccctgcagcgctgcaccagctcccacggctgtgtcaccatcatccagagcttgggcaggtgattcagatttggacagcctgagccaggag

SEQ ID NO: 86984 - DNA, 394 bp, Homo sapiens
tttcgtagtgggtgtgcggccggcctcccggcgcactcccagaggctggggggccggggctggagaagggaagcgggctccccacccgggatctgcgcgggttgacatggggcacgccacgcccctgcccctccccgggcctcagtttcgccgtctgtggagggggcaggggtctccaagcgccctcctgcaaggcacctgccggacgtcggctcatctggtatttcctgagcacctgcgacgtcctgggtgcgggacccgggccggaatcggacacggccctgccctctgagaggctgcttcccgcggtgggattggggcgggcagtaaacacgtgagcaaacaaggaaacgtcagaggtgggagtgccacgaggattgggaggggtggtgct

SEQ ID NO: 86985 - DNA, 372 bp, Homo sapiens
cataactttaatgccaataaatgtgacaatgcacatgaaatagaccaattcttgaaagatacaaactaataaaactcaagtagtagtctcagtagcccctgtatctactaaagaaattaatttgtggtttaaaaacctcctgtcagagaaaactgtaggcccagatggcttcattggtaaatgctaccaaacatttaaggaagaaataatgccaattctatataaactctcccaaaaagtgaaggtgataaatgatcttagtgtttgaaggaaagcatctgacaaaatccaacattcattaatgtaaaaactctcaaggaacttcctcagcttggtaaacatttaccaaaagcatctacagatatcatactt

SEQ ID NO: 86986 - DNA, 420 bp, Homo sapiens
gtgtggtggaattcggcatctcactttcccccgtctcggtcctcagcttctcgggcctagctaatttcttcttctgatctcaatcccctccaaccccataggtgtctaccccttcttcttgattcaagatttggtgacaggagactccggcaagaaacagggcacgattatgcgtggccagcttgctgctacggcaggtggagggagtggaaggagatgggtgcatgactcgagacccggaggccagtctgtgtgcacttctgtccctggtagctatgttctgctggtggtgggtggcgggcccacactggacagcctcaaggactacagtgaggacgaaatctaccgcttcaacagccccctggacaagtaatccccgtggggtcccacgtgtaatccaccttgcttcccctggaggcc

SEQ ID NO: 86987 - DNA, 453 bp, Homo sapiens
gggtcggggggctctagcatcctgggggagccctgggtccttcagggacacgcaacaaaggaagactctaccgtggagaatccacaagtgcaaacagaagtgacccttgtggccagaagggaggagcaagccgaggtgtccctgcaggacgagatcaagagcctcagacttgggctccggaaggctgaggagcaggcccagcgccaggagcagctgctgagggagcaggagggggagctgcaggcacttcgggagcagctcagcaggtgtcaggaagagagagccgagctgcaggcacagctggagcagaagcaacaggaggctgagaggagggatgccatgtaccaggaggagcttggagggcagcgggacttggtccaggccatgaagaggcgggtgttggaactgatccaagagaaggaccgcctgtggcagaggctccagcatctctct

SEQ ID NO: 86988 - DNA, 471 bp, Homo sapiens
  misc_feature (1)...(471): n = a,t,c or g
ttcgaaaaagacataaaaggcatccaattgcaaagaaaagaatgaaaactatccctgttcaaaaatgacatgatcttatgtatagagtatctccgagatgccacaagaaagctactagagcaaatagatgaattcagcagaattgctgggaacaacatcaacatgcaaaaatcaagtgtgtttctatacatgtgccatgaacaatctgaaaaggaaattaacaaagtcatttcatttaaattagctctaaaagaataaaatacctagaagtaaatttaacccaggaagaaagatttgtacactgaaaacaatacaaaatattgctgaaagaaattaaagaatacctaattaaatggaaagacgttccatattcatgggtaagaagacttagtatagctaacacatgaatactacctanagccatctacagatgcaatacaatccctatcanaattctaacagcctttcact

SEQ ID NO: 86989 - DNA, 934 bp, Homo sapiens
gttttttttttttttttttttttcacttttgaattctgttttatatcaagctataaaaacctggatcctgttcaacatacatacaaaagcagtactctaaaaaataattattattatattaacaatatcaaacacgctaactcctacacacgtacaaagaccttgggcatcctttataccggccacttcctggccacagctttgtaaggcagtacctgggaaaaggggacagacccaagagagccggccccaaatcctgactcagcactgcagaggcatcagccgggctgagtcatgcctgagatcgaagggccccctctcaggctgagaaggaactttcaggcccagggaggagcagagccttagggggagcacatgccgagcaggaaaacgagctcacattttcctggggtagagcgaggtgcccggcagggcaggggatgaacggagggtgcggtgggcagaataacggcctcccaaagatgtccacgtgacagtccccagagcctgtgactatgttaggttacacagccagtgggaactaaagttgcagatggaactaaggtggctaatcagctgacctgaaaatagaaagacgacctgggttctctgggtaggcgcaatgtgatcataagcgtccttaaaagcggtagagcaggccgggtacagtgactcatgcctataatcccagcactttaggaggctaaggctacaagatcccttgagcccaggagttccagacaagcctaggcaacagaatgagaccctgtatccacaaaaaatatgtagctgggcgtgggggattgtctcaggggactgagacaagaggatcacttgaaccaggaggtccaggctgcagtgagccttgatgccatgaccaggccactgcactccagcctgggcaacacagcaagaccctgtctcaaaaaaaaaa

SEQ ID NO: 86990 - DNA, 376 bp, Homo sapiens
  misc_feature (1)...(376): n = a,t,c or g
tcgatatgaacaaagtcagattccaggacaaatagacaggtgatgtggtcacccaaaaaccataatagcccttcagttagttatgcggcaagctcacatatattctactatatgaacaaagtcagattccagttcgtaatttaaaaagtgctggtgaattgtcagttgtatttcaatatggaacccccattcaatggctaggagatgagagcagcagagatggaagagaaaccttataaaattctgctgagaatatgctttttttcttcataatgctcatgtttctcatgccaagagtagctgtgcattaggggtattttaagagaaattccttttaggggaatattttctgactgacttgatcaatcatatctan

SEQ ID NO: 86991 - DNA, 382 bp, Homo sapiens
  misc_feature (1)...(382): n = a,t,c or g
acatgaatatgcacatccaagaagctcggtaaattccaatcaggacaaactcagaaatggcactgagacacactatagtcaaattgttgaaacccaaagagtaagaattttgaaatcagcaagagagaagcaacttgtcttgtacaagggattctcaataagattaatagctgatttctcattaagaaccttggtggccagaagggaataaactaacatattgtcagtcctgaaaacaaaaacaaaaaactgtcaaccacgaattccatatttggcaaaactatccttgaagaatgaaggggagtttaacatatttccagacaaacaaaagttgagggagttcattaccagtagacctgtcctacaagaaatggtagattcn

SEQ ID NO: 86992 - DNA, 819 bp, Homo sapiens
tttttttttggtggattttgtaaaccatcatttactttgtctttacttttttttgcaaagatagttgtgctgccaagcaacttgaggtaaaggcattaaaagggttagactacaagaaatgaaaacaaaacaattgcgatacttcctataggagaccgcacaaaaagcagttggctggtttcatattgcataatgatgctgtgttccttgatgaagtaaacaatcttccttgtattaacataaggatcagaccttggcccccacacagtgttggtttctgtatggctggaggtgtccttactcaattgacttcactggaaacatacgttgtatgtcaattcatctttcagtacttcctctcagagaatatacttggactatttaagcgaagtacattgtgcgtaaggtatcttggtgaatctgtacagccttggcaagagcttgtggatctcgcccattgctttgtcctgaaacgtgacttccttcagcactgtcatgttctttgtccacaagatgatatctggctctaaatgctaccaggtgagcataatacgctggtgcaggtatagaaacagatcgtgtacagcgtacgtaagtgtggcagagctggtaagttagcagctgaagttcatctgcagtaaagcagttatcatgccctctccctgatagtggaagggcgactgctccgctgtattccagcatggttcgagaggtaagaatggccctcctatgggtgtgtaacgtcagcctcatctgttgttccagctgggatataaaaaaaaattccaaccctttctgtcctatcagcacaaatcgaaa

SEQ ID NO: 86993 - DNA, 770 bp, Homo sapiens
aggggaagcagaagctaccagtgtgcgttgatatacaggaccctgcagtccccttcttcccaacctgctgcacagaaccagacagacagggccctggggctctgatcagactctttttattgttttgttttttataaacaagtctcaggtggaaaaagaaagaaagggaggagctagctctctgccttctcagccaattgaaatcgtggaaaccaatgggcttcagctagccccactcatcactgctgggggggaaaagacatccctactccccttccccgtggcactcatgatattctcaatgccccaacaagggtcatcttggttcctctcggcgtttctgtcctggcctttggctctggctccggctctgactccgactccggctccggccagggccccgggagcccctagagctgctggagcccctggaagagttgctgccggccgtggaacatgtgctggtgccctggccccgggacaggaagcttggtctgctgtatgggagccaggcctcttcatctgggtggagcacccgctgggctgccaggggcacggcctggaccgctttcctctccccactgcgctcccgctccagggaggacatgctgcctgctgccctcagctctagggcccagctcgcctcttcctctggcggtggcaagggtggtgggggcaagtccccaggactgttctccctcctgtaggcaagagccttgggtttcttctcgtgccgaattcctgcagcgcgggtccagtcggggtcaaaa

SEQ ID NO: 86994 - DNA, 1032 bp, Homo sapiens
tttcgttgagggcgcgtgggggcgcacagcctctggtgcacatggcttcctccccggcggtggacgtgtcctgcaggcggcgggagaagcggcggcagctggacgcgcgccgcagcaagtgccgcatccgcctgggcggccacatggagcagtggtgcctcctcaaggagcggctgggcttctccctgcactcgcagctcgccaagttcctgttggaccggtacacttcttcaggctgtgtcctctgtgcaggtaggtaggggatggcagggggtgagagccagagggaagagggaccacagggtgacccagaaacaccctcctttcaaagggagccctgagtaagtttgggaagggtggggtgagttggggagcacagggtagtttgatggaggcaacctctgggtggggaagggagcaatgtctcaggatctagtgtgtctaggttctgaagaatgataaattggactggggctgaggttgccctggggtttgagggaacagggctccctgggtatggctctccagggtaagaggaggagacttcccagttcagcctgactgcttcccccacccctccaggtcctgagcctttgcctccaaaaggtctgcagtatctggtgctcttgtctcatgcccacagccgagagtgcagcctggtgcccgggcttcgggggcctggcggccaagatggggggcttgtgtgggagtgctcagcaggccataccttctcctggggaccctctttgagccctacaccttcagaggcacccaagccagcctcccttccacatactactcggagaagttggtgttccgaggccacgagtgggcaggagcttgcagatttggaatctgagcatgatgagaggactcaagaggccaggttgcccaggagggtgggacccccaccagagaccttcccacctccaggagaggaagagggtgaggaagaagaggacaatgatgaggatgaagaggagatgctcagtgatgccagcttatggacctacagctcctccccagatgata

SEQ ID NO: 86995 - DNA, 763 bp, Homo sapiens
  misc_feature (1)...(763): n = a,t,c or g
tttcgtaaaaaactcagaattcatgtcttggcctataaggcccttcaggatcaccttcatagcttcatctctggctacttcccttctgctcactgcataccaaccctctttcaggttttcaacatcatcaagctctcacctaccttaggaccttcacacaaagctttttgttctagaatgatattctctctaatttcatctggtcacctcctgctcatctttgagtcacttcaaggaggccttccttcattctctgcttgaagcaaagacctctggttttactctttgatagcacgctattctttccttcatggcactctccccttagcttggaaaaatgcttatgtggttcaccactctctactttgatggcattttgtttgctgttgcttgctagtatgtancatactacctggcatgtggcgcatacttgggaaatattttgttagttaaatgaaaagatttgcttgggatttaaggaggtctttttatggtgaggcaccatgctaggggcttaggagaaaacgccccccccggggtcattatggggctaaccctgggaacggggcaggggggggaaaaatttgtgtgttaattncccggaccccccccccggggcctaggggtgggggaggggggggttccccagggggggagcccccaaaaaaggggggtataaattaagtgggggaccccggggagttttgtgagggaaaaacgatttatacctcctcacccccccccccccgccgcgggggccgcc

SEQ ID NO: 86996 - DNA, 478 bp, Homo sapiens
tttcgtaacaggagcagagacttcccaagcagcccctgtctcagggccagggaagcacacccagacgacaaggacacagagcagggagacacagggtccccctgcctgtgccccgggtgaccctgccatgggctgaagtctccactgtggtgtggtccattgtctcaggctccatggatactggaattacccagacaccaaaatacctggtcacagcaatggggagtaaaaggacaatgaaacgtgagcatctgggacatgattctatgtattggtacagacagaaagctaagaaatccctggagttcatgttttactacaactgtaaggaattcattgaaaacaagactgtgccaaatcacttcacacctgaatgccctgacagctctcgcttataccttcatgtggtcgcactgcagcaagaagactcagctgcgtatctctgcaccagcagccaagacacagccctgcagagtca

SEQ ID NO: 86997 - DNA, 781 bp, Homo sapiens
tttcgtgcctgcctcctagagctcattccctacgccccgactctgtcctggacagcgtgcccaccagccatggcggggccccggggcctcctcccactctgcctcctggccttctgcctggcaggcttcagcttcgtcagggggcaggtgctgttcaaaggctgtgatgtgaaaaccacgtttgtcactcatgtaccctgcacctcgtgcgcggccatcaagaagcagacgtgtccctcaggctggctgcgggagctcccggatcagataacccaggactgccgctacgaagtacagctggggggctctatggtgtccatgagcggctgcagacggaagtgccggaagcaagtggtgcagaaggcctgctgccctggctactggggttcccggtgccatgaatgccctgggggcgctgagaccccatgcaatggccacgggacctgcttggatggcatggacaggaatgggacctgtgtgtgccaggaaaacttccgcggctcagcctgccaggagtgccaagaccccaaccggttcgggcctgactgccaatcggtgtgcagctgtgtgcacggagtgtgcaaccatgggccacgtggggatggaagctgcctgtgctttgctggatacactggcccccactgtgatcaagagctgcccgtctggcaagagcttggctttccccaaaacaacccaaggctccgaaaggctcccaactgcaagtgcctgcccggctaacacaggaatggattgattgcgactcccaacccctgcaggcccg

SEQ ID NO: 86998 - DNA, 404 bp, Homo sapiens
aaaaagggagttaaaagatacaaattaaaaatataaactttatttctcaagataagccccatcaagttaaagatatttttgtaagcgatgatactagccatttagtccatcctaaaaactgaaggtcctgggaatttaattatgtcaatgctgtcttttttacattaactaaagaaaaatggatgccctttaatgattttttttaagattagaagcaaaaagaagtctgaaggagccaaatgaggactgtgaggtagatgcctcatgatttcccatcaacactctcacagaactgcccttgtttgctgggaggaatgagcaagaatattgttgtggtggagaggactctggtgaagctttcccgggcattttcccaccaaagctttggctaattttctcaaagc

SEQ ID NO: 86999 - DNA, 387 bp, Homo sapiens
gttattttatatcttttaagacgtttgtccatttcatctaaatatgtcaatttattgtcattaagttggttataatactcccttattatctttttaatatctatagaacctgtggtgatatccctttttactttcctggggttattaatatatatggaggtttatcaattctgttaatcttttctaaaaaccagctctttgtttcagttttttaaactaatttttgcttgttttctgtttcattgatttctgttctttattatttcttttctttttcttattttggctttttaaaaaaatctagcttcttaagatgtactcttaggtcattaattttaaagctttcttcttttctgatacaagcacttaaagccataaattgctttc

SEQ ID NO: 87000 - DNA, 447 bp, Homo sapiens
  misc_feature (1)...(447): n = a,t,c or g
aactacccggccggaatttnnnnatgacccacgcgtccgcccacgcgtccgcccacgcgtccgaaaaaaatagatttgcttgaaagcagaaaagacaaagagacttctcacatacaaagaaactagcataaggctatcagcagatatctcaacagaaacctcacaactgaaggagtgggatatattcaaagtgctgaaagaaaaaaaacctgacaaccaaaaatactatacctgacaaagctgtccttgagaattaagtagagataaagacatccccaaacaaacaaaagctgagggagtttacaaccatgagacctaacttacaagaaatgctaaagggagttcttcaacttgaaataaaaggacactgagtaacaacattaaaatatgtgaatgtgtaaaactcactttgaaagataaatctatagtcaaaattagaatatttta

SEQ ID NO: 87001 - DNA, 934 bp, Homo sapiens
gcccctcgagggatactctagagcggccgccctttttttttttttttttttttttttttttgcatcaacatttttattgaaatacaaaaagtgcaaagcggtgaaatacatgattggtgccaaggaagtcattaagtgtgaatgtgaacactggattcacacagtacaagcacccgctccctggggtacagaccagtgggggacatgagaaagaccaaatagatccgaaaggctccccagtgaatggggctgtgagcgacacttgatacacaaaggagggcggagagcagagcagccctggccgaggctagagaccaagggactgatgaagaaccagcagcagcccaggccccagggggctggatgcactgctgatggtcttgggagagcccagcgaagttatgcccaggcccagcctggcttgcggatggggctgggctggtcagtgaggatccccacagtacgggctctggaatcatcctgcctggccaaggtcatgggggcagggtcactgcaggtacttccctgtactccccaaggacaaggctgcaggaagagggatccccaggaaggagtgtaattctacgagacagtgggagtgagatcagccatcactggggccgaggttctttgaaagacaacagggctggcccgggcgcagtggctcacgcctggaatcccagcactttgggaggccgaggtgggtggatcatgaggtcaggagatcgagaccatcctggccaacatggtgaaaccccgtctctactaaaaatacaaaaattagctgggcatggtggcatgcacctatagtcccagctactcaggaggctgaggcaggagaattgcttgaacccagaaggcggaggtgtgccgagatcgcgccactgcactccagcctggtgacagagcgagactccatctcagaaaaaaaaaa

SEQ ID NO: 87002 - DNA, 396 bp, Homo sapiens
cggcacgagatgaccttcagcacaggaagaaaatgttcagacttcctcatcataagagaattgcagctgtaacgtgcattgagatgccgtttctcaccttttagattaccaaaaatctgaaagttgacagcatactcacgtggtaaggctatggggcaaacaggcacactcatacattttctgctaaagcagacctctgtggaggagtatttggcagtatctggccaaattaaatactcatttgtcctttgacccaacaggcctatttctaggaatccatctcaaagatccactgatcaaaatacaaaaatatatgtttatttattgcagcattctttgtaaagcaaaagactaaaagcaaaccatatgctcatcaatatgagacttggtgaaaaa

SEQ ID NO: 87003 - DNA, 789 bp, Homo sapiens
tttattttttattgtatttttattttttgagtactttctgtggttagtcaagtcgatatctggaactcactgatatggagtgccaaccctccatgtaacagttgcagtaacttgtttctgtaactggctagtcataaggctgaaataataaatttccttctttccttacacatcccatggttcctcttccctcagccagtagctcagcttctcaggatttatacggggtggggtgtaccaaaacatcattccctaaaggacctcaatcattcccctctttgagactgttatagctgtcccttagaagttagtggcatacatgggaagtgctaaaaatgccctagagaatcctttgggttccagatgcctttctcaccatccactggtgtaggaacgacataaatgcccctttgttgccaggatcacttgcaccagccaaaacagtaacctccagcccgttggttcagtgctgaaatgactggatagtctcaattcctgtctcaatggagccattgttgtgtcccctagcgggagcactcctcccttgggaactcaagagaagcaggaaacaaatcacccatgagtgggaccactccatctacctctgcttgattccagaccgtgcattctgaccaagaacagtcccatggagtggtcactcaatcaaagcacacgttacatttgtcagatggagttgtattccacctagggccataaatgtgtcttcagcagaccattccatcgtcctattatgcccgctattcctgggtgatgggggatactcgtgcc

SEQ ID NO: 87004 - DNA, 10348 bp, Homo sapiens
ttgctgtgtgaggcagaacctgcgggggcaggggcgggctggttccctggccagccattggcagagtccgcaggctagggctgtcaatcatgctggccggcgtggccccgcctccgccggcgcggccccgcctccgccggcgcacgtctgggacgcaaggcgccgtgggggctgccgggacgggtccaagatggacggccgctcaggttctgcttttacctgcggcccagagccccattcattgccccggtgctgagcggcgccgcgagtcggcccgaggcctccggggactgccgtgccgggcgggagaccgccatggcgaccctggaaaagctgatgaaggccttcgagtccctcaagtccttccagcagcagcagcagcagcagcagcagcagcagcagcagcagcagcagcagcagcagcagcagcaacagccgccaccgccgccgccgccgccgccgcctcctcagcttcctcagccgccgccgcaggcacagccgctgctgcctcagccgcagccgcccccgccgccgcccccgccgccacccggcccggctgtggctgaggagccgctgcaccgaccaaagaaagaactttcagctaccaagaaagaccgtgtgaatcattgtctgacaatatgtgaaaacatagtggcacagtctgtcagaaattctccagaatttcagaaacttctgggcatcgctatggaactttttctgctgtgcagtgatgacgcagagtcagatgtcaggatggtggctgacgaatgcctcaacaaagttatcaaagctttgatggattctaatcttccaaggttacagctcgagctctataaggaaattaaaaagaatggtgcccctcggagtttgcgtgctgccctgtggaggtttgctgagctggctcacctggttcggcctcagaaatgcaggccttacctggtgaaccttctgccgtgcctgactcgaacaagcaagagacccgaagaatcagtccaggagaccttggctgcagctgttcccaaaattatggcttcttttggcaattttgcaaatgacaatgaaattaaggttttgttaaaggccttcatagcgaacctgaagtcaagctcccccaccattcggcggacagcggctggatcagcagtgagcatctgccagcactcaagaaggacacaatatttctatagttggctactaaatgtgctcttaggcttactcgttcctgtcgaggatgaacactccactctgctgattcttggcgtgctgctcaccctgaggtatttggtgcccttgctgcagcagcaggtcaaggacacaagcctgaaaggcagcttcggagtgacaaggaaagaaatggaagtctctccttctgcagagcagcttgtccaggtttatgaactgacgttacatcatacacagcaccaagaccacaatgttgtgaccggagccctggagctgttgcagcagctcttcagaacgcctccacccgagcttctgcaaaccctgaccgcagtcgggggcattgggcagctcaccgctgctaaggaggagtctggtggccgaagccgtagtgggagtattgtggaacttatagctggagggggttcctcatgcagccctgtcctttcaagaaaacaaaaaggcaaagtgctcttaggagaagaagaagccttggaggatgactctgaatcgagatcggatgtcagcagctctgccttaacagcctcagtgaaggatgagatcagtggagagctggctgcttcttcaggggtttccactccagggtcagcaggtcatgacatcatcacagaacagccacggtcacagcacacactgcaggcggactcagtggatctggccagctgtgacttgacaagctctgccactgatggggatgaggaggatatcttgagccacagctccagccaggtcagcgccgtcccatctgaccctgccatggacctgaatgatgggacccaggcctcgtcgcccatcagcgacagctcccagaccaccaccgaagggcctgattcagctgttaccccttcagacagttctgaaattgtgttagacggtaccgacaaccagtatttgggcctgcagattggacagccccaggatgaagatgaggaagccacaggtattcttcctgatgaagcctcggaggccttcaggaactcttccatggcccttcaacaggcacatttattgaaaaacatgagtcactgcaggcagccttctgacagcagtgttgataaatttgtgttgagagatgaagctactgaaccgggtgatcaagaaaacaagccttgccgcatcaaaggtgacattggacagtccactgatgatgactctgcacctcttgtccattgtgtccgccttttatctgcttcgtttttgctaacagggggaaaaaatgtgctggttccggacagggatgtgagggtcagcgtgaaggccctggccctcagctgtgtgggagcagctgtggccctccacccggaatctttcttcagcaaactctataaagttcctcttgacaccacggaataccctgaggaacagtatgtctcagacatcttgaactacatcgatcatggagacccacaggttcgaggagccactgccattctctgtgggaccctcatctgctccatcctcagcaggtcccgcttccacgtgggagattggatgggcaccattagaaccctcacaggaaatacattttctttggcggattgcattcctttgctgcggaaaacactgaaggatgagtcttctgttacttgcaagttagcttgtacagctgtgaggaactgtgtcatgagtctctgcagcagcagctacagtgagttaggactgcagctgatcatcgatgtgctgactctgaggaacagttcctattggctggtgaggacagagcttctggaaacccttgcagagattgacttcaggctggtgagctttttggaggcaaaagcagaaaacttacacagaggggctcatcattatacagggcttttaaaactgcaagaacgagtgctcaataatgttgtcatccatttgcttggagatgaagaccccagggtgcgacatgttgccgcagcatcactaattaggcttgtcccaaagctgttttataaatgtgaccaaggacaagctgatccagtagtggccgtggcaagagatcaaagcagtgtttacctgaaacttctcatgcatgagacgcagcctccatctcatttctccgtcagcacaataaccagaatatatagaggctataacctactaccaagcataacagacgtcactatggaaaataacctttcaagagttattgcagcagtttctcatgaactaatcacatcaaccaccagagcactcacatttggatgctgtgaagctttgtgtcttctttccactgccttcccagtttgcatttggagtttaggttggcactgtggagtgcctccactgagtgcctcagatgagtctaggaagagctgtaccgttgggatggccacaatgattctgaccctgctctcgtcagcttggttcccattggatctctcagcccatcaagatgctttgattttggccggaaacttgcttgcagccagtgctcccaaatctctgagaagttcatgggcctctgaagaagaagccaacccagcagccaccaagcaagaggaggtctggccagccctgggggaccgggccctggtgcccatggtggagcagctcttctctcacctgctgaaggtgattaacatttgtgcccacgtcctggatgacgtggctcctggacccgcaataaaggcagccttgccttctctaacaaaccccccttctctaagtcccatccgacgaaaggggaaggagaaagaaccaggagaacaagcatctgtaccgttgagtcccaagaaaggcagtgaggccagtgcagcttctagacaatctgatacctcaggtcctgttacaacaagtaaatcctcatcactggggagtttctatcatcttccttcatacctcaaactgcatgatgtcctgaaagctacacacgctaactacaaggtcacgctggatcttcagaacagcacggaaaagtttggagggtttctccgctcagccttggatgttctttctcagatactagagctggccacactgcaggacattgggaagtgtgttgaagagatcctaggatacctgaaatcctgctttagtcgagaaccaatgatggcaactgtttgtgttcaacaattgttgaagactctctttggcacaaacttggcctcccagtttgatggcttatcttccaaccccagcaagtcacaaggccgagcacagcgccttggctcctccagtgtgaggccaggcttgtaccactactgcttcatggccccgtacacccacttcacccaggccctcgctgacgccagcctgaggaacatggtgcaggcggagcaggagaacgacacctcgggatggtttgatgtcctccagaaagtgtctacccagttgaagacaaacctcacgagtgtcacaaagaaccgtgcagataagaatgctattcataatcacattcgtttgtttgaacctcttgttataaaagctttaaaacagtacacgactacaacatgtgtgcagttacagaagcaggttttagatttgctggcgcagctggttcagttacgggttaattactgtcttctggattcagatcaggtgtttattggctttgtattgaaacagtttgaatacattgaagtgggccagttcagggaatcagaggcaatcattccaaacatctttttcttcttggtattactatcttatgaacgctatcattcaaaacagatcattggaattcctaaaatcattcagctctgtgatggcatcatggccagtggaaggaaggctgtgacacatgccataccggctctgcagcccatagtccacgacctctttgtattaagaggaacaaataaagctgatgcaggaaaagagcttgaaacccaaaaagaggtggtggtgtcaatgttactgagactcatccagtaccatcaggtgttggagatgttcattcttgtcctgcagcagtgccacaaggagaatgaagacaagtggaagcgactgtctcgacagatagctgacatcatcctcccaatgttagccaaacagcagatgcacattgactctcatgaagcccttggagtgttaaatacattatttgagattttggccccttcctccctccgtccggtagacatgcttttacggagtatgttcgtcactccaaacacaatggcgtccgtgagcactgttcaactgtggatatcgggaattctggccattttgagggttctgatttcccagtcaactgaagatattgttctttctcgtattcaggagctctccttctctccgtatttaatctcctgtacagtaattaataggttaagagatggggacagtacttcaacgctagaagaacacagtgaagggaaacaaataaagaatttgccagaagaaacattttcaaggtttctattacaactggttggtattcttttagaagacattgttacaaaacagctgaaggtggaaatgagtgagcagcaacatactttctattgccaggaactaggcacactgctaatgtgtctgatccacatcttcaagtctggaatgttccggagaatcacagcagctgccactaggctgttccgcagtgatggctgtggcggcagtttctacaccctggacagcttgaacttgcgggctcgttccatgatcaccacccacccggccctggtgctgctctggtgtcagatactgctgcttgtcaaccacaccgactaccgctggtgggcagaagtgcagcagaccccgaaaagacacagtctgtccagcacaaagttacttagtccccagatgtctggagaagaggaggattctgacttggcagccaaacttggaatgtgcaatagagaaatagtacgaagaggggctctcattctcttctgtgattatgtctgtcagaacctccatgactccgagcacttaacgtggctcattgtaaatcacattcaagatctgatcagcctttcccacgagcctccagtacaggacttcatcagtgccgttcatcggaactctgctgccagcggcctgttcatccaggcaattcagtctcgttgtgaaaacctttcaactccaaccatgctgaagaaaactcttcagtgcttggaggggatccatctcagccagtcgggagctgtgctcacgctgtatgtggacaggcttctgtgcacccctttccgtgtgctggctcgcatggtcgacatccttgcttgtcgccgggtagaaatgcttctggctgcaaatttacagagcagcatggcccagttgccaatggaagaactcaacagaatccaggaataccttcagagcagcgggctcgctcagagacaccaaaggctctattccctgctggacaggtttcgtctctccaccatgcaagactcacttagtccctctcctccagtctcttcccacccgctggacggggatgggcacgtgtcactggaaacagtgagtccggacaaagactggtacgttcatcttgtcaaatcccagtgttggaccaggtcagattctgcactgctggaaggtgcagagctggtgaatcggattcctgctgaagatatgaatgccttcatgatgaactcggagttcaacctaagcctgctagctccatgcttaagcctagggatgagtgaaatttctggtggccagaagagtgccctttttgaagcagcccgtgaggtgactctggcccgtgtgagcggcaccgtgcagcagctccctgctgtccatcatgtcttccagcccgagctgcctgcagagccggcggcctactggagcaagttgaatgatctgtttggggatgctgcactgtatcagtccctgcccactctggcccgggccctggcacagtacctggtggtggtctccaaactgcccagtcatttgcaccttcctcctgagaaagagaaggacattgtgaaattcgtggtggcaacccttgaggccctgtcctggcatttgatccatgagcagatcccgctgagtctggatctccaggcagggctggactgctgctgcctggccctgcagctgcctggcctctggagcgtggtctcctccacagagtttgtgacccacgcctgctccctcatctactgtgtgcacttcatcctggaggccgttgcagtgcagcctggagagcagcttcttagtccagaaagaaggacaaataccccaaaagccatcagcgaggaggaggaggaagtagatccaaacacacagaatcctaagtatatcactgcagcctgtgagatggtggcagaaatggtggagtctctgcagtcggtgttggccttgggtcataaaaggaatagcggcgtgccggcgtttctcacgccattgctcaggaacatcatcatcagcctggcccgcctgccccttgtcaacagctacacacgtgtgcccccactggtgtggaagcttggatggtcacccaaaccgggaggggattttggcacagcattccctgagatccccgtggagttcctccaggaaaaggaagtctttaaggagttcatctaccgcatcaacacactaggctggaccagtcgtactcagtttgaagaaacttgggccaccctccttggtgtcctggtgacgcagcccctcgtgatggagcaggaggagagcccaccagaagaagacacagagaggacccagatcaacgtcctggccgtgcaggccatcacctcactggtgctcagtgcaatgactgtgcctgtggccggcaacccagctgtaagctgcttggagcagcagccccggaacaagcctctgaaagctctcgacaccaggtttgggaggaagctgagcattatcagagggattgtggagcaagagattcaagcaatggtttcaaagagagagaatattgccacccatcatttatatcaggcatgggatcctgtcccttctctgtctccggctactacaggtgccctcatcagccacgagaagctgctgctacagatcaaccccgagcgggagctggggagcatgagctacaaactcggccaggtgtccatacactccgtgtggctggggaacagcatcacacccctgagggaggaggaatgggacgaggaagaggaggaggaggccgacgcccctgcaccttcgtcaccacccacgtctccagtcaactccaggaaacaccgggctggagttgacatccactcctgttcgcagtttttgcttgagttgtacagccgctggatcctgccgtccagctcagccaggaggaccccggccatcctgatcagtgaggtggtcagatcccttctagtggtctcagacttgttcaccgagcgcaaccagtttgagctgatgtatgtgacgctgacagaactgcgaagggtgcacccttcagaagacgagatcctcgctcagtacctggtgcctgccacctgcaaggcagctgccgtccttgggatggacaaggccgtggcggagcctgtcagccgcctgctggagagcacgctcaggagcagccacctgcccagcagggttggagccctgcacggcgtcctctatgtgctggagtgcgacctgctggacgacactgccaagcagctcatcccggtcatcagcgactatctcctctccaacctgaaagggatcgcccactgcgtgaacattcacagccagcagcacgtactggtcatgtgtgccactgcgttttacctcattgagaactatcctctggacgtagggccggaattttcagcatcaataatacagatgtgtggggtgatgctgtctggaagtgaggagtccaccccctccatcatttaccactgtgccctcagaggcctggagcgcctcctgctctctgagcagctctcccgcctggatgcagaatcgctggtcaagctgagtgtggacagagtgaacgtgcacagcccgcaccgggccatggcggctctgggcctgatgctcacctgcatgtacacaggaaaggagaaagtcagtccgggtagaacttcagaccctaatcctgcagcccccgacagcgagtcagtgattgttgctatggagcgggtatctgttctttttgataggatcaggaaaggctttccttgtgaagccagagtggtggccaggatcctgccccagtttctagacgacttcttcccaccccaggacatcatgaacaaagtcatcggagagtttctgtccaaccagcagccatacccccagttcatggccaccgtggtgtataaggtgtttcagactctgcacagcaccgggcagtcgtccatggtccgggactgggtcatgctgtccctctccaacttcacgcagagggccccggtcgccatggccacgtggagcctctcctgcttctttgtcagcgcgtccaccagcccgtgggtcgcggcgatcctcccacatgtcatcagcaggatgggcaagctggagcaggtggacgtgaaccttttctgcctggtcgccacagacttctacagacaccagatagaggaggagctcgaccgcagggccttccagtctgtgcttgaggtggttgcagccccaggaagcccatatcaccggctgctgacttgtttacgaaatgtccacaaggtcaccacctgctgagcgccatggtgggagagactgtgaggcggcagctggggccggagcctttggaagtctgtgcccttgtgccctgcctccaccgagccagcttggtccctatgggcttccgcacatgccgcgggcggccaggcaacgtgcgtgtctctgccatgtggcagaagtgctctttgtggcagtggccaggcagggagtgtctgcagtcctggtggggctgagcctgaggccttccagaaagcaggagcagctgtgctgcaccccatgtgggtgaccaggtcctttctcctgatagtcacctgctggttgttgccaggttgcagctgctcttgcatctgggccagaagtcctccctcctgcaggctggctgttggcccctctgctgtcctgcagtagaaggtgccgtgagcaggctttgggaacactggcctgggtctccctggtggggtgtgcatgccacgccccgtgtctggatgcacagatgccatggcctgtgctgggccagtggctgggggtgctagacacccggcaccattctcccttctctcttttcttctcaggatttaaaatttaattatatcagtaaagagattaattttaacgt

SEQ ID NO: 87005 - DNA, 611 bp, Homo sapiens
cccacgcgtccgattaaatggaaagataattaaatatgtaaattcataaggaacaaaagacgagaagttaattatacaataggctggtgacaccagagttcattgttatgtgccacaagaaaattaaattttttaaaaaactagaacgctcttcttttagtgttttgctgaaatcctgttttgtatttgtttctttacaacaggtgtaggtataggaggtcaagaaaaggagttcggtaaagggcatagctaataacaaccacacattgggccaggcgcagtggcttacgcctgtaatcccagcactttgggaggctgagacgggcagatcacctgagatcaggagtttgagaacagcctggccaacatggtgaaactccatctctactaaaaatacaaaaattagccaggcatgctggtgcacacctgtaatcccagctactcgggaggctgaggcaggaggattgcttggagaatcacttgaacgcaggagaatcacttgaacgcaggagaatcgcttgaacccaggaggcagaggttgcagtgagctgagatcatgccactgcactccagcctgggcaacagagcaagactctgtctcaaaaaaaaaa

SEQ ID NO: 87006 - DNA, 4222 bp, Homo sapiens
cccttcggtggtgagtgttaccagctcctaaggcagcggcgtctggagttcttcgttcctcctgggtgggctggtgatctcgctggcttcaggagtgaagctgcagacctttgtggtgagtgttacagctcataaaagcagcgtggcccaaaaaagtgagcactagcaagatttatggcaaagagcaaaagaacaagccttccccagtgtggaaggggacccgagtgggttgccactgctggctcaggcagcctgcttttaatccccttatctggccccacccacatcctgctgattggtagagccgagtggtctgttttggcagggcactgactggtgcgtttacaatccctgagctagacacaaaggttctccacgtccccatcagattagttaagatacagagtttccacacacaggttctccaagggctcacccagagtagctagatacagagtgtccattgggtgcattcacaaaccctgagttagacacagggtgctgattggtgtatttacaatccctgagctagacataaaggttctccaaggacccatcagagtagcctagatacagagctgaagggctcctcaagtgctgccaaaagtgggacccccaggcaagaggagttgccgagagtgagcgagcgagtgagggatgtgaggactgccagcatgctgtcacccttcaatcaacaggacacccccaactgctgttgggaatttggccgatgactgctctagctacttcctgctggataggggcgaagaaggggctttgcagttgtagtgtccttcagaggggaactctctaggccaggggaagtgccaggaccagctggtcagtccaggggtcctcggtagaagttgttagttgaactcatttggggttccatttgtaagaccatctgtagcttgatggcctcgattctagaggaatcaaatttgacaagaaggttcaaaatgcagggcccaaaggcgagtaacagcaagatggctgccacgggacctagaaagggcagaagccgtgttgcccaactccagaggttggtataagaatttgaaaggcgtctgatttcagaagccttttcctgtaaacgctgggtggcatctcatgctatccctgactggttagtgtaaaaacaacactcttcccctaagaaggtgcagagtcctcctttttcaggagtgaggagatctaggcctcagcggttttggagagtcactgctgccaaagagtcttatttgggattgtaaagtaaggatagatttcattatttcttcaactgtttgagaggcagatatgggttgagatccaatagagaattgccttgcgtgggtagagagaaatttaccctggcttttaaaggaataggtacactgttttttctttactacttccatctctctctttgacttcttctttgtctcttcctctcttttttaccctctctttgacttctgtgtctgtccctctttctctctaacttcttgtctcttcctctctgtctctttctttgacttcctgtctctttctttcctttctgctgcctctgccagctgcttatgctgctgttctcccctctccttcctattctgatggctttgtcagtgtaagattcccacctctttgtgtttttgcattgcgtgcaataactctataatttccttgtggtatttaatgggggttcctacagaggttaggaactccctctctttccatattgcagcatgggcatgtaggattagataagcatacttgctatctgtatacacatttattctttttccctttcccagttctaaggcccaggtaagtgccactagttccgctaactgggcactggtccctgggggaagaggcttgctttcaagtatggttacatcactaaccttcgtatcccattctccacaaatgaacttccatcagtatataggttaaggtcaggattagttaaggggacttctaagagatcatctcgggcggcataagtctggactataatttgttggcagtcatgcttgattggttccccatcctctgggagaaaagtggcagggttgagggccatgcatgtgcatatttgaagcactggtccctcaaggagtagtgcctggtatctaagtaggcagttgtctgatagccataaacttcctttggcacctagtatgccatttacatcataagtagtctagacagtgagatcctttccttgtattattttgatagcctctgatgctaagacggccactgctgcaactacccttaaacagtgaggccagccttttgctactacatcaatttccttacttaggtatgccactggttgtggggttgtcccatgagtttgagtgaggactccaagagctatcctggctctctctctgacatataaagagaaattctgtcctgtgggaaggcttaaagctggagcttgtactagagcctgctttaaggttttgaaggttgtttctgcctctggttcccactcaactagatgagtatttgccctctgggtttccttgattagaggggcctggctgtctcgctgtatccagggatccatagtcggcaaaagctggtaattccaaggaactccctcaactgttttaatgtcttagggcgaggataagccagtataggctgtattcattccttgctgagggccctggtccctttggctaagattaggcctagatatttaacctgctgtaggcaaagctgggccttcgacatagacaccttgtacccttgattagctagaaagttcaagagatctagagtagcctgctggcacaaggcttcctaactggtagccaaaagtaaatcatccacatattgaaggaccagagtgcctggacttgagaagtggcctagatctttggctagggcctgaccaaacagatgagggctatccctaaacccttggggcaagaccatccatgtaagttgggatgtgtggtttgtgggatcctcaaaagcaaagaggaactgtgaatcagagtgcaggggaacacagaagaaggcatccttgaggtccagaactgtgaaccattctgcttcctctggtatttgagagagcagggtataggggttgggtacaactggatatagtgaaattactgcctcattaatgagtctaagatcttgcactagtctcggtctttgtacttccagaattggggtgttgcagggactgctgcatttccttactaagccttgagctttcaaatgtttaacaatattctgtaatcctttatgagcttcaggccttagggatattgcctttgataaggaaaagtggtgggatcttttaacctgatttgtaatgggcgggcattttttgcccttccaaattgtccttccaatgcccagacttcagggttgattccctccacaagtagggggacaacaaatgggtaacttgttccccatattgatgtagataatagctccagccttggctaatatgtccctgcctaataagggtgtggaactttcaggcataataagaaaggcatgtgaaaagagcaaagtctcccaattacaactgagaggtgggagaaatacctggttacaggctgtcccaggattcatcggatggtaacagaccttgaggacagtcgtccaggacaggagattaacactgagaaggccgcgccagtgtccaggaggaagtcagtttcctggccctcaatggttaaacgtacccggggctcagtgagggtgatgacatgagctggcgcttgccccgggcaccctctgtcctgttgttggatcatctggttgggggcttctgacctagggaaccttcgtccgctggggcagtgcaccttcccaagtgattgcctcgggcattagtgggaccatggacgagggggcagcttgtttctcaattggacaatcttttttaaagtgtcctagtaaaccgcatgataaccaaggcctaccgggtgattggcctgcttcatgttctgtcctctctgaaccaccaaggtttgtttgtctgagggccataactgaaggctgcggcctttctccaatctcacttttccttttgggcctgttcctcttggtccctattatagaacactgaggttgccaggttttgataatacctccaaattttgttcagggcccagggcttgcttttggagctttctcctgatatctgcggctgattggataataaacttatcttttagaatcaaaaaaaaaaaaa

SEQ ID NO: 87007 - DNA, 802 bp, Homo sapiens
  misc_feature (1)...(802): n = a,t,c or g
tatggccgcatgggcacaagacagctcatggggatactgaatccccatctacatgctcaatcagatcatatggttgcaggccatcttagaaataattactaatgaaactttgactgttttagcttggcaggaaacccaaatgaggaatctatctctcagaataggctggccttggactacttgctagcagctgaaggaggagtttgtgaaaaatttaacttaaccaggtgctgcctacaaatagatgatcaaggacaggtggttgaaaacatagtcagggacatgacaaaggtggcacatgtgtctgtacaggtttggcacgagtttgatcctgagtctttctttggaaaatggtttccagctacaggaggattaaaaaccctcattgtaggtgtagtgctagtaataggaacttgcttgctgctcccctgtgtattacccttgctttttcaaatgataaaatgttttgttgctactttggttcatcaaaaaacttcagcacacgtgtattatatgaatcactatcgctctatctcgcaaagagactcagaaagtgaggatgagagtgagaactcccactaaaaagttgaaaattctcaaaggggggggaatatggtacgagaccaccacttctcctgttgtcttcccggtttcttccccaacctcccctttttccctagtttataagacanggggaaaagggagaaagccaaaaagttggaaaggaaccaggaganaggttaatagctagacgaccttgggggncaaccacctggccctggtgggttggaatgataataat

SEQ ID NO: 87008 - DNA, 377 bp, Homo sapiens
gtgatataaatcatgtttacacaaagacatgtgctcagatgttcactgcagcattttgcaggaaggccccagggtggaaacaagccaaatgtctaccaatcagtaaagggataaagaagtggtatatccgtacagccgaatgttactgagccgtgacaaagaacacactactgatgcacgtttgagcctccaagacattatgctcattgacagatgtcagacacagaagaccacttattgcacaagtcagtttataggaaatgcccagagaggcagctctaaagagagagaaaggagcttgctagttgcctgggtgggcctggaggtaaagtaatggggattcactgctgctagtgggtaccagcgatctttctggg

SEQ ID NO: 87009 - DNA, 4830 bp, Homo sapiens
gggagagaggctcaccacttttgagtccacggggcttgcacctccacaagacaaacatccctaggccacccagagtaggcaagagaggaggtgaagcctcgggagaaacccctcccttggcagctggtttaagacccaaaacggggatacaaatgcccctgagagagcagtggtatactggaatagatgaggatgggcacatggtggagaggcgtgtttttgtgtaccagcccttcttctctgccgacctcctcaactggaaaaacaataccccatcctatactgaaaagccgcaagctctaattgatttgctccaaactattatccagacccataaccccacttgggctgattgccaccagttgctcatgttcctctttaacacagatgaaaggcggagagtgctccaagcagcaactaagtggctagaggaacatgcaccggctgattaccaaaacccccaagagtatgtaaggacccagttaccgggaaccgacccccagtgggacccaaatgaaagagaggatatgcaaaggctaaaccgatacagggaagctctcttggaaggattaaagaggggagcccagaaggccacaaatgttaacaagctctctgaggtcattcagggagaagaagaaagtccagcacaattctacgagagactgtgggaggcctatcgtatgtatactccctttgatcccgatagccctgaaaatcagcgcatgattcccatggctttagtccgtcaaaccccggaagaaatcacaggaaaactgcagaaacaggctgggcttgcagggatgaatccatccccaattactacaaatagctaaccaggtgtttgtaaacagggatgcagtaagccctaaggaaaaccgcagagagaatgaacatcaggtccggcgaaatgccgacctgttagctgcagcaatcacaggggtccccccaaagaggcaagggaaggggggccccgggaaagaaattcagcctggttgtcagagcttgcagcgtaatcagtgtgcttattgtaaagaaataggacattggaagaacaaatgccctcagctaaaaggaaaacaaggtgactcggagcaggaggatccagacaaggaggaaggggccctgctcaacctggcagaaaggacccccaaagagcctatggtcaggatgacagttgggggtaaagacattgattttcttgtagataccggtgctgaacattcggtagtaaccaccccggtcagccccttatccaaaaagactattgacataattggagccacaggagtttcagcaaaacaagctttctgcttgccccggacttgtactgtaggaggacataaagtgattcatcagtttttgtacatgcctgattgtcccttgcccttgttgggaagggacttgcttagcaaactgagagccactatctattttacagagcatggctctttgctgctaaagttacccggaacgggagtcattatgacccttatggtaccccgagaggaggaatggaaacttttcttaactgagtcgggccaagagataagaccagctctggctaagtggtggccaagagtgtgggcagaagacaaccctccagggttggcagtcaaccaagcccccgtacttatagaagttaagcctagggcccagccggttaggcaaaaacagtacccggtccccagagaagctcttcaaggtatccaggtccatctcaagtgcctaagaacctttggaattatagttccttgtcagtctccatggaacactcccctcctgcctgttcccaagcctgggaccaaggactacaggccggtacaggatttgcgcttggttaatcaggctacagtgactttacacccaacagtacctaactggtacacattgctggggttgctgccagctgaggacagctggttcacctgcttggacctgaaagatgctttctttagcatcagattagcccctgagagccagaagctgtttgcctttcagtgggaagatccggagtcaggtgtcactactcagtacacttggatccggcttcccaaagggttcaagaactcccccaccatcttcggggaggcattggctcaagacctccagaagtttcccaccagagacctaggctgcatgttgctccagtacgttgatgacctttttctgggacaccctacggcagtcaggtgcgccaagggaacagatgctctactccggcacctggaggactgtgggtataaggtgtccaagaaaaaaagctcagatctgccgacagcaggtatgttacttgggatttactatccaacagggggagcacagcctaggatcagaaagaaagcaggtcatttgcaatctgccagagcctaagaccagaaggcaggccttagaactcagtgaaggtaagactgtcaacatttacactgactctcggtatgcctttttaacccttcaggtgcgtggagcattatataaagaaaagagcctattgaactctgggggaaaagacataaaatatctacaagaaatcttgtaattattaaaagccgtatggagaccccgcaaggtggcagttatgcattgcagaggacaccagcgagcttccaccttggtgggtttagggaattcccgcgctgacttagaggctcgaaaagcaacatctgcccccttccgggcatcagtcacagcccccatgctccctcaagcacctgatcttgtacctacttattctaaagaagaaaaggactttctccaggcagagagaggacaagtgatggaggaaggatgaattcggtaaccggatgggagagtagctgtgccacagctgctaggagccgcagttgtgctggctgtgcataaaaccacccatcgaggtcaggagtcactggaaaagttgttaggccggtatttctacatctcgcctttgtcaacccttgccaaaacggtgaggcagcggtgtgttacctgctgacagcaagatgggagtcaaggtccagccgttccgcccagcatacgagcttgtggagcagccccctttgaaggtctccaggtggacttcacggagatgccaaagtgtggaggtaacaagcatgtactggttcttgggcgtacctactctgggtgggtggaggcctatccaacacgaactgagaaagctggtgaagtaatccctgtgcttcttcgagatctgattcctagatttcgactgcccttacggatcggctcacataacgggcctgcgtttttggctgccatggtacagaaaacggcaaaggtattggggatcacacggaaactgcatgccgcctcccagcctcagagttccggaaaggtgtccaagtcacacagagccacggaatctcacaggagcctgagaactcctcctcctgggactctcagaggatccagaactgcagcccatcctcgctgggctgtccctgtccatgtacctggtcacggtgctgaggaacctgctcatcatcctggctgtcagctctgactcccacctccacacccccatgtgcttcttcctctccaacctgtgctgggctgacatcggtttcacctcggccatggttcccaagatgattgtggacatgcagtcgcatagcagagtcatctcttatgcgggctgcctgacacagatgtctttctttgtcctttttgcatgtatagaagacatgctcctgacagtgatggcctatgaccgatttgtggccatctgtcaccccctgcactacccagtcatcatgaatcctcaccttggtgtcttcttagttttggtgtcctttttcctcagcctgttggattcccagctgcacagttggattgtgttacaattcaccttcttcaagaatgtggaaatctccaattttgtctgtgacccatctcaacttctcaaccttgcctgttctgacagtgtcatcaatagcatattcatatattttgatagtactatgtttggttttcttcccatttcagggatccttttgtcttactataaaattgtcccctccattctaaggatttcatcgtcagatgggtagtataaagccttctccgcctgtggctctcacctgccagttgtttgcttattttatggaacaggcattggcgtgtacctgacttcagctgtggcaccacccctcaggaatggtgtggtggcgtcagtgacgtatgctgtggtcacccccatgctgaaccctttcatctacagcctgagaaacagggacattcaaagcgccctgtggaggctgctcagcagaacagtcgaatctcatgatctgttatctcatgatctgttccatcctttttcttgtgtgggtaagaaagggcaaccacattaaatctctacatctgcaaatcctgcctgttagtcacattatttttgtggcttgatggcttttattcctttccgcatttcctttgtgaatattgctttcttcgttatgcctttaactggaatgggtgaggattctgggatcctttgtttagcaaaaacctcatgactgaatcctctatacctaggcggcctcttttagtttcttgagcaataaccctgtcatccaggtggaatcacaaccatctttttatatacacgaagtccgtcacttcgttttggaattccctgaaaactgactttatggaaacaacgtacaggaggtcctccaacagcattggttgttcacagttgtgtagttatactgttgatgaaaaataagcggtttcactatatattattttgcttcaagttgaagtttccaagagactttcaaagatgttaagtgaggacatactgtacatcaaattcatatcctcttccagagttcc

SEQ ID NO: 87010 - DNA, 373 bp, Homo sapiens
ctaccctgtggtgccaaacccatagactctcctatcctcagtacctccctccacaacccattctgttctagataaacctagctgaccccataaatcctaaattctttccccactcccctttccatttcttaaaaaacagccctaaaagctgctcccacactagctctccctaactcatcccagcctttttcattacacatagctgaagtgcagggctgtgcagtcaaaattcttacacaaggactgggaccgtgccccctggcctttttatccaaacaacttgaccttactgttttagcctatccctcatgtctgtgtgcggcagctgccactgccttaatacttttagaggccctcacaatcacaaactatg

SEQ ID NO: 87011 - DNA, 1383 bp, Homo sapiens
ttttttttttttgtattcagaacctgtaggtttaatttcagaccctcgggatgcatctaaggccaatctgtgagccattacaacctccaaaaggcatttaggactaatctgatgatctttgcactgccaataattaaagatggcaaccaatgggctaaatggtaacaacactcatatccttacattcatagtatttctccccagtgtgaattctttcatgcatacttaggcatgaggaaagagcaaatgctttcccaaattctttacatacaaaaggtttctctctggtaggagttcacaggtggggtgaggaatacagaaattctttcccacatatcttgcatttacctttctccactgtgagttttcaaatgtttactacgatgggaagaagtaatgaaggtcttcccacattcaacacattcataaggcttctctcctgtgtgaattcttctatgctgagtaagcgttgaagatctattgaaggctttcccacattccttacactgatagggtttctctccactgtgacttcgtatgtgtatagaaaggcccgagtactgagcaaaggcttggccacattccttacattcatagggttttattccagtgtgagttcttacatgttcagtaagttgagttgatctagtgaaggctttcccacagtatgtacacttgtgtggttttattccagtgtgaatttgaatgtgatcattaaggcatgaggaatttctaaaggatcttccacattctttacattcaaaggacttctctcctttatgagttttcacaggtgcataaagttgagaaaaattagtgaaggatttcccacatttcttagtctttttggatttctttcctgtatgaactgctacacactgctttaggtgtgaagaagctgtgacagctctcccatattcctgaaattcacagagtttctcatcagtgtggattcccatatgattatcaaggcttgcaaaatacttaaagccttttccacattccttacatttgtagggttgtcttgcattgagaacttcaagatgtacagcaagacctggagttagagtaaagacttttccacatggattaaatttggaaagttcctgtccagtagaggcttccttgtgcacactgagggtgtcttttccataacaattaccctcagaagtattccctccattctgaactctcatgtgtgtcttaaggcaaaactgttccctgaagacctctccacaattcttacagtcacagagtttccatccactgtagtctcttgtcatttgtatcccactgaatatttgattcttcaaaaaaccctgctgaagtgatgaccgtttggttataggttgtatttcccattccacagaggccaggttcatg

SEQ ID NO: 87012 - DNA, 373 bp, Homo sapiens
  misc_feature (1)...(373): n = a,t,c or g
aatacatgagttccgctttgtaggtgtatcatatttatggtgcctctgttcaataataacatttgaatgcacaacgatattttccccaaatttgttaagtgcttggactctcttcttatggnncaagatggcttgtctcacatctctcgtacaagtttcctggcgcctttctaagacatcatcatatgtggagacttttctcaacgcggaagaaattatatcatccctcatgaaactttccatcataatgccatgatataagcgctcctgtgaaaaggtactctttgcagttgactcaatggtttctattttactcttcaagtctgaactgagatctactgggccttctttctctgcatgcatggctcttctg

SEQ ID NO: 87013 - DNA, 3064 bp, Homo sapiens
tttcgtgtaaaaaaaaaagggagaatcgagaggtagagcttgagggggggcggggagggaccggaccggaccgagccggggccacggccccccgccccgaaaccccgccgagcccaagggtggacaaaaatgaagccaatgaagaaggcatgcactggcctttcaggtcctggcagtggcagcaagtcccccccagccaccagggccaaggttttgaggcggcgaggggctggggagggtgacaagccagaggaggaggatgacgaggcacagcagccgtaaccacagtccgggcccgaaaaggctgaggaaggggaggaggaggaggctgagcggggccctggggctgaaggtcctccactggagctgcaccctggcgacccggctccaggcccagcagaggaccccaaaggggatggggaggcaggccgctgggagccctcactcagccgcaagacagccacgttcaagtctcgagcgcccaagaagaagtatgtggaggagcacggagctggcagcagtggggtggctggggcccctgaagagcgggtgcggacccctgaggaggccagtggcctgggggtgcctccacggccacccacctccactcgttcctcctccactgacacagccagcgagcactcggcggacctggaggatgagccggctgaggcttgtggtccaggcccttggccccctggcagcaccagtggcagctatgacctgcggcagctgcggtcccagcgggtgctggctcggcgtggtgatggccttttcctgccggctgtggtgcgccaggtgcgccgaagccaggacctgggcgtgcagttccctggtgaccgagccctgactttctatgagggggtgccaggcgctggtgtggatgtagttttggatgccacacccccaccaggtgccctggtggtgggcacagctgtctgtacctgtgtggagcccggcgtggctgcctaccgggaaggtgtggtggtggaggtggccaccaagccagctgcctacaaggtccgtctcagccctggccccagctcccagccaggcctaccaggcagcctcccgcagcccccacagccactgcaccgtgagccagaggaggctgtgtgggtggcccgctccagcctacgcctgctgcgccccccctgggaacctgagaccatgctgaggaagccccctacaggccctgaggaagagcaggcagagcctggggccaccctgccaccctgccctgctgccctggaccccaaacagcccgaggatgctgaggtctctaagatcagctttggtggcaacctgggtactcactgtgaggagggcgaggagaagcaccctccagccctgggtaccccagccctgctcccactgcccccaccccagctcctgtcaccaccacccaagtctccagcctttgtgggccccggccgccctggcgagcagccctcgccctgccaggaggggagccagggcggcagccgcagcagcagcgtggcctccctggaaaaggggacagcaccggcagcccgggcccgcacgccactgacagccgcccagcagaagtacaagaagggcgatgtggtctgcacacccagcggaatacgaaagaagttcaacggcaagcagtggcgccggctgtgctcacgagatggctgcatgaaggagtcacagcggcgaggctactgctcacgccacctgtccatgcgaaccaaagagatggaaggcctggcagacagtgggcctggcggggcgggccggcccgcggccgtggcagcccgtgagggcagcacggagtttgactggggtgatgagacgtcgagggacagtgaggccagcagtgtggcggctcgtggagactcacggccacgcctggtggcccctgctgacttgtcacgctttgagttcgacgagtgtgaggcggccgtgatgctggtgtcgctgggcagctcgcgctcaggcacgccctccttctcacccgtctccactcaatcgcccttctcgccagccccatcaccctcaccctcaccactcttcggcttccgccctgccaactttagccccatcaatgcctcaccagtcatccagcgcactgcagtccgcagtcgccacctgagcgccagcacccctaaggcaggcgtgctgacgccaccagacctgggcccccacccaccgccacctgccccccgagagcgccactcctctggaatcctacccaccttccagaccaacctgaccttcaccgtgcccatcagccctgggcgacggaagacagagctgttgccgcatccaggggccttgggggcccctggcgcagggggtggaggagccgccccagactttcccaagagtgacagcttagactctggtgtggactcagtgtcccacacacctacaccctccacgccggctggcttccgggccgtgtcccctgctgtgcccttctctcgctcccgccagccctcaccattgctgctgttgccaccccctgccggcctgacctcggatccagggccctctgtgcgcagggtgcctgctgtgcagcgggactcacctgttattgtccgcaaccctgatgtgccactgccctccaaattccctggggaggtgggcactgctggtgaggtgcgggctgggggacctgggcggggctgccgtgaaaccccagtgccccctggggtggccagtgggaagcctggcctgcccccacctctgccagcccccgtgcccatcaccgtgcctccagctgcaccaactgccgtggcccagccgatgcccgcctttggcctggcttcttcaccctttcagcctgtggccttccacccctcacctgctgccctgttgcccgttttggtgcccagcagctataccagccaccctgcccccaagaaggaagtcatcatgggccggcctggaacagatgggcagatggaggctctaacaggtccttcccaggaggtggcaggaccaggactggagccctcatctttaccactgtgtccagtaaacatcacaggcacggccatggaaggcagcgggggtgtgctgggcacttctccag

SEQ ID NO: 87014 - DNA, 538 bp, Homo sapiens
cctacttggtacgatgactggtagccagggctgctagctgatgaccccaataaacgcttagtgagtaccggcgaagagcaaggagaggatgttagagaggaggaggcagtgctgctgggagacagtgagctcccactggaagagaggggactgggcattgggactggagtctcaatccccacaggacacccaccattctccactggtttctcttgggccaatgccacagatttttcccgtggaggcacttggttttctacattgttgcctgcagtcagctccctggtagtttgtatctctgggtcacaatggccattggtttttgcatatgagtaagcaggagtggcaggaccaggcagcccagtgtttgtcatcttggctatgttgctcccatgggttctttctgctggaaaactctctgtttggcaaaacacagacattagcatgagaggctcagttgctgtgcctttggacacggttactggtttcttcaattgctcattaaggctactgtgctggtgggaagcctctaggtcct

SEQ ID NO: 87015 - DNA, 391 bp, Homo sapiens
ttcgccattcgtgctttcttggaaactggtgtttatttccttcagcgttatttccatcttgtttaagagcttgtggaagaacagcttaaggccactcagtggttattcttacccattcagtggtctgagcagtggaagttgcagaccagtcattcatggtaggctaagtgctccaatcttcagtagggaactgctgaataggcacagagggcacctgcatgtctttaaaccagtctgcaacctcagattgagtagcagtaaacttgcactacagcagtccattcactttgaaattcctcctttttcagctgcagcctactcttccttttcaatctcttcaggatctctatagaagtagagatcaggcatgatcatgggagatggtgcaaca

SEQ ID NO: 87016 - DNA, 1065 bp, Homo sapiens
taatgacatggaagaacatttagaggagcctgttgctgaaccagagcctgatcctgaaccagaaccagaacaagaacctgtatctgaaatccaagaggaaaagcctgagccagtattagaagaaactgcccctgaggatgctcagaagagttcttctccagcacctgcagacatagctcagacagtacaggaagacttgagggttgaattgaccaaagcaatggtgatggagaagcctagtcccctgctggtcgggcgggaatttgtgagacagtattacacactgctgaaccaggccccagacatgctgcatagggatggatggatgatgtcctgttcaaggcggtgcccttctctggcattccctaacacaagcttgacccgaagtaggcgttctgaaaaaggccgacagtcgatggaggccaacgcagcgcccctctcacctcctctctccgtccaggccggaaaggaggcggcgcggccggcagggatcaggactggagggggcggagcctccctcgcggccgggcccggagtgggaggggcctccgggaccaggcctctagcgcgcactctcggaagcgcagccgaacccgccctccgaatccagagaggcgctgctgacaccgccgccacaccgccgccacaccgccgctgcctcagtcatgccgaagcacgagttctctgtggacatgacctgtggaggctgtgctgaagctgtctctcgggtcctcaataagcttggaggagttaagtatgacattgacctgcccaacaagaaggtctgcattgaatctgagcacagcatggacactctgcttgcaaccctgaagaaaacaggaaagactgtttcctaccttggccttgagtagcaggggcctggtccccacagcccacaggatggaccaaagggggcaggatgctgatcctcccgctggcttccagacagacctgggacttggcagtcatgccgggtgatggtgttcctgcggagaccctcagttgtcctattccttcctagcttccctgcaataaaatcaagctgcttttgttggaaaaaaaaaa

SEQ ID NO: 87017 - DNA, 402 bp, Homo sapiens
aaagtccacctcatgtagacaccatcggatatgaatagggcttttgaaacagacacccaaagcattggagagaaaaacagatctccatctgagccagattattttgagagaaaaaagttcaaaagatcttaagaaaaagctcatattagatataagattgatcagccagaagatattcccctaaaagcaatttctctgtaaacactcaaagtgcacagctactctcagcatgagaaacatgagccttatgaaaaaaaagtgcagtttttcagaagaattttatagcctttttcccatctttgctggtctgtcatctcctagccattaaattggggttctatattgaaatacatctgacaactttcaacaacactttttgatgaagaaatagaaactgactgg

SEQ ID NO: 87018 - DNA, 370 bp, Homo sapiens
tttccctgaagttctcggtacccttggcaaagatcagttggctgtagatatttaggtttatttctggactctcaattacattattacattctatatgttgataattatgcaggtaccacactgttttgaacattgtagttttgtactgttttaaaattgagaagtgtgtcttctttctcaagattattttggctgctttggttccgttgaattttcatatgaacttcaaggctggcttttccatatctgcaaaaaagaccattgggatttttgctagggattgaatctgtagattgttctggggaatagtgccatcttaacaatgttaacatccattctctgaatgtggaatgtctttccatttatttct

SEQ ID NO: 87019 - DNA, 645 bp, Homo sapiens
gggaatgagttgtttttttaatggtggttatagagtttcattttacaagataaagagttcaggatattctttgctcaacaatgttaatgtacttcaagtattaaacaagacattacaatagttaagatggcaaattttatgtggcatgtacttcaccattgttttttaaaaaccatataatactagttctcagtgctaaatcacagatttctgggtgttgttcatcattttggctacattcaaggcacatacgtggcctttttccagtgtgaactacatgatgtctaagtagtgtggagtagtagcaaaataatgtcacacatttgctgtactcagaagactttcactagtgtggatattctgaagcccaataagtacaatcttgcatgttgaatctttaccactttctactttattgaaaagactcttcttcagtgtaaactctccaatgtctaatgagatgagagtcaaaccaaaataatgtcccgagtttgctgaacacacatttctgcagtgtgaattctctgatacatagcgactggagagctgtacctacataattacccacgttcacggcattcagtctttctccagtgtgtactgcctgctgtccagccacaatatgttggtgactgaaggctttcc

SEQ ID NO: 87020 - DNA, 1111 bp, Homo sapiens
cattgaaggacatatacccaaaagttaaattttttccctttaagttgtggctttgtaaaatttttaagcatgtacttaagaataaagaagtaaaagtcattttaaatgtagctgtttctttttagatacttaccaatatattccctttatctaaacaattaccaatattaaagagtgctatattctttgagctatttatatgtgtgtttaagatttgtgggcatttatccttcaagaatgagggatatatattactttgggagtgtcacaaaattcctttacaaagtttgcaaaagtttactgcaaatatggcagcttataagctgtatgtttcttatattttttaaaaagcttaactgatatggctgttgtataattatttaatcagtgctttaaaatttattagccagtctgtaataaaaatatcaatacttataatcttcataaaatctgcttgtttttggctcttaatttgattttaatttttttttgttggttagcatatttaggatgcagtaatatgacaatgcttattttaattatagctcaaattttagctatgctaatattgacatgtacaagtatctgcttgagtgcctggtttcaagtcttttgggcatgtacctaaggggaaacttaactgggtctatgggaattgtatgtttactctctgaggaaccgcaaactgtttctacaaaaccgaccattttcatttcaccaccatggttgagaggtccagtctcaccatcgttcaaacttgtgatgggattgttaaaaaaccgctccctcctattagggggagggatcccacgttcttcagcgggttactaaagaccgatggaacaactggtccgggcacagacgttagcgaactgttcttaccacggtcggctaccagcccccctcacgagacgttgattctacatatgttgcatacgtacggtacggtcccagaaatctcactacaggccatccggcgacgcacgcgcacagagacgcgttgcaagacccgagatgaacgtgtcggagtgttccgagaagagcctagttgccttatcctactaaatatacgagactcggtcgctacgccggttgtgattgatctcctgag

SEQ ID NO: 87021 - DNA, 1183 bp, Homo sapiens
ctgcggccactacaaaggcacgaaacatgccaagaagctcaaagcactggaagccatgaaaaataagcagaaatctgtaactgccaaggacagcgcaaagactaccttcacctccatcactaccgataccatcaataccagctctgacaaaacagggggaaaaaaaggtgcaatgaagccctgtggtttattcttaccattctgcacaagagacggtactgcagggacaccagcaatatcaacgacgacaactgtggaaatccgcaaaagcagtgttatgacaactggagatcaccttttaagtgggaaaaaagcccaacgaccagcccctggccatagctcatgtccttctacttgagaccgaggaagaaaaggcaaaacggcttctttactgttccgctatgcaaggttgctgtcaactctgcctcgcagctggaggcgcacaacagtggtactaagcacaaaaccatgttagaagcccggaatggaagtggcactatcaaagcctttcctagggcaggagtgaaaggcaaaggacctgttaataaaggaaacacaggcctccaaaataaaacatttcactgtgaaatctgtgatgtgcacgtcaactcggaaacgcaacttaaacagcacattagcagtagaaggcacaaagacagagctgctgggaagcccccgaaacctaaatacagtccttacaacaaactacagaagacagcacatccactgggggtaaaattagtattttcaaaagaaccttcaaagccattggctccacgaattctaccaaatcctctagcagctgcagcagccgcagcagcagtggcagtgagttcccccttcagtcttcgaactgctccagcagcaacactgttccagacttccgcgcttcctccggcactcctgcggccagctcctggacccattcggaccgcccacactcctgtgctgtttgctccttactaaattccaaataggagtaattgtactgcaataatttttcaaaaaacaaaaaacaaaacaaacaaaagagaactatgcagtgtttatttatagtttaaagtatatctgaagagccaggacttttgatagtgaattgaaaaggttataaaaaagtgggggaggtttgggggtgggacggagggcgtggtattttctccacattaaagcattcctcttgaaa

SEQ ID NO: 87022 - DNA, 700 bp, Homo sapiens
tttttttttttttaaaaggaataaataatgacaataatatatatttattcatgtcattaccatttctggtgctcttttattcctttgtgtagagagatttccatctggcattttccttctgtctgaaggacttcctttaagacttcctttcttgaagtgtcagtctgctgtaaactctttcttttaagctttagtttacctccaaacttatttatttcacctttgtttttgaaggatatttttttgccagttctagaactctaggttaacagtttttttctttcaggactttaaagagtttgcttactggcattgtttccaatgagaagtgtaatgtcaacttcgtctttgttccactgcaagtaactatcctctcccctggttgcatttaagattttctttttaacactggtttccagcaagttatgatgagccttggcatatttttcttcatatttctcatactcagggtttgttgagcatcttggatctgtggacttagtttttattatattcagaaaatctttggccattatgtcttcaagtatttttcctattccatctccctccccactcctctctttcagggacgccaatcaccatagataataaggctgcataaagttgtcccacaggtcactgatgctcttcgtgtttttgtaaattgttttattctgtgtatgtttcatttttttgtagt

SEQ ID NO: 87023 - DNA, 407 bp, Homo sapiens
cgagaaactgtgtatcatatatctgcacatataagctgtttgtgtatcatatatatctgcacatataaactgtgtgtatcatatataatacatctgcacatataaatgtatcatatatatccacacatataaactgtgtgtgtatcatatatctacacatataaactgtgtgtatcatatataatacatctgcacatataaactgtgtgtatcatatatatccgcacatataaactgtgtgtgtatcatatatatctgcacatataaactgtgtgtgtatcatatataatacatctgcacacatgcttctctgtattgaaaaccaaattgtcacggaccactcccattctcacgcagcatttagggctgtggctagcctttcccagctgtaagaaacctgtctttaa

SEQ ID NO: 87024 - DNA, 588 bp, Homo sapiens
ttttttttttttgagacggagtctcgctctgtagcccaggctgaagcgcagtggttgtgagctcggcttactgcaagctccacctcccgggttcaagccaatctccctacctcggcctcccgagtagctgggactatgggcgcccgccaccatgcccggctaatttttgtatctttagtagagacggggtttcactgtgttggctaggatggtcttgatctcctgaccttgtgatccgcccaccttggcctcccaaggtactgcgattacaggcatgagctaccatgcccggccacaagacatagattttctatatgcacatcaagggaggtgctggtttaggttgctataggacagagctatcctgtattccagttggtttttgtagagaaacaattagacttctctagatagagccctgatttttctctcacgctttcagttttttaaaagcactaatgatatttcctgttttctcataagaaaaagtcaatactatgccttacaaagagacctttccttctaatatagaattttatttgaaagtgagtacatgtttataactagagaataaaaggagaatttttg

SEQ ID NO: 87025 - DNA, 474 bp, Homo sapiens
  misc_feature (1)...(474): n = a,t,c or g
gggagattcggacattttcgnnnaccgctgcgcccttttgttcgggacagggngagcgcattgtccgggtttccgttgtaaggaccacgnggcggggacagggggagcgcttagtttgggtccttggtgtaaggaccaggnggcggggacagggtgagcgcacagtccgggtccccgctgtaaggacctggtggcggggacagggtgagcgcacagcccacgtccccgctgtaaggaccaggtggcggggacagggtgagcgcacagtctgggtccccgctgtaaggaccaggtggcggggacagggtgagcgcacagtccgggtccccgctgtaaggaccaggtggcggggacagggtgagcgtacagcccaggtttccgctgtaaggaccaggtggcggggacagggtgagcacacagtccgggtccccgctgtaaggaccaagtggcggggacagggtgagcgcatatcct

SEQ ID NO: 87026 - DNA, 1772 bp, Homo sapiens; identical to SEQ ID NO: 66123

SEQ ID NO: 87027 - DNA, 4945 bp, Homo sapiens; identical to SEQ ID NO: 66169
  misc_feature (1)...(4945): n = a,t,c or g

SEQ ID NO: 87028 - DNA, 1123 bp, Homo sapiens
aatgctcctaggaggcattaatttcccagcacttctgggctgcctccaacgctggagagtgggaacagtctgagagggtccttaggcagggacacagttcctgacagttggaactgtgtgtttaaggaattgagaggtactgaagggatgtggatggggcattgacagcatctgaccccacatggttcagatgcatccataccccactttttactccatcctatcactacttcttcaagtcccaacttccaaaaacagacacacacacatacaaatgaaacagttagcaggaccagctatatttcctgttcttacagataatcttaaatccataattgatattcatcatctccttcctccccctactattatggatgaatcatgcaccccaccctcacacacaattcatatgttgaagtcccagctgccagccagtacttcagaatgtggccatgtttggagatagagcctttaaagaggtgattaaattgaagggaagccgttgaggtggggccctaatcctaatgactgggggtctcctaagaagaggaagaggccagatgcggtggctcatgcctgtaatctcagcactttgggacgccaaggctggcagagcacttgaggtcaggagtttgagaccagcctggtccacatggtgaaaccccaactctactaaaatacaaaaattaaccggccgtgggggcagggacctgtaatcccagctactcaggaggccgaggcaggtgaatcacttgaaccccgggagccgaagtttgagggagcccagttgcgccactgtattcaacctaagggaagaggagatttggcttaacggcccgtcctctgccctaataaacatggggggcgcgttaagaatcaattttctcgcgcgcctccgcggtaaattttttataggaacaagatcattttttcgcccggttaaaatttgggttgggggaggacccctctttggctcaaatattcttccttgcgtggggggatcttgggtgactttggagcaggcaccagcttttggcacgggactcttttgctgaatcacactcggctaactttcctttccccctttccttttacgtgatacaaagcccccttttgacgttcc

SEQ ID NO: 87029 - DNA, 407 bp, Homo sapiens
agcgccaggatccggtcatcatggaaagaggactgggagaccataagagggccagctgggacgagggggcggacgcccaggaggcaacttctgagacgcagctcctgagaggggcagggaccaggcgcgggaggccagagggggcacaaagaacaaaccccctcataagtgaataggagagcggaaggaaccgagaggggacggacaggagctgaggaggaaagaggaggggagaggggtcaggccaggcagccaaggagaagacgtgtggccgggggctatcagaaggaaactgggacggacgggccgggctcgggctgtcctgtggagcagcagcatccccggggccggcagaggcgccagtggctgggcgggatgagtctctgagggccactgtggagcgcccc

SEQ ID NO: 87030 - DNA, 1315 bp, Homo sapiens
tcgaaggactgtatctttggtacactggagaaccaaatgatgcccttcgacattttaataaagctcggaaagatcgtgactggggccaaaatgccctttataatatgatagagatctgtttgaatccagataatgaaactgttggaggtgaagtatttgaaaacctggatggagacctgggtaattcaactgagaagcaagaatctgtgcaactggcagtaagaacagcagaaaaacttcttaaggaactaaaacctcagactgttcagggtcacgtacagcttcgcataatggaaaactattgcttaatggctaccaaacagaaatctaatgttgaacaagcattaaataccttcactgaaatagcagcatctgagaaggagcatatcccagcgctcttgggaatggcaacggcttatatgatcttgaaacagactccacgagccagaaaccagctgaagcgtattgcgaaaatgaattggaatgctattgatgctgaagagtttgagaagagttggctgctacttgctgatatttacattcaatcagcaaaatatgacatggcagaagacctgttaaaacggtgcctgcgtcataatagatcttgctgcaaagcttatgaatatatgggatacattatggaaaaagagcaagcatatacagatgctgccttgaactatgagatggcatggaaatatagcaatcggacaaatccggcagtaggatacaaactggcatttaattacttaaaagcaaaaagatatgtggattcaattgacatatgtcaccaggttcttgaagcacatccaacttatccaaaaatcagaaaggatatacttgataaggcccgtgcgtctttaagaccttgaaaataattttaacttaggtgttggtttaacaggaaatgaaagaaatctaactttcagttcttcctgttcaaaacaggtttgagctcagtgctttgttattagaagtatacccttttttctccagcagaggttgctgctgtacatcaagagaagtactatgtgaaattggtgtttcctaatggagttgaatgagagctggtctatttgactctgttttgattgggtacagatttggtgactctgtggtaaagactataattatttctataaagaatattttgttaaaatctaggtaattaaataccctgtatcttttctaaggaatattatttcaggaaatatatttaaaatgcattgttctcttttaaagtgtttttgttatattcttttatttatttatttatttttaaagacagagcctgggcaacagagtgtaaccctgtctc

SEQ ID NO: 87031 - DNA, 423 bp, Homo sapiens
agacgctgcgggcgaggctgcacaaatccggttcctgaaccattgattcccgcgtggctgcacctttccgacctaggccagttctgggaggcttgctgtccacgaaccaacgccagggaaggatgccccaggagtgggtttttttcagctgctgcgcggggcaggaaaacttcctggcgggtaaatactgggcgctggatccacgaggagatgcagtgttttatctatctatgggtgggcgacatgtcctttttcaacttgttgcctttgctcaagctttctctccacttggaacatgtttctgacacttagcctccacgagtggaaactgttctccaaggaagagctcctagatcgtctagccggaagtcccctctttcaggctctgaacctgcagcttgtgttagcaaaggacatgcatgt

SEQ ID NO: 87032 - DNA, 425 bp, Homo sapiens
  misc_feature (1)...(425): n = a,t,c or g
ccgggtggacccacgcgtccgctccacaactgcctttccttctcccattttcctgncaagnccgcatcaacacgaccatcctgtggcaccagggctgcgagaccgaggtcaacatcaccttctgcgagggctcctgccccggagcgtccaagtgagtgggctcctggccctgtgccaagagcacctgcgtgtggggggtccgccctggcccgccagctggctggcagcctgctctgggtcaggagggcctacgccagctccaggaaggagggaaggggctccccagcagggctccccctctccaacgtcattggcagaaagcctggggccgctctcctatccaggccagggcccggctgagccgagccacatggcacagagctctccgctgcgaacccaggttcaggtgtccccctggggagggg

SEQ ID NO: 87033 - DNA, 6305 bp, Homo sapiens; identical to SEQ ID NO: 72185

SEQ ID NO: 87034 - DNA, 408 bp, Homo sapiens
tttcgtctttctgcaactatatacagggcagtctgtgcagacccatccctgtctgccactggagagggtcggcagagaggggaaatggcttctccaggatgcccagtccagcccacattccccacacaacttccaggcccacgtgcagccctccctacagctggtccaggctccaggaatgaggagccggccccattctgggctggggagagtgagcttcagatcgctggggggaggggcccaggtcccacaaccaccccaggagacccaatcgcttgccacctgggtggcctgagcgcccatggggtcccactgtggggcctgggcgtgatccaaagagcatgagctttgacatttaacatttaacaagctctgcagccctggggactcagttttctcatcttcaaa

SEQ ID NO: 87035 - DNA, 442 bp, Homo sapiens
accgggttacccgggccgacgatttcgtggccacctcccaccgagtggcgaagctggtttccttcagtctccagaccccggtaaatcccatcactggagcgcgggtcgcccagtacgaacgcgaagaccccttaaaggccctggcggcagcggaggcgatcttggaggacgaagaggaggagaaagtggcgcagcccgctggggcatcggtaatactggggcgggacttgggctgggacctcgcatgggctgggtgcaggctgagggctgtccggttccccgcccagctgagggcaggctggtaaacgcgggtccctgtgcacatagtccctacttggtggtcctggcccagccccttctctacgctcacgaaaattactctaaatcgaggcgttgaaaagtgttttaattttcaccagtctgttgtaaaagcttcctagac

SEQ ID NO: 87036 - DNA, 445 bp, Homo sapiens
gatttccgttcgacgatttcgtaagcaatccagggacaagatactcaccaggaccaggaaggggactctgggggaccggcttcccctggaccttcctggctgtgcctcggatcaggaccagaatgacacccattcatttccctgggcctttgctccggtggtccctgcaccctggcctctgcctgacgaggatggtggggagaggaggggggacatcccccacgctgctgtctccactgtggcctctgagcttccaggactgcagcgggtgggtgggtggcctggcctaagcccaggaatgcacttcagctcctggttgagcaatgtcactgaggcttgggagtcgggtggggacgggaggaggcgtccgcaggccccccctaccgtgagaggcagccgtgggaacagcctacctctaaacaatcgctgcagcccaggctgaccg

SEQ ID NO: 87037 - DNA, 457 bp, Homo sapiens
  misc_feature (1)...(457): n = a,t,c or g
tttcgtgatctgtacaacccatggtttgcggtgacactcagaggggatctttgggagatttatagagccggttcttagcgctttgtgggttcagaggctggctgcagtgtttatgaagaggggcagtgggctggggacactgctggggttatggctgtagtgaggtccatgtgtacttgttccttggcatgtgtctgactctgtgttgctgctgcagtacagtgggcaggggcacggttgcttgggactgggctgcccgatgtctggcatggctggtggtcctgttgtcctttatttgatcgatagcagggaactgaccgccgaggttggcacaggttggcagggggatgaggatgcattggggntggctcctcctcctctccttcttcctcttccccttcctcctctcctttctggtcttgatctccctcatcttcctcttccttcttctccctct

SEQ ID NO: 87038 - DNA, 444 bp, Homo sapiens
agctttacgcaagacccgccgcgacggaatcgcgcggacgggagcgcagcccgcagcgtcgtggaaaggtacgaacaactatccctggagattggagatggctgggaggccgggttctcaagagcaaagcaaggataggggcaccggtagcctcccgccgccgtctcaacggcctctgggcccatcccctgagggggcggggccgtctcctccacctcccggtattccccgaggaggcggctcctcatcctccgagggtcctcacagctactttttgtccctcgtcgattcccagctcctaagaaggggcttccctctgacacccctcattcaaaggcacctcccaccccgcacctcatccttggcggagaggactcacaggtaccgattctctaggctgccgcccccaaccccatttcgtacccccggaaggccaaacatccc

SEQ ID NO: 87039 - DNA, 1061 bp, Homo sapiens
cccacgcgtccgaggaattatagataaaccttaggtcaaatcatttcacaattgcattggtggtattgaaaaatgatgagatttctctgacagagagctttgtcctagtttttgttcttcataggtcaaaactggcaatattctcttgtctgcaagataaagtgtttgtgcttctatcaccatatgcatgaacatgtaagaatcagatacaatttctgcttcatcagtttcacatgttcatgttgtcactgaaaaaatgcatctactgtttatagctcccaaggagaccccaaatcctttttttttcttttgagatggagtcttgctcttgttgcccaggctggagagcagtagcgcgatctcagctcactgcaacccccacctcctgggttcaagtgattctcctgcctcagcctccccagtagctgggatttacaggtgcccgctaccatgcctggctaatttttgtatttttagtagagacaggctttcaccatgttggccaggctgatctcaaactcctgacctcaggtgatccacccacctcggcctccgaaagtgctgggattacaggagtgagccaccgcgcctggccccgtattcattttttatactggaaaacattttttttgtaatttttctttgcaaagaaatgagcataaaaatgaatactccaaagaaaaggaattattatggcaaattaaaagggacacggtactatgatttaattactgtcttgtctttttaaaatgtcatctcttgttttaccctttttttaaataaaagctttaaaaacatgtctttgggtattattctggaggtatgtttcttttatataagatttcaagtttaaacatttacaataagtaataatatttaaattcttataacaagtaatgaaatatttggtttagtaattagcttagtctatttttaaaaatcattaaaatttactttgtttttaagaatgccatactacaaatgatgttatttggttttaatggtgttttgtgtttaagatagaataaatagagtttgaagaatgtgaaaaaaaaaaaaaa

SEQ ID NO: 87040 - DNA, 552 bp, Homo sapiens
  misc_feature (1)...(552): n = a,t,c or g
gtcacagaattagcgctcacagccagtgacagacaaattaattttgcagcctgtgaacttttacatagcatgggtatgtttatgttgggcaaagccacgcagatgccagaagggggacagggagccccacccatgtaccagctctataagcggacgtttcctgtgctgcttcgacttgcgtgtgatgttgatcaggtgacaaggcaactgtatgagccactagttatgcagctgattcactggttcactaacaacaagaaatttgaaagtcaggatactgttgccttactagaagctatattggtaagtaatagntgattcttttcctcttactcccatcgattagttgtatttgatgtttgtttatttatttatgttttnnnnnnnnnnnnnnnnnnnnnnnnnnnnngaagaatttctgagtatatccaattttctcctatactcagattcaataactaaagggccctggaaacagcagttcaccttttacatagaactctcctgacacggagaagcattgtcttagaatttgggcgccagcttactgag

SEQ ID NO: 87041 - DNA, 371 bp, Homo sapiens
aagttttgaaggttaaattatctttttatttctgaaataaaccagtttgatcattatgtattagctctctctcttacattaagggaacttcaaaaaggtcacgggaaaatggaattaaaagataaaaagaaaaaatataaactttatttttcaacataagctctgtcaagtttaagacacttttataagtgacaatgtcagccatttagtccatccctaaagaactgagggtcctgggatttaaccatgtcagtgcagtctttttcacattagtaactgaagaaaagtgggtgccctttaatgatttattaagattagggaacaaaaagaagtcagaaggagccaaatcaggtcgtaggtggttgcctaat

SEQ ID NO: 87042 - DNA, 421 bp, Homo sapiens
cgtgagccaccacagctggcccagctttattctttttgctcaatattgctttgggtatttggaggttttttgtggttccatatgaattttatgattgatttttctatttctgtgaaaaatgtcattggaattttggtagggattgcattgaatctgtagattgcttttggtggtgtggacattttttaaatattgatttttccaatccattaatacaggatatctttccatttatctgtgttttgatttctttcatcagagttatatagttttcagtgtacagatattttacctccttggttaaatttattcctattttaattttgctgacgctattataaatgggatttttttttaaatttctttttcaaatagcttgttgctgcgtatagaaatgctactgatatttggctgggcgccg

SEQ ID NO: 87043 - DNA, 473 bp, Homo sapiens
agcgctgacgaattccaggctccccctgcaagagttctgctgttctgagcaagtggacaggtcaaggctgttggtcacagtgctgactcctcctcctctgacgtgctcagtgacccagtggtccccactcagaccctgagccagccacctgtgcactgaggccttggaagccccagattccacctctgtgtactcagcactccgggagctgggtgggaggtggggcaggaggcggccacgagtctttaggccccatcagcagagtacaagttacgggtagtccccatggcggagtggctgtgccttgaaccgggcacaccagattcgtctctgtgcagtgctggagtcccccccgctaggggagggggctggcgggggaagggccgggcagcaggggcacaggcaatgatgcgggacccttcctgcaggggggtgagaagctgcaggatgcctactacctctttccagagaag

SEQ ID NO: 87044 - DNA, 15359 bp, Homo sapiens
tctacctcgcgggtgcctctggtgtctccagaggtctccgaccccagcccgcccccagccctcccgcccagcccgcagccccctccctctgttccccgacctcagaccctgggcttccgacctcgacatcatgggtgacgcagaaggcgaagacgaggtccagttcctgcggacggacgatgaggtggtcctgcagtgcagcgctaccgtgctcaaggagcagctcaagctctgcctggccgccgagggcttcggcaaccgcctgtgcttcctggagcccactagcaacgcgcagaatgtgccccccgatctggccatctgttgcttcgtcctggagcagtccctgtctgtgcgagccctgcaggagatgctggctaacacggtggaggctggcgtggagtcatcccagggcgggggacacaggacgctcctgtatggccatgccatcctgctccggcatgcacacagccgcatgtatctgagctgcctcaccacctcccgctccatgactgacaagctggccttcgatgtgggactgcaggaggacgcaacaggagaggcttgctggtggaccatgcacccagcctccaagcagaggtctgaaggagaaaaggtccgcgttggggatgacatcatccttgtcagtgtctcctccgagcgctacctgcacctgtcgaccgccagtggggagctccaggttgacgcttccttcatgcagacactgtggaacatgaaccccatctgctcccgctgcgaagagggcttcgtgacgggaggtcacgtcctccgcctctttcatggacatatggatgagtgtctgaccatttcccctgctgacagtgatgaccagcgcagacttgtctactatgaggggggagctgtgtgcactcatgcccgctccctctggaggctggagccactgagaatcagctggagtgggagccacctgcgctggggccagccactccgagtccggcatgtcactaccgggcagtacctagcgctcaccgaggaccagggcctggtggtggttgacgccagcaaggctcacaccaaggctacctccttctgcttccgcatctccaaggagaagctggatgtggcccccaagcgggatgtggagggcatgggcccccctgagatcaagtacggggagtcactgtgcttcgtgcagcatgtggcctcaggactgtggctcacctatgccgctccagaccccaaggccctgcggctcggcgtgctcaagaagaaggccatgctgcaccaggagggccacatggacgacgcactgtcgctgacccgctgccagcaggaggagtcccaggccgcccgcatgatccacagcaccaatggcctatacaaccagttcatcaagagcctggacagcttcagcgggaagccacggggctcggggccacccgctggcacggcgctgcccatcgagggcgttatcctgagcctgcaggacctcatcatctacttcgagcctccctccgaggacttgcagcacgaggagaagcagagcaagctgcgaagcctgcgcaaccgccagagcctcttccaggaggaggggatgctctccatggtcctgaattgcatagaccgcctaaatgtctacaccactgctgcccactttgctgagtttgcaggggaggaggcagccgagtcctggaaagagattgtgaatcttctctatgaactcctagcttctctaatccgtggcaatcgtagcaactgtgccctcttctccacaaacttggactggctggtcagcaagctggatcggctggaggcctcgtctggcatcctggaggtcctgtactgtgtcctcattgagagtccagaggttctgaacatcatccaggagaatcacatcaagtccatcatctccctcctggacaagcatgggaggaaccacaaggtcctggacgtgctatgctccctgtgtgtgtgtaatggtgtggctgtacgctccaaccaagatcttattactgagaacttgctgcctggccgtgagcttctgctgcagacaaacctcatcaactatgtcaccagcatccgccccaacatctttgtgggccgagcggaaggcaccacgcagtacagcaaatggtactttgaggtgatggtggacgaggtgactccatttctgacagctcaggccacccacttgcgggtgggctgggccctcaccgagggctacaccccctaccctggggccggcgagggctggggcggcaacggggtcggcgatgacctctattcctacggctttgatggactgcatctctggacaggacacgtggcacgcccagtgacttccccagggcagcacctcctggcccctgaagacgtgatcagctgctgcctggacctcagcgtgccgtccatctccttccgcatcaacggctgccctgtgcagggtgtctttgagtccttcaacctggacgggctcttcttccctgttgtcagcttctcggctggtgtcaaggtgcggttcctccttggtggccgccatggtgaattcaagttcctgcccccacctggctatgctccatgccatgaggctgtgctccctcgagagcgactccatcttgaacccatcaaggagtatcgacgggaggggccccgggggcctcacctggtgggccccagtcgctgcctctcacacaccgacttcgtgccctgccctgtggacactgtccagattgtcctgccgccccatctggagcgcattcgggagaagctggcggagaacatccacgagctctgggcgctaacccgcatcgagcagggctggacctacggcccggttcgggatgacaacaagaggctgcacccgtgtcttgtggacttccacagccttccagagcctgagaggaactacaacctgcagatgtctggggagacgctcaagactctgctggctctgggctgccacgtgggcatggcggatgagaaggcggaggacaacctgaagaagacaaaactccccaagacgtatatgatgagcaatgggtacaagccggctccgctggacctgagccacgtgcggctgacgccggcgcagacaacactggtggaccgtctggcagaaaatgggcacaacgtgtgggcccgagaccgcgtgggccagggctggagctacagcgcagtgcaggacatcccagcgcgccgaaaccctcggctggtgccctaccgcctgctggatgaagccaccaagcgcagcaaccgggacagcctctgccaggccgtgcgcaccctcctgggctacggctacaacatcgagcctcctgaccaggagcccagtcaggtggagaaccagtctcgttgtgaccgggtgcgcatcttccgggcagagaaatcctatacagtgcagagcggccgctggtacttcgagtttgaagcagtcaccacaggcgagatgcgcgtgggctgggcgaggcccgagctgaggcctgatgtagagctgggagctgacgagctggcctatgtcttcaatgggcaccgcggccagcgctggcacttgggcagtgaaccatttgggcgcccctggcagccgggcgatgtcgttggctgtatgatcgacctcacagagaacaccattatcttcaccctcaatggcgaggtcctcatgtctgactcaggctccgaaacagccttccgggagattgagattggggacggcttcctgcccgtctgcagcttgggacctggccaggtgggtcatctgaacctgggccaggacgtgagctctctgaggttctttgccatctgtggcctccaggaaggcttcgagccatttgccatcaacatgcagcgcccagtcaccacctggttcagcaaaggcctgccccagtttgagccagtgccccttgaacaccctcactatgaggtatcccgagtggacggcactgtggacacgcccccctgcctgcgcctgacccaccgcacctggggctcccagaacagcctggtggagatgcttttcctgcggctgagcctcccagtccagttccaccagcacttccgctgcactgcaggggccaccccgctggcacctcctggcctgcagccccccgccgaggacgaggcccgggcggcggaacccgaccctgactacgaaaacctgcgccgctcagctgggggctggagcgaggcagagaacggcaaagaagggactgcgaaggagggcgcccccgggggcaccccgcaggcggggggagaggcgcagcccgccagggcggagaatgagaaggatgccaccaccgagaagaacaagaagagaggcttcttattcaaggccaagaaggtcgccatgatgacccagccaccggccacccccacgctgccccgactccctcacgacgtggtgcctgcagacaaccgcgatgaccccgagatcatcctcaacaccaccacgtactattactccgtgagggtctttgctggacaggagcccagctgcgtgtgggcgggctgggtcacccctgactaccatcagcacgacatgagcttcgacctcagcaaggtccgggtcgtgacggtgaccatgggggatgaacaaggcaacgtccacagcagcctcaagtgtagcaactgctacatggtgtggggcggagactttgtgagtcccgggcagcagggccggatcagccacacggaccttgtcattgggtgcctggtggacttggccactggcttaatgacctttacagccaatggcaaagagagcaacacctttttccaggtggaacccaacactaagctatttcctgccgtcttcgtcctgcccacccaccagaacgtcatccagtttgagctggggaagcagaagaacatcatgccgttgtcagccgccatgttccaaagcgagcgcaagaacccggccccgcagtgcccaccgcggctggagatgcagatgctgatgccagtgtcctggagccgcatgcccaaccacttcctgcaggtggagacgaggcgtgccggcgagcggctgggctgggccgtgcagtgccaggagccgctgaccatgatggcgctgcacatccccgaggagaaccggtgcatggacatcctggagctgtcggagcgcctggacctgcagcgcttccactcgcacaccctgcgcctctaccgcgctgtgtgcgccctgggcaacaatcgcgtggcgcacgctctgtgcagccacgtagaccaagctcagctgctgcacgccctggaggacgcgcacctgccaggcccactgcgcgcaggctactatgacctcctcatcagcatccacctcgaaagtgcctgccgcagccgccgctccatgctctctgaatacatcgtgcccctcacgcctgagacccgcgccatcacgctcttccctcctggaaggagcacagaaaatggtcacccccggcatggcctgccgggagttggagtcaccacttcgctgaggcccccgcatcatttctcgcccccctgtttcgtggccgctctgccagctgctggggcagcagaggccccggcccgcctcagccctgccatcccgctggaggccctgcgggacaaggcactgaggatgctgggggaggcggtgcgcgacggtgggcagcacgctcgcgaccccgtcggggcctccgtggagttccagtttgtgcctgtgctcaagctcgtgtccaccctgctggtgatgggcatctttggcgatgaggatgtgaaacagatcttgaagatgattgagcctgaggtcttcactgaggaagaggaggaggaggacgaggaggaagagggtgaagaggaagatgaggaggagaaggaggaggatgaggaggaaacagcacaggaaaaggaagatgaggaaaaagaggaagaggaggcagcagaaggggagaaagaagaaggcttggaggaagggctgctccagatgaagttgccagagtctgtgaagttacagatgtgccacctgctggagtatttctgtgaccaagagctgcagcaccgtgtggagtccctggcagcctttgcggagcgctatgtggacaagctccaggccaaccagcggagccgctatggcctcctcataaaagccttcagcatgaccgcagcagagactgcaagacgtacccgtgagttccgctccccaccccaggaacagatcaatatgctattgcaattcaaagatggtacagatgaggaagactgtcctctccctgaagagattcgacaggatttgcttgactttcatcaagacctgctggcacactgtggaattcagctagatggagaggaggaggaaccagaggaagagaccaccctgggcagccgcctcatgagcctgttggagaaagtgcggctggtgaagaagaaggaagagaaacctgaggaggagcggtcagcagaggagagcaaaccccggtccctgcaggagctggtgtcccacatggtggtgcgctgggcccaagaggacttcgtgcagagccccgagctggtgcgggccatgttcagcctcctgcaccggcagtacgacgggctgggtgagctgctgcgtgccctgccgcgggcgtacaccatctcaccgtcctccgtggaagacaccatgagcctgctcgagtgcctcggccagatccgctcgctgctcatcgtgcagatgggcccccaggaggagaacctcatgatccagagcatcgggaacatcatgaacaacaaagtcttctaccaacacccgaacctgatgagggcgctgggcatgcacgagacggtcatggaggtcatggtcaacgtcctcgggggcggcgagtccaaggagatccgcttccccaagatggtgacaagctgctgccgcttcctctgctatttctgccgaatcagccggcagaaccagcgctccatgtttgaccacctgagctacctgctggagaacagtggcatcggcctgggcatgcagggctccacgcccctggacgtggctgctgcctccgtcattgacaacaatgagctggccttggcattgcaggagcaggacctggaaaaggttgtgtcctacctggcaggctgtggcctccagagctgccccatgcttgtggccaaagggtacccagacattggctggaagccctgtggtggagagcgctacctggacttcctgcgctttgctgtcttcgtcaacggcgagagcgtggaggagaacgccaatgtggtggtgcggctgctcatccggaagcctgagtgcttcggacccgccctgcggggtgagggtggctcagggctgctggctgccatcgaagaggccatccgcatctccgaggaccctgcgagggatggcccaggcatccgcagggaccggcggcgcgagcactttggtgaggaaccgcctgaagaaaaccgggtgcacctgggacacgccatcatgtccttctatgccgccttgatcgacctgctcggacgctgtgcaccagagatgcatctaatccaagccggcaagggtgaggccctgcggatccgcgccatcctccgctcccttgtgcccttggaggaccttgtgggcatcatcagcctcccactgcagattcccaccctgggcaaagatggggctctggtgcagccaaagatgtcagcatccttcgtgccggaccacaaggcgtccatggtgctcttcctggaccgtgtgtatggcatcgagaaccaggacttcttgctgcacgtgctggacgtggggttcctgcccgacatgagggcagccgcctcgctggacacggccactttcagcaccaccgagatggcgctggccgtgaaccgctacctgtgcctggccgtgctgccgctcatcaccaagtgtgcgccgctctttgcgggcacagaacaccgcgccatcatggtggactctatgctgcataccgtgtaccgcctgtctcggggtcgttcgctcaccaaggcgcagcgtgacgtcatcgaggactgcctcatgtcgctctgcaggtacatccgcccgtcgatgctgcagcacctgttgcgccgcctggtgttcgacgtgcccatcctcaacgagttcgccaagatgccactcaagctcctcaccaaccactatgagcgctgttggaagtactactgcctacccacgggctgggccaacttcggggtcacctcagaggaggagctgcacctcacacggaaactcttctggggcatctttgactctctggcccataagaaatacgacccggagctgtaccgcatggccatgccttgtctgtgcgccattgccggggctctgccccccgactatgtggatgcctcatactcatctaaggcagagaaaaaggccacagtggatgctgaaggcaactttgatccccggcctgtggagaccctcaatgtgatcatcccggagaagctggactccttcattaacaagtttgcggagtacacacacgagaagtgggccttcgacaagatccagaacaactggtcctatggagagaacatagacgaggagctgaagacccaccccatgctgaggccctacaagaccttttcagagaaggacaaagagatttaccgctggcccatcaaggagtccctgaaggccatgattgcctgggaatggacgatagagaaggccagggagggtgaggaggagaagacggaaaagaaaaaaacggcgaagatatcacaaagtgcccagacctatgatcctcgagaaggctacaaccctcagccccccgaccttagtgctgttaccctgtcccgggagctgcaggccatggcagaacaactggcagaaaattaccacaacacgtggggacggaagaagaagcaggagctggaagccaaaggcggtgggacccaccccctgctggtcccctacgacacgctcacggccaaggagaaggcacgagatcgagagaaggcccaggagctactgaaattcctgcagatgaatggctacgcggttacaagaggccttaaggacatggaactggactcgtcttccattgaaaagcggtttgcctttggcttcctgcagcagctgctgcgctggatggacatttctcaggagttcattgcccacctggaggctgtggtcagcagtgggcgagtggaaaagtccccacatgaacaggagattaaattctttgccaagatcctgctccctttgatcaaccagtacttcaccaaccactgcctctatttcttgtccactccggctaaagtgctgggcagcggtggccacgcctctaacaaggagaaggaaatgatcaccagcctcttctgcaaacttgctgctctcgtccgccaccgagtctctctctttgggacagacgccccagctgtggtcaactgtcttcacatcctggcccgctccctggatgccaggacagtgatgaagtcaggccctgagatcgtgaaggctggcctccgctccttcttcgagagtgcctcggaggacatcgagaagatggtggagaacctgcggctgggcaaggtgtcgcaggcgcgcacccaggtgaaaggcgtgggccagaacctcacctacaccactgtggcactgctgccggtcctcaccaccctcttccagcacatcgcccagcaccagttcggagatgacgtcatcctggacgacgtccaggtctcttgctaccgaacgctgtgcagtatctactccctgggaaccaccaagaacacttatgtggaaaagcttcggccagccctcggggagtgcctggcccgtctggcagcagccatgccggtggcgttcctggagccgcagctgaacgagtacaacgcctgctccgtgtacaccaccaagtctccgcgggagcgggccatcctggggctccccaacagtgtggaggagatgtgtcccgacatcccggtgctggagcggctcatggcagacattggggggctggccgagtcaggtgcccgctacacagagatgccgcatgtcatcgagatcacgctgcccatgctatgcagctacctgccccgatggtgggagcgcgggcccgaggcacccccttccgccctgcccgccggcgcccccccaccctgcacagctgtcacctctgaccacctcaactccctgctggggaatatcctgagaatcatcgtcaacaacctgggcattgacgaggcctcctggatgaagcggctggctgtgttcgcacagcccattgtgagccgtgcacggccggagctcctgcagtcccacttcatcccaactatcgggcggctgcgcaagagggcagggaaggtggtgtccgaggaggagcagctggccctggaggccaaggcggaggcccaggagggcgagctgctggtgcgggacgagttctctgtgctctgccgggacctctacgccctgtatccgctgctcatccgctacgtggacaacaacagggcgcagtggctgacggagccgaatcccagcgcggaggagctgttcaggatggtgggcgagatcttcatctactggtccaagtcccacaacttcaagcgcgaggagcagaactttgtggtccagaatgagatcaacaacatgtccttcctgactgctgacaacaaaagcaaaatggctaaggcgggagatatacagtccggtggctcggaccaggaacgcaccaagaagaagcgccggggggaccggtactctgtgcagacgtcactgatcgtggccacactgaagaagatgctgcccatcggcctgaatatgtgtgcgcccaccgaccaagacctcatcacgctggccaagacccgttacgccctgaaagacacagatgaggaggtccgggaatttctgcacaacaaccttcaccttcagggaaaggtcgaaggctccccgtctctgcgctggcagatggctctgtaccggggcgtcccgggtcgcgaggaggacgccgatgaccccgagaaaatcgtgcgcagagtccaggaagtgtcagccgtgctctactacctggaccagaccgagcacccttacaagtctaagaaggccgtgtggcacaagcttttgtccaaacagcgccggcgggcagtcgtggcctgtttccgtatgacgcccctgtacaacctgcccacgcaccgggcatgtaacatgttcctggagagctacaaggctgcatggatcctgactgaagaccacagttttgaggaccgcatgatagatgacctttcaaaagctggggagcaggaggaggaggaggaagaggtggaagagaagaagccagaccccctgcaccagttggtcctgcacttcagccgcactgccctgacggaaaagagcaaactggatgaggattacctgtacatggcctatgctgatatcatggcaaagagctgccacctggaggagggaggggagaacggtgaagctgaagaggaggttgaggtctcctttgaggagaaacagatggagaagcagaggctcttgtaccagcaagcacggctgcacacccggggggcggccgagatggtgctgcagatgatcagtgcctgcaaaggagagacaggtgccatggtgtcctccaccctgaagctgggcatctccatcctcaatggaggcaatgctgaggtccagcagaaaatgctggattatcttaaggacaagaaggaagttggcttcttccagagtatccaggcactgatgcaaacatgcagcgtcctggatctcaatgcctttgagagacaaaacaaggccgaggggctgggcatggtgaatgaggatggcactgtcatcaatcgccagaacggagagaaggtcatggcggatgatgaattcacacaagacctgttccgattcctacaattgctctgtgaggggcacaataatgatttccagaactacctacggacacagacagggaacacgaccactattaacatcatcatttgcactgtggactacctcctgcggctgcaggaatccatcagcgacttctactggtactactcgggcaaggatgtcattgaagagcagggcaagaggaacttctccaaagccatgtcggtggctaagcaggtgttcaacagcctcactgagtacatccagggtccctgcaccgggaaccagcagagcctggcgcacagtcgcctatgggacgcagtggtgggattcctgcacgtgttcgcccacatgatgatgaagctcgctcaggactcaagccagatcgagctgctgaaggagctgctggatctgcagaaggacatggtggtgatgttgctgtcgctactagaagggaacgtggtgaacggcatgatcgcccggcagatggtggacatgctcgtggaatcctcatccaatgtggagatgatcctcaagttcttcgacatgttcctgaaactcaaggacattgtgggctctgaagccttccaggactacgtaacggatccccgtggcctcatctccaagaaggacttccagaaggccatggacagccagaagcagttcagcggtccagaaatccagttcctgctttcgtgctccgaagcggatgagaacgaaatgatcaactgcgaagagttcgccaaccgcttccaggagccagcacgcgacatcggcttcaacgtggcggtgctgctgaccaacctgtcggagcatgtgccgcatgaccctcgcctgcacaacttcctggagctggccgagagcatccttgagtacttccgcccctacctgggccgcatcgagatcatgggcgcgtcacgccgcatcgagcgcatctacttcgagatctcagagaccaaccgcgcccagtgggagatgccccaggtgaaggagtccaagcgccagttcatcttcgacgtggtgaacgagggcggcgaggctgagaagatggagctcttcgtgagtttctgcgaggacaccatcttcgagatgcagatcgccgcgcagatctcggagcccgagggcgagccggagaccgacgaggacgagggcgcgggcgcggcggaggcgggcgcggaaggcgcggaggagggcgcggcggggctcgagggcacggcggccacggcggcggcgggggcgacggcgcgggttgtggcggccgcaggccgggccctgcgaggcctcagctaccgcagcctgcggcggcgcgtgcggcggctgcggcggcttacggcccgcgaggcggccaccgcagtggcggcgctgctctgggcagcagtgacgcgcgctggggccgctggcgcgggggcggcggcgggcgcgctgggcctgctctggggctcgctgttcggcggcggcctggtggagggcgccaagaaggtgacggtgaccgagctcctggcaggcatgcccgaccccaccagcgacgaggtgcacggcgagcagccggccgggccgggcggagacgcagacggcgagggtgccagcgagggcgctggagacgccgcggagggcgctggagacgaggaggaggcggtgcacgaggccgggccgggcggtgccgacggggcggtggccgtgaccgatgggggccccttccggcccgaaggggctggcggtctcggggacatgggggacacgacgcctgcggaaccgcccacacccgagggctctcccatcctcaagaggaaattgggggtggatggagtggaggaggagctcccgccagagccagagcccgagccggaaccagagctggagccggagaaagccgatgccgagaatggggagaaggaagaagttcccgagcccacaccagagccccccaagaagcaagcacctccctcaccccctccaaagaaggaggaagctggaggcgaattctggggagaactggaggtgcagagggtgaagttcctgaactacctgtcccggaacttttacaccctgcggttccttgccctcttcttggcatttgccatcaacttcatcttgctgttttataaggtctcagactctccaccaggggaggacgacatggaaggctcagctgctggggatgtgtcaggtgcaggctctggtggcagctctggctggggcttgggggccggagaggaggcagagggcgatgaggatgagaacatggtgtactacttcctggaggaaagcacaggctacatggaacccgccctgcggtgtctgagcctcctgcatacactggtggcctttctctgcatcattggctataattgtctcaaggtgcccctggtaatctttaagcgggagaaggagctggcccggaagctggagtttgatggcctgtacatcacggagcagcctgaggacgatgacgtgaaggggcagtgggaccgactggtgctcaacacgccgtctttccctagcaactactgggacaagtttgtcaagcgcaaggtcctggacaaacatggggacatctacgggcgggagcggattgctgagctactgggcatggacctggccacactagagatcacagcccacaatgagcgcaagcccaacccgccgccagggctgctgacctggctcatgtccatcgatgtcaagtaccagatctggaagttcggggtcatcttcacagacaactccttcctgtacctgggctggtatatggtgatgtccctcttgggacactacaacaacttcttctttgctgcccatctcctggacatcgccatgggggtcaagacgctgcgcaccatcctgtcctctgtcacccacaatgggaaacagctggtgatgaccgtgggccttctggcggtggtcgtctacctgtacaccgtggtggccttcaacttcttccgcaagttctacaacaagagcgaggatgaggatgaacctgacatgaagtgtgatgacatgatgacgtgttacctgtttcacatgtacgtgggtgtccgggctggcggaggcattggggacgagatcgaggaccccgcgggtgacgaatacgagctctacagggtggtcttcgacatcaccttcttcttcttcgtcatcgtcatcctgttggccatcatccagggtctgatcatcgacgcttttggtgagctccgagaccaacaagagcaagtgaaggaggatatggagaccaagtgcttcatctgtggaatcggcagtgactactttgatacgacaccgcatggcttcgagactcacacgctggaggagcacaacctggccaattacatgtttttcctgatgtatttgataaacaaggatgagacagaacacacgggtcaggagtcttatgtctggaagatgtaccaagagagatgttgggatttcttcccagctggtgattgtttccgtaagcagtatgaggaccagcttagctgacacacccccagctggccctccacccccacctcaagtgccttattctcacagcaagccccttagtccccaagcccctccccctaaggcagctgggggagaggtgacctagtac

SEQ ID NO: 87045 - DNA, 621 bp, Homo sapiens
gtcctctgccggctgctgccaggtgaaggcatctccatgcccttccgttgggcagctggggcgggtggacctccagcttctgcccgacggggttcagatgaccgagatcctacgggattgccaatgtgtggggacggggggctttcaggggcgggaaaacatgtccccatccgtgggaagtggagccacgtggctccgacccagcaactttctagggagatcgaaagacaaagcctgccacggcgtccttggcggtgtgtgcctggcatgtgcgcggcgctccacgtgtcggcgtggaattacgggaatgtgctgcttttcagaaagagcgccccgcggtgcccttgcccgtcctcgtcggacgtgttaggttcaatgtcagctttctattcagagcaggtggttgtggacttggtgggctccagggacccagagcagcaggtgggctcaggagggggataggcatcccccattccagattctggaatacccagaagcaccatctggcagggaaggtggcgtgtcgggggagcccgctcccaggccagagacgcgtcccaccatctgcccaacagcccatcccctttccggacggtcccatctccactgcagctggaaccc

SEQ ID NO: 87046 - DNA, 432 bp, Homo sapiens
tagggcacctgtgggtgcaggcaagtaggtagctggattcaatgtccagcatactttaagtgttatatcaggagtgtctagtaataaagcctgatatttcaataagtgtccccctgtcattcactggtgtcctttagcttctaggattccttgtacttggtgtgggtttaaaaccttcagactggtcctaaagtcagtttattggctttatctaccaagagagcagttgcagcaactgccctgaggcatccaggccatcccaaagcgacatggtctaattgcttaaaaaaatatgccactggttggggaatatctcccaacttctatacaaggacacctaagggtgttccctgtttttcagtcatatagaggaaaaatggcttattaagattagggattcctatggctggagctgatcccaatttctctttg

SEQ ID NO: 87047 - DNA, 2078 bp, Homo sapiens; identical to SEQ ID NO: 65792

SEQ ID NO: 87048 - DNA, 665 bp, Homo sapiens
caacatatatacaaagtgctgagctcttgacactctgttagcatgacttctctgctttcattgaggaggaaagcagggcttagagaggctgacttccccaaagccagggcaaggcctgcaactctgacgtatgtgacccctgcactgtcttcaggtttaaactcagtccctggaacagaggcgccaattggagaaacagaaagtgcactcttagacagttgccagaatattgttacatgcatgaggagacttaggttttaaatttgcttttgtcctttttagggcgtttgaccctgatgaatatagtacctaggtatgaaaagcactgtgtgggcttgttagatgagaattcaatttgggttggcttttaggttagccttaaagttttctcttgttgaggtctaaagcaaatagaaatttatggagatgattcataggaatgaaaaaagttggactttagaattaagtaatagtggcaatctattgtcaacttatttttgacaagggtgccaagaccattcagtgacctttccaacaaatagcgctggcaaaagaatgaagttaggtccttgtttcacaccatgtggaaaaattaattcagaatggatcagagagctaagtgtaagagtcaaaactataaaacacttagaaataggagtaaatca

SEQ ID NO: 87049 - DNA, 726 bp, Homo sapiens
aagggtacctggcagcatattagaaaatagcttatgttacaacaaaaaccctataaaaacattcatcccagcaaaagcctccagggctggagggtgaggggaaaagtttcaaagcacgtggatagtccagatctgggatgccctgtcctcatccggctcccatagcaccacgtgggtcccggtcgtagccccggcctcccttcacgtccaggatctggccttcgaacatctggctgcaaatgtggcccgattcactgatgatccacgtttgggcgcggcaggcggctctcggcccacaacaccaccttggagcctgggctagggggtccaatcacctgtaggctcatggtgggggccatctggttcttcagcagcccatcctcgtagtaccagatgcagctacctccagcttgggggtcggcgaccaccacacggcctgctttcatgtcctccacatggtccggcactgccaggaatccccccagtgctgcattccagaggcggaaataaacccggcgctgtgttgaagagggttcctgacgggatggacactggactgtcagacatcagacatggctctgccataaatcagctggagctcttagatggtagcaaaagtaataatagtaataacaataatcacagctaacgtttgttgagagctgactcactcaagcactgttctaataatgttttacctacattatcttcagtcctcaaaacatg

SEQ ID NO: 87050 - DNA, 2697 bp, Homo sapiens
atgggaaactgggtggttaaccactggttttcagttttgtttctggttgtttggtaagggctgaatgttttcctgtttgtggatgccttcctgaaatatgagaaggccgacaaatactactacacaagaaaaatccttgggtcaacattggcctgtgcccgagcgtctgctctctgcttgaattttaacagcacgctgatcctgcttcctgtgtgtcccaatttcccttcatttcttgaggggcacctgctcattttgcagccgcacactgagaaagcaattggatcacaacctcaccttccacaagctggtggcctatatgatctgcctacatacagctattcacatcattgcacacctgtttaactttgactgctatagcagaagccgacaggccacagatggctcccttgcctccattctctccagcctatctcatgatgagaaaaaggggggttcttggctaaatcccatccagtcccgaaacacgacagtggagtatgtgacattcaccagcgttgctggtctcactggagtgatcatgacaatagccttgattctcatggtaacttcagctactgagttcatccggaggagttattttgaagtcttctggtatactcaccacctttttatcttctatatccttggcttagggattcacggcattggtggaattgtccggggtcaaacagaggagagcatgaatgagagtcatcctcgcaagtgtgcagagtcttttgagatgtgggatgatcgtgactcccactgtaggcgccctaagtttgaagggcatccccctgagtcttggaagtggatccttgcaccggtcattctttatatctgtgaaaggatcctccggttttaccgctcccagcagaaggttgtgattaccaaggttgttatgcacccatccaaagttttggaattgcagatgaacaagcgtggcttcagcatggaagtggggcagtatatctttgttaattgcccctcaatctctctcctgggaatggcatccttttactttgacctctgctccagaggaagatttcttcttcattcatatccgagcagcaggggactggacagaaaatctcataagggctttcgaacaacaatattcaccaattcccaggattgaagtggatggtccctttggcacagccagtgaggatgttttccagtatgaagtggctgtgctggttggagcaggaattggggtcaccccctttgcttctatcttgaaatccatctggtacaaattccagtgtgcagaccacaacctcaaaacaaaaaagatctatttctactggatctgcagggagacaggtgccttttcctggttcaacaacctgttgacttccctggaacaggagatggaggaattaggcaaagtgggttttctaaactaccgtctcttcctcaccggatgggacagcaatattgttggtcatgcagcattaaactttgacaaggccactgacatcgtgacaggtctgaaacagaaaacctcctttgggagaccaatgtgggacaatgagttttctacaatagctacctcccaccccaagtctgtagtgggagttttcttatgtggccctcggactttggcaaagagcctgcgcaaatgctgtcaccgatattccagtctggatcctagaaaggttcaattctacttcaacaaagaaaatttttgagttataggaataaggacggtaatctgcattttgtctctttgtatcttcagtaatttacttggtctcgtcaggtttgagcagtcactttaggataagaatgtgcctctcaagccttgactccctggtattctttttttgattgcattcaacttcgttacttgagcttcagcaacttaagaacttctgaagttcttaaagttctgaagttcttaaagcccatggatcctttctcagaaaaataactgtaaatctttctggacagccatgactgtagcaaggcttgatagcagaggtttggtggttcagagttatacaactaatcccaggtgattttatcaattccagtgttaccatctcctgagttttggtttgtaatcttttgtccctcccacccccacagaagatttctaagtagggtgactttttaaataaaaatttattgaataattaatgataaaacataataataaacataaataataaacaaaattaccgagaaccccatccccatataacaccaacagtgtacatgttatactgtcacttttgatatggtcttatacagagtgaacagcaatttattcttatttttgctcatcaaaaaataaaggattttcttcttcacttgaagaatgagtcttttgttacttatttttgggctctccatttgggaaagaaaatctagaaagtatgctcattgtaattgaaattgtattataattgcaagtcagctatactgtcatcttgtattattctgttaaaagcgattgtgaaaacttgaactccatgttaggatgacttatttagtcaagaggagctctttatcactattaagggagtttattaatgtctagtttaaaaaataacaatttataattttcatagatttttgtggactcctacctatatcgctaaggaatcattcagctaataacataagcaaaatgccttcattctctatcagaatgctttttatttctgccatctacccaacctcggc

SEQ ID NO: 87051 - DNA, 374 bp, Homo sapiens
aaagaattctagcaatactcaggcagaagtaggtcacctacaaagggaaaaaaacagtcaggctggccccagacttctctagagtaaccctagatgccagaagataatggaatagtgtctgctgggtattaagagaaagggaaacgtaacccaaaaattctgtaaccagccaaaacatcacgttgcttgtgaaagccactaacagacatttttgaacataagagcactcaaacaaccactcctgaaaaaactatttgataaacataatagatttaaatatattaaagctatagctttataatacccatagaactacaaactaccatgtttaatctattctaagatgtacctttttcacatttttgtctatctgg

SEQ ID NO: 87052 - DNA, 4004 bp, Homo sapiens
  misc_feature (1)...(4004): n = a,t,c or g
cttctacaacatcctgaaaacctgccggggccacaccctggagcggtctgtgttcagcgagcggacggaggagtcttctgccgtgcagtacttccagttttatggctacctgtcccagcagcagaacatgatgcaggactacgtgcggacaggcacctaccagcgcgccatcctgcaaaaccacaccgacttcaaggacaagatcgttcttgatgttggctgtggctctgggatcctgtcgttttttgccgcccaagctggagcacggaaaatctacgcggtggaggccagcaccatggcccagcacgctgaggtcttggtgaagagtaacaacctgacggaccgcatcgtggtcatcccgggcaaggtggaggaggtgtcactccccgagcaggtggacatcatcatctcggagcccatgggctacatgctcttcaacgagcgcatgctggagagctacctccacgccaagaagtacctgaagcccagcggaaacatgtttcctaccattggtgacgtccaccttgcacccttcacggatgaacagctctacatggagcagttcaccaaggccaacttctggtaccagccatctttccatggagtggacctgtcggccctccgaggtgccgcggtggatgagtatttccggcagcctgtggtgggacacatttgacatccggatcctgatgggccaagtctgttcaagttacacggtgaaacttctttaggaaggccaaagaaggagatttgcacagggntagaaatcccattcaaattccacatgctgcattcagggctggtccacggcctggctttctggtttgacgttgctttcatcggctccataatgaccgtgtggctgtccacagccccgacagagcccctgacccactggtaccaggtgcggtgcctgttccagtcaccactgttcgccaaggcaggggacacgctctcagggacatgtctgcttattgccaacaaaagacagagctacgacatcagtattgtggcccaagtggaccagaccggcttcaagtccagtaaccttctggatctgaaaaaccccttctttagatacacgggcacaacgccctcacccccacccggctcccactacacatctccctcggaaaacatgtggaacacgggcagcacctacaacctcagcagcgggatggccgtggcagggatgccgaccgcctatgacttgagcagtgttattgccagtggctccagcgtgggccacaacaacctgattcctttagccaacacggggattgtcaatcacacccactcccggatgggctccataatgagcacggggattgtccaagggtcctccggcgcccagggcagtggtggtggcagcacgagtgcccactatgcagtcaacagccagttcaccatgggcggccccgccatctccatggcgtcgcccatgtccatcccgaccaacaccatgcactacgggagctaggggcccgccccgcggactgacagcaccaggaaaccaaatgatgtccctgcccgccgcccccgccgggcggctttcccccttgtactggagaagctcgaacacccggtcacagctctctttgctatgggaactgggacacttttttacacgatgttgccgccgtccccaccctaacccccacctcccggccctgagcgtgtgtcgctgccatattttacacaaaatcatgttgtgggagccctcgtcccccctcctgcccgctctaccctgacctgggcttgtcatctgctggaacaggcgccatggggcctgccagccctgcctgccaggtcccttagcacctgtccccctgcctgtctccagtgggaaggtagcctggccaggcggggcctccccttcgacgaccaggcctcggtcacaacggacgtgacatgctgctttttttaattttatttttttatgaaaagaaccagtgtcaatccgcagaccctctgtgaagccaggccggccgggccgagcccagcagcccctctccctgagactcagaggcgccgcggggaaggggtggccccgccgagggcttcaggggccccctccccaccaaagggttcacctcacacttgaatgtacaaccccaccccactgtcgggaaaggcctccgtcccttggcccctgcctcttgctgctgtcctgtccccgagcccctgcaggtccccccccggaccccccactcaagagttaagagcaggtggctgcaggccttgggcccggagggaaggccactgccgggccacttggggcagacacagacacctcaaggatctgtcacggaaggcgtcctttttccttgtagctaacgttaggcctgagtagctcccctccatccttgtagacgctccagtccctactactgtgacggcatttccatccctcccctgcccgggaagggaccttgcagggacctctccctccaaaaaaagaaaaaaagaaaaagaaagaaaaaataaatgaggaaacgtgttgcagcacaggcagatttcttctccttctgctcccctgtttctcatacccccaaactcagatgctggagctcaggcccgccgtgtgtgcacccaggcaggagcgggcgctgtccaggctgggccgcccccttggctctccctcctgttccaggggagccataggagggaaagcaggtggcccgggggggatatgggggccccagccctgtcccaaagctccctgctcggctgcccctcgcccgcctttatataaattctctgaatcacctttgcatagaaaataaaagtgtttgctttgtaagaaaagtctggaaagtagcagaatcatctcaaggtgtcaaaggagccttcagtcatcgtctggggggcaggacaggcagaggggttggtccacttaggtgttgcctgtgggacccgggccttcctaggagggggccagggactgcggcaaggtaggggacagcgcgatgtttgagggcagagatgtgatttggggtggaggagccacgttctccggaggcagcgactggaagaagtacaacttacagcccatggccaggagggcgtggagcagcacgaccacggacagcagcactgtggccaccagcctggtgtcctcacggaccacgggccagagggtgaataccagcccggcggctgacaggcccagggccagcgccccaaagagccactgcagccaaggcacagggatgagccacaggaccaccatggggatgaagacaaagagggagtagccgtagatgcacacagtctccaggaaggtgtagggccccatgcgctcctggacacccttgcgccaccgcaggaagccccacagggccaggggcaccagccacgcatagcagtagatgctgatgcctgccacggtcaccttgtggaactgggggctgtagtggatggaggggtccctcctctgggccagcaccagcgtcaggttgccagtgacggccaggacaaaggccaatgtggcacagatccagaaggggccatacagatccggccgattccgcagatggtgccgcacaaagttgtggccaggccggggcagcagtgagcctttgatccggtccaggacctgtgaggtgtccacgtcaaagaagctctgatagtagctgaaggtccagaatcccggctgctgctgctgctgctgctcctgcaggagcgcggccttgtcactctcctcctccacctcatcctcggctccatagctgccacctgagcccacggccacagccacgtgcccttgtggggtcagctgatcgcttctgctggtggtggctgcatctggggtgtcagccagaagattagtggcctcctcgaattcatggaaggtcagctcgtcggccgatgccatggtcgttcaggggcgtctccgcatccctcgctggcgaccaactgcacccacggaggcttgaactcgtcgtcccgtccccacaggtgcgctccgccccccctcacctgaggccacctgggccggcgtg

SEQ ID NO: 87053 - DNA, 421 bp, Homo sapiens
tgcctgcagcctccggagccatgggaacagggctgcgaagtcagtccttgcgagagccccgaccctcctatggaaagctgcaggagccctgggggaggccccaggagggccaactccgcagggcgctaagcctcagacaggggcaagagaagtccaggtcccagggcctcgagagaggcacagaagggccagatgccactggccaggagcgggtgccggggagcctgggggacacagagcagctgatccagcccagcgaaaggcagccggtggtggctgaggcgggacccacagccaggaagaggaaggtggagagctaatgtcgcatctttctcagcgtgactctgagtcagccggctccccgagccacactgggcaccatagctaagatgctggagccattgtgccccttgctgtgctg

SEQ ID NO: 87054 - DNA, 1119 bp, Homo sapiens
cttttgccactacaacttcagggcccacttaattcatggattccacctttctctggaattttacaacagcagcagcaggctcaaattccaggactctcccagttctctttatcagctctagaccagtttgctggactgctcccaaatcagatacccttaacaggagaggccagttttgcccaaggagcccaggcaggccaagttgatcccttacagcttcaaaatgcctcaagagcaaggacagatgtttcaatactatccagtttacatggtcctaccctgggaacaacctcagcaaacagttccaaggtcacctcaacaaacaagacagcaacagtatgaggagcagataccattctatgctcaatttggatacattccacaactagcagaacctgctatatcaggaggacagcagcaactagcttttgatccccaactaggcacagctcctggaaattgctgttgatgtcaacaggagaagagataccatatttacaaaaagaagcgatcaactttagacatgacagtgcaggagttttcatgccctcaacttcaccaaaacccagcacaaccaatgttttcacttctgctgtagaccaaactattacccccagagctcccagaagaggaaggacaagactgacagcctaaggggaaccattaagaaggttgccctgattcattcagacattttggggaaaaagatgttggccatgccttggatataattttagggctattagccttcctccaatactagtatccagttctttggaatacatgaaatatcttgactcttctcctaaatttgtttttacttatacatgttattaaactctttaaatatgtcatagaaaataatacaatcatgtaatgagtcttgtcttacaaaattatatgtctcttcaaatatcctatcattgtataatatggaatataataacacagaataaagctagtatcattaaatcaattggataattgcattagtaaatgatgcctctgcaaaatggtagtacccatgaagatatgtatattgtcattggatgtatgatgagtgttgtgattggaactgatgaagtaaaataagtatctagatttgaaaaaaaaaaaaaa

SEQ ID NO: 87055 - DNA, 422 bp, Homo sapiens
  misc_feature (1)...(422): n = a,t,c or g
cctctttgttgaaaattagcggagcatatttatgtaggcctatttttgcgtcctctattctgttccattgatcacatatgctgagctctctaccagtaccacccagtcttgattactgtagctctaaataggctgtgaaatcaggtagaggaattcctcccttgttactgttttttaatcaaaattgatttaactcttctagtctctttgagtttccatttaatggtaggataatattttcaatgtcaacagagtcttcctgagattctgataagcccattatacctgtatagcaggtagaggagaattgacatctttaatatgttgaggtttccagtctatgaacttactgtatcttcgtatttatttatatcttctttcatccctctcattctggtaaanttagcacacctctcctatat

SEQ ID NO: 87056 - DNA, 416 bp, Homo sapiens
cataaatgcagggcctgcagatatgggaggtcaaatatacattctgtttagatggctctggtgataccaagcttaacatatctggctggaatcgctgatactgaacaaaacaactgaaggtattagaaaacttggtgtgtttcatgtaacagatatttttaaaaaggtacaatggatgactgtgaagaataattcatggtaaacttttataggattactataaatactttagtaacatacctgtggttatttaaaaaaaataagaaattgtatcatggatattggcataaaaaatgtgaatattatagattgtctgaatgttttatcaagacaggaaatgggggacaagtagaaaaacattgaaaaattatgacggattagatgcatgtttcactcttttggggaaaaccttatag

SEQ ID NO: 87057 - DNA, 419 bp, Homo sapiens
  misc_feature (1)...(419): n = a,t,c or g
tttgcagatatgttcttccattctgaaggctgcctctacactttgctccttcctttgctgtctagaagcttcttagcttgatgtaatcccatttttctattttttgctttgacttcctattcttttgcggtcctaccctaaaaaatctttgcccaaaccaatgtcctgtagcatttcttcagtgttttgttctagcagattcatacctttaggtcttacatttaaggcttgaattcattttgagtcgatacttgtatatgacgaaagatggcgatccgagtttatttttctgccaacagatatannnnnnnnnnnnnnnnnnnnnnnnnggagactctttatcaccccagtacgggttcttagcgcctttcctgaacacgacttggctcttagcacacccacatattttctgagttcgt

SEQ ID NO: 87058 - DNA, 7502 bp, Homo sapiens
cgagcacagtgtatctggccggagcagtgcttatggcgatgctacagctgaggggcatccggctggaccaggaagtgtcagctcaagcactggagccatcagcaccaccactgggcaccaggagggagatggctccgagggagaaggagaaggagaaactgaaggagatgtccacactagcaacaggctgcacatggtccgtctaatgctgttggagagattactgcagaccctgcctcaattacgaaacgttggcggtgtccgggccatcccatacatgcaggtcattctaatgctcactacagatctggatggagaagatgagaaagacaagggggccctagacaacctgctctcccagcttattgctgagttgggtatggataaaaaggatgtctccaagaagaatgagcgcagcgccctgaatgaagtccatctggtagtaatgagactcctgagtgtcttcatgtcccgcaccaaatctggatccaagtcttccatatgtgagtcatcttccctcatctccagtgccacagcagcagctctactgagctctggggctgtggactactgcctgcacgtgctcaaatcactgctggaatattggaagagccaacagaatgacgaggagcctgtggctaccagccagttgctgaaaccacatactacctcctccccacctgacatgagcccattctttctccgccagtatgtgaagggtcatgctgctgatgtgtttgaggcctatactcagcttctaacagaaatggtactgaggcttccttaccaaatcaaaaagattactgacaccaattctcgaatcccacctcctgtctttgaccactcgtggttttactttctctccgagtacctcatgatccagcagactccatttgtgcgccgtcaagtccgcaaacttctgctcttcatctgtggatccaaagagaagtaccgccagctccgggatttgcacaccctggactcttcacgtgcgtgggatcaagaagctgctagaagagcaggggatattcctccgggcaagtgtggttacagccagccctcagtccgccttgcaatatgacacactcatcagcctgatggagcacctgaaagcctgtgcagagattgccgcccagcgaaccatcaactggcagaaattctgcatcaaagatgacttcgtcctgtacttcctcctccaagtcagtttccttgtggatgagggcgtgtccccagtgctgctgcaactgctctcctgtgctctctgcggcagcaaggtgctcgctgcactggcagcctcttcgggatcctccagtgcttcttcctcctcagcccctgtggctgccagttctggacaagccacaacacagtccaagtcttccactaaaaagagcaagaaagaagaaaaagaaaaggagaaagatggtgagacctctggcagccaggaggaccagctgtgcacagctctggtgaaccagctgaacaaatttgccgataaggaaaccctgatccagttcctgcgttgtttcctgttagagtccaattcttcctcggtgcgctggcaggcccactgtctgacactgcacatctacagaaattccagcaaatctcaacaggagctcctgctagatctgatgtggtccatctggccagaactcccagcctatggtcgtaaggctgcccagtttgtggacctactaggatatttctccctgaaaactccacaaacagagaagaagttgaaggagtattcacagaaggctgtggagattctgcggactcaaaaccatattcttaccaaccaccccaactcgaacatttataacactttgtctggcttagtggagtttgatggctattacctggagagcgatccctgcctggtgtgtaataacccggaagtaccgttctgttatatcaagctgtcttccattaaagtggacacgcggtacaccaccacccagcaggttgtgaagctcattggcagtcacaccatcagcaaagtgacagtgaaaatcggggatctgaaacggaccaagatggtgcggaccatcaacctgtattataacaaccgaaccgtgcaggccatcgtggagttgaaaaacaagccagctcgctggcacaaagccaagaaggttcagctgacccctggacagacagaggtgaagattgacctgccgttgcccattgtggcctccaatctgatgattgagtttgcagacttctatgaaaactaccaggcctccacagagaccctgcagtgccctcgctgtagtgcctcggtccctgccaacccaggagtctgtggcaactgtggagagaatgtgtaccagtgtcacaaatgcagatccatcaactacgatgaaaaggatcccttcctctgcaatgcctgtggcttctgtaaatatgcccgcttcgacttcatgctctatgccaagccttgctgtgcagtggatcccattgagaatgaagaagaccggaagaaggctgtatccaacatcaatacacttttggacaaagctgatcgagtgtatcatcagctgatgggacaccggccacagctggagaacctgctctgcaaagtgaatgaggcagctccagaaaagccacaggatgactcaggaacagcagggggcatcagctccacttctgccagtgtgaatcgttacatcctgcagttggctcaggagtattgtggagactgcaagaactcttttgatgaactctccaaaatcatccagaaagtctttgcttcgcgcaaagagttgttggaatatgacctacagcagagggaagcagccactaaatcatcccggacctccgtgcagcccacattcactgccagccagtaccgtgccttatccgtcctgggctgtggccacacatcctccaccaagtgctatggctgcgcctcggctgtcacagaacattgtatcacactacttcgggccctggccaccaacccagccttgaggcacatccttgtctcccagggccttatccgggagctctttgattataatcttcgccgaggggctgcggccatgcgggaggaggtccgccagctcatgtgcctcctaactcgagacaacccagaagccacccaacagatgaatgacctgattattggcaaggtctccacagccctgaagggccactgggccaaccccgatctggcaagtagcctgcagtatgaaatgctgctgctgacggattctatctccaaggaggacagctgctgggagctccggttacgctgtgctctcagccttttcctcatggctgtgaacattaagactcctgtggtggttgaaaacattaccctcatgtgcctgaggatcttgcagaagctgataaaaccacctgctcccactagcaagaagaacaaggatgtccccgttgaggccctcaccacggtgaagccatactgcaatgagatccatgcccaggctcaactgtggctcaagagagaccccaaggcatcctatgatgcctggaagaagtgtcttcctatcagagggatagatggcaatgggaaagcccccagcaaatcagagctccgccatctctatttgactgagaagtatgtgtggaggtggaaacagttcctgagtcgtcgggggaagaggacctcccccttggatctcaaactggggcataacaactggctgcgacaagtgcttttcactccagcaacgcaggccgcacggcaggcagcctgtaccattgtggaagctctagccaccattcccagccgcaagcagcaggtcctggacctgcttaccagttacctggatgagctgagcatagctggggagtgtgcagctgagtacctggctctctaccagaagctcatcacttctgcgcactggaaagtctacttggcagctcggggagtcctaccctatgtgggcaacctcatcaccaaggaaatagctcgtctgctggccctggaggaggctaccctgagtaccgatctgcagcagggttatgcccttaaaagtctcacaggccttctctcctcctttgttgaggtggaatccatcaaaagacattttaaaagtcgcttggtgggtactgtgctgaatggatacctgtgcttgcggaagctggtggtgcagaggaccaagctgatcgatgagacgcaggacatgctgctggagatgctggaggacatgaccacaggtacagaatcagaaaccaaggccttcatggctgtgtgcattgagacagccaagcgctacaatctggatgactaccggaccccggtgttcatcttcgagaggctctgcagcatcatttatcctgaggagaatgaagtcactgagttctttgtgaccctggagaaggatccccaacaagaagacttcttacagggcaggatgcctgggaacccgtatagcagcaatgagccaggcatcgggccgctgatgagggatataaagaacaagatttgccaggactgtgacttagtggccctcctggaagatgacagtggcatggagcttctagtgaacaataaaatcattagtttggaccttcctgtggctgaagtttacaagaaagtctggtgtaccacgaatgagggagagcccatgaggattgtttatcgtatgcgggggctgctgggcgatgccacagaggagttcattgagtccctggactctactacagatgaagaagaagatgaagaagaagtgtataaaatggctggtgtgatggcccagtgtgggggcctggaatgcatgcttaacagactcgcagggatcagagatttcaagcagggacgccaccttctaacagtgctactgaaattgttcagttactgcgtgaaggtgaaagtcaaccggcagcaactggtcaaactggaaatgaacaccttgaacgtcatgctggggaccctaaacctggcccttgtagctgaacaagaaagcaaggacagtgggggtgcagctgtggctgagcaggtgcttagcatcatggagatttatacaagctgagcccaatgttgagcccctgagtgaggacaagggcaacctcctcctgacaggtgacaaggatcaactggtgatgctcttggaccagatcaacagcacctttgttcgctccaaccccagtgtgctccagggcctgcttcgcatcatcccgtacctttcctttggagaggtggagaaaatgcagatcttggtggagcgattcaaaccatactgcaactttgataaatatgatgaagatcacagtggtgatgataaagtcttcctgggactgcttctgtaaaatagctgctggcatcaaggaacaacagcaatgggcaccagctggaaggatcttgattctccagaaggggatcacccagaatgcacttgactacatggaaaaagcacatccctaggcggccaggatttgggatgccgacatcttggaaaagtttttgtcttcgcccagccttgccatttatcctaaggctgcttcggggcctggccatccagcaccctggcacccaggttctgattggaactgattccatcccgaacctgcataagctggagcaggtgtcccagtgatgagggcattgggaccttggcaagagaacctggctggaagccctgcgtgaacaccctgacgtaaacaagaagattgacgccagcccgcagggagacccgggcagagaagaaacgcatggccatggcaatgaggcagaaggccctgggcaccctgggcattgacgacaaatgaaaagggccaggtcgttgaccaaggacagcactccttgaagcagattgggaagagctgatcgaggagccttggcctcacgtgctgcatctgcagggagggatacaagttccagcccacaaaggtcctgggcatttataccttcacgaagcgggtagtccttggaggagtttgggagaataagccccgggaaaccagcagggctaccagcaccgtgtcccacttcaacattgtgcactacgactgcccatctggcttgccgtcagtttggctcgaggccgggaagagtgggagagtgccgccctgcagaatgccaacaccaagtgcaacgggctccttccggtctggggacctcatgtccctgaatcagcttttgccacttgcttggcaagacacaacacttacctccaggaatgtacaggccagcgggagcccacgtatcagctcaacatccacgacatcaaactgctcttcctgcgcttcgccatggagcagtcgttcagcgcagacactggcgggggcggccgggagagcaacatccacctgatcccgtacatcattcacactgggctttacgtcctgaacacaacccgagcaacttcccgagaagagaagaacctccaaggctttctggaacagcccaaggagaagtgggtggagagtgcctttgaagtggacgggccctactatttcacagtcttggcccttcacatcctgccccctgagcagtggagagccacacgtgtggaaatcttgcggaggctgttggtgacctcgcaggctcgggcagtggctccaggtggagccaccaggctgacagataaggcagtgaaggactattccgcttaccgttcttcccttctcttttgggccctcgtcgatctcatttacaacatgtttaagaaggtgcctaccagtaacacagagggaggctggtcctgctctctcgctgagtacatccgccacaacgacatgcccatctacgaagctgccgacaaagccctgaaaaccttccaggaggagttcatgccagtggagaccttctcagagttcctcgatgtggccggtcttttatcagaaatcaccgatccagagagcttcctgaaggacctgttgaactcagtcccctgaccaccacacagcagctgcggcggcgaagacgaagctggcttgccttccaccctctgttctccctccttgtgcattaagttccctccgcgggatgctgcattgttaccccgccctcccctctctcatttttcttggtgtggcttggggtttttaggcttcctgttttatctcgtgtgtgtggtgcaccagctatgaggttgtctgtaacccaagccatcaaagggcctgtacatacctaggagccatgagttgtcccggccagcttcatacttgagtgtgcacatcttgagaaataaacaagtgacttaacacacattgaaaaggaaggtgttgcctgctgcttcaactcgtcctcagtggcgcaggccaaatggtttcccttgaatgcacagccatttccggcgtcagcccgggaagactcatgtcagacccgctgtctccaggcctgttgtcagcgctaagtgcaacctgtctattcttggccagcaagttggggcaccacattggatggctctgatttttcccaaaacaaagcccatgccttgctcttaattttttggccttaagagctggaacccaaagacacgtggagcccagagctttcctagccctcggctgaaggaaggctcgcggagtagggc

SEQ ID NO: 87059 - DNA, 390 bp, Homo sapiens
  misc_feature (1)...(390): n = a,t,c or g
caaataaacaatctaactttatacctcaaggaactagaaaaataagaacaaaactgatcccaaggttagcagaaggaagaaaataacaacgattacacagaaataaagaaagactagatggacaatagaaaagttcaatgaaactgaggtttcttttgaaaaaatgaacaaaagtaatcaagttttatctaggctaaccaagagaaaaagagagaggagtcactgccatttctccatgtatacaataaagctaaaaatcaatgctatcccaaggatataattttatcactgatatcccaacaatataattttatttataaaattataaagaaaagtggagtcattacaactgataccacagaaatacaatgaaaggatggtaggagactn

SEQ ID NO: 87060 - DNA, 445 bp, Homo sapiens
gcgttttaatttcataatttaaaattatcttaaaaaattacatgttcttcatgactttgtgggtaaactctctcaaatatttaaggaaaaaatattattcttacatacattctttgagcaaatgaaggaagaaattaccttttccatctctcatgtgagtccagcataatgatcataccaaaagcacacaggacattctaaaaacaaaaacagaactataagtcaatgtcacccaaagcaaagatgcaaaaatactcaacaaaataccagcaaaccaaacttagcaatatataaaagcaatgttacagcatgacaaaatatggtttacctagaaactcaaggtttggattaacatttggaaattgattactataatttaccatattaatagaacatagaaaatcacataattttcccaaaagatgcagaatatggtttgataaaa

SEQ ID NO: 87061 - DNA, 581 bp, Homo sapiens
cccacgcgtccgaggatatggaagacctgaataatattctgtttatttactctatcagagaggagagctaaaatctccaactcttaattgtggactgatagagtaaataaacagaatattaataaggatatggaagacctgaataacactgcccaaccagattgatactgacatttataaaacacttcacccaaggacagcagaatacgttctctacgagtgcaaatggaatatttaccaagatcatattctagtccataaaacaagtctcagtataatttaaaagaagtgaaagtatgttctctgatcacaatagaattaaactagaaatgtctcaagaataattcctaggtatttggaaattgaagaaaatacttctcaataatcatgggttaaggaaataatcacaacagaagttagaaaatattttgaactcattgaaaatgaaaatagtacaggcaggtaacccagacagatttttgccaagtaaggacagttctggtatggacaggaatcatgcatgggactgggcccagtgaggactaccattcaaatttgttaaaagccactaaggccgtgcg

SEQ ID NO: 87062 - DNA, 557 bp, Homo sapiens
  misc_feature (1)...(557): n = a,t,c or g
gacgtcgatttgnacattccngggttgacctacgcgtccgctcgccctctgagattggcgggtaacctagcaacgcagggatcgcggcggttactgtggctagggaaacctggagcggtcagagcaggtggaaaaggagaactttgtgatccaagaactgaaaaaccacctgcaccaggtgctcaagttctcagagaacagcctcgttcgcactaagcaggaggctgagaagcagcagaaggccgatttccgggcatcacaggccagggtggccaagatccagcaggagatcctgcagctgcagtcacagttttacaacctggtcatggagaaccgggaggcagagcaggcgctgaggaagaagaaatataaagtggaaacggaaatcgagaactggatccagaaatatgatacagagatgggaggagttggaggatctggacgctgttcacagggaggagaagatctcgctggaggagctcaggcggaggcacanagtgctggtgggagagtttggcagatccgggaagagcgggagatcaactcccagaaaagga

SEQ ID NO: 87063 - DNA, 457 bp, Homo sapiens
ggttcgacccacgcgtccggttccaggccctgttccctgtgggccctgtgacccccagccacaggtggatgctcagatgctatggctctcgcaggcatatcctgcaggtatggtcagaacccagtgacctcctggagattccggtctcaggagcagctgataacctcagtccgtcacaaaacaagtctgactctgggactgcctcacaccttcaggattacgcagtagagaatctcatccgcatgggcatggccggcttgatcctggtggtccttgggattctgatatttcaggattggcacagccagagaagcccccaagctgcagctggaaggtgaacagaagagagaacaatgcaccattgaatgctggagccttggaagcgaatctgatggtcctaggaggttcgggaagaccatctgaggcctatgccatctggactgtctgctggcaattt

SEQ ID NO: 87064 - DNA, 2663 bp, Homo sapiens
gcccgtgggtcatggcctgccagcagtcgcggtaccacagcttctcgtccgcgtcgaggtaggcgctggcagggatgagggcagagatgagggtttgagtacttctagagagggaaatggcacttgatccggacctctgcacctcctgctggcctctgaccattgatctagggctccagcaccacagagtcaatggttagaatcgggctgatttagcccagtgaagacgttacgtgctagcaaaacgattacagccacggccttcaggagtgaccatagacgaatcctttctcacagaagacaagagcacccagaatcgcaagcttcttcagaaacgaaggacgctggagctgccagcagcacccctttcgcactgccaagccccagtacttggaggaactggaaaactacctacgcaaggagctcctcctgctggacctgggcacagattccacccagaaacgaaggacgctgcccaccaaagggagaagattcgggctctggagcccctgaaggccaagcttgtcactgtgaatgaggactgcaatgagaggatcctggccatgagagctgaggagaaatatgaaatctccctgctcaagaaagagaagatgaacttgctaaaactcatcgacaaaaagaatgaggagaagatttcattgcagagcgaggtgaccaaactgaggaagaacttggctgaggagtacctgcactacctcagtgagcgagatgcctgtaagatcctcatcgcagacctgaatgagctgcggtaccagcgggaggacatgtcattagcccagtcgccaggcatctggggggaggaccctgtgaagttaaccctggctcttaagatgacccggcaagacctgacccgcacgcagatggaactcaacaacatgaaggccaactttggagatgtggtccccaggagggactttgaaatgcaggagaagaccaacaaggatcttcaggagcaggtgctggcaggcaggcagggccaggagggtaggacggggtctcacaggtggggggccagggccaatgtccttgcccacagctggacaccctgagagccagctacgaggaggttcgcaaggagcatgagatcctcatgcagctgcacatgagcacgctgaaggaacgggaccaattcttctctgagctgcaggagatccagcgcacttccacgccgcggcctgactggaccaagtgcaaaggtgagggcagccggcagggccccaggtcctgcttacatgtgggcccagactccagctccctctccccacatgcagatgtggtggctgggggcccagagcgctggcagatgctggctgagggcaagaacagcgaccagctggtggacgtgctcctggaagagattggttcggggctgctgcgggagaaagacttcttccctggtctggtaggggaggccccaggagtggggcttgggccagagtcagaacagccatgccctgctgctcagacaagcttttggggaaccaactggggatcttccctgattgggggtggggccacagatgggtccagagatgagctgatatcctccctcctagggctatggggaagccatccctgcttttcttcggtttgatggcctcgtggagaacaagaagccaagcaagaaggacgtggtcaacctcctcaaggatgcctggaaggaacgtcttgctgaggagcagaaagagacgttcccagatttcttcttcaatttcctggagcatcgctttgggcccagtgatgccatggcctgggcttatactatttttgaaaatatcaagatcttccactccaacgaggttatgagtcagttctatgcagtcttgatgggaaagcggagtgagaatgtgtatgtcacccagaaggagacagtagcccagctgctgaaggagatgacaaatgctgacagtcagaacgaggggctactaaccatggagcagttcaacactgtcctcaagagtaccttccctctcaagacagaagagcaaatccaggagctgatggaggcagggggctggcatcccagcagcagcaatgcagacttgctcaactaccgctcactgtttatggaggatgaggagggccagagtgagccctttgtgcaaaaactctgggaacaatacatggatgagaaggacgagtacttacagcagctaaagcaggagcttggcatagaactccatgaggaagtgactctgcccaagctgcgagggggcctgatgaccatcgaccccagcctggacaagcagacagtgaacacctacatgagccaggccttccagctccctgagtcggaaatgccagaggagggtgacgagaaggaagaagccgtggtggaaatcctccagactgccctggagcggcttcaggtgattgacatcaggcgtgtgggacctcgagagccagagcctgcaagctaggaacttgtgggcagcctgcgtactccagtcctgctaacccctagcttttaatataaaagtgtttgtctgaatccatgccattctccagactgtgctggggagttgtgggggggaatcagtccctgcctggctggccccaggacatgcacaaaaatgaagaatattctgtttatgacactttattgatgctgggggggtggggagaattccaccaggtgaatg

SEQ ID NO: 87065 - DNA, 437 bp, Homo sapiens
aatgtctttaattcattttgagttcttttctgtatatggtatgagacaaaggtctgatttgattcttctatatgtggatatacaactttcccaacaccatttactgaagaggctgtcctttctccattgtacgttcttggtacctttgtcaaaagccactttaacgtaaatgtctgggtttatttgtaattctcatttgttgtaatgtttttctctgcttttgtgatcagggtaatgctagcctcgtaattggaatatgttttctccccttctatttaatgaactaattgtgtagaattgatattgtttcttccttgattgtttggtagaatccaccattgaaaccatgtaggcctacagtttttatctttaggagggttataactttcaatttaacttatttactagaaatagagctattcaggttttcttggcag

SEQ ID NO: 87066 - DNA, 539 bp, Homo sapiens
  misc_feature (1)...(539): n = a,t,c or g
acccgaggcccagagaaggtgcaggaaggcccactgccccgggcagggaatggggctgtccttcagatggagggtgccagggcagaggctgtgttcatgcaggcctgaggctaagccctggtgcagcactggccactgtgctgtgtcggggaccacatagcgaccagaaggagggatgcaccagctttcacattccgacggacgccatgggtcctggcatggctccattcttgagccctggtcactaaaaatagccccgtcgcctgccagcgggtgtgaggaattcaccagctggctggggatgggggtctgtggagagaggccaggcgaagggaaggttgcgtggggagggccctccatggaggggaatgtaaccgtcgagctggtcctggccctatggggctccttgtaatacaaagcatcttgtcagcaatttggtgaccctgttcccacttgtcgggggggaccctgaggctcagagacagcggngggcttgcccaggtcacacggtttccgtgggaaagatcagccctcctgaa

SEQ ID NO: 87067 - DNA, 1041 bp, Homo sapiens
cggacgcgtggggtgattgggggggcttccctgatgagtcctcatggagggtgctgaggcagggaacaggggtgcagggacagtgatcagggcacctggtaccctgaccaacttgatgatggcatctcttttaagatgcccaagtctgcgcacttttattcctttattcggcccctagcaccccctccccaccccaaagaaggtcagttgcatgcgtgtggggatgtagctcaaaaaagaaataagatggagtggaaaggaaagaaaggaagaagcaggaattcaaggtgggtgggctgagcttggggccacctagcccacctgctccaatcaagggctggaacaaacctgaggccacttggagaggcagggctgggcagggacagggggtgggggccgaaatcacagcttccccatcagagccagatgtgtgaaggaaatgtcccagatggcagtagtttctcggcaaggaggggaatcctggagatggttcatgtctgtgatcccagtgctttgggaggctgaggtgggaggattgcttgagcccgggagttccagaccagccctgggcaacacggcgagaccccatctctacagaaattaaaaaaaaaaattagccagttgtgtgtcaagcacctgtagtcccagctacttgggaggctgagttgggaggcttatctgagcccaggaggttgaaggctgcaatgagccatgattacactactgtaccccagcctgggcaacagagcaagaccctgcctcaaaattaagaaaaaaaaaaggggggccaggcgcagtgcttatgcctgttatcccagcactttgggaggccaaggcagactgatcgcttgaggccaggagtttgcgaccagcctggccaacatagcaaaaccccatctctactaaaaatacaaaaattagtcaagagtggatggtgcgtgcctgtaatcccagctacctgggaggctgagacaggagaattgcttgaacctgggaggcagaggttgcagtggtgtgagatcacgccactgcattccagac

SEQ ID NO: 87068 - DNA, 1391 bp, Homo sapiens
ttttttttttttctactttaaaattacattttatttctctttatgaatatttgctttttgttttttgtaaaaaaaaaaaaggttcattttacatcttcttcaagagtcttgtgcctcctggtaagtgcattggtttgtttcacagtactctccacgaccaaggacggttcttattgctggaaggagtgagtggatgtccacgccagggcggggcatggagagaacataagaagaaatcgggggccctggcaggaaaccctggggcctgtgctcccaaacatgaagcaaggaggctgaaggagcaagaccggggctcagctgagcgtccgtggccggacctgcagcctctccagggtgttcctagcccttcttcggtgaggaagggcagaaagaaggggcacgggtgaaggtgggtcagggggcaaggtgggctgggggccgggcatgcagtgggaggggtgctggctcctgcctcgagtgtttgctctcactcaagaaatgcgggttcgggggtccttcaccccctagcagctcaggaagcccctttccattctggtctccagccccacctccaggaataaaccagcggcctgagacccgcttcctgaacccccagggtcctgtccctgctttagtgcaacaaagacctgagtggagaagtctccagtgaatgaaagctgagtcccagccctgtccccacccatcctcagacatgcagctgggacccactgttcccctaaggctactgcctttcggggtggcacggcctccatcctcacaagagaacctgcagtttctgcggggaggtcctggcccccatcaggggccccctgagcaccgtgccagccggcagctccagcccagtgtgtcccaggacagcctcctggcacgagctgggcccggagaccgacggcagtggctaaacggtcattaagcaccccttgaataaacgcaatagcccgtggacaaaggagcagggcagggactttggttcccacaccgtcccacgctgtcacggagactcttacaagtggctcatctgcagcagaaatggattatttttctaaatggacggttttctgtgcttgataattattaggctgagtgtgggtcccgggcgggtagctgtgggtttggcaagctggaaggagcgtggcttcagcgggatgtcccctaatagcccctgcaagtggccacaaggccgacactgctcagaaccctggcacaatgggtcaggactaagtaagccctggagctccagtgacctgggaccaagggagggcaggtcccagggatgggcttccagacgtctgtcctcacctgtcgctctccactgtgccagcccagcctccagagtggctctgaacccgaattccacgacactggactag

SEQ ID NO: 87069 - DNA, 1090 bp, Homo sapiens
tcctcttgtcccggaatgagcatgcctgccctttgcaagcaggtttgggtctcacgcagaggaaaccaaaagcaataagagggagggaaggcagagcaaccaatcaagggcagggtgagactcaaaacgagcgggctccctggggagccagacagaggctgggggtgatggcggagctacagcagctgcaggagtttgagatccccactggccgggaggctctgaggggcaaccacagtgccctgctgcgggtcgctgactactgcgaggacaactatgtgcaggccacagacaagcggaaggcgctggaggagaccatggccttcactacccaggcactggccagcgtggcctaccaggtgggcaacctggccgggcacactctgcgcatgttggacctgcagggggccgccctgcggcaggtggaagcccgtgtaagcacgctgggccagatggtgaacatgcatatggagaaggtggcccgaagggagatcggcaccttagccactgtccagcggctgccccccggccagaaggtcatcgccccagagaacctaccccctctcacgccctactgcaggagacccctcaactttggctgcctggacgacattggccatgggatcaaggacctcagcacgcagctgtcaagaacaggcaccctgtctcgaaagagcatcaaggcccctgccacacccgcctccgccaccttggggagaccaccccggattcccgagccagtgcacctgccggtggtgcccgacggcagactctccgccgcctcctctgcgtcttccctggcctcggccggcagcgccgaaggtgtcggtggggcccccacgcccaaggggcaggcagcacctccagccccacctctccccagctccttggacccacctcctccaccagcagccgtcgaggtgttccagcggcctcccacgctggaggagttgtccccacccccaccggacgaagagctgcccctgccactggacctgcctcctcctccacccctggatggagatgaattggggctgcctccacccccaccaagatttgggcctgatgagcccagctgggtgcctgcctc

SEQ ID NO: 87070 - DNA, 1785 bp, Homo sapiens
tggaattcaaagatacaaagtagatgtcaccttgaaaatttcaagatttatttaattaataagcaaaatttgaaaaggaataagaactttttatttcagaggtgaatggttactatcagcatttactaacattccttatgagaactcagatattaagcattccaaaccataatatgattaacacaacatggtaagtgttacgttcactcgttattatacaactatcagtatgtaatgaacaacattgcccaggacattatgcctagcatttaattgagcactctacaatgtgttgtgacaggaagcagttttacgtggatgtctgcacaaacctgaatttaaaaccagacctgttttgagcttcagctttattcatcagtaaaatatttacagtaagctcatgtgtttggagatgacagagaaagctttgctacaagatctgtctaaagggttaatcaggccacttgagtcaataacacattaaagctctctgcacagcaaatgtgtgtgtctgttatttatgtatgtatgaatgatttctttgtttttttttattccagtcaaatgtttatgaaacctccagattgcctcgttaaatccttaaccttggtgaaatggtttgggaaaatgcaggtctgggctataagtttagctttttctttagtcactactttagatttcacagaataactggaagtgtacatggtaattttatagatctttttctttatggaatcctgtatttcttggcattagacgtcaacttcagattttgagaaggaatgtatttgctaagagtaatacagaaatgcttgttatgatatttctgtattaataacaagccatgctcaaaatgtggtttcatccagtttgaccattaagccctcagcactcagggacatgactaaaggcactcacatggaagaacggcagttcataacactgggaataaacaagtggaacagcgggaatcaggcagtgtgtttattgaggtacatcttcaggcagtactgggattagcaattaggtattcatatgaattcagtttgtgagaggattccatcaatggctcttcaaatttaagcagcaaaggccaccactaactcctaaaatatagtgatctttaataccagtttatttgaatggggaaaatttgccacacattttctcgttttcttcttcttgtaattttagagcagcaggagcattttaaaagttatactcaccaagcctgggcaaggtggtgagaccctgtctacatgaaaaataaaaaaactagccgggcatggtggtgcacacctgtggtcccagctactcaggagcctgaggcaggaggatggcttgagcccaggaatttgaggccagcctgggtaacatagcaagacccatgtctctttaaaaaataaaattaaaaagggtatatcataaattcgcgtatgttaaaactattctctaatgcaagatatttttctaaacatttagaaattgaaatgtggtccggcacagtggctcatacctgtaatcccagcagtttagggggctgaggcaaaaggattgcttgaaggaaggagtttgagaccaccctggacaagtgtagtgagacctcgtctctacaaaaataataataataataataataacaacaactagccaggtgtggtaatgaggacctgtagtcctgtctactcaggaggcaagatctttgagcccaggagtttgaagctgcagtgagccaggagcttgctattgtactccggactgggagtctacctcttaaaaaaaaaa

SEQ ID NO: 87071 - DNA, 5988 bp, Homo sapiens
  misc_feature (1)...(5988): n = a,t,c or g
atgagttctgactcagaattggctgtttttggggaggctgctcctttcctccgaaagtctgaaagggaacgcattgaggcccagaataggccctttgatgccaaaacatctgtctttgtggcggagcccaaagaatcctttgtcaaagggaccatccagagcagagaaggaggaaaagtgacggtgaagactgagggaggagcgactctgacagtgaaggatgatcaggtcttccccatgaaccctcccaaatatgacaagatcgaggatatggccatgatgactcatctgcatgagcctgctgtgctgtacaacctcaaagaacgttatgcagcctggatgatctacacctattcaggtctcttctgtgtcactgtcaacccctacaagtggctgcctgtgtataagcccgaggtggtgacagcctaccgaggcaaaaagcgccaggaggccccgccccacatcttctccatctctgacaacgcctatcagttcatgctgactgaccgagagaatcagtcaatcctgatcactggagaatctggtgcagggaagactgtgaacaccaagcgtgtcatccagtactttgcaacaattgcagttactggtgagaagaagaaggaagaaattacttctggcaaaatacaggggactctggaagatcaaatcatcagtgccaaccccctactggaggcctttggcaacgccaagaccgtgaggaatgacaactcctctcgctttggtaaattcatcagaatccactttggcactactggaaaactggcatctgctgatattgaaacatatctgctagagaagtctagagttgttttccagcttaaggctgagagaagttatcatattttttaccagattacatcgaataagaaaccagaacttattgaaatgcttctgattaccacgaacccatatgattacccatttgtcagtcaaggggagatcagtgtggccagcatcgatgatcaggaagaactgatggccacagatagtgctattgatattttgggctttactaatgaagaaaaggtctccatttacaagctcacgggggctgtgatgcattatgggaacctaaaatttaagcaaaagcagcgtgaggagcaagcagagccagatggcacagaagttgctgacaaggcggcctacctccagagtctgaactctgcagatctgctcaaagctctctgctaccccagggtcaaggtcggcaatgagtatgtcaccaaaggccagactgtagaacaggtgtccaacgcagtaggtgctctggccaaagccgtctacgagaagatgttcctgtggatggttgcccgcatcaaccagcagctggacaccaagcagcccaggcagtacttcatcggggtcttggacattgctggttttgagatttttgatttcaacagcctggagcagctgtgcatcaatttcaccaatgagaaactgcaacagtttttcaaccaccacatgttcgtgctggagcaggaggagtacaagaaggaaggcatcgagtggacgttcatcgacttcgggatggacctggctgcctgcatcgagctcatcgagaagcctatgggcatcttctccatcctggaagaggagtgcatgttccctaaggcaacagacacctccttcaagaacaagctgtatgaccagcacctgggcaagtctgccaacttccagaagcccaaggtggtcaaaggcaaggccgaggcccacttcgctctgattcactatgctggtgttgtggactacaacattactggctggctggagaagaacaaggaccccctgaatgagaccgtggttggactgtaccagaagtctgcaatgaaaactctagctcagctcttctctggggctcaaactgctgaaggagagggagctggtggaggggccaagaaaggtggtaagaagaagggctcttctttccagacagtgtctgcccttttcagagagaatttgaacaagctgatgaccaacctcaggagtacccatcctcactttgtgaggtgtatcatccccaatgagacaaaaactcctggtgccatggagcatgagcttgtcctccaccagctgaggtgtaacggtgtgctggaaggcatccgcatctgtaggaaaggatttccaagcagaatcctttatgcagacttcaaacagagatacaaggtattaaatgcaagtgcaatccctgaagggcaattcattgatagcaagaaggcctctgagaagctccttgcatccatcgacattgaccacacccagtataaatttgggcacaccaaggtctttttcaaagctggtcttctggggctcctagaggagatgcgagatgacaagctggcccagctgattacccgaacccaggccaggtgcagagggttcttggcaagagtggagtaccagaggatggtggagagaagggaggccatcttctgtatccagtacaatatcagatccttcatgaatgtcaagcactggccctggatgaaactcttcttcaagatcaagcctctgttgaagagtgcagaaactgagaaggagatggccaccatgaaggaagaatttcagaaaattaaagacgaacttgccaagtcagaggcaaaaaggaaggaactggaagaaaagatggtgacgctgttgaaagaaaaaaatgacttgcagctccaagttcaggctgaagccgaaggcttggctgatgcagaggaaaggtgtgaccagctaatcaaaaccaaaatccagctagaagccaaaatcaaagaggtgactgagagagctgaggatgaggaagagatcaatgctgagctgacagccaagaagaggaaactggaggatgaatgttcagaactcaagaaagacattgatgaccttgagctgacactggccaaggttgagaaggagaaacatgccacagaaaacaaggtgaaaaacctcacagaagagatggcaggtctggatgaaaccattgctaagctgaccaaggagaagaaggctctccaggaggcccaccagcagaccctggatgacctgcaggcagaggaggacaaagtcaacaccctgaccaaagctaaaatcaaacttgaacaacaagtggatgatcttgaagggtccttggagcaagaaaagaaacttcgcatggacctagaaagggctaagaggaaacttgagggtgacttgaagttggcccaagaatccataatggacattgaaaatgagaaacagcaacttgatgaaaagctcaaaaagaaagagtttgaaatcagcaatctgcaaagcaagattgaagatgaacaggcacttggcattcaattgcagaagaaaattaaagaattgcaagcccgcattgaggagctggaggaggaaatcgaggcggagcgggcctcccgggccaaagcagagaagcagcgctctgacctctcccgggagctggaggagatcagcgagaggctggaagaagccggtggggccacttcagcccagattgagatgaacaagaagcgggaggctgagttccagaaaatgcgcagggacctggaggaggccaccctacagcatgaagccacagcggccaccctgaggaagaagcatgcagatagtgtggccgagcttggggagcagattgacaacctgcagcgagtgaagcagaagctggagaaggagaagagtgagatgaagatggagattgatgaccttgctagtaatgtagaaacggtctccaaagccaagggaaacctagagaaaatgtgccggactctagaggaccaactgagtgaactgaaatcaaaggaagaggagcagcagcggctgatcaatgacctgactgcgcagagggggcgcctgcagactgaatctggtgagttttcacgccagcttgatgaaaaggaagctctggtgtctcagttatcaagaggcaaacaagcctttactcaacagattgaagaattaaagaggcaacttgaagaggagataaaagccaagaacgccctggcgcatgccctgcagtcttcccgccacgactgtgacctgctgcgggaacagtatgaggaggagcaggaatccaaggccgagctgcagagagcactgtccaaggccaacaccgaggttgcccaatggaggaccaaatacgagacggacgccatccagcgcacagaggagctggaggaggccaagaagaagctggcccagcggctgcaggcagctgaggaacatgtagaagctgtgaacgccaaatgtgcttccctcgaaaagacgaagcagcggctgcagaatgaggtcgaggacctcatgcttgatgtggagaggacaaatgccgcctgtgccgcccttgacaaaaagcaaaggaacttcgataagatcctggcagaatggaaacagaaatgtgaggaaacgcatgctgagcttgaggcctcccagaaggaggcccgttcccttggcactgagctgttcaagataaagaatgcctatgaggaatctttggatcagctagaaaccctgaagcgagagaacaaaaacttacagcaggagatttctgacctcacggaacagattgcagaaggagggaaacgtatccatgaactggagaaaataaagaaacaagtggaacaagaaaagtgtgaacttcaggctgctttagaagaagcagaggcatctcttgaacatgaagagggaaagatcctgcgcatccagcttgagttgaaccaagtcaagtctgaggttgataggaaaattgctgaaaaagatgaggaaattgaccagctgaagagaaaccacattagaatcgtggagtccatgcagagcacgctggatgctgagatcaggagtaggaatgatgccattaggctcaagaagaagatggagggagacctcaatgaaatggaaatccagctgaaccatgccaaccgcatggctgctgaggccctgaggaactacaggaacacccaaggcatcctcaaggatacccagatccacctggatgatgctctccggagccaggaggacctgaaggaacagctggccatggtggagcgcagagccaacctgctgcaggctgagatcgaggagctgcgggccactctggaacagacagagaggagcagaaaaatcgcagaacaggagctcctggatgccagtgagcgtgttcagctactgcacacccagaacaccagcctgatcaacaccaagaagaagctggagacagatatttcccaaatgcaaggagagatggaggacattctccaggaagcccgcaatgcagaagaaaaggccaagaaggccatcactgatgccgccatgatggctgaggagctgaagaaggagcaggacaccagcgcccacctggagcggatgaagaagaacatggagcagaccgtgaaggatctgccagcntccgtctggatgaggcttaagccagctggccttgaagggtgggaagaagcagattccagaaaactggaggcccagggtacgggagctggaaggagaggttgagaagtgagccaaaggcgttaatgctgagggctgtcaaagggtctgcgccaaacattgagaggccgagtgaaggaactcactttaccagaccggaaggaagatagaaagaatattctcaggcttcaagatttggtagataaacttcaggcaaaagtgaaatcttataagagacaagctgaggaggctgaggaacaatccaacaccaatctagctaaattccgcaagctccagcatgagctggaggaggccgaggaacgggctgacattgctgagtcccaggtgaacaaactgcgggtgaagagccgggaggttcacacaaaagtcataagtgaagagtgatcatgtcctgatgccatggaatgactgaagacaggcacaaaatgtgacatctttggtcatttccctctgtaattattgtgtattctaccctgttgcaaaggaaataaagcatagggtagtttgcaaacaataaaaaaaaaaaaa

SEQ ID NO: 87072 - DNA, 430 bp, Homo sapiens
gggccgagtgggagccgctccagccaggcctgggcagtgacctctttctcttgccccccagccacgaccagcgcttcttcctgaagacccaggggcgccaagaggtgcaggctctgctcgcccacctgccccgctacgtgcagcacctgcagcggcacccgcactcgctgctggcgcggttgctgggagtgcacagtctgcggatggaccggggaaagaagacgtacttcatcgtcatgcagagcgtgttctaccccgccgaccgcatgtacgagaggtatgacatcaaaggctgcgaggtgaaccgctgggtggatcccgcccctgagggccaccccctttgtctggtgctgaaagacctccacgtatgacggcatgaaccctaaacttgggccccaaacggacctggatcttccctcaaatgagcaac

SEQ ID NO: 87073 - DNA, 825 bp, Homo sapiens
aagcttggcacgaggcctcgtgccaaaaaatgggggcttgggggactcagagaaggcaggcaaggcctggagtgcatagcagatggcctcgggaagaaggaatgaggaaggacaggatccggagagggtgctcccaggaggagcgatggggcagcgggtcctggaggggcggcacggttcaggcgggtgtcaccgcacctcacacccgagcagccgtggccaccaggtggccgccctggccctgctcccctcaggctggtgttgtccacagggaacaccatgaccgtgtcctacatgtcagggctgacgctggggtccgccgtggcctactgcacctacagcctcacccgcgacgctcacggcagctgcctgcacgcctccaccgccaatggttccatcctcgcaggcctctgagccagccccgcccactgccagggacgccgagggcctgaccaggggccccgaggcctgagggcccctcccctgtccccacctcagtgcctgcggggccctgagcctccccctgtgccagcagccccactccctcagggtccagccatgccccaccctggactgaagttctgcaaagtcctccgaggaccggaacacgtttctgcgacccggggctctggccagcactgtgttctgcgtttggtctcatacctgcgtctaccttccatctgtgtccagcgggccccggctccagcccagccatcactctgcagggtcacacgcgccgcgtgcccacccaagacagcatacacccgccatagagtgccccccagcgatggcaccctgccctgatcaccatcggatctgatgggg

SEQ ID NO: 87074 - DNA, 398 bp, Homo sapiens
agagaagatggcggaagcggagtgagtgactagatggtgactgatgtcgtaactagggggggcgagttggggcagcgacacgttcccccaggggaaagctcagggctcttttgcgggcagtgtggggaaagagagactcgagacccgtcctatcgtggaggagccggctaggcccgtgtcgcggggcgaagacgaactctagggtccagttaccctccaggcaggagcgccccttccgccatcaggtcccggatctgcgcggccctgcgcgcagggtcacccttgggactccgggagctggggttttccggggaacgagcccgggtgggctcctcaggcgctgtcattcctgcaagtgggccccgcgggcagccttgctacggctgcctgcgcagggg

SEQ ID NO: 87075 - DNA, 414 bp, Homo sapiens
agcagagccttcccagacacctcctgcttcactgttgcctcgatgtagtttggactacacacaagttacttgattctcatagtactccttttgataaaatggcatcatgaaagaccgcatggcatcctttcccgtggaccaaaagatgacctggtaagggataaggtaaattgtatgtttctgggtccttctaaaggcctctggcatcttcttcatgtcactgaatgtaagttccacatggttataggacataaggatgctcttgcttttgctgaccatcactctgccaccctctgagcgattcttgttgaatgctttagtctctcctgtatactctcattttgatgcccttttgcatagctgcttttccatatcaggttatttgaacaatatcttatcttgcctttcagggat

SEQ ID NO: 87076 - DNA, 367 bp, Homo sapiens
  misc_feature (1)...(367): n = a,t,c or g
gaataaggacaagaattacagcagacgtctcaacataaaccatgcaagccagagacaacggagtgagatttttaaagtgttgaaagaaaaaaactgtcaaaacagatttctacatccaggagaaatatctttcaaatgtgaaaaacaaataaatacttttgtgtaccaacataaactgaggaagttcagtaatatttcctactttactggaaatattaaaggtagttcttcaaacaaagaatttgtttggaacttagatctgcatacaggacataaatgaagggaaatatgctttatcatatttctcgctgaaaaaatactttatcatattttcttgctataacaagnaacttgactgtttaaagta

SEQ ID NO: 87077 - DNA, 1442 bp, Homo sapiens
ttttttttttttgctgactcagaaggtttatttgcagcgctggcggggcggacaattggcggcctcggggtgcggcgggtgcgggcgctcagcggctgggccagagcagggtgaaggagccgcgagcgcagcggaaatcgggctctggctgctccggcctgggctccacggagatgaggcgccggaccccgcgatggcttagtgggatgcagttcggagacgcgaacctccagggtgcggccctccccctggcagtgtgcggccagcacgcccaccagctccccaacgcggttgtccaatggcggccgggagcggtgcaggcacaccacgaggtcgtcctggccgcgggcgtgcagcaccaccagctggtctcctccgctggtcacgctcagccccgtcaccgcctaaaggggcacggcccgcatcacccggtactgccggtcagggtccagcttgtataggtgctggtctgtgagcaggatggcccggttccggatcttgtggaagcggttcaccttgcggacatgggcttgaaaacgatcacagccccgaagccatctttgtcccgaagtgtctttagtcgctgagcaaacaggcttgatgctgtgggattgtcagtggcctgaggacaggtagtctagggcccaggcccgtcggcagccccagtcctgacgaagcccttgcagggcccccatggcggccaccttggccttgatctggggcatgtctgaaggggggatgttcttcaccagctgccgggcccgccacctgcagaagagtgcgtggcaggtgtcctggaagggctgcagcacagcagggggcagcggccacacaaggtcacgcccgtagagtggcggctgccttgcagcctggaatcgccgctgcagctcagccaggtgagcccgcaccttgtgtctccggaaccagcgcatgatggtgtagatagccctcagcctccggcagcgccacctcgccaaggtgccccgccatgccttctgcaatagcagcacaatgatggggatgaggcgggctcggctctgctccagtgtgaccagtgtccggggtgagcggatgaacagcttgctgtggccaaaggccacgtccccctgcagcccgtgctgctccaggagagcgctcacggctgccttgtcggagcccagcaggtggttgggccatgtgtattcacaggtcatcttgtacctgtcaccacaggacagggcagtgtggcccaggcctgggggagagatgatggagcccaccctgcccaccccacacctgagcaggaatcgagagtagggctggcgggaagcgaagccagccctgcggaccctcacattctccagcagccccaggtatgcgacctggtggcgacagtggttctcatccagcttcccagctaccttgtcctcattgggcttgatgcagcggacgtagaagggctc

SEQ ID NO: 87078 - DNA, 1800 bp, Homo sapiens
agagcctggagttcctacaaagaagacttggtttgataagccagattttaatagaacaaacagcccaggctttcagaagaaggttcaatttggaaatgaaaataccaagcttgaacttagaaaagttcctccagaattaaataatatcagcaaacttaatgaacattttagtcgatttggaaccttggttaacttacaggttgcttataatggtgatcctgaaggtgccctaatccaatttgcaacatacgaagaagcaaagaaagcaatatcaagtacggaagcagtattaaacaatcgctttattaaggtttattggcacagagaaggaagcacccaacagttacaaactacttctccaaaggtaatgcagcctttagtccagcagcccattttgcctgttgtgaagcagtcagtcaaagagcggctgggtccagtaccttcaagtactattgaacctgcagaagcccagagtgcctcttcagaccttcctcaggtgttgtctacatctactggcctaacaaaaacagtgtataatccagctgctttgaaggctgcacagaaaaccttacttgtttccacctctgcagttgataataatgaagcacagaaaaaaaaacaggaggcattgaaacttcagcaggatgtaaggaaaaggaaacaagaaattttagaaaagcacattgaaacacagaagatgttaatttcaaaactggagaaaaacaaaacaatgaagtctgaagataaagcagaaataatgaaaactttagaggttttgacaaaaaatattaccaagttgaaagatgaggtcaaagctgcttctcctggacgctgtcttccaaaaagtataaaaaccaagactcagatgcagaaggaattacttgacacagaactggatttatataagaagatgcaggctggagaagaagtcactgaacttaggagaaagtatacagaattacagctggaagctgccaaacgagggattctttcatctggtcggggcagaggaattcattcaagaggtcgaggtgcagttcatggccgaggcagggggcgagggcgagggcgaggtgtgcctggtcatgctgtggtggatcaccgtcccagggcattggagatttctgcatttacggagagcgatagagaagatcttcttcctcattttgcgcaatatggtgaaattgaagattgtcagattgatgattcctcacttcatgcagtaattacattcaagacaagagcagaagctgaagcagctgcagttcatggagctcgtttcaaagggcaagatctaaaactggcatggaataaaccagtaactaatatttcagctgttgaaacagaagaagttgagcctgatgaagaagaacagagagagatcatcattgcctgaatttagctttgtgactgcaagagcaaagaccagttcctgtctggagacgactgttacaataatatcatcctattattttatgttcactctttatcaatttgaacagatgtttacatgtactataattagcattttatctctacagttcttttaaaaagtacctctgaagtcccaaagtgtatctgaatgtgtgctctgaccttattcttaaatgttttctccccatactttatagccatttattttttaaacaccttaagaaggaacgaaaaagttctcttggatgacgtatattcaagtctgagccaaattgaggattgtgtctaggaaatctgtaaagccatactactgtgttcattagcatgagcaatttaaaatgaaaatgaattaaaaagttaaaaaaa

SEQ ID NO: 87079 - DNA, 607 bp, Homo sapiens
cttcagcatggaaagcccgttacaatctgcctgttcagggattcaggctggaacagctggcgaggcctatgagcaggtttactgctggagtccttgggtaggctgccttggtgactgatcagcggggacttgtgcctgataccttggtccataagacatgggcctggttctggggcagtcctggagcctccatatgtggaaggcgttctggagctgaggtgccataatctttcacctgggttccttagctcttgtgaaggtatcttcatgcatggatggtagttcaaactgatgtttctttgaaagactctggccttgtcaaaagaaggacgtaagaaggcacgatgtattatacttgggaatgatagaagagactgacctggtatttccacccggaagagggaaaggattttaactacaaatacaggaatccagcagatggcatcagagaacactataaaaaagaaacgatttgcaacagccacctctcttccaaaacaattccttacttctgtgggctgcaaggcgggttctttgaatggaacacaacatactcctattagaaacaccatgatgagaaaagccagcccgttcacacctagtggga

SEQ ID NO: 87080 - DNA, 749 bp, Homo sapiens
gctttgtggtcgcccacgcgccgacattttgtctatcttcaacctagttcctcctcagatcactctgggctacagcatccctgctgtttagatcagcacactgaggcgtggtgtgattaaatgacttgtctgagattagttttcaggcatgtgaaggacttatactcacatgctagcccttggataaagagctatatgcttttccctggagagtggggagatgagaccagtgttcctcacactggagggtgatagaccccaaggggaactgaagagtggagctcagtttcctctcttctcaccctccacctgttcctcatttgccattattcaccttgtcccttgcctgcccctctctattagtacctcatcctccactcaccgttccttatcatacttctcacctctacttagcccattcttgtaggatggaaatatttgagaactactgagttagaactttactatcatatgaatgtgttatgttatatgacaaattaatgcagcagttttacttaccttatgcacaaaggtattcccaggtaggggacaatagtagcattcgcagtggtgataatgcttcaaggtggatgtgtttggaagtttggcctttaggaaatggagagtagtgagcaaaacatcagatttcaccaaaggaccaaagtgactccacaattgggatgccgacacaccttgctaggaactgacaacaacttcagtatggtctggagcttaccaggctctaccag

SEQ ID NO: 87081 - DNA, 642 bp, Homo sapiens
tttttgccggggcctcttttcagttctgagcaccagccagagtctaactgaattggacctcagtgacaattctctgggggacccagggatgagagtgttgtgtgaaacgctccagcatcctggctgtaacattcggagattgtggttggggcgctgtggcctctcgcatgagtgctgcttcgacatctccttggtcctcagcagcaaccagaagctggtggagctggacctgagtgacaacgccctcggtgacttcggaatcagacttctgtgtgtgggactgaagcacctgttgtgcaatctgaagaagctctggttggtcagctgctgcctcacatcagcatgttgtcaggatcttgcatcagtattgagcaccagccattccctgaccagactctatgtgggggagaatgccttgggagactcaggagtcgcaattttatgtgaaaaagccaagaatccacagtgtaacctgcagaaactggggttggtgaattctggccttacgtcagtctgttgttcagctttgtcctcggtactcagcactaatcagaatctcacgcacctttacctgcgaggcaacactctcggagacaaggggatcaaactactctgtgagggactcttgcaccccgactgcaa

SEQ ID NO: 87082 - DNA, 423 bp, Homo sapiens
aaaattagaaaggaagaagttaaattgtctctgcataagatatgatcttatatataaaaactctaaagactccaccaaaaaaactggtaaaattaataaatgaatttaataaggttgcaggatacaaaataagcattcaataatcagtagtgattctatttactaacagtgaaatatctgagaaagaaagaagaaaaaaacatgattgcatcaaaaatatgaaaaacaaggagtggcaagatctgtaccttgaaaaactattggaaatattaatgacacaaattaaagaagatactaataaatggaaagatatcatgtgtttatggggtggaagaattaccattattaaaatgcccataatacctaaagatatctgcagattcagtgcaatctctattaaaattctcaagacatttctcacaa

SEQ ID NO: 87083 - DNA, 357 bp, Homo sapiens
ccagcactgggattccgaggtgtttttattcggtgatcagcactgaacacagaggactcaccatggagttttggctgaactgggttttccttcttccgattttaaaaggtgtccagtgtgcggtgaccctggcggagtctggaggaggcttggtccagcctgggggatccctgcgagtctcctgtgcagcctctgggttcgccgtcactgccaacgacatgacctgggtccgccaggctccagggaaggggctggagtgggtcgcatttatttctggcagtggtactacaaattatggagactccgtgaagggccgattcaccatctctagacaccattccaacaacaccctgtatg

SEQ ID NO: 87084 - DNA, 499 bp, Homo sapiens
aacttatagctgggtgtgttttgcgcggaagaagggtggggcaggaaccctgactggcgcagccgccacagtaggtggaaatacaactcgacaatggaaaattgatgaggtccagccgttccttggcactcagcaccagcgtttgtcattctttggggcacccacatgggtcccttgggaaaggtggagctggggctggaggccggggcagagagcaggatgcgggcaggagggcggcagaggtgaggggttctggtgtcacagggggccactcagtttgacgtcaagtcagcttagggtgcccagcgggtaacctcatctttaaaaatagagtgtcgctgcctctggggaccaagctggctgggcggggagtcagctttttttttcagtccagtcagtgctctcttaatgaggatgaggatgatgctcctttctcaaggataacttcctgtgagctccaacgatgtgacaggagggctaggtatcccacactcattgg

SEQ ID NO: 87085 - DNA, 406 bp, Homo sapiens
ggaggcaggaggggaggggagggaggaagctctcaccccagcttgagattcagaacgctgccagaggggtcatttgagctggatcacgaaggtaaggcagggcttgaggagggagagatatgaggagggcaggcaaggtggggtatatcgcagggatgatgacttgggatgggaaatggctcactcccctagcaggtgacaaatggcagggaggctggagctgagttgctgactgaggtgaacaggctgggaagtggctcttcagctgcttcagaggaggaagaggaggaggaggagccgcccaggcggaccttacacctgcgcaggtgagtgggacccactgcccccacctgacaaggacctgctcagggcccagggctaggcaggctggagatcgcaccgtctt

SEQ ID NO: 87086 - DNA, 493 bp, Homo sapiens
gatacctcaccttcatggaagagagaggctctcctgtctcaagtctgcctgccgtgggcaagaagcccctggacctgttccgactctacgtctgcgtcaaagagatcgggggtttggcccaggttaataaaaacaagaagtggcgtgagctggcaaccaacctaaacgttggcacctcaagcagtgcagcgagctccctgaaaaagcagtatattcagtacctgtttgcctttgagtgcaagatcgaacgtggggaggagcccccgccggaagtcttcagcaccggggacaccaaaaagcagcccaagctccagccgccatctcctgctaactcgggatccttgcaaggcccacagaccccccagtcaactggcagcaattccatggcagaggttccaggtgacctgaagccacctaccccagcctccacccctcacggccagatgactccaatgcaaggtggaagaagcagtacaatcagtgtgcacgaatg

SEQ ID NO: 87087 - DNA, 433 bp, Homo sapiens
ggaggcaggagaatgcctggtggtcctacacctggaggaaggtatgtgttgcccagccccaagcttggcaccgccgtcttccttcaggtgggccgggtcctcctagggaagatcaggggctggcagagcccccaccctgggcagggaggctgtggtcttgttcctaggactgggttgcgggtccgtggcctggaaggtgggcaccacactctgtcctgtccccgaagcccagctcttagacttgcccctgcctcggtgccagggagagagctgctgccttctccccacccctgaagacgacgcagggctcggggccagtggaacccttcttcccacagccccagcctgttctcagggccgctggcctaagatactccctgcggggaaggggcttcatcgggcaccccaacccagagaccccagggcgggagct

SEQ ID NO: 87088 - DNA, 442 bp, Homo sapiens
tgcgatcgcggtcctgtaattcccgggtcgacgatttcgtgggacattacagtgaacaccctcacgaatgtagtgctcaccacttgtccgggggccacatttgtggatgtttttgacctcacaaccatctgggatgagccacttctcagccgccatgtcttcacatttatccacattaaatttggtaaagccccactttgagatgtgggtctttgggcagccagggaccttgaacttggcgctgcatggggccttagttgcatgctccttattttgcagatttgtgtggatggacatgatgacttggccactgtgaaccctggtcacggtgccctgggggctttccaaagacaccttgcataatagctctcagaagcctagatgggggacagcaggaggtcagagacatgaatgtacattggaaagggctggctctcaggtt

SEQ ID NO: 87089 - DNA, 409 bp, Homo sapiens
tttcgtcctcttgctgcccctgtccagtctccatttcctccttaccctcttctgaccccccccacagcctgttgagtgtactgcaccagtgtcctgacgtttctccctgacacgtctccctgccaaccccctcttcctccctctgccacctccaccctcttgctgcccagaccctgaaggcctgacgggcctggcctcgcctccagggcatctcagtgccctcctggccctgttttctctactccctctggtccccagcactggctgttcgtttcctgtgagtgccttgcccttccccacctgcatctttgcactgttttccccagagagttttcccagacctctgcagacagccttctgagcctccgccctgggactgcccctctgggcagtgatgattcctacctac

SEQ ID NO: 87090 - DNA, 1950 bp, Homo sapiens; identical to SEQ ID NO: 71982

SEQ ID NO: 87091 - DNA, 434 bp, Homo sapiens
tttcgtaaagaccctgcaacactattggcacaaaccttatttacccttatatttttaaaatttagatgacacatttcgatcagctgtagatatgcactttgctaaaacctctcaagacataaaacctgcagttttatggaaagatgtgaacagtaatgtatggtgtggtccaaatgaattattaacatggggaagaaggtatgcttccacaccccctcgggtcctctttggattctagcacaacgcatcaaaccatagcatggcatggctaggacctaacccggtaccagaaatgaagaaaataaccctacaggacccacagccccagacaatgcaccttccttggacaacacaggccctggacagaatgctgaagaagacaagtcagaagactgagcgaatcctgctctggacacagacaccattcactccag

SEQ ID NO: 87092 - DNA, 476 bp, Homo sapiens
  misc_feature (1)...(476): n = a,t,c or g
tttcgtgtttccatctttgctgatttccctttctgctgcaacatcccttctgtttaagtcaaaacctttacaaggttctgaaaccaaggtggatacctggactatgcatagaggaatgagatggggttgctctcaaggtcatgtctggtgtagaagacagaggcctctaacagttaaccacaatattgcacatggtgagaactgtagaaatgggggtcctgccaagggaggagcaggacagattggggagggcaggggatggtgttgggagagacctcacagggctgatctttgaagcggggtggagcagagactttgggaggagtgcaggcatgggagcatgaaggtgcagggtgcagtggggaccatggggctggagttcagggtgcctggtggatggcaggagatgagatgggaaaaagagggagaagcctagcaagaagagtctcanacgccgtctgaggggctgagactcc

SEQ ID NO: 87093 - DNA, 596 bp, Homo sapiens
atggagtatcccgcgccggccacggtgcaggccgcggacggcggagcggccgggccttacagcagctcggagttgctggagggccaggagccggacggggtgcgctttgaccgcgagagggcgcgccgcctgtgggaagccgtgtccggtgcccagccggtgggtagagaggaagtggagcacatgatccagaagaaccaatgtctcttcaccaacacccagtgtaaggtttgctgcgccttgcttatttctgagtcccagaagctggcacattaccagagcaaaaaacatgccaacaaagtgaagagatacctagcaatccatggaatggagacattaaagggggaaacgaagaagctagactcagatcagaagagcagcagaagcaaagacaagaaccagtgctgccccatctgtaacatgaccttttcctcccctgtcgtggcccagtcgcactacctggggaagacccacgcaaagaacttaaagctgaagcagcagtccactaaaggtggaggtactggttttcctgagtagtgctatagtgggacccctgccgtcctcagggcactattgccaggggctcacagagatcc

SEQ ID NO: 87094 - DNA, 415 bp, Homo sapiens
tttcgtcttcccgaaagggctccgtacctgatgctcctcgatctcctgctttagcacctgagcaaaagggaaacacagatatgaggagcagctcgggccatcaacccattcctccctccacacttaaagcccagccgctgaccgtttgaccagtcaaggccggcctttccctcaccctcaacggaactgctcgtcccgctgcctcgatttccccactgggaccattcaccacgactcccagatctctttcttccccttacctgagcggatttgttgcagggtccagactgcaagaacctagcgatcaggcagaacttgctgaaactccaacctctggaaattactggaaccctgcattctagaacttgctggaaacccaccctctggaattggcctgctagagtgcctgagaagg

SEQ ID NO: 87095 - DNA, 440 bp, Homo sapiens
gcaccggctcgtaattcccgggtcgacgatttcgtgccaaacaaccgcgaacgccgacaagccgaagagccgtttggccttttagccgaagcggacacccgcgcgcggtgattggccggttggccggaagaactctgtctctgattggcaggagagtcacgaaccggtcagccccgggtcaggggccgcaagtgaggacactacaagtgtcgaggggcctaagggaagccggggcttgggagggcagggctttctctgcttgcggacatcgcgaagggcctctggcaggcgccgccgggtggcggcgagacgcctccgcgcctccggggttccttgttcgctgtcggaggaggaccggctgatggatggcctggtggggagggagccctcgggcaggtggctgcgtcgggcctggggcagctgtgctgcgcttggagacc

SEQ ID NO: 87096 - DNA, 1377 bp, Homo sapiens
aatgcaaagtatggcgaaatccactaaatttatttaggggtgctgaatacaatcggtatacttgggtgacaggacgagagcctcttacttactatgacatgaatctctctgcccaagaccaccagacattctttacttgtgactcggaccatctgcgtcccgcagatgcaataatgcagaaagcctggagagagagaaacccccaagctaggatttctgcagctcatgaagccttggagataaatgagtgtgcaactgcttatattctcttggctgaagaggaagcaacaaccattgctgaagcagaaaaattatttaagcaggccctgaaggctggagatggctgttaccgacgctctcagcagctacaacatcatggatcccagtatgaagcccaacatagtgttttatatctccctcttcaggacgagacaccaatgtcttggtgtacatcaaaagaaggctagcaatgtgtgccagaagactcgggaggaccagggaagcagtgaaaatgatgagagatttaatgaaggagttcccccttctgagtatgttcaatatccatgaaaaccttttagaagcccttctggaactacaagcatatgctgatgttcaggcagtcttagcaaagtatgatgatataagcttaccaaagtcagcaacaatatgctacacagctgctttgctcaaagcaagagctgtctctgacaaattctctcctgaggctgcatctcggcgggggctgagcacagcagagatgaatgcagtagaggccattcatagagctgtggaattcaatcctcatgtgccaaaatacctactagaaatgaaaagcttaatcctacccccagaacatatcctgaagagaggagacagtgaagcaatagcatatgcattctttcatcttgcacactggaagagagtggaaggggctttgaatcttttgcattgtacgtgggaaggcacttttcggatgatcccttatcccttggaaaaggggcacctattttatccttacccaatctgtacagaaacagcagaccgagagctgcttccatctttccatgaagtctcagtttacccaaagaaggagcttcccttctttattctctttactgctggattatgttccttcacagccatgctggccctcctgacacatcagttcccggaacttatgggggtcttcgcaaaagctgtgagtgtttgcctagagggaggccttggggaatggatggggaaagccaagggcataaaagcagcgtgagagaaatggggttgccttacagaaatgggtacgagcctgcaaagatcattgctcaccatttaattttcatgatcatcaatggaatcaaagcattaagggtcacatgagaa

SEQ ID NO: 87097 - DNA, 468 bp, Homo sapiens
cggacccaagctcccgggtcgacgatttcgtgatggtgagtgagctgtagttccgtggcactatagccaggttcttgctgtatccgctgccatcctcctcaaggcgcggcctcggagggcctcctgctcctcctggcgctaggagagccccactcggtgtggcacggagacaccgaggtggattagagccccacttggtgtggcacggagacattgagatggactagagccccgggcggccgagagcggaatgcgttgttcccggtgtcgcagggctgggtgtcgcagggctggagcaccgcagtgcggggctcggagccctagcgtctctcgcgcttgctgggggccgctccagaggccttgtgagcgacgagttctgagcccgcccctgttgcttctagagcctgtggggccgcgactcagaggagtcatgagtccggggtgtctcctgggtgggcgacgcgaaac

SEQ ID NO: 87098 - DNA, 446 bp, Homo sapiens
agtcaggtccaacttgtgcagtctgggcctgaactgaagaagcctggggcctcagtgaaggtttcctgccaagcttctggatacaccttcacttcttatcccatgcattgggtgcgccaggcccccggacaaggacttgagtggatgggctggatcaacgctggcaatggtaagacaaagtattcgcaaaacgtccagggcagagtcactttcaccagtgacacatccgcgaccacggcctacatggaactgaccaacctcaaaattgaagacacggctatatattaactgtgcgacggaggcttggagtatttttaacttttgacacttggggcagggaatccttgtcaccggctcctcagcctcaaccaaggcccaatgggctttcccctggcaaccttcttcaagaacaacttttggggcacaagcggccttggcttgcttgg

SEQ ID NO: 87099 - DNA, 475 bp, Homo sapiens
cagagttcccgggtcgactatttcgagaaagtcagcccaagctttagcagaaaaacacctggggaagcttcaccagagtccaccacgacaatgccactgctcattcctgtcatcgaacaaggtcaattttgtgagcgtttgaggggaaatcataggcatccaccttacagtcctgatttggctccttctgacttatttatgtttcttaatcttaaaaacaactctaaagggcacccatctttcttcgggtaataatgtaaacaagactgcatggatatagttgaattcctgggaccctctgttctttattctttaaagatggactaaatggctggaatcatcacttacaaaagtgttttgaccttgatagagctcatgttgagaaataaagtttatactttctatttttatcttttaattccatttttccatgaacatcttgaagtcccctcatatttcctgtataccatatgcc

SEQ ID NO: 87100 - DNA, 413 bp, Homo sapiens
  misc_feature (1)...(413): n = a,t,c or g
tttcgtgcctgggtgagtcaccgtgccccctgcactgcaagcctgggaaccgcaacgaccgcgtcttgcccggctccgccctggcccccaccggctttcctgagtcccgccttctgtcatttggggctccgcctcccagtctttaggctccgcccctagaacctgggcacctgggctcccctgccaacctggcccgccccctgggaccagatcccctaggtctgaaaaccctgggcctcccaggcctgatccttgtccctccttccctcccttccttccctggggctgctgccagtgggcggtgaggcagcacctctggcttgcctcttgccggttcccccatgagggagaatggcctagggaagaggatactgtgaacagggaggtgggcagtaccacagatggaggctntc

SEQ ID NO: 87101 - DNA, 395 bp, Homo sapiens
ttcccgggtcgacgatttcgtcagccttctggagatggcgtgcgcagccggggatgggggcgactggaagggggtgcccgtggcttcctttgggcctttccttccaactagcgcctgcaggtggacccgggttgacttccctcacctccctcgggcggccgacctttggatggcggacctcagccgccccagggttgcgaggcgacgggcgcgctggcccaggccaccaggcgggctccatcagggctttgggtggtgagttgggggcgccggatttggctcatttcaacgctggccggaggtcacgaggatggagttcaggacaaagaggtgtgggcaggccactgggccagctggtaacatcatggcagagaaagagaacaacttcccaccat

SEQ ID NO: 87102 - DNA, 461 bp, Homo sapiens
tttcgtcacacagaggccggcttggtcactatggaggagataggcatcttgttggagaaggctcaggtacaggggggacttgggctttttagtccgggccgggctcgcggggagagggtgaagccagacctgagtggggggaggaatggcttccaggaccccggcccaggttggggttattttaaaggcctcggtggaaagctttgtgccattcgaaggcctgtctgggtggccgagtgatggtaggaggtaaggctcaaaaagcggggctgggggagtgagtgacgttagtgggtctttgagacggattgatttcgaaccctggccggtagtgcttattgaggtcggtggcccggcgttgggattgggtcaggcggtgagtgatatatgggatcccgccgtgcggccgagtgatccccgggtctgggctgcggggctgactgatgttcacggctttgctg

SEQ ID NO: 87103 - DNA, 422 bp, Homo sapiens
tttcgtgattcagaatcctggcgaaaacccgaacaggtggcaacgctcagcagtcaaatttggagccgaaggccccaaggaggaggcctggaaatgtcagggcctgttctccttcccatcagtgctgtgccgcccacctctggccccgaggtgcggggacgtgcggcaccatacctaggcggagctcccgcaggaggcgcagcaggagggaagcgccactgcagtcccctctcgcctgggagggcagcctggtttctccctgtggccatcttaaagccaccacctctgtgcctctcgccacctgccttcagggttccagcagcagggagccaccatctgctctggcgagggagctgaagctcacccacccaacttctccgggctggctgccgctggtaagctgctctaggtgaggcacttgg

SEQ ID NO: 87104 - DNA, 905 bp, Homo sapiens
tttcgtctcgggccagacagagaaaaccttgttcaagtttgcagcaagtactttcccggtgcgcaaaactgggcgactgggaacgcgttgagacgttcctctttcccgcttctccacctttacgcctgaaagaagactcccaaagattgctttcttctgggacgctgcttgaacgctaaccgcgttgattggaacagattttgtgtcttggctggctttgggtgaagaccggggtgaaaaggttgcgctgcgattctcaagatctctggacctgggttgttcttcagaaaaaaatggttatttccttgaactcatgcctgagctttatttgtttattgttatgccactggattgggacagcatcacctctgaatcttgaagaccctaatgtgtgtagccactgggaaagctactcagtgactgtgcaagagtcatacccacatccctttgatcaaatttactacacgagctgcactgacattctaaactggtttaaatgcacgcggcacagagtcagctatcggacagcctatcgacatggggagaagactatgtataggcgcaagtctcagtgttgtcctggattttatgaaagcggggaaatgtgtgtcccccactgtgctgataaatgtgtccatggtcgctgtattgctccaaacacctgtcagtgtgagcctggctggggagggaccaactgctccagtgcctgggaaggtggatcactgggggcccccctggcccaggccggggcagtggcaaaaagggggctctgggctaccccctcaaccgggggcttggcccactgtggctggggggttttccggggcctggccccggaaaaaaccccttgggagcaagggcccccttctgtaagggactgttcattaaaaagacgccggggcccc

SEQ ID NO: 87105 - DNA, 429 bp, Homo sapiens
tttcgtggctgccggaggacgcgctgctgcgagaccagccgcggcgtctttggcagtagtgggcgtccttgcgggtccaggagggcccctctcccgcgaccgccgaccacgatgagagcgtgaagaccctctcgaaaggaagggctctgctctacacactggtgtctcctgcggaagggcagctgggcacgccttccagaccgagcaaaagttgaaaaatcagtaacccaagatgactaaccaaatcaatatgctgggcaggatgagacatcagtgtctgcctcagacagaagagcacacacaaaacatgacctctcactccaagcccagttacagcagaaagttttcatggagaaatggaatcacacttcaaatgatttcattttgttgggtctgcttcccccaaatcaaactggaatatttctcttg

SEQ ID NO: 87106 - DNA, 695 bp, Homo sapiens
tttcgtaggaaagaaaaggaaggacggctcccagacagagagtgggagaaaccggggagcagcgggagcagcaggtccggggggagctgttccgctgcgctgccctcgttattcacacggacgctgcggagcttccccgggctgcttccctgtccccctgggtggaggctgccgtctaaacctgactccagagtttaagatgcaatggccagaagacatgaacgtgtcactagaaggatgtggacatgggctccgggactgttgatgatgactgtggtgttttggggtcatcaggggaatggacaaggccaaggatcgcgtcttcgccaggaggactttcccccgcggattgtggagcatccttccgatgtcatcgtctctaagggcgagcccacgactctgaactgcaaggcggagggccggccaacgcccaccattgagtggtacaaagatggggagcgagcggagactgacaaggacgatccccggtcccacaggatgcttctgcccagcggatccttattcttcttgcgcatcgtgcacgggcgcaggagtaaacctgatgaaggaagctactgtttgtgttgcgaggaaatatgttgtggaagcagtgaggccaaatgcgcctatggaggtggcatgctagtgaacataatgaacctcctgtgcacatttacttttatttatttcaagag

SEQ ID NO: 87107 - DNA, 425 bp, Homo sapiens
tttcgttgagggaggtcaggagacctgaattccagtcctggcaagaccccacccagcctgctctgtgacctcactccctccccaagtctcgagctcctcatctgtaaaacaagaggctggatggtggaggagtgtggagaggggctctggagggcaaagggaagattccagcgtgggcccatccctgggcggtagaaagagcactgggcctggaaccaggacagccaggtctcagctcaggcatggcggcatcagagctgtgtgtccccaagcacggccccagcctctcagggcctgggctgtctggtctgcaaagggagtggagtgaattactcctgctgggacatagcacaggcactcaggcatcagatgaacactggagaccattgacttcctgaacgacaacattcgaagaggaattgaga

SEQ ID NO: 87108 - DNA, 429 bp, Homo sapiens
  misc_feature (1)...(429): n = a,t,c or g
tttcgtgcagccaggacaggcggaagcagtggctgccatggaggaggacaagctcttatctgcagtgcctgaggaaggcgatgccacccgtgaccccggtccagagcctgaagaggagccaggggtccggaatgggatggccagtgagggcctgaacagcagcctctgcagcccagggcacgagcgaaggggcaccccagcggacactgaggaacccacgaaggacccagatgtggccttccatggcctcagccttggcctctctctcaccaatggcctagccctggggccagacttgaacattctggaagattcagcggagtccaggccctggagggctggcgtgctggcagagggggacaatgcttccaggagcctctacccagatgctgaggaccctcagctggggttggatggtcccggngagcc

SEQ ID NO: 87109 - DNA, 937 bp, Homo sapiens
tgtttttataaaaaagtagggtttattgactcttatgcattgttaaattagagggtaaaaagacagagctggtagtctttccctgaaggctgtaaggttatttttggggtttggtgacttctcaggttggcagccgtcttgttgatgtcccctatgtcaatccagagggcaggagcgggcagctctctaccttggcaactggttcctctctctccagcttcatcttttccattgttttttgtttgtttgcttgtttttgtttttcatttttaccttttacagattgatttaaacattttttaaaccacatgcttctttttctgggctccagccagatctctgggggaggagttgttggcagtggtgatggaattgggaagggtctgtgagaaaatctgaggagcttcctgcctcccccagatctccctcacaagactgtctctctcagggttgcttgtgagaatcatttaggaactgctgcagtgttttgatgttttctgaacccctccccagaaagcccaggagtttgtaattgaaacaagaagtcaagggaaagacccagaatcatcttttccccaaagtcattagaggaggccagtaaatgtgtttagggggcacaagttcccaaacgccaccccaccattccttcctaggaagttctcaaaggtacagcaccaagaacctgtccctcctctttcatctcctcctccctcctgttctcctcctggggctggagagccagtgctctgaaagaggagaggggagaggaggagctaagatagctgatgccagcgttctgctgtccgggggtgacagtgattgccgaacccttaaagtgttgcctgaaggttggggtccaggatggtttctcgatctggagactcaatgtagttggcagcttcttgaagtttcagcagcatggccatcagaggatctg

SEQ ID NO: 87110 - DNA, 16341 bp, Homo sapiens
atcacttctccctgggctcccaggccctcctgcagcagccccgcctgggccatgtcttcctcagatgaagagacgctcagtgagcggtcatgtcggagtgagcggtcttgtcggagtgagcgatcttacaggagcgagcggtcggggagcctgtctccctgtcccccaggggacaccttgccctggaacctgccactgcatgagcagaaaaagcggaaaagccaggattcggtgctggaccctgcagagcgtgctgtggtcagagtcgctgatgaacgggaccgggttcagaagaaaacgttcaccaagtgggtcaacaagcacttaatgaaggtccgcaagcacatcaatgatctttatgaagatctgcgggatggccataacctgatctctctgttggaggtcctctcaggcatcaaactgccccgggagaagggcaggatgcgttttcataggctgcagaatgtgcagattgccctggacttcctaaagcagcgacaggtgaaactagtgaatattcgcaatgatgacatcacagatggcaaccccaagttgaccctgggtctgatctggaccattattttgcatttccagatctctgacatctacattagtggagaatcaggggatatgtcagccaaggagaaactactcctgtggacccagaaggtgacagctggttacacaggaatcaaatgcaccaacttttcctcctgctggagtgatgggaagatgttcaatgcactcattcaccgataccgacccgatctagtagacatggagaggctgcaaatccaaagtaaccgagagaatctggaacaggcttttgaagtggcagaaagactgggggtcactcgcctgctggatgcagaagatgtggatgtgccatctccagatgaaaagtctgtaatcacttatgtgtcttcgatttatgatgccttccctaaagttcctgagggtggagaagggatcagtgctacggaagtggactccaggtggcaagaataccaaagccgagtggactccctcattccctggatcaaacagcatacaatactgatgtcagataaaacttttccccaaaaccctgttgaactaaaggcactttataaccaatatatacacttcaaagaaacagaaattctggccaaggagagagaaaaaggaagaattgaggaattatataaattactagaggtgtggattgaatttggccgaattaaactgcctcaaggttatcaccctaatgatgtggaagaagagtggggaaagctcatcatagagatgctggaacgagagaaatcacttcggccggctgtggagaggctggaattgctgctacagattgcaaacaaaatccagaatggtgctttgaactgtgaagaaaaactgacactagctaagaatacactgcaggctgatgctgctcacctggaatcaggacaaccggtacaatgtgagtcagatgtcattatgtacattcaagagtgtgaaggtctcatcaggcagctgcaggtggatctccagatcctgcgggatgagaattactaccagctagaagagctggcttttagggtcatgcgtcttcaggatgagctggtcaccttgcgtctagagtgtacaaacctgtaccggaagggtcatttcacttcacttgaattggttccaccctctactttaaccaccactcatctgaaagcagaacccttaaccaaggcaacccattcttcttctacctcctggttccgaaagcctatgactcgggctgaacttgggccatcagctcctctgaagatgaaggcaatctccgatttgtgtatgaactactgtctttgggtagaagagatgcagatgaaactggagcgagcagagtggggcaatgacctgcctagtgtggagttgcagctagaaacacagcagcacatccatacgagtgtagaagagctgggctcaagtgtcaaggaggccaggttgtatgagggaaagatgtcccagaatttccataccagctatgctgaaactcttggaaagctggagacacagtattgtaaattgaaggaaacttctagcttccggatgaggcaccttcagagcctgcataaatttgtttccagagctacagctgagttgatctggttgaatgagaaggaggaggaggaactagcatatgactggagtgacaacaattccaatatctcagccaagagaaattacttctctgagttgacaatggaactggaggagaaacaggatgtgtttcgttctctacaagatacagcagaactactttcacttgagaaccacccagccaagcagacagtggaggcttacagtgctgctgtccagtcccagttgcagtggatgaagcagctgtgcctgtgtgttgagcagcatgtgaaagagaatactgcttattttcagttcttcagtgatgcacgagagctggagtcattcttgaggaacctccaagattccattaaacgaaaatattcctgtgaccacaacaccagcttatcccgccttgaagacctgctccaggactccatggatgaaaaggagcagcttatacagtccaagagttccgttgccagtctcgttgggagatcaaaaaccatcgttcagctaaaaccacgcagtccagaccatgtgttaaagaacaccatttctgtcaaggctgtctgtgactacaggcagatcgagattactatttgcaaaaatgatgaatgtgtgctagaagataattctcagcggaccaaatggaaagtgatcagccccacagggaacgaggcaatggtgccgtcagtctgcttcctcatccccccacccaataaggatgccattgagatggccagcagggtcgaacaatcttatcagaaggttatggccctttggcatcagctgcatgttaacaccaaaagccttatctcttggaactatctgcgtaaagaccttgaccttgtacagacctggaacctagaaaagcttcgatcctcagcaccaggggagtgccatcagattatgaagaaccttcaggcccactatgaagactttctgcaggatagtcgtgactctgtgctgttctcagtggctgatcgcttgcgcttggaagaggaggtggaagcttgtaaagcccgcttccagcacctgatgaagtccatggagaatgaggacaaagaggagactgtggccaagatgtacatttcagagttgaagaacatccggctacgcctggaggagtatgaacagagggtggtcaaacgaattcagtctctagccagctctaggactgacagagatgcctggcaggacaatgcattaaggattgcagagcaagagcacacccaggaggatttacagcaattgaggtcagacttggatgcagtttctatgaaatgtgacagctttctccatcagtctccatctagttcaagtgtcccaactctgcgctcagaactgaatctgctggtggagaagatggaccatgtctatggtctctctactgtatatctgaataagttaaagacagttgatgttatagtacgtagcatacaggatgctgaactcttggtcaaaggttatgagattaagctgagtcaagaagaagtagtactggcagatctctcagctctggaggcccattggtcgacattacggcactggcttagtgatgtgaaggacaagaattcagtgttttcagtcctggatgaggaaattgccaaggccaaggtagtggcagagcagatgagtcgtctgacaccagagcgaaatctggatttggagcgctatcaggaaaaaggctcccagctgcaggagcgttggcaccgagtcattgcccagctcgagattcgccaatctgagctagaaagtatccaggaagttctgggagattaccgagcctgccatggaactctcatcaagtggattgaggaaaccactgcccagcaggaaatgatgaagccaggccaggcagaggatagcagagtgctttcggagcagctcagccagcagacggccctatttgcagaaattgagagaaatcagacaaaactggatcaatgtcaaaaattttcccagcagtactctactattgtaaaggactatgaattgcaactgatgacatacaaggcctttgtggaatcgcagcagaaatcccctggcaagcgccgtcgcatgctttcctcttcagatgccatcactcaagagttcatggacttaaggactcgctacacggcattggtgactttaacaactcagcacgtgaaatacatcagtgatgcactccggcgtctggaggaggaggagaaagtggtagaagaggagaaacaagaacatgtggagaaggttaaagaacttttgggctgggtgtctaccctagcgaggaatacacaaggaaaagctacctcatccgagaccaaagaatcaacagacattgaaaaagctattttggaacagcaggttctgtcagaagagctgacaacaaagaaagaacaagtctctgaagctattaaagcatcacagatcttcttggccaagcatggtcataagctctcagaaaaagagaagaaacaaatatctgagcaattgaatgccctaaacaaggcttaccatgacctttgtgatggttctgcaaatcagcttcagcagcttcagagccagttggctcaccagacagaacaaaagaccctgcagaaacaacaaaatacctgtcaccagcaactggaggatctttgcagttgggtaggacaggcagaaagagcactggcaggccaccaaggcagaaccacccagcaggatctctctgctttgcagaagaaccaaagtgacttgaaggatttacaggatgacattcagaatcgtgccacctcatttgccactgttgtcaaggacattgaggggttcatggaagagaatcagaccaagctgagcccacgtgagttgacagctcttcgggaaaagcttcatcaggctaaggagcaatatgaggcgctccaggaagagacacgtgtggcccagaaggaactggaggaagcagtgacctccgccttacagcaggagactgaaaagagtaaagcagcaaaggaactggcagagaacaagaagaagatcgatgctctcctggattgggtaacttcagtaggatcatctggtggacagctgctgaccaaccttccaggaatggagcagctctcgggagctagcttggagaaaggagccttggacaccactgatggttacatgggggtgaatcaagccccagagaaactggacaagcaatgtgagatgatgaaggcccgtcaccaagaattgctgtcccagcagcaaaatttcattctggccacccagtcagctcaggccttcttggatcagcatggccacaatctcacacctgaggagcaacagatgctgcaacagaagctgggagagctaaaggaacaatactctacttccctggcccaatcagaggcagaactgaagcaggtgcagacacttcaggatgagttgcagaaatttctgcaggatcataaagagtttgaaagctggttggaacgatccgagaaagagctggagaacatgcataagggaggcagcagccccgagacccttccctccctgctaaagcggcaaggaagcttctcagaggatgtcatttcccacaaaggagacttgagatttgtgactatctcaggacagaaagtcttggacatggaaaacagttttaaggaaggcaaagaaccatcagaaattggaaacttagtaaaggacaagttgaaggatgcaacagaaagatacactgctctccactcaaagtgtacacgattaggatctcacctgaatatgctgttaggccagtatcatcaattccaaaacagtgctgacagcctgcaggcctggatgcaggcttgtgaggccaacgtggagaagctcctctcagatactgctgcctctgaccctggagttctccaggagcagcttgcaacaacaaagcagttgcaggaggaattggctgagcaccaagtacctgtggaaaaactccaaaaagtagctcgtgacataatggaaattgaaggggagccagccccagaccacaggcatgttcaagaaactacagattccatactcagccacttccaaagcctctcctatagcctggctgagcgatcttctctgctgcagaaagcaattgcccaatctcagagtgtccaggatagcctggagagcctgttgcagtctattggggaagttgaacaaaacctggaagggaagcaggtgtcatcactctcatcaggagtcatccaggaagccttagccacaaatatgaaattgaagcaggacattgctcggcaaaagagcagcttggaggccacccgtgagatggtgacccgattcatggagacagcagacagtactacagcagcagtgctgcagggcaaactggcagaggtgagccagcggttcgaacagctctgtctacagcagcaagaaaaggagagctccctaaagaagcttctaccccaggcagagatgtttgaacacctctctggtaagctgcagcagttcatggaaaacaaaagtcggatgctggcctctggaaatcagccagatcaagatattacacatttcttccaacagatccaggagctcaatttggaaatggaagaccaacaggagaacctagatactcttgagcacctggtcactgaactgagctcttgtggctttgcgctggacttgtgccagcatcaggacagggtacagaatctaagaaaagacttcacagagctacagaagacagttaaagagagagagaaagatgcatcatcttgccaggaacagttggatgaattccggaagctggtcaggaccttccagaaatggttgaaagaaactgaagggagtattccacctacggaaacttctatgagtgctaaagagttagaaaagcagattgaacacctgaagagtctactagatgactgggcaagtaagggaactctggtggaagaaatcaattacaaaggtacttctttagaaaatctcatcatggaaatcacagcacctgattcccaaggcaagacaggttccatactgccctctgtaggaagctctgtaggcagtgtaaacggataccacacctgcaaagatctgacggagatccagtgtgacatgtcagatgtaaacttgaagtatgagaaactagggggagtacttcatgaacgccaggaaagccttcaggctatcctcaacagaatggaggaggttcacaaggaggcaaactctgtgctgcagtggctggaatcaaaagaggaagtcctgaaatccatggatgccatgtcatctccaaccaagacagaaacagtgaaagcccaagctgaatctaacaaggccttcctggctgagttggaacagaattctccaaaaattcaaaaagtaaaggaagccctggctggattactggtgacatatcccaactcacaggaagcagaaaattggaagaaaattcaggaagaactcaattcccgatgggaaagggccactgaggttactgtggctcggcaaaggcagctagaggaatctgcaagtcatctggcctgcttccaggctgcagaatcccagctccagccgtggctgatggagaaagaactgatgatgggagtgctggggcccctgtctattgaccccaacatgttgaatgcacaaaagcaacaggtccagtttatgctaaaggaatttgaagcacgcaggcaacagcatgagcaactgaatgaggcagctcagggcatcctaacaggccctggagatgtctctctgtccaccagccaagtacagaaagaactccagagcatcaatcagaaatgggttgagctgactgacaaactcaactcccgttccagccaaattgaccaagctattgttaagagcacccagtaccaggaactgctccaggacttatcagagaaggtgagggcagttggacaacggctgagtgtccagtcagctatcagcacccaaccagaggctgtaaagcagcaattggaagagaccagtgaaattcgatctgacttggagcagttagaccacgaggttaaggaggctcagacactgtgcgatgaactctcagtgctcattggtgagcagtacctcaaggatgaactgaagaagcgtttggagacagttgccctgcctctccaaggtttagaagaccttgcagccgatcgcattaacagactccaggcagctcttgccagcacccagcagttccagcaaatgtttgatgagttgaggacctggttggatgataaacaaagccagcaagcaaaaaactgcccaatttctgcaaaattggagcggctacagtctcagctacaggagaatgaagagtttcagaaaagtcttaatcaacacagtggctcctatgaggtgattgtggctgaaggggaatctctacttctttctgtacctcctggagaagagaaaaggactctacaaaaccagttggttgagctcaaaaaccattgggaagagcttagtaaaaaaactgcagacagacaatccaggctcaaggattgtatgcagaaagctcagaaatatcagtggcatgtggaagaccttgtgccatggatagaagattgtaaagctaagatgtctgagttgcgagtcactctggatccagtgcagctagagtccagtctcctaagatcaaaggctatgctgaatgaggtggagaagcgccgctccctgctggaaatattgaatagtgctgctgacattctgatcaattcttcagaagcagatgaggatggaatccgggatgagaaggctgggatcaaccagaacatggatgctgttacagaagagctgcaggccaaaacagggtcactcgaagaaatgactcagaggctcagggagttccaggaaagctttaagaatattgaaaagaaggttgaaggagccaaacaccaacttgagatctttgatgctctgggttctcaagcctgtagcaacaagaacctggagaagctaagagctcaacaggaagtgctgcaggccctagagcctcaggtagactatctgaggaactttactcagggtctggtagaagatgccccagatggatctgatgcttctcaacttctccaccaagctgaggtcgcccagcaagagttcctcgaagttaagcaaagagtgaacagtggttgtgtgatgatggaaaacaagctggaggggattggccagtttcactgccgggtccgagagatgttctctcaattggcagacctggatgatgagctagatggcatgggtgctattggcagagacactgatagcctccagtcccaaatcgaggatgtccggctattccttaacaaaattcacgtcctcaaattagacatagaggcctctgaagcagagtgtcgacatatgctagaagaagaggggactctggatttgttaggtctcaaaagggagctagaagccctgaacaaacagtgtggcaaactgacagagagggggaaagctcgtcaggaacagctggaactgacactaggccgtgtagaggacttctacaggaaattgaaaggactcaatgacgcgaccacagcagcagaggaggcagaggccctccagtgggtagtggggaccgaagtggaaatcatcaaccaacaattagcagattttaaaatgtttcagaaagaacaagtggatcctcttcagatgaaattgcagcaggtgaatggacttggccagggattaattcagagtgcaggaaaagactgtgatgtacagggtttagaacatgacatggaagagatcaatgctcgatggaatacattgaataaaaaggtcgcacaaagaattgcacagctacaggaagctttgttgcattgtgggaagtttcaagatgccttggagccattgctcagctggttggcagataccgaggagctcatagccaatcagaaacctccatctgctgagtataaagtggtgaaagcacagatccaagaacagaagttgctccagcggctcctagatgatcgaaaggccacagtagacatgcttcaagcagaaggaggcagaatagcccagtcagcagagctggctgatagagagaaaatcactggacagctggagagtcttgaaagtagatggactgaactactcagtaaggcagcagccaggcaaaaacagctggaagacatcctggttctggccaaacagttccatgagacagctgagcctatttctgacttcttatctgtcacagagaaaaagcttgctaactcagaacctgttggcactcagactgccaaaatacagcagcagatcattcggcacaaggctctggaagaagacatagaaaaccatgcaacagatgtgcaccaggcagtcaaaattgggcagtccctctcctccctgacatctcctgcagaacagggtgtgctgtcagaaaagatagactcattgcaggcccgatacagtgaaattcaagaccgctgttgtcggaaggcagccctacttgaccaagctctgtctaatgctaggctgtttggggaggatgaggtggaggtgctcaactggctggctgaggttgaggacaagctcagttcagtgttcgtaaaggatttcaaacaggatgtcctgcacaggcagcatgctgaccacctggctttaaatgaagaaattgttaatagaaagaagaatgtagatcaagctattaaaaatggtcaggctcttctaaaacaaaccacaggtgaggaggtgttacttatccaggaaaaactagatggtataaagactcgttacgcagacatcacagttactagctccaaggccctcagaactttagagcaagcccggcagctggccaccaagttccagtctacttatgaggaactgaccgggtggctgagggaggtggaggaggagctggcaaccagtggaggacagtctcccacaggggaacagataccccagtttcagcagagacagaaggaattaaagaaggaggtcatggagcacaggctggtgttggacacagtgaatgaggtgagccgtgctctcttagagctggtgccctggagagccagagaagggctggataaacttgtgtccgatgctaacgagcagtacaaactagtcagtgacactattggacaaagggtggatgaaattgatgctgctattcagagatcacaacagtatgagcaagctgccgatgcagaactagcttgggttgctgaaacaaaacggaaactgatggctctgggtccaattcgcctggaacaggaccagaccacagctcagcttcaggtacagaaggctttctccattgacattattcgacacaaagattcaatggatgaactcttcagtcaccgtagtgaaatctttggcacatgtggggaggagcaaaaaactgtattacaggaaaagacagagtctctaatacagcaatatgaagccattagcctactcaattcagagcgttatgcccgcctagagcgggcccaggtcttagtaaaccagttttgggaaacttatgaagagctcagcccctggattgaggaaactcgggcactaatagcacagttaccctctccagccattgatcatgagcagctcaggcagcaacaagaggaaatgaggcaattaagggaatctattgctgaacacaaacctcatattgacaaactactaaagataggcccacaactaaaggaattaaaccctgaggaaggggaaatggtggaagaaaaataccagaaagcagaaaacatgtatgcccaaataaaggaggaggtgcgccagcgagccctggctctggatgaagccgtgtcccagtccacacagattacagagtttcatgataaaattgagcctatgttggagacactggagaatctttcctctcgcctgcgtatgccaccactgatccctgctgaagtagacaagatcagagagtgcatcagtgacaataagagtgccaccgtggagctagaaaaactgcagccatcctttgaggccttgaagcgccgtggagaggagcttattggacgatctcagggagcagacaaggatctggctgcaaaagaaatccaggataaattggatcaaatggtattcttctgggaggacatcaaagctcgggctgaagaacgagaaatcaaatttcttgatgtccttgaattagcagagaagttctggtatgacatggcagctctcctgaccaccatcaaagacacccaggatattgtccatgacttggaaagcccaggcattgatccttccatcatcaaacaacaggttgaagctgctgagactattaaggaagagacagatggtctgcatgaagagctggagtttattcggatccttggagcagatttgatttttgcctgtggagaaactgagaagcctgaagtgaggaagagcattgatgagatgaataatgcttgggagaacttaaacaaaacatggaaagagaggctagaaaaacttgaggatgctatgcaagctgctgtgcagtatcaggacactcttcaggctatgtttgactggctagataacactgtgattaaactctgcaccatgccccctgttggcactgacctcaatactgttaaagatcagttaaatgaaatgaaggagttcaaagtagaagtttaccaacagcaaattgagatggagaagcttaatcaccagggtgaactgatgttaaagaaagctactgatgagacggacagagacattatacgagaaccactgacagaactcaaacacctctgggagaacctgggtgagaaaattgcccaccgacagcacaaactagaaggggctctgttggcccttggtcagttccagcatgccttagaggaactaatgagttggctgactcataccgaagagttgttagatgctcagagaccaataagtggagacccaaaagtcattgaagttgagctcgcaaagcaccatgtcctaaaaaatgatgttttggctcatcaagccacagtggaaacagtcaacaaagctggcaatgagcttcttgaatccagtgctggagatgatgccagcagcttaaggagccgtttggaagccatgaaccaatgctgggagtcagtgttacagaaaacagaggagagggagcagcagcttcagtcaactctgcagcaggcccagggcttccacagtgaaattgaagatttcctcttggaacttactagaatggagagccagctttctgcatctaagcccacaggaggacttcctgaaactgctagggaacagcttgatacacatatggaactctattcccagctgaaagccaaggaagagacttataatcaactacttgacaagggcagactcatgcttctaagccgtgacgactctgggtctggctccaagacagaacagagtgtagcacttttggagcagaagtggcatgtggtcagcagtaagatggaagaaagaaagtcaaagctggaagaggccctcaacttggcaacagaattccagaattccctacaagaatttatcaactggctcactctagcagagcagagtttaaacatcgcttctccaccaagcctgattctaaatactgtcctttcccagatagaagagcacaaggtttttgctaatgaagtaaatgctcatcgagaccagatcattgagctggatcaaactgggaatcaattaaagttccttagccaaaagcaggatgttgttctgatcaagaatttgttggtgagcgtgcagtctcgatgggagaaggttgtccagcgatctattgaaagagggcgatcactagatgatgccaggaagcgggcaaaacaattccatgaagcttggaaaaaactgattgactggctagaagatgcagagagtcacctggactcagaactagagatatccaatgacccagacaaaattaaacttcagctttctaagcataaggagtttcagaagactcttggtggcaagcagcctgtgtatgataccacaattagaactggcagagcactgaaagaaaagactttgcttcccgaagatagtcagaaacttgacaatttcctaggagaagtcagagacaaatgggatactgtttgtggcaagtctgtggagcggcagcacaagttggaggaagccctgctcttttcgggtcagttcatggatgctttgcaggcattggttgactggttatacaaggtggagccacagctggctgaggaccagcccgtgcacggggaccttgacctcgtcatgaacctcatggatgcacacaaggttttccagaaggaactgggaaagcgaacaggaaccgttcaggtcctgaagcggtcaggccgagagctgattgagaatagtcgagatgacaccacttgggtaaaaggacagctccaggaactgagcactcgctgggacactgtctgtaaactctctgtttccaaacaaagccggcttgagcaggccttaaaacaagcggaagtgtttcgagacacagtccacatgctgttggagtggctttctgaagcagagcaaacgcttcgctttcggggagcacttcctgatgacacagaggccctgcagtctctcattgacacccataaggaattcatgaagaaagtagaagaaaagcgagtggacgttaactcagcagtagccatgggagaagtcatcctggctgtctgccaccccgattgcatcacaaccatcaaacactggatcaccatcatccgagctcgcttcgaggaggtcctgacatgggctaagcagcaccagcagcgtcttgaaacggccttgtcagaactggtggctaatgctgagctcctggaagaacttctggcatggatccagtgggctgagaccaccctcattcagcgggatcaggagccaatcccgcagaacattgaccgagttaaagcccttatcgctgagcatcagacatttatggaggagatgactcgcaaacagcctgacgtggaccgggtcaccaagacatacaaaaggaaaaacatagagcctactcacgcgcctttcatagagaaatcccgcagcggaggcaggaaatccctaagtcagccaacccctcctcccatgccaatcctttcacagtctgaagcaaaaaacccacggatcaaccagctttctgcccgctggcagcaggtgtggctgttagcactggagcggcaaaggaaactgaatgatgccttggatcggctggaggagttgaaagaatttgccaactttgactttgatgtctggaggaaaaagtatatgcgttggatgaatcacaaaaagtctcgagtgatggatttcttccggcgcattgataaggaccaggatgggaagataacacgtcaggagtttatcgatggcattttagcatccaagttccccaccaccaagttagagatgactgctgtggctgacattttcgaccgagatggggatggttacattgattattatgaatttgtggctgctcttcatcccaacaaggatgcgtatcgaccaacaaccgatgcagataaaatcgaagatgaggttacaagacaagtggctcagtgcaaatgtgcaaaaaggtttcaggtggagcagatcggagagaataaataccggtttggggattctcagcagttgcggctggtccgtattctgcgcagcaccgtgatggttcgcgttggtggaggatggatggccttggatgaatttttagtgaaaaatgatccctgccgagcacgaggtagaactaacattgaacttagagagaaattcatcctaccagagggagcatcccagggaatgacccccttccgctcacggggtcgaaggtccaaaccatcttcccgggcagcttcccctactcgttccagctccagtgctagtcagagtaaccacagctgtacatccatgccatcttctccagccaccccagccagtggaaccaaggttatcccatcatcaggtagcaagttgaaacgaccaacaccaacttttcattctagtcggacatcccttgctggtgataccagcaatagttcttccccggcctccacaggtgccaaaactaatcgggcagaccctaaaaagtctgccagtcgccctgggagtcgggctgggagtcgagccgggagtcgagccagcagccggcgaggaagtgacgcttctgactttgacctcttagagacgcagtctgcttgttccgacacttcagaaagcagcgctgcagggggccaaggcaactccaggagagggctaaacaaaccttccaaaatcccaaccatgtctaagaagaccaccactgcctcccccaggactccaggtcccaagcga

SEQ ID NO: 87111 - DNA, 788 bp, Homo sapiens
gtctcgaattcccgtgtcgacgatttcgtggttggggagttgtggccaggcaggagagggtcaatgactgagagggagacatggtcctggagacggagagagaagccagctctgccaagaagctgagctgcagaggcctggctgggggccggcagtgttttattgtatctcattaaagtgagagagacaggagcatacactgatgtcagtatgcatgtcaggttgaatatgtatgtgcttcaacccttagctctgtctcctctgtcttgtgggagtgacggggaacaagccctgggctgcgggctgtgcttgctctgtgtctggagtttactgaattcagttgacccatgcccgagacactgctttgacctttccctgggccgaaggccccaatttggggagagatttccttggtcatgagcccctagggctgactgcttattctttctccttttcagatggatgagatcaaagggaaagaccgtgtgattctggccttggagaaggaacttggcgtgcaggctgggcagacccagaagctgcttctgcagaaagaggctttggatgagcagctggttcaggtcaaggaggccgagcggcaccacagtagtccaaagagagagctcccgcccgggatcggggacatggtggagctcatgggcgtccagggtcaacatatggacgagcgagatgtgaggcgatttcaactaaaaattgctgaactgaattcagtgatacggaagctggaagacagaaatacgctgttggcagatgagaggaatgaactg

SEQ ID NO: 87112 - DNA, 448 bp, Homo sapiens
gtcttacatttcgaggggaggagacagcagccaccgtcacccccggagcccggcggttggagtagcagcagcagcagcagcgcggcgaggagacagcagccagccgcagtagccgccgcagccgcgggagcaatgcagacagcaccttgagaacgcgctaaagcactccaaaccgtggaccatgccgtgtccctgcaactgggaggggggaaaaccagattttttttgacataaaagcaagccagccaaaaatatataattttgtccttcaaggagccggtgtgtaaagagtgagcgctattttccttctcctcctcctcctctccctcctccttctctgcctccttgtctctctgctccttctcctcttctttttcctcctcctcctcctccctaagtgtacagacagcatcacatcacctggtttgcttctgagaaacagcatctc

SEQ ID NO: 87113 - DNA, 608 bp, Homo sapiens
tttcgtgccgctcatcgggctacccaaccctgcgctcccctcccagcccgtgtcctcccgctgctctttctcctcctcctgccgagcctcctcccctccggcgcggcgccgccagccagcctcggcggggagagtgcaggtactttgccttcagaataattagcaggacccaagccggctttccgagcgcgctttctttttcttcctttgccccctccctccggaaaagaagatcccacttttgaaacaatcagaaatcgaagcaccccaccaaagccaaaccctgacgggctgctgtgcatgtgccatccctttttgcagtttattctgggcctgtgtggaatagaaagacaattctttatttgactggtaggaaagaaaagagaagactcctcagggtttccaaggaggactggagcggctgctttagtgaagaagtgaagaatcaaggaagtaaaggacctgtctcaaagtcacacaactaggaaatcttgaggagtctgagacttttcatcctccagctataaaatcatcttgtagggggaaagctgacattggtggaaaataaaaaagcagcagttccttgccagtgatattcaagtagaggg

SEQ ID NO: 87114 - DNA, 1386 bp, Homo sapiens
tgcctgcggcaccggcccttaatggccgggtcgacccacgcgtccgagaatgtggcaaagcttttaaccaatcctcatactttactatacagaaattcatactggagagaaagcctacaattgtgaagaatgtggcaaagcttttaaccttccttaacccttaactgtagataagaaaattcatactggaaagaaaccctacaaatgtgaagtctgtggcaaagcttttaactgattctcaactcttactacatgtaagagtatttatactggaaagaaaccctacaaatgtaaaaaacgtggcaatgcctttaactggtcctcacaccttgctacatataagacagtttatactttgagagaaaccctgcaaatgtgaataatgtggcaatactttaaaccaatcctcaaacctcactaaacataagataatactgaaaactttacaaacctgaatgatgtgacaataattttgacaacacctcgaactttctaacataaatcatactggtgaaaaatcctagaaatgtgaaaaatatcacaaagcctttaaatggttgtcacacttgattgtaggtaagaatccatactgaagaaaactcctggaagtgtaaaaaatgtggcaacacttttaataaatgctcaccccttattgcacaggaaagcatttatacttcagaaagattgtacaaatacaaggaatgtggaaaagccattattatctgctcaaattttactcaacattagagagttagtacggaatataagcattataaatgcaatttttggcaagagatctttcagaaaatataagcctttaaagtgaagaagaggagccagttgtgctggctcacatctgtaatgccagcactttgggaggccaaggtgggtggatcacctgagggcaggagtctgagaccagcctggccaacatagcaaaaccccatctctattaaaaattttacaaaaattagctgcgtgtggtggcaggcccctgtaatcccagctaattgggaggctgaagcaggagaattgctcaaacctgggaggcgaagattgcagtgagctgaaatcacaccactacactccagccaaagcaacaagagcaaaaacttcgtctcaaaaacaaaacaaaaaaagagtattcattgtgaggacaaacaatacaaatacgaagagggttgtagtacctttacttgtatcacagatacttttgtacccattttgcactagaggaaaaccatgaagcagttgctcaaatgttgttcaacaccagaaaatttatattggagaaaagcactgtaaatgtaatgcatttgtgaaaacattttttaaaaaactacagcttagaaaataccagaggcctcatactaaaatatattttgg

SEQ ID NO: 87115 - DNA, 554 bp, Homo sapiens
  misc_feature (1)...(554): n = a,t,c or g
cgaggcatttctctatctgcccaggtgacggttccttttgtccctctgtttggctggcctctggactgtagttccaggagggcaaaagcatgaccccagagctgggccttggcacctgggcataccccaggctcctcagcctggttcccaagcctggctggtactgccgctggcatccttgctgtcctcaccccgacacaggtgtgcctgggccttgcacaacaaggtgacgccatgcgagcgtggcagggccggggaagcctttgctcctcaccctggggaggcccatgaggggctgcaggtggagggagggtggcaccgggccccagagccaggagcccctgctgtccccggatggccgagacccttggagggccttgggagaggcggtggggcatctggacaaatgcctggtgcaggtgagaaggggtgggactacctccggcatccctgggctgagcccacctggtctccccggttgctcctgcacatggcagngcccacctgcttccctcaactcctgaggggctgggcagagcctgttgctcacgcca

SEQ ID NO: 87116 - DNA, 482 bp, Homo sapiens
  misc_feature (1)...(482): n = a,t,c or g
cagattggagaccctcagagggcccctcagggcccagctgctgccccccggccgatggcctgtgcgggcccaaagtgtcctgaagtcggtctcgccaggcccagctcctgcctgtcgtaagcccctggacttgaggcacggcctctgcctcctcacagtggacccccaccaggcccagctcttgcctcagcatggccgcctcaggccaggctcgtgttctgcctgtgggcagcctccacgggcccggctctcgcctctggccatcctctccaggcccagaagtgtttccagccagcctctccaggcccagctctccctgccggctgcgcctgccggcccagctcctgcctcgcaacagccacgttcggcccagctcctgcccagctcctggcagcctttgtaggccccaggctcctcgaagagaggcctctcaggccccgccttcggctccctggcggcctgaagagtcccagccactgccn

SEQ ID NO: 87117 - DNA, 453 bp, Homo sapiens
ttccattgtgcggtgcaatggcactgctctacagaactgcacgacaactgcaatccatgaaagacatacaaatggctgactcgttaggaatgaaggtttgggtccaccaggcgaaaaaacatgaccagccgaggggcttgttgaaggcaaagggaatacagaatggatattagaagaaggtagttatcaagaccaactatgatcacgtgactggttgcagaaaaaatgactgtaattgtcatgaatatttcctccttattttgttaagaatatgtttgtgcatgtacacacctttactaagaaaatctgttttatttcctttctttttcctttgtcatgtaacgtaagatttgttgactttatatcagcatttaagtgttgctactttatgtaataatatttaggttaaggacgggtgcgcttccggctgtacgaaggatagttgcattatgt

SEQ ID NO: 87118 - DNA, 987 bp, Homo sapiens
tggcttttaccccggtgggtaaggcactttccaattcctactgctgactccattcatggatttccagaattaattattaatgtgctcagtcatgctgccccttgggcctaaaatttctggtgtatattacctacccttacttcttccacaaaacattgagtacaatggtctttacatcactttatttcatgaagtaactattgctatacccattttacaggagacaagatggaatcttacagaagtgaaatcataatcccaaggtaacaccccttctaatttgaagtgtcatcttctggctgcaattgtgatctactaaagcacttatgatttttaatatctgagtttttgccttctgcatcttccattagaccatgaaacacttgaagacagtggctaggacttacccattttagtatccgtcataccagctaaagtcctggttcatagcaggtgcttagttactgaatagatgatgaatgaaaaagttattagtaaatttatatatttggtgaatacaatcaacaaagggagcctcaccttgggatctatgccttatttggcttatttcaggaacaggttacctggggttgttacttttcctccagtctccaaaggttctaaggatttgaacaaatccagacagaaataatgagcaaagctgcaattagaatttggactgtctgattgcatgtcttctaaagtatgcagtacagctaacaacaaggatatgatcaaaacttatgtaaataataaatattcatctttcttactcttgctttaactcagtggtaccaccatgtttaatatttgcttaatcaagcactaattttttaaaaagctatttctacattcaaatatttcagttgataatcattagcaatttctcaagatttttaaaatgtggagcgcattagttttctattttaatttgtgactttggaaatgaatatctaagcattaaatgttgaacgcatggtacagtga

SEQ ID NO: 87119 - DNA, 562 bp, Homo sapiens
aagaaaccattattttttattctaaatcaactgtagcttctcctggaagccagtattaacaccctagagttgtgaaatctgcgtgttaagcaaccgctcccatccgttcccctagaatatagccatctgcttaatttctcctggaggtttttctaaattctgccctcatttccagagatgctgtcttacaacttttaaatttttgctctaacttgcaatctgtaagataaggccaccatgtggaatacagtggtgtaagccataagaaaggaaaaccccggaaggcacatgtatggtactcctgccagggcaagctgggtgccctgtgtttactgagtgaaggcgtggctgtgcgtcccccctcgctgccgctgctgggagaggaatgccttatgcggactttggccactttaatccagcagaggtttgagcacctacctttactgtgtgggactttctgcctgctccagtgttcagagggtagatacagagatgaggaggctgctctcagagtccccactcagaggaacatcagagcagggggccctaagatgggcacagg

SEQ ID NO: 87120 - DNA, 443 bp, Homo sapiens
tctgaattcctggtcgaccacgcgtccgcccgcttctcctcaagctaatttatctaaaaagataagatttttttgctagatctgttcccggcacggtggggtggttgaagtcctcctgtgaggccctctgccttatggagatcagtgcagtgtcagtggcacgaattggtgcctggccaggagcacgctctgctcctttacaggagagcccttgacaggcactggagggctcagattgttacctgcgcccgtcatgactgcaggggtgctgcgttgatcatgcagcttctactagagcgtttttggtaaaatttgggacatggtagttgacttgaatgtgtcagtcttgcctgcaggtcatcatccgtcatctcagccatggtcgtgctggattgtctttcttgtttttgagacagcctctctctctgtcacccagtcgccca

SEQ ID NO: 87121 - DNA, 501 bp, Homo sapiens
cggacgcgtgggaagttgcacgagtagaacaagtactttccacttacccttgacccagacccgtgtgtgggctcgttccccggtcacgcttgacccgggcccacgtgtggcctcgttccccggtcacgcttgacccggacccacatgtcgcctcgttccccagtcacacttgttccttctcccttcacggtcccgcccgtgcttttctgattgtatcaacacttccaagtgtgtttcccaccgtgcagtccccaaaaccacagcagccaccatcgcacgtcgccggcgcgaccacattcgagtttgccgctgtccagtcccgttcttccggctgaggttccttcccctctggatccagtctgcgctgcattctgctgccccctccgtctggcccactggacactcccagcctttctttgtgtgtggtggccttggcatctttgaggcgtgcaggccttcggttttctggacgtcccttcctgtgggtttgtcggatgtgcc

SEQ ID NO: 87122 - DNA, 1482 bp, Homo sapiens
  misc_feature (1)...(1482): n = a,t,c or g
cgttgttcgacacgtcgcgagaggagagcgggacgcgagggcgtgccacacgtctcctctcgcccccaacatagttatttgaaaatggcttgaaatgcgaccagtaaaaccatagatcaaaaaaaatctcaaaatataatacattaacagacaatgatatagctctaccaaacattcacacgcaggcaacagaataagcctttgggtttacaaaggacattttacagtcaaagggccacctgccctccttccttccctgactacattctcagggaagcttttccttgcagacacttcgttgcaaggtcagctttctctctcagcacgttggcttcgtcggcgcttctgtgggcctgtgcgttctttagcaagaagtggctgatgaaaagcttcaaaccctcacgtaacatccccagctttgggttgtcagatagtcttgtgaaaattaaactgaggtcttcaacttctgtttccattaataggatacttaatacttttcgtaaaaaaacggactctgggtttgtccaattcactgaattcaactacctttaagatggaaagggaaagcgattttgtcttcaacaagtgggccaccagatgaaccaaattagagaaattcgtagctggcaagttttccaagtcccgaaatttgtcccatatgctgaactggaaagtcatctgaaatctcctttcatattcacagaatttgctagccaggaaagcatagaagggattgtaagttttctcttgaaggcagcaatccatgagaacgtgaatgatttctctctcctgctgatccttaagtccaagcctagaaaacagaacagcaatgactggaacatcactcgacttccaaagtttaatggctgatacctttcaggggaacatcttcccgcctggaagggtctggttagaggcgagccacgtaaaggaggtggaggcagcggcagacaccagctaggggcccagccctgtcacaacctctctggtcctcaggttctcctacaatgtggcaaaatgtcagaggagacaagaccatctagggggtcccccgtcgctgcaaaagtcgacagctgtgcccggctgacaataaactgactcaatcgtgtgtgcccttagagctggttcctgctatngcattgacttcacatttttttttttttgagacagtcttgctctgtcacccaggctggagtgcagtggcatgatctcagctcactgcaacctccacctcccaggtccaagcgatcctcccacctcagcctctcgagtagctgggattacaggtccccaacaccactcctggctagtttttgtatcttcagtagaaacagggtttcaccatgttggccaggctggtctcaaattcctgacctcaagtgatctgcccgccttggcctcccaaagtgctaggattacaggtgtgagccaccctgcccagcctgtacctcccggacgcgtgggcggacgcgtgggcggacg

SEQ ID NO: 87123 - DNA, 412 bp, Homo sapiens
ggcctcgtgccaagcttggcacgaggaggagaggcaaggaggaggctgagcagtgatctgggcaaggctagcaggcctgttcaagggtgcgggtatggagggtgggtggcagggagtgatggtgcccagctggtacccttgacttccctggtccccaggaaatggtgttgctggagattgaggtcatgaaccagctgaaccaccgcaatctgatccagctgtatgcagccatcgagactccgcatgagatcgtcctgttcatggagtagtgagtgcccgaagtagtggtaggggctgggtgggggtaccaccaggcacggagcaagccgtggaggggtctgtgcacacagcatcgagggcggagagctcttcgagaggattgtggatgaggactaccatctgaccgaggtgg

SEQ ID NO: 87124 - DNA, 515 bp, Homo sapiens
ccgataagccctacgaccaggatcacgccaagcttggcacgagggctggagcacaggccttagtgcccccaacagccccagccctataaacatgcaggggtgcaggggcgtctccccgaagcccaagctcacagagctgctcaggccctccaggctgtggtccctgcagagccaagttggccctgatgatcacatctgcccctctctgcccgcagtgccaccaagtggttggtgtagacgtggagtggacacctgtgtttgttgctgggggccggcctcggccgtcactcctgcaggtggccgtggagggccacgtgttccttctggacgtcctggcactctcgcagccaccaacagggcagggagcccaggccttttcccggctggtggcccagctcctctcggacccctctatcaccaagctgggctacgggatggtgggggacctgcaaaaactgggcacgtcctgccccgccctggcccatgtggagaagcagattctgggcggcatggac

SEQ ID NO: 87125 - DNA, 1343 bp, Homo sapiens
ccagggaataccagtcaccatgaatggttttaggaagagcaagtcaagggaggtaagtgtggaggaaagagatgatgtggaagctggatcatcgcgggccttgtgtgtgttgagctcagcaatttgaattttatcccaacattggaggaggagtcatttgtgctttcgaagtccagtttggggctttggcctctggcagcattttggaggaggaattgatggcgcgtgcctgtagtcccagctactcgggaggctgaggtgggaggatcgcttgagcccaggagttctgggctgtagtgcgctatgccgatcgggtgtccgcactaagttcggcatcaatatggtgacctcccgggagcgggggaccaccaggttgcctaaggaggggtgaaccggcccaggtcggaaacggagcaggtcaaaactcccgtgctgatcagtagtgggatcgcgcctggagtgcagaggtgtgatctcggctcactgcaacctccacctcccgggttcaagtgattctcatgcctcaacccccaagtagctgggattatagacgtgcactaccacacctggctaatgtttgtattttacgtagagatggggttttaccatgtggaccaggctgctctcgaactcctgacctcaagtgatccatccacctcggcctcccaaagtgctgggattacaggtgtgagccactgtgcccagcctattatattttgagcaagagtctcactctgtcacccaggctggatggagtgcagtggcacaatcttggctcactgcaacctttgtctctggaggatcgcttgagtccaggagttctgggctgtagtgcgctatgccgatcgggtgtccgcactaagttcggcatcaatatggtgacctcccgggagcgggggaccaccaggttgcctaaggaggggtgaaccggcccaggtcggaaacggagcaggtcaaaactcccgtgctgatcagtagctgggactacaggcacccaccaccacgcccggctatcaaatttattttaataatagtgaaattcgctgggtgtagtggcacgcacctgtagtcctaggtactcccgaggctgaggtgggatgatcacttgagcccaggagttctgggctgtagtgcgctatgccgatcgggtgtccgcactaagttcggcatcaatatggtgacttcccgggagcgggggaccaccaggttgcctaagagacggggtctcgctatgttgctcaggctggagtgcagtggctattcacaggcgcgatcccactactgatcagcacgggagttttgacctgctccgtttccgacctgggccggttcagtcgacgcgg

SEQ ID NO: 87126 - DNA, 444 bp, Homo sapiens
ccattcgtccagtgcggtggaattcgctggccctagccctgaagggcaacaccaccctccagcagctggacctgcgctggattatacgttggcctcctggggggccgggccctcatgaactgtctccccagcaacagaaccctgtggagactggacctggctgggaacaacatccctggagatgtcctcagagccgtggagcaagccatgggccacagccaggaccggctcaccaccttccaggagaaccaagcccgcactcacgtcctcagcaaggaggtccagcacctccgggaggagaagtccaagcagttcctcgacttgatggagactattgataagcagcgagaagagatggccaagagcagcagggcgtcggcagcccgtgtagggcagcttcaggaagccctgaatgagaggcactccatcatcaacgctctcaag

SEQ ID NO: 87127 - DNA, 448 bp, Homo sapiens
gtcgtggaattcggcggatcttttagctctaaacctctatggttagaaacaaagaaaagtctcaaattaattacttcagtttccacattaagaaactacaaaaagaagagctaattaaacacaaaataagtgaaagaaaggatatagtgaaagtcaaagtggaacagaaaacagaaaaccaacaaagaaaattgatgaaactaaatgctgattctttgagaatattgataaaattgccaaacagatttatggggtgggtggggaaaaacagcacagtttatgaatatagaaaatgaaagaggtgatatcattagagattgtacagggattaaaacgataatcatgggtattatgacaactttatgccaatagatttgacaacctagatcaggggtgaacaagcttcgtctgcagagaactagatagtaagtatttttggctttgaggg

SEQ ID NO: 87128 - DNA, 453 bp, Homo sapiens
cgcgggaattcctgcccttcacctgagtgactcactaaaactccgtctccaagggaaaagggaaggggagtgttgtcagtgctactcatgatgatatagaaatgtagggtgatttttgtcaaaatcccaatggtattttttttgcagaatttttgtgtataattctaaacgttgcttaggacaggtgactagccaaacaccctttaaaaagaacaaagaggtattacattttctgattcaaaatcatgatacaaagctacaaaaataaaaacaatgtggtattgccacaaaaacagatacatagatgacgaaacagaatagagatcccagaaataaacccttgcatatgtgataaaataatcttccgtaagctttccatgaccacacaatagaaaaataagaatccatttaacaaagagttttccaaattgaatatttacagagaaaaaaatg

SEQ ID NO: 87129 - DNA, 465 bp, Homo sapiens
agtccagtgcggtggaattcgatgacaattctgacgagagcgcagactcggagcctcacaagtacatctgcaagcggtgccagctcaccttcggccgggggaaggagtacctgaagcacatcatggaggtgcacaaggagaagggctatggctgcagcatctgcaaccggcgctttgcactgaaggccacctaccacgcccacatggtcatccaccgtgaaaacctgccggaccccaacgtgcagaagtacatccacccctgcgagatctgcgggcggatcttcaacagcatcgggaacctggagcgccacaagctcatccacacaggtgggaaaaagccacgcctgcgagcaagtgtggaaagcccttggcaggaaagaacatggctgaaggagcaacatgcgtgtgcacgacaattgtccgcgagtaacctgtgtgcccgagtggtgggaaaaggcatgaaaa

SEQ ID NO: 87130 - DNA, 2037 bp, Homo sapiens
cacccggaggggaccctcttctatcagtagcagatacagctgcgcaagggcaaaggccccaagatagaagaatttgtacccccagatgagagctgtcccctgaaagaggcttctagcaggaggatccccaggctgactgtgaaggcacgggagcactgcctgcggcttctggaggaggcgctgagcagcaaccgccagtcaacacgtaccgctgatgaagctgacctccgggccaaggccgtggagctggaacatgagacattccggaacgccaaggtggccaacctctacaaggccagcgtgctgaagaaggtggccgatatccacagagcctccaaggatgggcagccctatgacatgggaggcagtgccaagagctgcagtgcccaagctgagcccccggagcccaatgagtatgacattccaccagcctcccatgtgtactcgctcaaacccaagcgggtgggagctggtttccccaaaggctcctgcccgttccagacggccacggaactgatggagacgactcggatcagggagcaagccccccagcccgagcggggaggcgagcatgagcccccgagccggccctgtggcctcctggatgaggatgggagtgagcccctccctgggcccagaggggaggtccctggaggcagcgctcactatggggggccctcccctgagaagaaggcaaaaagttcctctgggggcagctcccttgccaagggccgggctagcaagaaacagcagctcctagccacagcggcccacaaggattctcagagcatcgcccgcttcttctgccgaagggtggaaagcccagctctgctggcatcagccccagaggcagaaggtgcctgcccctcctgtgagggggttcagggacccccgatggccccagagaagtacacaggggaggaagatggagccgggggacattcgcctgcccctccccagactgaggagtgcctcagggagaggccaagcacctgcccgcccagagaccagggcacccctgaagtccagcccacccctgcaaaggacacatggaagggcaagcggcctcgatcccagcaggagaacccagagagccagcctcagaagaggccacgcccctcagccaagccctccgtcgtagctgaggtcaagggcagcgtctcggccagcgaacagggcaccttgaatcccacggctcaagaccccttccagctctccgctcctggcgtctccttgaaggaggctgcaaatgttgtggtcaagtgcctcacccctttctacaaggagggcaagtttgcttccaaggagttgtttaaaggctttgcccgccacctctcacacttgctgactcagaagacctctcctggaaggagcgtgaaagaagaggcccagaacctcatcaggcacttcttccatggccgggcccggtgcgagagcgaagctgactggcatggcctgtgtggcccccagagatgaccaactgctggctgggcagggcccgcgtcctcccccagattctagcatgggtcatcctgggcctcacctgctgatgccagggccatcgtcttttctcagtccttctcctttccaaccatacttggctttggggatgaccccagacaccccctgaatccaggtcagaggtcagcccacctttctttctgcttgcaaagcctatagacccttctcagagcggtcctcatggctgggttttctgggacacatgtcgaggacagaaggtggagggtggtggagctgctgctggaagaaggggaaggaagagtggcccctccccgagttctaagtcaggatgaggcccacctgtccaaggtatcggaacctacccaggggaccctcagatcctccacccactcccccatccattacgatgccagcttccagccttgcccaggtcagagctgtggcagaggagaggcagccaggccctgttcctgctcagctcctgctcaggaaggccaggcctgacagatgtttgggagaggaataaagttgtgttgttgtggggcaaaaaaaaaa

SEQ ID NO: 87131 - DNA, 525 bp, Homo sapiens
  misc_feature (1)...(525): n = a,t,c or g
taggctgccttctctccatcagtcctgattatggtgttgatcgtggtcatgtcagtgtcacagaccttcatatagcctgtttgatctggtgcttgttggctttgataaccacagtgaacacagatgtgggattgtcttcttcatggtcagctcagggggcaaggggaacttgatggcataatagtccagcttgtatatcctgcaggttctctactgaggatgtttgggctaccttcaaagccaaagtgtgttgggctactggaacataggtgacctgcagatatttttttgcgtgtgtgactggatgcctttcaacactgccttgctggccttaaaagccttagctttggatttggctttgggaggagcagggatttccttctttgctttcagcatcatcattttggtgaaaagggttgacacctggatttttatatctatttctatattcagnctggtgtggtatggtatggcgttttggtagaagcatatgaagaaaatgaaagctcatggaaataggtagtg

SEQ ID NO: 87132 - DNA, 1034 bp, Homo sapiens
gttaggtaatgggaccgaccttatggggccttaataggctgcagtgtgttggactcggctcctctcaatgattgtatgtctcccactggagactttatggcagcttcccatgtggaccgccttggaatttatctatggtgcaatatttccctgtattcagttgtttcagtacggccacttcctgcagattatgtcccttcaatagtcatgcttcgtggtacttgtcaaacccaagatgtagaagtttcagaagaaacagtagaaccaagtgatgaattgatagaatatgattcgccagaacagctgaatgagcatttggtgactctttcacttcttcctgaatcacgatggaaaaaccttcttaaccttgatgttattaagaaaaagaataaaccaaaggaaccacccaaagtacccaattcagcaccatttttcattccaacaattcctggccttgtacccagatatgctgcacctgaacaaaataatgatccccagcagtctaaagtggtaaatcttggagttttggctcaaaaatcagatttctgcttgaaacttgaagaaggactggtaaataataagtatgacactgctctcaaccttctggaaagaatcagggcccatcaggaattgaaacagagctgcgaagcttgtctcctgattgtggtgggtccatagaagttatgcagagcttcttgaaaatgattgggatgatgctggacagaaagcgtgattttgagttagcccaggcataccttgcattgtttctaaagttacaccttaaaatgcttccttcagagccagtactcctagaagaaataacaaatttgtcatcccaggtggaagaaaactggacccatttgcaatcactcttcaatcaaagcatgtgtattttaaattatctcaaaagtgctttgttgtaaaaataaatttgtgactaaacaaagactttcatattaaatgggttcaattgaactcatttcttattttccaagtgtcaatgtgaaaagaaaataaatgctagcactactgaa

SEQ ID NO: 87133 - DNA, 1108 bp, Homo sapiens
aggtgaaggacccggccggaattcccgcgtcgacgatttcgtcgcggagccgggcagaggttttaggggtgcgcaggagtcaagtggtggttcagtggggacggtgaggtggaggacgatctggtcggatagccgcgggcacgaacctgggaaccagagggtggaggccatgctggggactgatgtagggcgggaccgactggaagcggcatccagaggcccagtgagcctcggtctcagctcctgaaggggttgcatggggccctacgcttccttctccattttttagctaagagattgagagagtcggtttacttttgggcttggagtatcatttagatctgttaacagtacagttgagagagttggtgtcttttgttgaggtgcgaggacccgaggcggcgaccctcgcctttattcggagaagcccacttccacccacagagttggggtagtcctccgaaatgcatttttgttttgccgtttgttttccaaccccctttcactctccccaaagcttcagattcactgatttttcatacaggaatgattaacaaaggcgtccgaagaaatcgttgttggaaggtgaccaaggtggaaagagacgttgctttggccctgcaagtaagaagagagagggaatagcctgaaggagtaacactaaatttaaaatgacacttttttaccaaccagcgaaagcagatgttcaaaggggatattggccaggtgcggtcgctcacgcctttaatcccagcactttgggggcagacgcggggagatagcgtgattctaggagttcaaccccagcctgggcaacatgcggagaccccgtaccgtctctacaaaaacattaaacaaaaaaattagctgggcatggtggtgtaccctgtagttgcagctacactagaggctgaggtgggaggatcgcttgagcccgggatgttgaggctgcagtgagcctcgatcctaccactgtgctccagcctgggacagcaagcccgtgtctcagaaaaggcgggaggggtgggatattattgatgataggccttctgacgtctggcaatagattccagagtaacatcggtcatggataaattttttttttaac

SEQ ID NO: 87134 - DNA, 1319 bp, Homo sapiens
ctgccatcgcccccaaggatgacctcttctatggcttcctaaaaccttggctaggggatgggctgctgctcagcaaaggtgacaagtggagccggcaccgtcgcctgctgacacccgccttccactttgacatcctgaagccttacatgaagatcttcaaccagagcgctgacattatgcatgctaaatggcggcatctggcagagggctcagcggtctcccttgatatgtttgagcatatcagcctcatgaccctggacagtcttcagaaatgtgtcttcagctacaacagcaactgccaagagaagatgagtgattatatctccgctatcattgaactgagcgctctgtctgtccggcgccagtatcgcttgcaccactacctcgacttcatttactaccgctcggcggatgggcggaggttccggcaggcctgtgacatggtgcaccacttcaccactgaagtcatccaggaacggcggcgggcactgcgtcagcagggggccgaggcctggcttaaggccaagcaggggaagaccttggactttattgatgtgctgctcctggccagggatgaagatggaaaggaactgtcagacgaggatatccgagccgaagcagacaccttcatgtttgagggtcacgacacaatgatccagtgggatctcttggatgctgttcaatttggcaaagtatccggaataccaggagaaatgccgagaagagattcaggaagtcatgaaaggccgggagctggaggagctggagtgggctcgaattcgaattgatagcaacccaacccaccgggcagacgtgaccacaaagcagacaacccacacatttctcggtattacaatgcggtgtgcgggttttctcgctccattccatcgcctggtgaccgccgtcgtaacaggaaatataacagcgtccacagccaacacatttatcaagattgatacggggatagacaatataactgcggtctaaatcttccgccgggacaatattgttattcgccagacctaccatctcctgcagcgaatcaaatccctgatcggcgagataatgcgacaacccgcttgccatatcttccactatccgatacccgtactgcatgatgccggtggtcacctgtaacgttgctgcgccgagcaataaaaactcagccgcatcctcccaggtttcaatgccgccgataccgctgattgggaaatcgcgcagttctggatgggtgcgcatttgtaaaaccaccggcaggagtgataggccaaaaagtgaaggcggaggagtacgattaaccaatagtacataaagaagtg

SEQ ID NO: 87135 - DNA, 1567 bp, Homo sapiens
ccgccagcctgggctccgcgcagcccactgatctgggcgcccacaagcggccggcatccgtgtcgagcagcgctgccgtggagcacgagcagcgtgaggtggcagccaagcgagaaacaaccgccgccgcctgcgcaccggggcccggccgacagcctgtccaccgcggccggggccgccgagctgagcgcggaaggtgcgggcaagagccgcgggtctggagagcaggactgggtcaacaggcccaagaccgtgcgcgacacgctgctggcgctgcaccagcacggccactcggggcccttcgagagcaagtttaagaaggagccggccttgactgcagttgcaagaacagcaaggaaaaggaagccctctccagaaccagaaggtgaagtcgggccccctaagatcaacggagaggcccagccgtggctgtccacatccacagaggggctcaagatccccatgactcctacatcctcttttgtgtctccgccaccacccactgcctcacctcattccaaccggaccacaccgcctgaagcggcccagaatggccagtcccccatggcagccctgatcttagtagcagacaatgcagggggcagtcatgcctcaaaagatgccaaccaggttcactccactaccaggaggaatagcaacagtccgccctctccgtcctctatgaaccaaagaaggctgggccccagagaggtggggggccagggagcaggcaacacaggaggactggagccagtgcaccctgccagcctcccggactcctctctggcaaccagtgccccgctgtgctgcaccctctgccacgagcggctggaggacacccattttgtgcagtgcccgtccgtcccttcgcacaagttctgcttcccttgctccagacaaagcatcaaacagcagggagctagtggagaggtctattgtcccagtggggaaaaatgccctcttgtgggctccaatgtcccctgggcctttatgcaaggggaaattgcaaccatccttgctggagatgtgaaagtgaaaaaagagagagactcgtgacttttccggtttcagaaaaacccaatgattacccttaattaaaactgcttgaattgtatatatatctccatatatatatatatccaagacaagggaaatgtagacttcataaacatggctgtataattttgattttttttgaatacattgtgtttctatattttttttgacgacaaaaggtatgtacttataaagacatttttttcttttgttaacgttattagcatatctttgtgctttattatcctggtgacagttaccgttctatgtaggctgtgacttgcgctgcttttttagagcacttggcaaatcagaaatgcttctagctgtatttgtatgcacttattttaaaaagaaaaaaatgtctttataagtacataccttttgttaacgttattagcatatctttgtgctttattatcctggtgacagttaccgttctatgtaggctgtgacttgcgctgcttttttagagcacttggcaaatcagaaatgcttctagctgtatttg

SEQ ID NO: 87136 - DNA, 1085 bp, Homo sapiens
cctgctgagcgagttggaattgcgagaccggtctggccggcttggtggaatccggtctctactggaaatgcaagactcagccaggtgtgatggcacatacctgtgggtgtagctacttggggggctgaggcgggagaatcggcttgagcctgggacacggaggttgcagtgagccgagatcgcgccactgcactccagcctgggcgaccaagtgagactccgtgtctcaaaaataagaacaaaatgtagatgcctacgtaccatctctctacccttggctcctggggagtaaggggtcacccagtgacctcctagaaggccagtgacaatggggggtgtcagagtgctcttcagagccaagggagcagtaggaattgggatcttagtctcttagtctgactccaagctgtgagggagagagttgcagggcacttaagcttggtggagaccgtcagtgcctccttgcctgtccctgcagcaaaagttcaggacaccagagccaagctcagaggccgtggtggaacaggggtgaagagcatgggttctgactttaaactgctgggctgcagccctggctctccctccccgggtaggggcaggctgcatgcctccctgtgcctcagtttccccctcttcatagtgggattgtattggtgcctaccccagagagttgtgtcatcaattaggatggcacctggcaccttggtcagtggcaggaaaggttccagaagctctgctctggtcccggggtgcctcgggccctgccaccatctccttggggtggtgccatgtggtgggaaagaccccaacttcaaggccagacgcagtggctcatgcccataatcccagcactttcagaggccgagatgggaggatcacctgaggtcaggagttcaaggccagcctggccaacatggtcaaaccctgtctgtactgatgatccaagaattagccaggtgtggtggtgcgtgtctgtagtaccagctactcgggaggctgaggcaggagaatctcacgaacccgggaggcggaggttgcagtgagccgaggttgcgctactgcagtccagcctggctctgtcttgg

SEQ ID NO: 87137 - DNA, 409 bp, Homo sapiens
  misc_feature (1)...(409): n = a,t,c or g
ggaatctattttcccaggaccattttgttgaaagacgaaccattctctgttgaattacctgtgctctttgctcttttgtcaaagagctcttgactgtgttagcgtgatttacttctgggctctgagttctgttctgttggtcaatttgtctgttctttcaccaatgccaagctgtcttgattactgcaggtttactctaagtcttaaagttggttgcttggtgttgtttctctgactttgttcttttccttcaatattctgttcgcgattatgggccttttgattttctatgtaaacttcagaatcagtttgatgatatcccacnggaaaggnngnantnataanccaatgtaaaatgaaataggaaaggtattnnncccgcccggcttttagaaaagcgcccctcaac

SEQ ID NO: 87138 - DNA, 416 bp, Homo sapiens
gcgtggtggatttattacaaggtgtccgttgtgaggtgcagctggtggagtctggggggttctttttacagcctggggggtccctgagactgtcctgagcagcctctggattctccttcggtacctacgacatgcactgggtccgccaacccataggaacgggtctggagtgggtctcaggtatgggaactgctggtgacagatattatgcaggcttcgtgaagggccgattcaccatctccagagaactatgctaagaagtccttgtctctgcaaatgaacagcctcacagtcgaagatgcggttttttatttctgtgcaagaggggcccaccgaactgctgatgaggactactttgacttctggggccgcggaaccttggacgccgtcttctcagcatcctcgaacagcaccaa

SEQ ID NO: 87139 - DNA, 1828 bp, Homo sapiens
aagttcctcttctctgccccggttccgggcggtccgctgggaggtggcgcccggagggacacccgtgcctggggtcggggccagtgctcttctcggagctccagaagttctgctgagaagcgcggcggcagcaagacgacttctccggagccgccgagctggagttagaggaatctcaatgtcggctaccaccgttggtctttatcttgttcctttttgcaagacagcaatattactcactgtcatgatgtctatcttcggtgtttcaattggcattctggatacaggtggtaacgtccttatcttggctatttggggggacaaaggagccccacatatgcaggccttacacttctcttttgccttgggtgcctttttggctccactgctagctaaactggctttgggtccgacagcgtctgctgaaaaccacacagagtctgacttccatcctgcactcaaccaatcatctgatgctgactcagaagctctgtttggagtacctaatgataagaatttactgtgggcttatgctgttatcggtacttacatgttcttagtttctgtcatttttttttgtctgtttttaaagaatagctcaaagcaagaaaaagcaagagcatctgctgagacatttcgaagagcaaaatatcacaacgcccttctttgtctcctttttctgttcttctttttttatgttggagctgaggtaacatatggctcttatgttttctcatttgcaaccacccatgctggcatgaaagaaagtgaagctgctgggttgaactccatcttctgggggacatttgcagcctgcaggggcctggcaatcttttttgctacctgtttacagcctggaaccatgattgtgttgagcaacattggcagcctgacttcatctttatttctggtgctttttgacaagaacccaatttgtctctggatagcaacttcagtgtatggggcttcaatggcaaccacatttccgagtggtgtttcttggattgagcagtacacgaccatccatgggaaatctgcagcattttttgtaattggtgcttccctgggagaaatggctattcctgcagtcattggaattcttcaaggaaaataccctgatttgcctgtagttctgtatacctctttgggagcatcaatagctactggtattttatttcctgtgctatataaattagccacttcacctcttgatcgccagcgaaaagaagacagaaagagtgaggaccagaaagctctgctctctagctccgggctaaatgaatatgaggaagagaatgaagaggaggatgcagaaaaatggaatgaaatggattttgaaatgattgaaacgaatgatacaatgaggcattctataatagagacatctagaagtagtctgacggagcccacagctgaagtctataatcaatacccatcaaatgcactggtgtttgagtcttctccttttaatactggcagtgcccatgtgaagcacttgccagaaaccaggacaaaagggactaacgtttagagaagatggattactcactgacatctttgaataactgccacttctaaggacgccattcagagcagagcattagcagaatttcaccatgctttggggattaaaatttttaggtccatattatagcaaatgctaaaaatttttgaaatgttctgtaattcccagagtcttccataaataaccaaatggtctcatacacgtacaataggatcttgttataacgctatcatttgacatgtgactgattaggaaatattttatggtctccacccctcagagcacccaaagaaggcatgtatt

SEQ ID NO: 87140 - DNA, 3038 bp, Homo sapiens
ccaaacactagttcccctagtagagccagcctatgagaagaaaagctttgttggccaagttcttacattaatgacttcatagtaagaaactgatttcaaagtgaattaaggaaatcatcacagagaatattttcaaacagatgtttctctttttaaaaagtgatagtaagatgaacttgtaaaaaatttcctctgatgttaattgtagagttgtgggggacggcctatttttctctaccgttgggactggcagggcattgcccaccatataccatagtggtcaccaaaaaagaaacctcttcaacttgaaaagggaagtgaacatgagccatgagagagatttaaaagacccctgtgcttgcagttaatgccacgttgattgattatctgtgcttcaaaggtcacagaaatcttaaaggatttttagcaccatgtagatattgtcttttgtcctgctttataaaaagcgttgctataatgtattagtgggttctcgtgtctccaaattaccaccgtggctaggctgctggaaaaaagcactgttctgttcacttcaatctcctggtagactctgttggtctatagacttctgtgaagccagtgggtttctactaataaccaggtccagcttattcccggattctgctatgaggggcacaacaaggcagcagtcaaagtctctggttcggacatgattcacctgtaagagcctgtcatagggctttaagccaccaagatctcctggcccagctgggcgaatatttttgacatacactcctttctccagtaagccatctgctacactgaacccaaagtcctccatgtcagagtccttgtacaaggtcaccttgtgcagctccacaggagttggagacatgatctcctttatttcttgtttcatttttctcagggttactgacttcctacccacatctgaaggcagggtgttgctccgagttgtttggctgtagtgcggccgcgagctgctgcgctcctggaagctgggcctgtcgctcccagctggactgcgaggtgttggagcctcatgattcaaactcatcgtgctccccgacatgattgttgcctccagttctctcagaattcctgactgtccgcaggtttccaaatcctccagcgcttgagaccagaagttctcctcttgttctgtctctgcactatcgggcagcccctgcaaaaccactggctgtggaccggtcccagtcttcataactcagccccacatctgggtaagtctggcttcgaggcttaagtgactggggacaaagctgcctctctgttttggactcctccagtcataggtgttgaaatttgtatcctgaggcctgaaaactaagtgccttcagttccataagctggtgtctattggcagacccatcccatgaatccacagcactgtccacactggggcacccgtgggaggggtacatgtcggagagcttgcctggcttctgtgctggtgaggagtcctcctccacatcccccaggtcactcaaatggctagaaatagggaacttcttggggctcgatgctgactgggcatctgtctgtttcttaattttcaaggtgacagtctctcctgccatctgtaacaaatggatggcttcactcagaggcttccctttcaagctgctgctattgatggcctaggattcggtctcctatgtggattgcgccagttctttcagctaatccccccttagtgaggcttgaaatgatttatagatcaaaccggctcttcagttcctgaaattgtgatgcccaaggggccccccgtagcgtttaagctccacggtgtaaataattgctccggaactttcttgctcatctgaattatcttcatctttgcggattttgagcttcaccaggtcttcacattgctggaggatctgaactgcatcttccatggaacagttgtccagccggatattatctattgcgagcaatttatccccaagttccagggtcccagttctgtgtgccacactccctttcttgatatctgaaatgacgagggggtctcctggttttctactggatggtgaacttatggttattccaagttccacattgtgcttcttaggcagctttacatgaaatgttccactacttgggatgacagactctgcaacatcaaactcgatttccagtgtgaccttgctcgtgattgaagagtctcggaggagctgactggcttcttcgaaggtgctgtcttctgttggaattccattgatggccatcactctgtctccaatctgtagcaccccacatctctctgctgggctgtcagcttcgatataggaaatcagaggtggagaagagagagtttctgtggcaaacacactgccctgcagttggatcccaaatcctgtgacaggatctgccgtcagaacaacctctgtggtttctgtgtgaacaacctgcccagccaatcctactgtgctggaggctaaggacaatgagcttttgaagtctttctttttcagtctcctcctcatcatggttccacgtgggctggtggagtagaggcttcgaggtagagtccccatgttcagggaactcaggctgtatgcactcatggaggtaggagagaaggatgaagacaccaaagctggagggctgtttggaggaggtgctttcgggaatgtcagggctggtactctgcaatggtcagggtggtacgtgttatagtgatggttggtgtgaaggctgctgtggttgctggcccaggaatcccaggtaagttgcctgtcgctcctctgaattttcacatggtcgggcccctttagggccagccgggtctgatgatggggaaggatctcaagcttgacctggtcagtggtgttggccaggaactgggttgcttctgcaagtgtacagtactccatgctggttccatcgatggagaggatgtgatctcccacatgcaatgcgccacatctgtctgcaatacttgcagatttgattttgtctatgacaatgacttgtttgttacagcacatcgaggtagttagggcaac

SEQ ID NO: 87141 - DNA, 1691 bp, Homo sapiens
ttttttttttttcagtgtcaggactagtatattttattttcagatgcaagcagcaactttggcatttcttatcacaaaaaaactatatgagaaagctggcaagcccagtgaacttcctggccggagaggtttttccattaaaggtggcaaggtttgatcatccaccatctttagagttagaccattgagttggacagatttggaaagtaatccatgaggtcccaaaggtcttagaaggtatttatccacttgcttgttagaaaaaggatagggtaaccgcaagtacttggtgacgttatgggaggtttatgggcataccaggagttaaatcccccttcctttataccttgggattgtcagtggtttggtgcaatgaaaggtatactccgaagcttccttctctttgaaccttgcacgcttgccattaacaccttggtgcccaccaatttcttgaacagaagagatagccaataatcaggtaaaggatcgaagttttcatccactaaatggtagtttcctggctccaaaggaatacttggcctcatcaccacttctattcccattcgggctgacaggcccaatttatccagccacataaagccagctgcaaaggtgtcggatagcaagggcgctccgcctccatatgcagagcttgtttctcctaaccagaccttcttgccaggcctggtgctctcaaccacctggaaaactttttgcacagatgaaataaaaatgtccaatacatcagggtttagaaaatcttccttggtagcagtccgtccattcaaatagtagtgatgccatgtaactgaatcaatcacttctccaccagccttcaggaagctcttcagcatcttagccgtctttcttcgaggctgaccaacatcaggaccatagagttttgcatttttgaaggtggactttcttagaagtttatgcaattgaatataatcttctcctaactgcgacccattgatgaaaatatcagccttcttaaggaaactgttaggttcattgcctagttcccaagaaatgttataccccttggaagagcagtagtccaggagcaactgagcattagaactgttccactgcaaatctgctgttcttaataacgcatttaggccaaagatcaagtccagtcctgagcagtttgcaaaagtgtatagcacatctacagagcttcttgagtaggtgctgttcttgaactttttctggtagtgttctcggagtagcaattgctcctggtagggccattccaaccgtaacttctcctccacatcaggagggatggatccatatttgcaaatatcctggttgacttgagattgccagtaacttctctcttcaaaggttgattccttcttgggatcgaaaattaggaagtctgtcttggtgccaccaaacctcaggtacgcaggagacaagcctctggccaaggtacgaagctttggagaacccaggaggatgaggaaccgcgggtccgtggccaggttggcgtcaatggtgacggacaggaacgaggggctcaccaggtgcagcggctcctgggtgaagaagtccaggtccacgacgtcctgctgtgcttgcgcaggtcggggcagggcgccaggggagaggggacccagcggccccaggagcagcagcatcagcagcggcggcggcagcgcaggcttcgagcgcagcagcat

SEQ ID NO: 87142 - DNA, 626 bp, Homo sapiens
cggtggaattcccggagtgctgtcggaggcttttgttccctgttgccgggatatctgcctgctcagtcatccgagctctgagccgcagggtggctctcggtgccacccccgtcgcctgccctccctccctcaccctgccgctgacagcctctggccaaagccctcggctcccccagggcctggaccaccgtctccctttgcctgggcctggctggccctctcttgaaacagagagaagaaaacaaatccattccacgggctagggaatgtcggtgaaacaacctggccacaccgcacttcttagaagcaaatattctatgggagaaacaatcacaaggggtaactctagagcctcaagcactgaagtcatcaactgagttggtgacactccaaacccccttgggctggggtgcaagagctgacggacgcagccttggcggccaccttctccttcaagctccttggccaggtgggagccgtcaggtccacatgcacacctccaacacttcccaagcgatggccagcgctaaagcagaagcaacaggatgacatctgctggtgcgtctgtatccaggccgggcatacgtgtgctctggaggtgcccctgagggaggggcctcagagca

SEQ ID NO: 87143 - DNA, 355 bp, Homo sapiens
ttttttttttttactataaccagggtttcattctgtctttttccactgaagggggacattttgttagtacatttcagtgtagtcattcatttctagctgtacataggatgaaggagagatcagatacatgaacatgtcttacatgggttgctgtatttagaattataaacatttttcattattggaaagtgtaacggggaccttctgcatacctgtttagaaccaaaaccaccatgacacagtttttatagtgtctgtatatttgtgatgcaatggtcttgtaaaggtttttaatgaaaactaccattagccagtctttcttactgacaataaattattaataaaatacttgaaa

SEQ ID NO: 87144 - DNA, 3260 bp, Homo sapiens
ctttgaggtcttgtggtctgattcttcaataacatcagtaaccaaatcttcctctgaagtgacggaatttatttcaaagctatgtcagctctatcctgaagagaacttggagaaactcattccttgcttagctggtccggacgcattttatgtggagcgaaaccacgtggatctggactcaggcctgaggtacctggcctcattaccttctcacgtgttgaaaaatgaccatgtcaggaggtttctcagcacttcctctcccccacagcagcttcagagtccaagtcctggcaatccctccctttctaaagtaggtaccgtgatgggcgtgtctggaaggcctgtgtgtggagtggctggtatcccgtcctcgcagagcggagcccagcaccacgggcagcacccggccggctcagccgcccccttgcctcactgctcccatgcgggcagcgcgggctcagccctggcctaccggacccagatggacacatcacctgccatcctcatgccttccagtctgcagacccctcagacccaggagcagaatgggattctagactggcttaggaaactgcgtttgcacaagtattaccccgtctttaagcagctctccatggagaagtttttgagccttactgaagaagatctgaataaatttgagtctcttaccatgggggcaaagaagaagctcaagacccagctggagctggaaaaggagaagtcagagagacggtgcctgaacccctcggccccgccgctggtcaccagcagtggtgtggctcgagtgccccccaccagccacgtcgggcccgtgcagtcggggcggggcagccatgcagcagagctgcgggtggaagtggagcagccccatcaccagctgccccgggaaggcagttcctcggagtactccagctcctcctccagccccatgggggtacaggcccgggaagagagctccgacagcgctgaggagaatgacagacgtgtggagattcacttggagagctctgacaaggagaagccggtgatgctgctgaatcacttcacttccagttccgccagacccacggcccaggttctccctgtgcagaatgaggccagctccaatccatcaggccaccaccccctgcccccgcagatgctgagcgcagcctcacacatcacacccatccgcatgctgaattccgtgcacaagccagaaagagggagcgcggacatgaagctcctctcgtcttctgtgcactcacttttgtctctagaagaaaggaataaaggatctggaccaagaagcagcatgaaagtggacaagagctttggcagcgccatgatggacgtgctgcccgcgtccgcaccccaccagcctgtgcaggtcctctctgggctttcggagagcagctccatgtcacccacagtctcctttggtccccggaccaaagtcgtgcatgcatccacgctggacagggtgctgaagacagcacagcaaccggccctggtcgtggagaccagcacggctgccacggggacgcccagcacagtcctccacgccgcccgtccgcccatcaaactgctgctgtcgtcatctgttcctgctgattctgccatttctgggcaaacttcctgtcctaataatgtgcaaataagtgtgccccctgcaataataaacccccggactgctctgtacacagccaacaccaaagttgccttttctgcaatgagcagtatgccagtgggccccctgcagggtggcttctgtgcaaacagcaacactgcctctcccagcagccacccctccacgtcctttgccaacatggccacagatgcccagctgcccagcccccagctccagcccggcgctgtcctccgtccctgaaagcagtttctatagcagcagtggcggtggcggctccacatgtgaaacattcctgcctcgaatccgaaccaccaccaccaccaccaccatcagcagcccccggcacccccgcagcccgccccacccccgccaggctgcattgtgtgcacgtcctgtggctgcagcggcagctgcggctcgagtggcctgactgtcagctacgccaactacttccagcacccgttctccggtccgtccgtgttcaccttccccttcttgcccttcagtcccatgtgcagcagcggctacgtcagcgcccagcagtacggcggcggctccaccttccccgtcgtgcacgccccttacagcagcagcgggaccccagaccctgtcctgagtgggcagtccacgtttgccgtgccacccatgcagaacttcatggcagggacggcaggggtgtaccagacccaaggactggtgggcagtagcaatggttccagtcacaaaaagagcgggaacctatcttgttacaactgcggggccactggtcaccgcgcccaggactgcaaacagccgtccatggacttcaaccggccaggtacttttaggttgaaatacgcccctccagcagaaagtctggactccacagattgatatttttcctctggcaaaccagaacgttatttaagccatggagacataaggaaaattaaatacaaaactgagaaggtctagttgctgttgagcttaatctttttaatccaaaggtgctttacttttcctagactggatagaaaatctagccgtagaaagtgcatcaaactcgatttattgccaaaaccctagattggagcttgggtgtcagaactcgcctagtgggcatctctgtggctggtgagatcggccacctccacttttggttgcagtgcagagacgccatgtctcccgaagagcattgccatcactggccctcctaggctcacacgtcaattccagggcagctacacgtggtctgaatcgagaaccgagcttggagttctccaagtggagttccacccgccggactcctgacacccctgggctagggaaaatgtcgactttgttttgttctgttcctaaagtgattagcactaatctctgggatttttaaggattgcactacagaagaatgtaccctgatgtaaatctctgcggttctgggagccaaactcctctgagaacagtcagtgcaagagactccaataatccatattgaaagagtcagcaccagcagaggctactcgacttaggacgcaacagaggttttagtatttccttccctcctccaagcacttgtagcagtttcaggtttttaatttttttctgcaaataaatctaaactacgttattaaatagaaatagtttactcgca

SEQ ID NO: 87145 - DNA, 439 bp, Homo sapiens
  misc_feature (1)...(439): n = a,t,c or g
ggaacgacccacgcgtacaaaaaccccgcgaagaggcgcctgctggcgctgctgcatctggctgatgtgggcgctgacctggacagcacccggcggcagcctgacacatgaagtgctggtccccgacgtgccccaacagcactgagtcctcctacagccgagccctctctgtgtcctgctgccagggtagccagagcaaccgcagtgcagccgcaggcctggtgggcagccccgggaccctgtgggccagcatcgcagccagccagctgtgggccctgctgcaggcagcccgctgaggccctgcgcctggagcgctcagcgtgggtcccctcagcctgaccagctcccacacaccccacccggggcagcagggtcctagtctcagctgccacgcccccctccctcctttgcccaggccacacccagcaccccaccccgn

SEQ ID NO: 87146 - DNA, 831 bp, Homo sapiens
taagtgtcaaagcataaaagcaaaggatgttgagctgatgaagactgtagaaaatagcataagagtgttcactaaatcatctttgcttaattcttaacagtggaactctagaaacatttttttaagttcaggcttaatattttaaggtatcccaaaaggttaatttaaaaaatatgtattaatttacttttcttggctaacatctgctaggcatttaaattttttttcctagcccagaagattaacaaacataattctaggttagcaagtataaaactagaaataaagaattacatagtggtaatgctacccatctgtgattaataggtataacttattctttacctgaccaagtaacaaatgcacataattttacttcagaagcagaaggctctgaaatcccagtagcaaaaataatgttcttctgttgctgaatcttatgaatccatttacagaactgagataagcaaatcttcagagggactccttcatcaacttgagcctgctttatgcctgtcaattccatgcaaaattctgaaagaattggatgttcctgaggttgaacataagcctggaactcagagtcaatctgtccagttgatgtgttcagcaacactgctggaaactcaattatttcctggctatggtggtgcttcccatcattccagcatgtcgattcaaaatcaatgacaattaagtagtcaaacaactgcttggatttgcttcttccgagatttccatttgctggcgcaattgactttctcctaattaatccaagctgccgcgcgagccgcttggtcgccattcccgacactccttgcttttccaagt

SEQ ID NO: 87147 - DNA, 663 bp, Homo sapiens
cggacgcgtgggcaggggccgagagggagctgtgcttggggcggggccgagacggagcgaggggtgcagggtgtgagaaacggggaggggtttgaggaggggattggagtgtggctcaagttcgggaggcgttacctgcggagggtttgaggcaggcccaggagcgagcccacggtctgccgacgcggggccagcggcgggccccaggatccggagcttcgggcggggccgagtccagctctctgcccgcaggagacaaggaaaaccaatgggaacagtaacaaacagaaccgcaagagctcctgtgacaatgctgagcctgatcactgcgccttgcagagcagatgccctctgcacctccgctcctgttaagaaaccagagggtttttaattgtctgttcccatctagccgctagtgagtattaattatggaaatgaagtgtacatttaacccaagaaaatgctcactctagagaaatctcataggggaagtcgttgaaagccgatttactaaatgacctcttcgccaaatgacccatttgcctaatgaccactttgccaaatgatcagtttgctgaaagccaattcgctgaaaatctgtttgtgggatgtcctgcttatcagtaactgacagtcagacgcagattatcccaggctcccagg

SEQ ID NO: 87148 - DNA, 491 bp, Homo sapiens
attttttcttaacatccaagacaaggccaccagtcaaaactatcaagttttagtagtattttcctgcttgattatataatagcctggcttagagatacaacctttaaataaggaatcttaagatgatgtgcagctgttctttgccttatttgtttgtttgttggttagtttgtagtttctaagaatctgctctgttcagctgtacagttccttcttctggagttaacctgtggcaaggattatgtttcacctgtcacaaaaatgagatctgtgccttcctctattataaagttagggcatgtgattcattcttcgaaatacttcaaaatgtactttggtatgtttttgtcttgaaaagaggttttctagctagaaattcggggcccagaaggtcaaggctccagagatccccttctcatcatccttcagttgtctgaggagacagaggatcacatgtgtcacagtgagtgctgattccccagaatctgcag

SEQ ID NO: 87149 - DNA, 564 bp, Homo sapiens
gaccctgtgctgcctgtgaccccgctcctgaatccttcaccaagatgtcctgccagcagagccagcagcagtgccagccccctcccaagtacacccccaagtgccctcccaagtgccccaccccaaagtgtcccccaaagtgtccccctaagtgccctcctgtctcttcctgctgcagtgtcagctccggaggctgctgtggctccagctctgggggaagctgtggctccagctctgggggttgctgcagttctgggggaggtggctgctgcctgagccaccacaggcgccgtaggtcccactgccacagaccccagagctctggctgctgcagccagccctccgggggctccagctgctgtggaggagggagtggccagcactctggaggctgctgctaaagtggatcctgagcctagaagaacacaaatggccaaatatttcccttccgtcttccttctccttctgggcctgcccatgttgttgagaggtcttggtgagggctcaactcaagcatagaggattcttctgtcttggagttcagaggcccaaaacttctccccc

SEQ ID NO: 87150 - DNA, 411 bp, Homo sapiens
agaagattgtggctgagaagataaagaaaaggcttgggggtgaaagaagatggttgagagggagagataggggctgggagggtggacagcagtctgctggatccaaagaggaaaaagaggtagggtcgggaagaggaaggcaatctgggtggtgagaacagaggaggaggatttgaacacgtgagcaagaattgcagaggttgggttgtgatctgagtgcaaaaaaggcctggatataagtaatttctcctcatttttccagtcatcagcaataattgattaagtcagttaaaattgtaaagtccaatgttccgtttgtgggccatttggacccattatccaattcgtattgtggccagattgaattgtaaaacaagacaaggcacggatatcttgactgaggcctgaggt

SEQ ID NO: 87151 - DNA, 407 bp, Homo sapiens
agaagctgggtctggagactgggggtccccgtgaggccatgccgggcactctacagaagctgggtctggagactgggggtccccgtgaggccatgcggggcactctacagaagctgggtctggagactgggggtccccgtgaggccatgcggggcactccacagaagctgggcctggagactgggggtccccgtgaggccatatggggcactctacagaagctgggtctggagatgagggtccccgagaggccatgcggggcactctacagaagctgggcctggagactgggggtccccgtgaggccatgcggggcactctacagaagctgagcctggagatgagggtccccgtgaggccatgcggggcactctacagaagctgagcctggagatgagggtccccgg

SEQ ID NO: 87152 - DNA, 449 bp, Homo sapiens
ctgaggtgctgaaggaccctgtgctgcctgtgacctcgctcctgaacacccaccgccgagatgtcctgccagcagagccagcagcagtgccagccccctcccaagtgcacccccaagtgccctcccaagtgccccactcctaagtgccccccaaagtgtccccctaagtgccctccagtctcttcctgctgcagtgtcagctccggaggctgctgtggctccagctctgggggcggctgcagctctgggggaggtggctgctgcctgagccaccacaggcgccacaggtcccaccgtcacagactccagagctctggctgctgcagccagccctcgggaggctccagctgctgtggaggggacagcggccagcactctggaggctgctgctgaagcggactctgcacctagaagagcagactcgggtgaaatgagtgatcaaacatttc

SEQ ID NO: 87153 - DNA, 411 bp, Homo sapiens
  misc_feature (1)...(411): n = a,t,c or g
cctgaattcttcattactcccacaaaaacaggaagtacacatgagagaaaaatctttccaatgtaataagagtggcaaagcctttaattgtagctcactcttaaggaaacaccagataccccatttaggagacaaacaatataaatgtgatgtatgtggcaagctctttaatcacgagcaataccttgcatgccatgatagatgtcacactgttgagaaaccttacaagtgtaaagagtgtggcaagaccttcagtcaggagtcatcccttacctgccatcgtagacttcatactggagtaaaacgttacaattgtaatgagtgtggcaagatctttggtcaaaattcagcccttctaattgataaggcaattgatacttgaggaaatccttacnaggtgtaatgaatgtg

SEQ ID NO: 87154 - DNA, 4833 bp, Homo sapiens
  misc_feature (1)...(4833): n = a,t,c or g
tttttttttttggattagaaaacctgtttattaagactgggtcacatccagctagtacatttcagtgccctttctggtgctgcctcccaggagcagacactgcaaatttcagaacccccatctagagaaacccctaacctgtgatctagcttccgaggctcagtgttggttcttgtggtagtgctgatgtgtgggtaccactgaggccaggccacagtcgcatgtaccctcctctgggctgactcacgaggctacaggggacagcacacctaatgagcaggtctgtcctccagacatactcattaacaagcacgttcctggctaaaaaataaccagatctttttggccgtgccctcaggttggagaaagaaaacttttaatttggaatcactacaaagacaaatggtttctacaaattattttattagaatgtcagactcaaaagaactaccaggaacatgcctgaaaatgctatatatgatttatgcttgacccatgacacctgctgtcactggatccagagtgagcaagggaaaggaagtggaggtaggcggggacagcaccagccctggctggccagacctgaggcccacagacctggtccccacaaccaggattcctacaatgtacacattcctaattcaggctcaactctccctttacccaaaaagtaaaatgcctcagggactcaatctgaatcactgtctgtctcaggcttctttcacatcccacgcttgaatttgtactcctgggtcacatccccatgtaaagcggtcacttcatggaaggtaccagagtgtaagtttgtgggcaacccagtgggctgggggccacaaaagtccaaactttcacctttgggcccttctggctggcaaaggtcagcctcttgatgggagatgaggcctattggacttggcatctccaatcaccacccaccagcccttcttcacgtttcctgcggaagaaaaggcgcattgagcaggggcctgtgacttccctcctctcgcttcagctgcaccagcaccacaactgggccggcacttgcggatgcctgtccttatctacccacctcataaagatagtcgattattaggggtaggggttacaaaagcgaggcaccatctgcaattctggctgtcaagtcagcttgaagcaaacgcgttcccgttcttcatccttccatctcccatgatgtcgaaaaacactctccattccccttgtctgtgccaacgttttgaatatgctccagaaggtgaaagtgtggcagctgctttcaaggtatgaagtccttggaccacatggcttgggtgaccatctgggccagttcccatagcttgccaggagcagggctgagccaccccatttgctggaaaggacatcccacgcagccctggatgagccggattgccttactaaggatttcctccgtatctgactgcaactcagcacttcagctgcatgcgagacaagtgaggcctgcaggagcaggtttggtcttgacgtgcggatcattgaacttagggttaattcagcttgtgggggaccttctgagccaactgcctcaggagattgtcttcatggtgccggatgggaatgttctcatactctgctgcattggagatgatctcgataagccctcgcaccttggtcttggcattgagggacatgctgaagagcttcaattggtggtgtagttgatgtaatagtaggcggcgatcatgccttaggttcagaggcgccacgtccatctcgtcctcgatgctgatgcacttggactgctccaggtcactcagggtctgctccaccagctctgacaagtggtccgacaagtgacgatgggagatgccctgcaggttgtagtaattggggttctgtgtcatgcggcggtacagaaaggtccaggtgaggtagtccacagcatcctgcttgttctcaatggtcttggtgacgatctcagcattgaagtggtcatgcatacagtggtcccaggtgaagattctactggcaaatggctcaataataagaacttcttgaaaaaatccttcttggagccctgacacatgatgacacagcgcccctcatcgtcctgcaaaagggcggttggcgtggcccaccatctgaagcacgtcatagatggggtaatccacataggcgtggatcttgccattgtagtactgggtatccatgatgattaccaggtgggcagccacgttcatgccccagcagagactccgagaagccaccaccacctgggatagcccctgaagctgaagagctgctccaccagggcgtcgctccatggggctgagcccctcagtgcaggtagcccaccccattttaggcagcttttccttgagcgtgctgttcatttagctttttccaggtacggattcagatccttctcggtgcaagtgcaaagaacctctgccgttggatgtctgctgcacaggtggtgaggatgtcaatggcagtgaggcgggtctgcttgcgagacggcacaaagacaatgacaggcttcttgggcgagtgcttggtgatagcatggtacacaggcttggccatggagagcaggcgggtttgtgtatggctgatgttgaagccctggatgtgcagctccaaggggacgggacgcacattgggatggaagttgaaggtggaggtggcactgcagcccagccagtgggccacatccttggcattggagagcgaagagctgagtgccacaatgcgaatgggccgctcaatctgggaggagatgtagcgcattcgggagcagatcacttctaagacaggcccattctcgcccccgataaggtggacctcatccaccacgaagaggttgatgttctgcacgttcttgcgctgcttccatcgccgggaaagtatgtcccacttctcaggggtgctgatgataatgttccctttgcccagcagcttcaggtctgtgctggtctcgcctgtcaggagtaccaccttcttgttgagcctgtcctggaacttctcgtaccagtccatgtataccttgctctgccagggcctccatgggggtgatgtacacacagcgcccctccgagctctgcagcagcattcgcaggatggcaaactctgcacaaatagtcttcccgctgcccgtgggggcccccacaaacacgttgtcgtcactgttgtatacagtgttaaacacctgggtctggatgggattgaagaaaggaaatttatcttggtaaagactctcaaaggcactgtttctcagagcagacacgggcaagggctgcaggtccaaaagttcggttggaggggggtacttctccggcaagatcaggtgccggaaggagacaggcagctgggtctcacaagagagccagcggtcagacaccactcggatgaagtactgagggggcagcggttcaaagacaggcacgaagaatgtaatgaggtgctcgtcctgggcgtacttggccttgaggagaaaatactcatggtgcagaatcacctcgctgtccacatcctccaccagaatccaaaaagcctcggatgaaccatgcaccttttcatcccactggaaagtnctggccgtgatggtccaactccaccttcagggtggaacgtgtgataggctgcaggtgcactgacaactcccaacttgggaaacagatggacatatttgtggatggtcttccccatctttggcatgcggataagctccccaatctcattatgattcaggtcgtacagacgctcaaaggggaaattcttcttctcaatcttcttcactacttcctcagggagtttccggaactggcgcagaggacacatggactgccacatgcgtttgtcgatcatcttgcagaggttcagggtcttgtctgtaagctgtgcccaacctcggttcaggacaatttcaaatatcgctcgcatcaaccggccagccgactgtgtgacatacaccatgtcagccatcagtgcaaagccctccaatttcagctgtgagatgaaggcttgcagaagaacgttgatcttagcactgggttcctcaatgctctcctttacagggataggcaccctctccagcaacttctgcagctccagcttctcctcctctctcactgtgatgttcttgaactcagaggacaatgagaagaccctgaaaagctcaatctcactcagggtgggcttcagcagctggttgtaagtctgcactgtatcattggtgatgtagtagtggctggctatacggcccagttctgtcacctggaagttgcccgtcttcttgtcgtacttgaccagattgttcttgtccagcatcagggcagctgtatgaaccagatctagtcggcgctggtccagcaggggatctcccttgaggtcatcatgagagatgccatagagggttggggatcgcagcattcggatatagaggtaggcatagcccagccagttcaccgcatccttggcattctggacatttcctagcacgatttctgcattgagcatgtcaggaagctttgaaaccatctggctttcaataggaagttgttgattgaggagggacaggtagtactgtagctccccatgagatgtgatgagtatgccttcacccttggtgtcatactggggtcttccggcacgtcccagcatctgcagaatgtccagtgctcccagttctgtccaacgccccttctctggactgtacacctgggtgcctttgatgatgactgtatgtgcagggagattcacaccccaagctagagttgctgtggaaactaaaacctgaatatgtttatcaagcaaaaagatcctccacgagtgttcggtcaaccctggtcatgcctg

SEQ ID NO: 87155 - DNA, 454 bp, Homo sapiens
tccgggtcgacccacgcgtccgaggaagcctctgggatttatgggacactgtcattgaatgaatatatgcattatagggattgaagagaagcagggagaaagccttttttttaaagaaataacccaaaacttcctaaatatggagaacaaaacagatatccagactcaagctcatagaaccccacaacagttaaagaagtctacatcaagacttattataattaaattgtcaaaactcaagagacagaattttgaaagctgcaagagaaaggcaactcatctcatacaagggaaacctgcccccccaccaccccccaccccagaaatgatcagtgaatttctcaacatgaatcttccaggctaggagataatgggatgttacattcaaagtactgaaagaaaaaaacaaaaccctgccagccatgattactataccctggaaagctatccttaa

SEQ ID NO: 87156 - DNA, 1357 bp, Homo sapiens
aaagatgctttgccaaaagaatctaattacatccgtcttaaaagggctaaaatggacaagtctatgtttgtgaagataaagacactaggaataggagcatttggtgaagtctgtctagcaagaaaagtagatactaaggctttgtatgcaacaaaaactcttcgaaagaaagatgttcttcttcgaaatcaagtcgctcatgttaaggctgagagagatatcctggctgaagctgacaatgaatgggtagttcgtctatattattcattccaagataaggacaatttatactttgtaatggactacattcctgggggtgatatgatgagcctattaattagaatgggcatctttccagaaagtctggcacgattctacatagcagaacttacctgtgcagttgaaagtgttcataaaatgggttttattcatagagatattaaacctgataatattttgattgatcgtgatggtcatattaaattgactgactttggcctctgcactggcttcagatggacacacgattctaagtactatcagagtggtgaccatccacggcaagatagcatggatttcagtaatgaatggggggatccctcaagctgtcgatgtggagacagactgaagccattagagcggagagctgcacgccagcaccagcgatgtctagcacattctttggttgggactcccaattatattgcacctgaagtgttgctacgaacaggatacacacagttgtgtgattggtggagtgttggtgttattctttttgaaatgttggtgggacaacctcctttcttggcacaaacaccattagaaacacaaatgaaggttatcaactggcaaacatctcttcacattccaccacaagctaaactcagtcctgaagcttctgatcttattattaaactttgccgaggacccgaagatcgcttaggcaagaatggtgctgatgaaataaaagctcatcccattttttaaaaccaatttgacttctcccagtgacctgaagacagcaggtcggctttcaaacaattcccctaaaatcacaccaccccaacagatacatcaaattttgatccttgttgatcctgataaattatggagtgatgataacgaggaagaaaatgtaaatgacactctcaatggatggtataaaaatggaaagcatcctgaacatgcattctatgaatttaccttccgaaggttttttgatgacaatggctacccatataattatccgaagcctattgaatatgaatacattaattcacaaggctcagagcagcagtcggatgaagatgatcaaaacacaggctcagagattaaaaatcgcgatctagtatatgtt

SEQ ID NO: 87157 - DNA, 403 bp, Homo sapiens
  misc_feature (1)...(403): n = a,t,c or g
caaccctaaaagtcttctccaaggcattttatagtcataatgtcataagtgaaagacaaagagggaattctaaaaacaacaagataatagccccaagttacaataagggaattcccataaaataaatacagcttttgcagcagaaacctcacaggaggggagaaaatgaagttatattcaaaatattgaaagaagaaaattgtgatccatgaatattatacacagccaagctatctttcagaaatgagggagaaataaaatatttcccagacaacaattatgaaagtatgaaaaagcagggtgttacagcaccctcaaaagattgcactaactttctaacattggatcctaaccaaaataaaaattttgacattccagaaacagaattcaaactattgatttn

SEQ ID NO: 87158 - DNA, 470 bp, Homo sapiens
ttctcgggtcgacccacgcgtccgtgcccttccagtgctctgccagctacctgggcaacgactcccgcatccgctggtaccacaaccgagcccctgtggagggtgatgagcaggcgggcatcctcctggccgagagcctcatccacgactgcaccttcatcaccagtgagctgacgctgtctcacatcggcgtgtgggcctcaggcgagtgggagtgcaccgtgtccatggcccaaggcaacgccagcaagaaggtggagatcgtggtgctggagacctctgcctcctactgccccgccgagcgtgttgccaacaaccgcggggacttcaggtggccccgaactctggctggcatcacagcctaccagtcctgcctgcagtatcccttcacctcagtgcccctgggcgggggtgccccgggcacccgagcctcccgccggtgtgaccgtgccggccgctgggagccaagg

SEQ ID NO: 87159 - DNA, 1356 bp, Homo sapiens
tttttttttttcattattcagcaataatatattttactccttataatgtaaaaaatataaaccgtttgagtggttttcagcatgatctgttaattttgaatacagagaatgaacaaagcaggtaaatatatgtatatgctgaataatgtaattccatatacaattcacagttagatgcacttaattgtggaaaataaaggaagacaataacatcaagatctttttccaaaacacggtaaaaataacgttcacatgcattaaacatttcaagccatctcagtatatgtctttcttgagtaagtagtgaaccaatggaccagtggttattgttggagaaaacaattaggcaactcatcaatgcgctatttatacaatcttagtgactatttaccacttcacctaagtagactttcccactcatttgaagctattgctatctataaataaatggcaacaggaaatgtttcacaagggcctttgatttccaaaactctcaaattccacagcaaagactcaatttaaggcaattatttatgcactgaatatttgaatgaagatgtattattttccttaagtgaaaaaagctgatactattttgtaatgataaaatttgtataccatagtagaaaatgatttgcaattatgtgttaggacttttcatattccatattgaaacatagtgattctgtagctggcatcagctgtaccctgacttcacatgaatggcctggaggggatcatatttttaaacaggaaatcagtgtgaattagctgagtaattaacattcagtgtacagtgagcattcttaactaaatcaaagtagtcatgaaagaaagtactgttggtaaatccaaaaacatacatcaaaattaaatggtgaggttgaaggttgtagttaagtaccaactagtgtgagttctgggagcattttgaaatggtggaggaatgtactaaatttctgaggaattaatactgatgggaaggatgcagtaaagagtaaaaacgggggcattgtggtttatacctgtaatcccagcactttgggaggctggggctggaagattgcttgagcccaggtgttcaagacaagcctaggtaacgtggtgaaactcgtctctacaaaaattacataaattagctggtgtggtggcctgcacctctagtcccagctaggtgggaggtttcagtgacctgtgattgcaccactgcactccagcctgggtgacagagtgggaccctgtctaaaaaaacataacaaaacaaaacaaaatgaaaaaaaaaaaaacaagaaaaaagaaaagaaaaagaaaaaagtaaaaagcctagggattgggtgaactttttgaaaaaaaaaa

SEQ ID NO: 87160 - DNA, 412 bp, Homo sapiens
gatacagcttctgaggatcacggggatgaaaggcgtgaactgggctcacacagctatgaaaaaggtgcctgcttctccttctgccatgattataagtttcctgaggcttccccagccatgcgtaactctccttcccatttatgagagagccacatgacatcagcccatagactgtggagagtattccagatctatcacattctgcgattctgcgattcccagaaggctggtcatgaaaaaattccctcttcagtttacatatatggcagtgatgcacattgttcttttggttgtgaaaaattcgaagaagtagatgtggtcctggttgatggatgaacattgaggccctcaagtgcataaaggagccccttgattcaagtttacacaaaatgtgcctttggagactatcctg

SEQ ID NO: 87161 - DNA, 221 bp, Homo sapiens
cagatgttcataatagtatctggtgatcttttgtatttccatagtgccaattgtaatgtctccttttccatttctgattttgcttattgggtcttctctcttctttccttggtttgtgtagctagcagtttatcaattttatttatcttttcaaagaatcagctttttttcattgattctttgaaatttttttaagtctccattttatttagttctgatct

SEQ ID NO: 87162 - DNA, 489 bp, Homo sapiens
tggaatcctgtaatgcctgataatccctgtagttggctgaggggcttggggagaaggaaggagaaaatggatccaattctctcctcgcccagtgtcctggtcccttctgacaagaccaggcataggtacttcactgaagtctgacggagttgagccttggactttgaaactttatgtcctctgtcagttagaaaattaagaagagccttattgcttttctgagaaatttcctcagttggggcacagagtagagtgtaatctacatattaagactaacttgagtttgaaagaactcagagagatcttttgagattgcctgcccaaacaggtggaggctgtcttggaatccctgtggtaacaccatccaggttagctgggtagtctggttggagggatccctgaatgcaaacaagttttgggagttggggtataatggtatgcagaaaaaaagcatcttttaattccaagaatgcaaaccatttagttccc

SEQ ID NO: 87163 - DNA, 358 bp, Homo sapiens
catttttctcttgcagctttcaagattttcttgtgtttgacttttttcatttccaccatgtgtttgtgggtctcttttattgaccctgtttggagtctgttgagcttcctggatgaatagcttattgttcttcagtaaatttgggaagtattaagtcattatttctttgaattattttcttctcctttctctctcctttccttctggtattcccattacacatgtggtggtgtgcttattggtgttccacctttctctgaggctgtgttcatttttcatttttttctccctcttgagcttatataatctctaccgacctgccttcaagtttgctaattctttctccattgtgtacaaa

SEQ ID NO: 87164 - DNA, 376 bp, Homo sapiens
  misc_feature (1)...(376): n = a,t,c or g
gagagagctagcnnnnnnnnnnnnnnnnnnnnnctccatcatcctggctccctgctccatcatcccggcttccctgctccatcatcccggcttccctgctccatcatcccagcttccctcctccatcatcccaactgccgtgctctatcattccagctccctgctgtttcatcccagctgccctgctccatcatcccagctgctctgctccatcatcccagctcccggctccatcatcccagctccctgtccatcatcctggctgcttgttccatcatcctggctccatgctccattatccaggcgtcctgctccatccacaagctgccttatcctgctctatcatcctggatcccctattctctctgcaagttcc

SEQ ID NO: 87165 - DNA, 974 bp, Homo sapiens
aattcagcgcttgatagttcttcctctgctctgcttcccttcggaggaaaatttcaggctgaaggtttagcgggtgccgcctctaaagagagcaatcactacacttatggctgggattttgcgcttagtagttcaatggcccccaggcagactacagaccgtgacaaaaggtgtggagtctcttatttgtacagattggattcgtcacaaattcaccagatcaagaattccagaaaaagtgtttcaggcctcacctgaagatcatgaaaaatacggtggggatccacagaaccctcataaactgcatattgttaccagaataaaaagtacaagaagacgtccatattgggaaaaagatataataaagatgcttggattagaaaaagcacatacccctcaagttcacaagaatatcccttcagtgaatgcaaaattgaaagtagttaagcatttgataagaatcaagcccttgaagttgccacaaggacttccaacagaggagaacatgtctaacacgtgcctcaaaagcactggggagttagtagtgcagtggcatctgaaacctggggagcagaaagcacatgagtcctaatgccccagcagcttccgattggaaaatgcaaattgtttttatttaaagatggtgagaaagtgttttcattaaaatatgttttcaaaaccattttcaggccgggcacggtggctcacctgtaatcccagcactttgggaggccaaggcgggcagatcacctgaggtcaagagttcgagaccagcctgaccaacatggagaaacccccatctctactgaaaatacagaattagccaggcatggtggcacatgcctgtaacccagctactcagggaggctgaagcaggagaatcacttgaacccgggaggcagaggttgcagtgagctgagatggtgccactgtactccagcctgggtgataggatgagactccatctcagggga

SEQ ID NO: 87166 - DNA, 703 bp, Homo sapiens
cacgctcccctcagactgcgctccagcctgggggcgcccggccgccgccgcctttcgctgccgccacgggcccgtcttcttcctccttcggctcccaggatgaagaaactgagtctcagagaggtgaagtgacttgcccaagatcacagcaattatcacttctccctgggctcccaggccctcctgcagcagcccccgcctgggccatgtcttcctcagatgaagagacgctcagtgagcggtcatgtcggagtgagcggtcttgtcggagtgagcgatcttacaggagcgagcggtcggggagcctgtctccctggtcccccaggggacaccttgccctggaacctgccactgcatgagcagaaaaagcggaaaagccaggattcggtgctggaccctgcagagcgtgctgtggtcagagtcgctgatgcccttccgagtacatccttctgcttcccccattgcagccttcttagaaatgcagcagcagtctcacccatcaggagcaaaagaaaatcaaagaccaaaaggagaaagcctcagagcttttgcgactgtgtggtctggctataaatttagactgttgcttgaaagaagcgaaaaacctccccttcatagacttccttcttcccatcccccctggcagccgctttgttcctctagccttgtaaaattttctctgtataaaacaggaacatcagcc

SEQ ID NO: 87167 - DNA, 2662 bp, Homo sapiens
ttttttttttttggtttcatggtctgatttattggtggtgaatacacaggggcaggcccaggacaagcagcttggctactccccctctgctggctgcccgaccggcagagggggctccatgtggcaggagctaggctcccaacgcccactgttcttgccaccctctgggctcccaggctgggctccgctaggctcctgtctcccctgccagttagttaggcaagttcaggtgtggaggccgcagggatagatccaggtggctctgggctgggccctcttctcttcccagcggggaggtgctgttggcctggctgggctggcctgaatctgtttcaagttctcccttcctgcccagctcagttcaccagtgctggatccaggttcaaatgacagggacttgggtttttacaacagcgtggcaagtggtctgtctcctgggcagccatatcccagacccactgggttgaaggttctgtggggtggagggaccccaaggtgttccaagccagtggctgcactggcagcaggcctctgagagggaggcgggaagggtaggcgcggagagcaggctccattctgggtcgagtggaggactggctcccagggtgagttcacaccagtgctcccagctggcggctgctcagtctctcctgctgggcgagcgcggggggccggggctatgccatgctgctggtggagcagggggtgctctgggtgctcccgatgctgtggttggtgctgctgctctccgaggaggccggggcagccaccgccaccacgggctcccgcttgctgggggaacgcgtgtgcgagtagatgtaccagagtgcagcagtgagcagggccccgatgaggaaggcaccaaaggtgatgcccagcacggcgggcaggacgaggcctttgcttgtgcaaccagacaggtcagggctgatgatgttcaagcgcatgaagacagtcctatggacttcctggtcttgagacccggtcttgggacgcagggctaccgtgcagctgagggtgccggttttgggtatgggtactgtgtagaagtggaggaggaagctgaagcgcgggtcaccctcggggcttggggacagcaggctcacacagttgcccttggccgcccggccctggatgagttccacggtgcctccctcaggccccaagtccaggtggcagctgtctaactggagcaggaactcggagacggatggggacactctgacctgcacaaagctctgctgccccggctcgatggtgttggaggcctggaggaagtgtgggctgaggtagaggcccagctggaaagagaggctgtccatgttgaggcagtgcacctttttccgctgtggtgatgagctcgacaggatattgaccaccgcctcattgctgatcatacttgctgacacctgcatgccacagctggagtaagcactgcgcaagacaaacttgtcacccctgtcctctgcctcacagctggggtcccagaaggtcaggcccgtgatggtgcacttcaaatgcgcaacaagctctttctttagtaccagggtcatggcgtcgtcggcacactttgtctggatcaaggacatgagcagctccgggctacaagtgtccttgggaggagtggtctggatcggtgcgggtgaggtctgcagcctaccaccgcagctggaggcatgaagtgagacaatgctggccagcggtagctccacgaaggatgccacaatgctggcattgagcatccgggcctcccccaggaggccttgaggtgtgtctgggagcttgaagccacgaatgtttttctctggaaagatcttgaaggagtattctccagtggtccagatctgcatgttgtggttggcgtcgatgagccaggacacgtaggggggaccctgcaggatgaggacggcatcgagatccccgggtgcgcagctcagttccaccttcaccgtcaccgtccggggcccggccgagtggcccggcaggaccctcaggatgtgcgcctccttgtggccggccacgccttccaagtggcagccccggaccaaaggctggagtacgcggccgccactcgagcgtgcggcccatgtcctggctggcttccagcatgcagaaggacagtgacccctgggcttggcccagtcggaggaggatgctctgggggtcattcagctcagcagcagaggtgatggggcccctctcagctgcccactcaaggatctgggtcttggggaaggatggcagctctgtggtgttgacccccgggggctcttggaaggtgaccaggctggaattgtaggccaagtgcagtgggattcccagggcctggagatgcaggaagacactgctgtttacactgaggaccagaagcacctctcggggccaggtgccattttgcttggatgcctggagagtcagctccagctgtgacgggcccgttgggaactccaggaagaggacatggacttcaaggatggcatttgggggcctgaagccacggagccctttcgagacctggcatagtggtatatgtcacctcgcccctgctcggggcccacaggctgaaaggtcacaatggactgtttctgcaagacttgtgggagctgaggctgcagctggccagcagcagggcaacagccagagggagcgtgccgcggtccat

SEQ ID NO: 87168 - DNA, 2351 bp, Homo sapiens
  misc_feature (1)...(2351): n = a,t,c or g
aatggcctctgctgcctctgtgaccagcctggcagatgaagtcaactgcccccatctgtcagggtaccctgaaggaagccgggtcactatcgaactgcggcccaaaaacttctgccgggcctgccttaccccgctactgtgagatacccaggcccagaccctggaggagtccccctacttgccccactctgcaaagaacccttccgtccctgggagcttccggcccaactggcagctggctaacgtggtggagaacattgagcgcctccagctggtgtccacactgggtttgggagaggaggatgtctgccaagagcacggagagaagatctacttcttctgtgaggatgatgagatgcagttgtgcgtggtgtgccgggaggctggggagcacgctacccacaccatgcgcttcctggaggatgcagcgggctccctatagggaacaaatccataagtgtcttaaatgtctaataaaagagagagaggagattcaagaaatccagtcaagagaaaataaaaggatgcaagtcctcctgactcaggtgtccaccaagagacaacaggtgatttctgagttcgcacacctgaggaagtttctagaggaacagcagagcatcctcttagcacaattggagagccaggatggggacatcttgaggcaacgggatgaatttgatttgctggttgctggggagatctgccggtttagtgctcttattgaagaactggaggagaagaatgagaggccagcaagggagctcctgacggacatcagaagcactctaataagatgtgaaaccagaaagtgccggaaaccggtggctgtgtcgccagagctgggccagaggattcgggactttccccagcaggccctcccgctgcagagggagatgaagatgtttctggaaaaactatgctttgagttggactatgagccagctcacatttctctagaccctcagacttcccaccccaagctcctcttgtccgaggaccaccagcgagctcagttctcctacaaatggcagaactcaccagacaacccccaacgttttgaccgggccacctgtgttctggcccacactggcatcacaggggggagacacacgtgggtggtgagtatagacctggcccatgggggcagctgcaccgtgggcgtggtgagcgaggatgtgcagcggaagggggagcttcggctgcggccagaggagggggtgtgggctgtgaggctggcttggggcttcgtctcggctctgggctccttcccccacacggctgaccctgaaggagcagccccggcaggtgagggtgtctcttgactatgaggtgggctgggtgaccttcaccaacgctgtcacccgagagcccatctacaccttcactgcctccttcactaggaaggtcattcccttctttgggctctggggccgagggtccagtttctccctgagctcctgagaaggagcagttacctactctcctctaagtacaggactcatatcaacccaagtaccatgtggacttgatccctggctgaatcacctggatgacttggaatagaaatgactgctttagaagatgggatggggccgggtggtaagggatagaagagaggactctcaatctactgatcaagtcctttccccaatgcccagtggatggccagggtacctggggactcaggctgctgccagttctgctcaccaccatccgtgcttggcacagaagtagctgcatagaaagagcactggatttgaagtcagaagacctgggttcttgaaccagcctgtcaaccagttgtatgactttaaacaaggcatctcacctcttttcatcttgttttcttccaataatgttagagttcatgtaatcacattctctagaaccatttagtttgtgttaactatgaaccaagcagtgtggtggccactggtgacttgaaaatatagagaaaaaaaaaacctgctctatatctgaaagagctcttgggaagacagagaaacataaagaggaaattacagcacagtgtggtgggtgttacgggaagtccaaccccagcattatgggagtttagggaaaggggcatagcccagcctggaaggagagggtgagtgggggatggctttctgaaaagggtggtctaaaggatgcctatggtcaataggggaaagagggggagaagcatcttaagaagaggaaacagcagagnactggctggatgacctgtgactttggagcactgggttgtctccattgtcattatgggcagatgtgtgccatccccagccgacgccactcactgcctctttcctcctggtgttgccacttctgggtgagattaaggtgca

SEQ ID NO: 87169 - DNA, 369 bp, Homo sapiens
ctggattggatgaaataaaactatgttcacagatatgatggagaaactcaaaagattccataataatctatgagaataaatgaatccagcaaagtaacagaatacaaaatcaacacagaaaaatcagtttcatttttatacactaacaatgaacaatctgaaaaggtaattaagaaaacaattccattcacaatagcatcaaaaagaatatctaggaattaaccaaggatgtgaaagacttatataatgaaaactataaaacaatgctgaaagaaattaagacataaataaatgaaacatatctcatgttaatggattataagacttaatactattaaaatgtcaatacccaaagcaatccacagattt

SEQ ID NO: 87170 - DNA, 399 bp, Homo sapiens
ctcaatgtccttctgattattggaggcaattacccttcctgcatggctagaaaacccatggtaactcctcgccttcctgataatcaatcagcatgaggaaactgaaatgactggacagtaacaacagctttcagtttaaaggaactcttcctatgctctctggaaaccggaatttttataagtacagagtccatatttgtagatttaaagtactaattctccgagtgggttacttggagtgacggcatatggaaacactccaacttggttcctggaaccatgtatactacctagtagggacacagcaccacatgagtattgatttaaagtgggcactggaggatgttgccttccagttagcacctcaattgatccttcaacaaaccatttttatttcag

SEQ ID NO: 87171 - DNA, 382 bp, Homo sapiens
  misc_feature (1)...(382): n = a,t,c or g
ggagggcgtacaaaaacatgtataactggggcaatttctcgcggcatctctcaatcttgaggaaactctgagcacattggaatatgctcatagagcaaagaacatattgaataagcctgaagtgaatcataaactcaccacataagctcttattaaggagtatacggaggagatataacgtttaaaacgagatcttgatgcaacccgtgagaaaaatggagggggtatttctgaaaaaaattttagagccatgagtggaaaattaactgttcaagaagagcagaacgtggaattgtactgacaaattggtgctgatgaggaggagctgaatagggttacagagttgcttatggataataggaatgaacttgaccagagtaan

SEQ ID NO: 87172 - DNA, 628 bp, Homo sapiens
ttttttttttttagattctttccattttttattaattgaagcacagagaaaagaggcaaaatgattaaagaaatttatgttttttagacagggtgttggcttttacaccaacggaaaaaagaaaaaccagatgaataagcttttgatcttcattttcgtttctcttattctcatcggtaggcctgaaaaggctttttaaaatgtgaaggttaataaaccctaaaggcaagcttggacttggcaaggcaaaacaaagttttttaaacccctcccctcgggcaaaaagcaaggtctccccttaatccgtccaagccttgccagcaacttcctccctacaaaaagctgccgaaaaccatcccataacaagctttcaagttgcctcttttggttgccttggggcttggtgtttcacggaggctcaacaagtggcagtttggtttcttggatttgtctctccttctcagaaagtgtgcatatatctgcatgggaagggtgaatggtttcagcattaaactctttgggaaccgtatgtttcatctgacttccagaggctgaaaagcatggtcgcctgttcaccaaggattctgtgcagcatttggtgactctgtcactttactggcgttttctc

SEQ ID NO: 87173 - DNA, 872 bp, Homo sapiens
ttttttttttttagagaaacaacagcgggcccaggggacctgcgcttagcatgctaaggacctgcactggcacaggtctctgaattccctcagtttttattgattattatcttcattatttcagcaaaaaggaatgtagtaggagggcagggtgataataaggagaaggtcagcaacaaacgtgagcaatagaatccatgtcataatgaagttcaagggaaggtactatgactggacgtgcatgtaagccagatttatgtttctctccacccagacatctcagtggagtaaaggataacaaggcagcattgctgtaaacatgtctcgcctcccaccatagggcggtttttctcccatctcagaactgaacaaatgtacaatcgtgttttataccgagacattcagttcccaggggcagtcaggagacagtggccttcctccatctcaactgcaagtctttcctctttgactaatccacctcagcacagatcttttatgggtgtcgcgctgggggaccgtcaggtctttctcatcccacgaggccatatttcagactatcacatggggagaaactttggacaatacccagctttcaagggcagaggtccctgcggctttccacagtgcattgtgcccctggtttattgagatgagagaatggtgatgacttttaccaagtatactgcttgcaaacatttggttaacaaggcacgtcctgcacagccctacatgccttaaaccttgatttcatacaacacatgtttttatgagctccagattgggtcaaagtggttggggcaaagtggctggggcaaagctacagattaacaacatctcagcaaagcaattgtttaaagtacaggtctttttca

SEQ ID NO: 87174 - DNA, 543 bp, Homo sapiens
tttttgaaaaagaaaaatatttattttcagcaagaccaaagtcccaagtgggggcaggtgccaaatttgcccccgccaccagagggcctaggcccacaggaagcctgaagccaaattcaggcgtggaaggaggggagccaccagtggggcggcgacagtcacttgtactgaggagagagcggggggacaagtggagcagtgcagacactcagcatcttgtcgatgtccacctgggttgacttatccacctcggccttgtggtcactcacccccaagctgggcaagcccccaggctcctctccagcctcctctccgaggggagccagggcatgggtgggggtcactagtggactgggacagggcaaagcgaggcctgggcccagctcacctgccaagggcagcaaggcctgcagttgctccacacctccctcctcgggaaccggggccagctctgcctctgcctccacctcagcctccccgtcccccttccctgcctggttcagctcagggttgcaatagttgacgtactggtacagcggccgc

SEQ ID NO: 87175 - DNA, 1016 bp, Homo sapiens
gtccaagatggctattaaaaaataaggattattatgatgtctggaaagtatggtattggaggttcgcagcttttagaatctcaataggccagatatgtaggaagtgagggtttctcatctcagtcaggcccaaacctgtcctgatgctgaggaaaacacttgagatctgggaagacaattgtttaaagatactaatagtggacatttattgagtatttacctctattcagacattaggtttcccctgagcacccccactagattcagggggtgttgttttgtggccaagaggaggaatgagccaacaagattgcattattgtgcaggggcagagtggggagataggggcacatacccaggatgaaggtaacgattgaggggaggtgatcatgtgaatgaaatatatttaagaacgcacatgtcacgtcacttttgcaaacttgacacctcattctgttccttctttcccttttcagctccaagaggccttcgggtgggagccattcacccagctctttgctgagtaccagaccctctctcacctccccaaagacaacactggcaggatgaatctatgggtgaagaagttctctgaaaaagtgaagaagaatctggttcccttctttgaggcctggggctggcctatccagaaggaggtggctgacagcctggcctccctaccagagtggcaggaaaaccccatgcaagtgtacctccgtgccaggaagtaaaggatgccccacaaggcgggagagaaaaggcagggtcacgccatcaactccaccatggggctttggccgtgtgctcagtatctggagcctgaatcccgcttccaagcctgaccactagatggtggccccggtcataagaaaaaatggaacccctttctgtaaaaggtgccttgtgcttctttctattgtttttccgcttacgctattgctttccccaagagactcacttcacctcttagtcttccagagaggatctttcatcctgccatcctgaggctcgtgccg

SEQ ID NO: 87176 - DNA, 480 bp, Homo sapiens
  misc_feature (1)...(480): n = a,t,c or g
ccattaagaaaccccactggatgggttttgtgacatacttacttttcacattctgagctagtggccttgtgccttcccagtgtcccctgaatgtcctcagcgtcccctgtgtgcagcgcccacgtctcctggttgaactgtcccctaatgttctaggtgtcccctctctgtggtgcccatgtctcctggttggactgtccattggtgtcctgggcatcccttctttgtggtgcccatgtctcctggttggactgtccctgagtgtcctgggtgtcccctctctgtggtgcccacgtttcctggttggactgccccttggtgtcctgggcgtcccctctctgtggtaccctggtctcctgggtctcctggttggactgtccccgagtatcctgggcgtcccctctctggtcactcgtgtcctgggttccattcagccctttttttatagcaggtcctatattaaacctctctgtaggagtn

SEQ ID NO: 87177 - DNA, 362 bp, Homo sapiens
tccaaacagcccacgaggaaatctgcacaaccaatgaaggggtcatgtaccgcattggagatcagtgggataagcagcatgacatgggtcacatgatgaggtgcacgtgtgttgggaatggtcgtggggaatggacatgcattgcctactcgcagcttcgaggtatgctggctgattaacaaaaatatttgagatggcaaaaggtacagaaagggacacttttttttatgaaaacttgcactatgccaaaagcaggggaagaaatatggaatgccacgtcattcattagtctactgtgcatggtaagataagcctgaaaggcttagcaggcagcctgctaagacaagcggcatagcaatgct

SEQ ID NO: 87178 - DNA, 881 bp, Homo sapiens
ggatgtgtcttgcctccataaatacatcataaaaagcagaaatgtcctgaggcccctttgaattacagaaaccttgaggactatgcctaaaacctcaaaaatatctccaagctatttgtggatttttgtaacttaaatgattcataaaaccaatcccaacacaactggattctactgaaattaccacatatttgaggtccacaagcacaagtatagatctaatgcaaactgggctcagattagcagatccatgccaaaaacgacccctcccagtgtgttctggttttcaaaagactagtcccaggtcatctcttaaattagcatgtctattccatatacctctcctcttaatcacccatttgcctaattccacactatcatttgcagttgattacagtgggcacctgtatgtttaccttccctgttctccaaatacagaactgttatacaagtacagtctacccttgaataacacaggacttgggagtgctgatccccaagcagttgaaaatccacgtataacttgactctccaaaacttaactgctcatagcctactgttgaccagaagcctcactgatagcatatatagtcgattattttgtatgttatatgtattatatactgtattcttacaataaagtaagctagagaaaagaaagtgttattaagaaaatcatgccagacatagtgtctcacgtttgtaatcctagcactttgggaggccgaggtgggaggattgcttgaggccaggagtttgagacaagcctgggcaacagagcaagaccctatctctacagaaaaattgtttaaaaattagccaggcgtggctacatgtgcctgtagtcccagctactcaggaggctgagacggaaggattgc

SEQ ID NO: 87179 - DNA, 2833 bp, Homo sapiens
tgactgtggtggagcagctcagcaggataataagcttactcgcctgaccttgggtctctctctcatcctttctcttggctaaccttcattttggtgccaaaacccaggaaggggataggctctggctgggcgtccttagaggattctctctctctctctcctatcatcccttacccagccaacctccccttcccgaacctgctaaagaccctaaggatctcccaaaattctcccattgttggccacctcatccaccatcaaagcctctgagaggggtgagtaagagagacttttgcctattacctggaacccttgaccatctcctcactcccaaaagacccagcgctgggccaagggcttcctctggcctccaggcctctggttcctctgtttcctggacgcctgactccgcagctacctcctctattccatacaaggcctgcaagacaggcgccgccctctctcgtctttgtcgtctgtggtcccttcttcctctaccctcacctcctccattcactatgggagcctctcagtctacccctcccaagaccaccccccttgggtgtctcctccgcaatcgcaaggctctcggcctccgttcagggatccgttctaagaggcttatcttttactgcaatactgcatggcctcaataccaattggacaatggctcccaatggcccgaaaatggcactttcgatttcaatatacttagagacttagacaacttttgccatcgcaatgagaaatggtctgagattccttatattcaggctttcttcattctccgtaaccacccttctctctgccactcctgctctactttccaaatcctactcaccagctcaaaacctgactcatctcccgtcaccccacccacagacccagccgatgactcctcttcctttgaccccgtggattttctccctcctcgacagcatcatgatcctccaccagagcatcatgatcctccaccgtatgtccctgctccggctctacccctctcccccactctctccaaccaacccacttctgactctgagtcctctctgcctcctcccctcacccgctctcgggcccaatgtgctcagcaaccagctcccttgcttcctctccgggaagtagcgggagttgaggggatcgtccatgtccacgtccctttctccttctacgatctcttacagattgaagaacgtctcgggtccttctcctccgatcctgatacttacatcaaagaatttaaatatcttactcaatcttatgaactcacttggcatgatctctactttatcctctcttctaccctccttccagaagagaaggaaagagtgtggctcgcagcacaggcatatgccgatgaccttcatcagcaggatcctactaagcccgtaggagctgctgctgttccctgggaagagccttcctgggaataccaacccacagaccctggccagagtcccctcctgctcctctccgctagtccggcccctgacccctttccccagtacccacttcctgcctctctcattaacccttccgtagctgctcaccatgaccccatcagaatccagttaaaagactcttccaaatttcccagcgttcctcaataccccatctctctaacccaccaaaagggcctacagcccatcgtaaacaagctctgctcatgcagtcttcttagaccaacacactctccatataacacccctatcctccctgttaaaaagtctgatggctcataccgactcgttcacaacctccaagccatcagtcaagctgtcctccctattcatcccatagtccataacccctatccacttctctctctcgtcgctaccaacaccaccctctacactgcaattgacctgaaggatgccttctttaccatttccctacaccctgattcccaaaacctatttgctttcacctggactgaccctgacaccctccagtcacaacaactcacatggactgtcctccctcagggcttcagggatagccctcatttctttggacaagctctagcccgaaacctcacttccttaaacctgtctcccagtcatcttcaatatgtggacgaccttcttctttgcagcccctctctaaaagactctcaaactcacacggccactgctctcttaaactttctcgctatcaaagggtatagggtctccccccccaaggcccaactctccatctccatgatgacttacttaggaattcaactttcccctggggcccaggctatgactccagccagggcagcattaatagaaaatctacccccaccctcctccaaaagcgaaatcctttccttcccagggctagcaggcttctttagaatatggatttccaactttgccctcctagctcatcccctctatgaagtggccaaaggccctcccaatgaacccctaaacccctcacataacatactccccagcttccacaaactccaaactgctcttgtcactgcgtcagctccgtccttacctgatatctcccaacctttcactctctatactgctgaaagctgaggaatagccctcggtgtcttaggacaacagaaaggaaatcctccttcctttgcccctgtagcttacctctctaaacaactagataacacagtcaaagggtggccagcctgctttaaagcactagaagtggtagccagcttagctctagaaagcaggaaactaactttcagccagaataccaccgtccacagttctcataatctacaagatctcctctcctcccaagcagtaagctcccttcctccttccaggattcaattactccatgccctctttataaaaaatcccaaattcag

SEQ ID NO: 87180 - DNA, 383 bp, Homo sapiens
ctgctgcctggcgggcaaggcgaacgaaccggagaagaatcgcattctggagcactcctgcccacgaaattgacaaaagcaaggccaaccacttcctgatgctctttcgcgactcgagctgccaattccggccgctctacacgctgccgggggagacagaggagctggagcggttggcagggtatgggccccggaccgttacgcccgccatggaggaaggcatctacgagtacaagacgaaccgcctgcgcttcaccacagattcccgtcaagagcatgtccattagcgacgatgccttaaccatccaaggacatcctttggaagggcttgaaaaccaccaaccccacaaagggcggcggggaccccccaataagcccacccg

SEQ ID NO: 87181 - DNA, 347 bp, Homo sapiens
tttgcatgccagcctcggcaaagacaggcactgcgtgttcctgtgtggagaagatgctgcagctagaccactggtcctgaacacccagggagaaaagggtctcaatgaggatggccgtctccacagttatttgcacgcagttagcaatgcacgcacccttcagtggcctggaggccgagtaaagcttctgcatgcccatcaaacccggcatccattctccacaatggctaaggccttgtgtccccaggtggccaggccgatgtcagcaactttgtagggcagcttgtcaaacatgctggcggcacctttgatggacaaggtcaaagggggctgggccatattctggg

SEQ ID NO: 87182 - DNA, 358 bp, Homo sapiens
ctgcccagctgcccgtgtgcctacccactggaggccatggacagccctgtgagcctacaggacgagcaccagggccgcagcttccggtggagggatgccagtggccctcgcgagcgcctggacatctaccagcccacggcgcgcttctgcctgcgttccatgctgtctggggagagcagcacactggccgcccagcactgctgctatgacgaggacagccggctgctgacccgtggcaagggcgccggcatgcccaacctcatcagcaccgacttctcacctaagctgcacttcaaagttcgacacgacgcccctggattctgtgcaaggggggactggaacccggctccacgcctgg

SEQ ID NO: 87183 - DNA, 382 bp, Homo sapiens
cctccgacgagggaggaggtctccttttattgctaccccggtactgatttttatcatcacagggtattgaattttgtcaggtgctttaatctgcatctttttaggggatcctgtgattttccactgttctgttattgtatgaattatattaattgacttttgcattttaaaccaactttgtattcttgggataaactccacttggtcacaatgtgtgactccttttgtatatggcagcatttgacttactaatatcttgttaaggattttaaggcatagcgctctttatttttcttggaatatatttgatcttttttgcgtaagggaaatgcaagcctcgcataaaaaattgggagtatatccttcttttctgttttccgaa

SEQ ID NO: 87184 - DNA, 356 bp, Homo sapiens
aacaaaatcaggcaagaaaaatcatagactaaaaagaataaaataaaactgtttctattcgtagtttatgtgaaaacttaatgagttaacaacaaaataactcccaaaactaatgaagtttagcaaggtcacaggatacaaggtcaacaaacaaaaatcaaacacatttgtacatactagcgatgtgcaattggaaacccatgtttcaaaaataatacaacttaacaatagttcctccaaaatgaacactgtggaatatatgctgaaaaatacataaaatgctgataactgaaatgaaagaggtcctaaatagatacctcatgttcatggattggaagacacaaaattgcattcaa

SEQ ID NO: 87185 - DNA, 818 bp, Homo sapiens
ttcgagagctttggcacccaaagggtggctaaggttttcagttgaataaacatatttctttctaaaaagtttatttctaaaagtcattattgaggttggggcaattatcttgaagaggatcagttccaaagttattttctatttagagtaaattggaagattaagctgtaaatgtttgctggtagcttatgcattcatatatatctttttgtatttatggaagaaaaggtattgaagccctattttcggggcattttctgcatcttacatttaataaatttttctaataactaacaatttttgtatgcttacaaaataatagtcgtgtacgttaatggaagaagaaatcaaaggtttctgtgtctttctcttttatggttacttgtcagcaattgccatttttatatgctttggagtcataccttataaaacctgcctaggatagtaaccccacaaataaactttctgagtctggttgaaaattaaagtgttgataatgacactttggccagacacggtggctcacctataatcgcagcattttggaagactgagatgggcagatcacttaagaggccaggaggttgagaccagccagaccatcatggcaaaactccgtctctaccaaaagaaaacagattatccagacccggggacctgcatctgtagtcccagctacttgggaggctgaggcccgaaaagtccgttgaacctgggagggcaaaccttggcagagaacaccagttttggcccactggtgccccatccctgggagacaggaggcggagacttctggccgtgggagacggacgagccac

SEQ ID NO: 87186 - DNA, 318 bp, Homo sapiens
aaatggccttggtacaactgaatattcacatgcagaagaatgaagttgggtcttttactctcgtcctacaaaaaattaactcaaaatggattgttgacctaaatataagagctaaagttataatactgttggaagaaaatatagctataaacctttgggaatttgagctaggcaaagcttccttagatatgataccaaaaatacaagcaataaaaggaaaaagtaggtaaattgattttatcaaaaattaagacttttgtgcttcaatagacgctggcaagaaagtgaaaagacaacctacagaatgggaataattat

SEQ ID NO: 87187 - DNA, 4648 bp, Homo sapiens
atggcggcgggctcggatctgctggacgaggtcttcttcaacagcgaggtggacgagaaagtggtgagcgacctggtgggctcgctggagtcgcagctggcggccagcgcggcccaccaccaccacctcgcgccgcgcacgcccgaggtgcgggccgcggccgccggcgcgctcgggaaccatgttgtgagcggcagcccggccggagccgcgggcgcagggccggccgcccccgccgagggcgcgcccggagcggcgccggagccgccccccgcaggtagagcgcggccggggggcggggggccgcagcgcccgggccccccctcaccgcgccgcccccttgtccccgcagggcccgcgccgcccgccgcgaagctgaggccgccgcccgagggcagcgcgggggcctgcgccccggtgcccgccgccgccgccgtcgccgcggggcccgagcccgcccccgccggccccgccaagcccgccggccccgccgcgctggccgcccgcgccggccccggccccgggcccggccccggccccggccccggccctggcaagcccgccggccccggcgccgcgcaaactttgaatgggagcgccgcgctgctgaactcgcaccacgccgccgcacctgctgtcagcctggtcaacaacgggcccgccgcgctgctgccgctgcccaagcccgccgcccccggcactgtcatccagacgccccccttcgtgggcgccgccgcgccccccgcgcccgccgcgccctcgccccccgccgcccccgcgcccgccgcccccgccgccgccccgcccccgccaccccccgcgcccgccaccctggcccggccgcccggccaccccgccggacccccgaccgccgcgcccgccgtgccgccccccgccgccgcccagaacgggggcagcgccggggcagcccccgcccccgccccggccgccgggggccccgctggggtcagcggccagcccgggcccggcgcggcggctgcggcgccggcgccgggggtcaaggccgagtcgcccaagagggtggtgcaggcggcgcccccggcggcgcagaccctggcggccagcggcccggccagcacggcggccagcatggtcatcgggccaactatgcaaggggcgctgcccagcccggccgccgtcccgccgcccgcccccgggacccccaccgggctgcccaaaggcgcggccggcgcagtgacccagagcctgtcccggacgcccacggccaccaccagcgggattcgggccaccctgacgcccaccgtgctggccccccgcttgccgcagccgcctcagaacccgaccaacatccagaacttccagctgcccccaggaatggtcctcgtccgaagtgagaatgggcagttgttaatgattcctcagcaggccttggcccagacgcaggcgcaggcccatgcccagcctcagaccaccatggcgcctcgccctgccacccccacaagtgcccctcccgtccagatctccaccgtacagacacgtggatcacctatcattacacggcggtgcaccccaactaacataatatcgcgagtgtctcaggcccagacaacggtgcagcccagcgcaacactgaagcgctcgcccggttctcagcctcagctcgttctgggttgcgctgccaagacggcttaacttggaacggcgccggctgttcagacggggactcctcagcgcacggtaccaggggcgaccaccacttcctcagttgccagggaaactatggaaaacgtgaagaaatgtaaaaatttccgatctacgttaataaaactggcttcatctggcaagcagtctacagagacagcagctaatgtgaaagagctcgtgcagaatttactggatggaaaaatagaagcagaagatttcacaagcaggttataccgagaacttaattcttcacctcaaccttaccttgtgcctttcctgaagaggagcttacccgccttgagacagctgacccccgactccgcggccttcatccagcagagccagcagcagccgccaccgcccacctcgcaggccaccactgcgctcacggccgtggtgctgagtagctcggtccagcgcacggccgggaagacggcggccaccgtgaccagtgccctccagccccctgtgctcagcctcacgcagcccacgcaggtcggcgtcggcaagcaggggcaacccacaccgctggtcatccagcagcctccgaagccaggagccctgatccggcccccgcaggtgacgttgacgcagacacccatggtcgccctgcggcagcctcacaaccggatcatgctcaccacgcctcagcagatccagctgaacccactgcagccagtccctgtggtgaaacccgccgtgttacctggaaccaaagccctttctgctgtctcggcacaagcagctgctgcacagaaaaataaactcaaggagcctgggggaggttcgtttcgggacgatgatgacattaatgatgttgcatcgatggctggagtaaacttgtcagaagaaagtgcaagaatattagccacgaactctgaattggtgggcacgctaacgcggtcctgtaaagatgaaaccttcctcctccaagcgcctttgcagagaagaatattagaaataggtaaaaaaacatggtataacggaattacatccagatgtagtaagttatgtatcacatgccacgcaacaaaggctacagaatcttgtagagaaaatatcagaaacagctcagcagaagaacttttcttacaaggatgacgacagatatgagcaggcgagtgacgtccgggcacagctcaagttttttgaacagcttgatcaaatcgaaaagcagaggaaggatgagcaggagcgggagatcctgatgagggcagcaaagtctcggtcaagacaagaagatccagaacagttaaggctgaaacagaaggcaaaggagatgcagcaacaggaactggcacaaatgagacagcgggacgccaacctcacagcactagcagcgatcgggcccaggaaaaagaggaaagtggactgtccggggccgggctcaggagcagaggggtcgggccccggctcagtggtcccaggcagctcgggtgtcggaacccccagacagttcacgcgacaaagaatcacgcgggtcaacctcagggacctcatattttgtttagaaaatgaacgtgagacaagccattcactgctgctctacaaagcattccttaagtgacacaggaggacgcctggggactttttatatatttgcagattacgcctttttgtaacgagcaaatgggatattgtttaaaaaacagccacctctttacaatggaacagttttatattcctgtttctaaatcagctcttcagtgtgaaagaaaacacgtttctgtaacagagagaacacaaaggcctgtggatactcttaaaggacaattaaatcttaactcatcttgattgagtggccttcctgccaaacaagccatatataaagactgatggaatcgttagcaaataattagctgccctcttgtcaactcatagcagtttctgcattatttgtgcattttggtttagttctacctaacttactatgtaggtgtatgtctacagccgatgacctcatttcgtttattttatttttgtaatagtcagttgggcaaagcaaactgattttttaggactatttatcttccttcccttcccctcccaccccggtctcctgtgtgccccctgccctcccctcccctcccttcccctccactccgctgagaatcctggaggaatacacaattcatcgttgcacccccacctcagagtgtaatcgcatttctgcttggtagaggccgagcccagcaaaggtggctccttctgaatgtgtggtcagcatctgtacaaatgcattttatttgctatagtttgtaaagctgtaaagttaaaagagatgaaaaccttttcagcataaatatattttacttgcactgtgttttttagctaaaagtgaaaacctagattaaataaaatcaaagttgagaagaatcatcaaaagactgtttctcggtgtgaatcaagtgttgaaaaatggttggtgtattttgtcagtaattgtacataacttttggcacatgacatagaaatggctatgtaaactataattattttgctaagagactgtatgcaagccttgggccgactttacagacgtccagagcaaagccccttctttgtacctatttttttattacaaatatactaattggttctttctattttcagaggttattgtatgaaattgtctattgatagtacttttatgactgtaaatactctggctttctccgtgtgaattctcacattagaccttaaatccgagccgcgtgtgaactggaacgctggatcagtattttttatcaacacctgaggaactggttacacctttttattttggccttttagggaaacccctggtcctttcccattttttcatgtaaattttgcacagtttacttgttcatatgtaaatattttactttcagaaatgaagtttttaattgctattgttttatataggattgaaagaaaattaactcctttattaaaaacaaatttatctgtaaaaaaaaaa

SEQ ID NO: 87188 - DNA, 363 bp, Homo sapiens
caacggcagagctgtgcagaatgcttgtcagatccttctgaaacgccttgagcccatcattaagaaacatccggaaggtaaatgggaagactggatagaagctgcatttgaacaaagaatcagtctctcagccactggatacttcaggggctacaaggccttcatggactgggagaagggggtgggggacccatttccttactatgtctgcagagctgcctgttctgaggttgaaattgactgcctgacaggtgctcacaagaaaattagaacggacatcatcatggatgcatgttgcagcctaaatccagccattgatattgggcagattgaaggtttgtttattcagggaatggggctttt

SEQ ID NO: 87189 - DNA, 364 bp, Homo sapiens
  misc_feature (1)...(364): n = a,t,c or g
ttgtgttcgctgagtttggggatttgaggaggtggtccaggagctttgttcctgctagcagcagccaggtcatgacctttacatggtgacttacggctgatgtttgcccttccaggtccagggtgcaatcatggtgtccagcgtggtggaggtggtgattggcctgctggggctgcctggggccctgctcaactacattgggcctctcacagtcacccccactgtctccctcattggcctttctgtcttccaagctgctggcgaccgagctggctcccactggggcatctcagcttggtgagcaggcaccaagcctgattcctgtccagccccagcaccctaccctttttatgttctttgtccn

SEQ ID NO: 87190 - DNA, 1346 bp, Homo sapiens
cccagcaacattcttagcacctccaggacagagacaggacaggattgtgacatacagcaagaaaacagcatttccaggagggaggggtatctagggagaagtgcctgtcaggagatccttggcaagatgacagtgtgtcctggaggaaatgtgttattcctccctttgaaagccagggagcagggtgcctcctcatgaggaggcctagcatgaacctgacactcagaatatctgttcccatgcgggcaggggctccctggcctttgtggcccccactgaggttgtgtgtcttgccttccgcagcgcgagcccagcattgacctgctgcaggccttcgtggagcactggaagggcatcacgcactactacatcgagagcacaggtaacctgcccagtcgttcagaattggagccgagttcacggagacagagaaccagacagacagaagacccagagccctgggccactccactcctgatgatttagctgccggtcccactctgaccttttggaaagaggctgtgtgaggaaggagtagcctggttgggggtctcactggcctgactctgcaaggaagaggtggctgcacttcccccagcttccagctccagaccttcaggccccagatgaaagcacccccgccaagaagacagacattccctggcggctgaagcagatgctggatatcctggtgtatgaagagcagcagcaggcggccgcgggtgaggcagggccctgcctggagtacctgctgcagcacaagatcctggagactctctgcacgctgggcaaggccgaggtgggaggccctctgcgcgctgggccaggccgaggtgggaggcctctgcgcgcttggccaggccgaggtgggaggcctctgtgcgctgggccaggccgaggtgggagaccctctgagtgctgggccaggctgaggtgggcggtgggcagtgggcagcctggggctccctggattccaggcctttctgcctatgctcttcccagtcctgacactgaaagtggcagttcagggcgagaggagcaaacaggacgggcactgtggctgtctcacttagaacactccaccatcccagcgctcctgttcccagttcactccacaaagatgggcctgccatgtgccaggctctgctctagatgctggggacacagcagggattcatactgacaagagccaggcatggtgatgcgtgcctgtagccccagctacgtgggaggccgaggtgggtggattgcttgagcccaggagatggaggctgcagtgaactgttatcgtgagaccgcactcctgcctaggaggcagagcaagacactgtctcttaaaaaaaaaa

SEQ ID NO: 87191 - DNA, 2389 bp, Homo sapiens; identical to SEQ ID NO: 61131

SEQ ID NO: 87192 - DNA, 1150 bp, Homo sapiens
  misc_feature (1)...(1150): n = a,t,c or g
ctgcaagtccttcttcccggtagctgcagagtcttacatggcatgccgccgctgaggcccgagccggtcactaggtctttttaaccggggcccgctgtggtctgcacagtgcacatacctcacgatcacgggaaacacacatgcagagaaggcgggaaagcgtggcaaagacatggtgaaccagtattttggcatcttcttcctcatattccagtcatccggtgtgtggggcaacttgatctcatcgctggtatttggccagactcccagccaaggtaaaaggaaaaggggcattctttcgaagacctttctgcaggtgagttagttctccaagtcagcacaggacacagaatctggggctggagggatttggagggcgtcgtgtgctatgtctcctgtccactctgacttcatagagacccttccagaagagcagctcacgtcctgtggggccagtgactgcctgatggccaccacaaccaccaacagcacccagaggccctcccagcagctggtctacaccctcctgggcatctacactggtacgagctccatcggcccagggcagggtccctagcaaagcagagccaagcctccttcctgggctgacaaagaaggagagaagaaatcagtacctttctggtccactttactgtcgactttcaagctatatagagataaacgtctgtgcctcttaattctgctgccgctgtacagtggattgcagcaaggattcctctccagcgaatacacaaggtcctatgtcacctgcaccctgggcatccagttcgtcggctacgtgatgatctgcttctcggccactgacgcgctgtgctccgtgttgtactggaaaggtctcgcagtacacgggcagggctgtgctgtacgtgctgggcgcggtgacccacgtgtcctgcatgatttgccctactgctgtggagacctcgtgcttgaccatctggcagtgttcttcgtattctctggcctgtggggcgtggcagatgccgtctggcagacacaaaacaatgctctctacggcgttctgtttgaagaagaagcaaggaagcttgccttcggccaattaccgcctgttgggagggccctggggtttcggtcattgcctttggggtaanagaagttttttggtggt

SEQ ID NO: 87193 - DNA, 383 bp, Homo sapiens
actggtagttctagccagcgcaataagaagaggaaataagatgcaaacagattagaaataccactgttcctgtttacaaatgacatggttgtctacacttaaaataccaagaaacctaccaaaaaaatcttacgactgagacagttcacaaaggtcacaggatactagataaacaaacaaaaatcaattatatttctatgctagcagcgaatgtgaacacatagacaccactattaaaaacacaataccatttaaaattgctcaaaaaagaaatgcatatgtgcaaatctaacaaaacatgtatagaactttttatgctgaaaacagcttaacactgatgaaagaaatcaaaaatctaaataaatggaaagtcataccatgtc

SEQ ID NO: 87194 - DNA, 377 bp, Homo sapiens
gcaagggatagcattgctgaccagaatgggcgagtcagtcaagcacgtcactggcggctacaagctgaggactcggccgcttgagtttgctgccataggtgactacttagatacatttgcactcaaactgggaaccattgatcgaatagcccagcggatcatcaaagaagaaatagagtaccttgtggagctgagagaatacgggcctgtgtactccacatggagcgccttggagggtgagctggctgaacccctggagggtgtgtcagcttgcattgggaactgctctacagccttataagagctgacagatgacatgacagaagacttcctatttgtgctcagggaatatattttatactctgactccatgaagg

SEQ ID NO: 87195 - DNA, 989 bp, Homo sapiens
cgggcaccctggttccccaggtggcacaggtgcctgagaggcccatagggccgaagtgtttccctccccatcccacccaggcccggtccacaccagccccctcccacggctgcagcctccaggggcaccctctccccacaggccctacctccggtccaggctgtccctccctctcaccatagtgcaaaaatgcactaggctccccagtcttttaaaaaaattagactttttaaagaacaatttaaggtttacagcaaaattgagaggaaggtacagggagttcccgtcccccttggaacccccctgccaccaacaccctgcatgggggcacattagtcaccacccaggaacctgcactgacatcacctccaccgagtccagagcggatgtcaggtcgccctggtggcacagccacaggtggacaaacagcagcatcgccgcccaggagccctgtgcccgcccactcctactaccctcctaaagcccctgcagcctccggatggttctgccttttccagtgcgccatgctgcagagctggagtcgcacggcctacagccttttcagaggggcttctctacttagtaacagggacttgatgtttctcccatgtgcctgctcttggcccgactgctcatttcttttcagtactggataatagtccagtatggatgcaccacggtttatttttccacttatctactgaagggcatcttggtcgcttccaggttttggtaattatgaagaaagatgctatcaacatccgggtgcaggtttttgtgtgggcaggagatttccagtgggtaaatgacgaggtgtggctgctgggtggtttgccgagagtgtttcgtgttgtcagcagctgccaagctgttctccacagggcctgcgggttccacttcccacaggaatgaacctgcgctcccggcgtttcccgaatgtgttgtcagtgcttgggattctggcccttctatggggtacgcgtggtgcc

SEQ ID NO: 87196 - DNA, 382 bp, Homo sapiens
tacttaatggtagaacactgaaggcttttcccataagatcaggaaaggatacttgcttttgccgcacttatcaacattgtattagagcttcaagctagttaaattaggcaagaaaaggaaataaaaggcatcaagattgtaaagaaaaataaaactgtctgtaattgcagataacatgatcctatgtgtagaaaaccctgaagaattcacagaaaaactgttagaattaataaaatgagttcagcaacatgacaggatacaagatcaatgattaagcaatcaattgaattgtcatgtactagatagaataatttgaaagtacaattaaaaagaagacaacaattccattcactatattgtcaaaagaaatcaaacccttgga

SEQ ID NO: 87197 - DNA, 376 bp, Homo sapiens
gaggaattatctgctgttacttggctgggaaagacgttatgtctccttcatttccgaaggatagatttgctggatataccatttttgataaacaactgtttttctttcaggactttgattgcctcatcccattctctcctgttctataagggttctgctaagaaatttgctcttaacctaatggagactcccttatatatgacttgacactcttgctggtcttacaaacctctttcacttttggcagctcgactatattgggcctagagaagaccttcttgcattgaatatatgtggcgatctttgagcctgctgtatctggttgtgtatcactctctctcacgactgggacaaatgtaaactattatttattaag

SEQ ID NO: 87198 - DNA, 388 bp, Homo sapiens
gtattttataaaagtaattctgtaacctgattttaaaagtcttgtggaaatgcaaatgaccttaaaaaaggcaaagcaacttaaaaattttttttcaaaaggaggacctacagtgcctgatatcaagagtatttataaagctgcagtaacaaagacagggtagtattggtatcaagatactcaaatacatcagtcaaagatgatacagagttcagaaacagacccatacatttgtaaaggtgcaaaggtaattcagtgggagaaagaatcctcttttgacaaatgattaacaattggatattaatattataaatacaaaaagtgatctataccttgtacaatatgccaaaaaagttctgaagacataaatgtaaaatataaaactcac

SEQ ID NO: 87199 - DNA, 1065 bp, Homo sapiens
gagttttttttttttttttttttaaaattaagacaagtttattgagtaaaaaaatgcatacattggaacggcaaaacatcaataaggccctaaaacaaaaaatacagttatgctttaacaaattcttagcaatgtggcccacgctttttaaaaaattgacgtgttggcagtgttggttaggaacactgacgtacatcccaaatagtaataaattcagtatgaaattatacgcataaccttactcaccatactactttttctcccaaactattgtgacttctttttgctctctgattaaaacaaacaggtaacatccttacacctttgctccatcccttgggctttaaaaagaatggctgtagttagttttgattcactatatactctctgtacttgaggaagagtaagctgtgtttaaaagtgcccttttccatgtcgtcatgtaccaataccctctgcatttcaaaatgttgactcagatgtttttccctctacagaactagaaaattgtccccccactttggtctatttactcatttgaagacaaacagggttactaagagttttacataagttatttctttagagtgacgaagtgttagtttacttcttgcttagtggagacaaaaattgtgagataaagaggaaggaataggatgtacacatttacccatcaatatagcacccagtgttatttgagcaggacccttctgttagcatctaaggtaaggttaggacagtcaagataaaatactggatgttggccaggagcagtggctcaagcctgtaatcccagcactttgggaggctgaggcaggcagatcatgaggtcaggagatcaagaccatcctggctaacacagtgaaaccctgtctctactaaaaacacaaaaagttagttagttagttagccaggcgtggtggtgggtgcctgtagtcccagctacttgggaggctgaggcaggagaatggcgtgaacccgggaggcggagcttgcagtgagccgagattgcaccacttcactccagcttgggcgacagagcgagactccatctcaaaaaaaaaa

SEQ ID NO: 87200 - DNA, 1188 bp, Homo sapiens
gcttcctctgattctcaccaaagtgttggcccaaatgatttttaaatttgaattcattgccattattaaacatatatagatgtcacacaaaatatccagatttctgctcctctaagaaacttgggaggtctggccaccctgggcctgcatgcccccatggcaataaatcaagccctggctgctgcttcagatgtggcatggactctccgagctgccacagcccggccactctttgtcagttcccaccactgcagccaaaagccagctgctgtttttcatctcttacccagcctgtttgctcatttaagctaattgtctagtccctgttgagattggagtttagatctcaaaagctagactctacagggtgggtaggcctgttaatgattttgttatttaccctggaagcactgcaaaggcattggaaggtttcacgtagagcagcaataacacaagcaaatctgatgtcgaaagatcactctggctggccttggtggctgatgcctgcgatcccagcactttgggaggctgaggcaggaggattgcttgagcccaggagttggagacaaggctggcaagaccctgtctctacaaaaaaaattgaaaagttaaccaggcacggtggaacacgcctgtagtcccatatacttggggggctaaggtgaggattgcttgagcctgggaggtagaggctgcagcaagctgtgatcatgccactgcattccagcctgggcaacagagtgagaccgtctcaaaaaaaaaaaaattactctgaattgttaaaactccaggtaaacagctatttgactatacaatagggacaaatcaagacctcccccagtctcctgtggcttttttatacaaaaaccttaattatattcctggagataattgtcagtaaaaaaggatattttcaccaaaattttttgtgaaaaatagctggagaaccactgtgttaggatgaaaatggattggaactaaatggtggaaagagttgtattagagccctaagggacttttaccactgatccttttaccttggctatgccctcttctatcaggtgggaattgtaacatttagacctgtttaagtaatcccccaggggccatttggcaggaacttttctatgaaaagatgacccggtgtttaaaaacccttctaaagggggatccaggggtgttttatgt

SEQ ID NO: 87201 - DNA, 466 bp, Homo sapiens
  misc_feature (1)...(466): n = a,t,c or g
tagggctcggcggggacaaaaggcatccagattgttaagaaagatttaaaactatctgttcactgataacatgagcctgtgtgtagaaaaccttagggaacctatacagaaaaatgaatagactaataagagtttcagaaagaccaaaggatataagatcaatacacaaaagccaaccccacttctatatgtaagcaatgagtaatctgaaaaggaaattaagaaaataattccattcaaacttaagcacttgcaaatttttgatactataaataacctagttgatggacatccatgaatacataaagtactttctgtatttcagatatccatgtgggataggtttctgggaactttatttggcttttcacagtgacagatacaaaggtacggggcactgaatataaatgatgggtttcagnggaacatggttgtgttgtaaaaagtatggacccaaatgtaaggt

SEQ ID NO: 87202 - DNA, 332 bp, Homo sapiens
ctggaagattcaatactgtaaagaggtcaatattccataaagtgatctgtagattcaataaaatcaaatcagaatccccacagggtttttttattcagtgggaactgacaagttgattctgaaatttatatggaaaaacaacatcgcaagaataaccaaagcaatctttgaaagacttaacactactcgatatcaagactcctaacatcataataattaagacagtatggtaatggcacaaggacaaatgggcaaacagaacagagattacagagaaacagaccctcacatatacaacctcttgatttatgatggaggtgattgtacactgg

SEQ ID NO: 87203 - DNA, 512 bp, Homo sapiens
  misc_feature (1)...(512): n = a,t,c or g
cattcccattttcatgcccaaatgttgccttttccaagaccactctggcctgccacacccctatcctgtgcccatataaaccccaagctctacaagcagaggaacagaagagcagcagagtagcaaaatggcatggcagaggagagaagagaaggagcatctgaatgtcaggaggagttcggctgaggacggttggaaagcagataagccggggatggctgaactccaggggaagatcatcttcccactccatcccctttccagctccacatccattcctctgagagccaactccatcactcagtaaaatccccaccttcactatccttcaggttgatgtgacctgattcttcctagatgccagacaaaggacgggattaccaaggaggaggcaggattttaaaaagggctgttcaccctggattnttcccattgagtgggaattagggccttccaggaaaaggcaactggttaaaggggcattnatttgttaaccacacccttaggatggt

SEQ ID NO: 87204 - DNA, 395 bp, Homo sapiens
  misc_feature (1)...(395): n = a,t,c or g
aaaatctggcggttatatcatcttgcctgtagcacagaagtttttgtctgttcagaattgagcttttatggtaatgaacaggctttatcagtataaatattttacatgtgacagatctgtgacctccatttttcttgctgggaacaggtttgaacgctgaagtgactcattgtggaacaatgagacggaaataccgtgattgtactgtaacacggaggcctgccagtcatcaaacgtaacaaaagattgtcagagcaacgatggtgtgaggcagcttgctctagatagtggggatgcgagattttctggctcataatgggcaagaattgatcatgagtacttttttttcctcagttttactttaccgaagaagaccgccaaactgcggagagagn

SEQ ID NO: 87205 - DNA, 678 bp, Homo sapiens
ttttttttttttgtacatcaaaatgagttattttaatgaatgaaaaacattaaatctaccagtctacagaaaaagaaaatgtgtatttgacatcgtttaaggtggctcttacatcaactccttacttggaaaactggtatttaaatgtcaagaattaagcttttctcctgtcttcccagcattgacgatttcgaaaaatttttgatactattctacgtaacactgctttagctaaggtaagtatatcttcttagttccaagtatcctatccagcctgctctccagtcattcctgcttaaggaactccctgtggctgggctgaaacaggactctttcccttgctccagatgagaagaccaaagctggtttggaagtggggtggcactacaaagggccacagcctccatagttctccagcatcacatccctgtacaaggccctctcggcaggcacccatgatggcccattccttcgtagtgaagtacacagccacgtcctcaaaagccactgattcctggggcctggttgttaaggacacagctgtcatcatctgacctcttttcttcctttctgggtaaaggtaaaagtctcaggtgctgaggatatgccccttggggcctctccatccagagctccccgaggaaccgagcaccagggtgtttcccctcgctccagctg

SEQ ID NO: 87206 - DNA, 1304 bp, Homo sapiens
cctgcctgaggctgatcattaacccagaacttatataaagatggctcatgcgtggaatgggtatagcactgcctgcagccatggccagtacggttagccccagcaccatagctgagaccccagagccacctccattgtctgaccacatccgaaatgctgctgacatctcagtcattgtcatctattttctggtggtgatggctgttgggctgtgggcgatgctgaagaccaaccgaggtactataggaggcttcttcctcgctggtcgtgatatggcctggtggccgatgggcgcctctctctttgccagtaacatcggcagcaaccactatgtggggctggctgggacaggagcagcttcaggagtcgccaccgtaacatttgaatggacttcctcagtaatgttgctgattcttgggtggatctttgtccctatctacatcaagtcgggggtgatgaccatgccggaatatctcaagaagcggtttggtggggagcgactccaggtctacctctccatcctctccctcttcatctgtgtggttttgttaatttctgcagacatatttgctggagccatattcatcaagctggccttgggattggacctttacctggcaatcttcatcctcttggctatgactgctgtttacaccaccactgggggcttggcctcggtgatttacacagacaccctccagaccatcatcatgctgattggctcttttattctcatggggtttgcatttaacgaagttggaggttatgagagctttaccgagaagtacgtgaatgccaccccatccgtagtcgagggggacaacttgacaatcagtgccagttgctacacacctcgggcggactccttccacatcttccgagatgctgtgactggggacattccatggccaggaattatatttggaatgcccattacagctttgtggtactggtgcacaaatcaggtcattgtgcagcgctgcctgtgtggcaaggacatgtctcacgtgaaggccgcttgcattatgtgtgcttacctgaagctgctgcccatgttcctcatggtgatgccggggatgatcagccgcatcctgtacacaggtaagccctgaatccgtatgttctctctttttttatgcttgtattctgataagtgtttttaaaatgtcataaaaccttgagaaaatccattctggaaggaagtaaaagcagacttccaggtggagggagcagcctgcacagtggtcaaaggcaggaaaatttggcatattggacgctctgttcctttatcctcttcataccaa

SEQ ID NO: 87207 - DNA, 1160 bp, Homo sapiens
ttttttttcaaggtttacatatacctttttaaagtaacatttaaaattacttcctttaatataaaagaaacacacaaagacacaaagaaagcccaataaagctgtgagtcccagtttggtagctgaggaggagtctaagaaaacaagccattcctcagtatccctcgggaaagaaggggtgagaggacacagatatcaccaggccctgggtgactgcattgctggggccatgcagggctcagctctccaccaagggaaagtgctgattttccttgtcatgggtcctggccttgctcccatgctcgtccttcagttttcagaagtccgtccagttccaagaatgggctccttccttttagttcactaacattttcacttaggggtttgaaggccgctttaccctgtcgtagtgtcagggtgccaggggagttgtcatcctggcaggatgggtgaaggggggatttccctaagtaccttgctgctgttttggtttccatctattgcgcatagaaccttgaagatctgggagtctcagggtcccttgagggcttgtcggagctctggctggccacaggggtttctgtgggctgtcttgcttcctccttggaaaacacctgtttggaggggaactcagtctggttccaaggtggcatctgttcctcaacagataactgggtacccagaggcaagtccaattcagaagataaaggtgcctctgggggcagaacaggctctgggggaagatttgatttagagtcttcagtttcaaatacttcactcagctgtttcaccagtgggcttggggggtctccactgctggtcttcataggtgtccgtgcaataccaagagtaggagagcggggatctgagtcctgggcatgtttaagaccctccagttgctcccctgctggtaggcctggctgtggagagctctccacctggatgggagtgcgcaggatgccagcactaggtgaacgggggtccgccactcgagccagatgcttgttgtgcggcggaggccgcgctggtgtgactgggacgctcttggctgagcccatctcaaccaggagttgcagggtgggggcaagggccagcccgggacgaggagggaatgccgggccccaattccacctctggatgcacaacagctcgctcgtgcc

SEQ ID NO: 87208 - DNA, 399 bp, Homo sapiens
cggcacgagcttgtctctctcatacataggtatatatgttatatacacatgtgtatgtgtacaattcaatacatctatgtgtctatgtagctacctatgtatgcatgtatgtatgtatgtatctgcctatctattaatctatctctatgtatctacctacctatctatatctgtgtctatcaacttcaggaatgcttggcattcttctaacatctgcggggtatttagggattaggctatgatgatagatttccagcttcatttctttttaaaaccttttattcttcttgctcattttccttttcctgtccctaaaggacagtttctcctcagtttaggacttcttccttttgctctcttatcatttgcagactttccgttctcagccagaaccttcct

SEQ ID NO: 87209 - DNA, 369 bp, Homo sapiens
gacaaacttgcatcttgcatcctcaccagaaggaaggaagcacactacttgatgagcctctctgggttctggcaacaccacattccacatctaagtttattgctttggctgacactctgggtgatataggaggaggccagctttgagtggggcctggactggaaaggacactgcagcagacccaggctgtggtgcagtcagtcaccatccctcagacccctggtgctggaagtggcggtctggggaaagaagcaggatggagctcaaccaagcatcagtgggaaagtcagaatgcagggcctgggatcaggagtaaggccatggagtccacagcagagaaacatgctccatgttagaagcaacttttaa

SEQ ID NO: 87210 - DNA, 403 bp, Homo sapiens
tatagaaatagaaataaaagacattcagaatagaaaggaagaagtcaaaactgcttgtattctatgtggcatgattgtctacatagaaaaacaaaaagaatttaagaaaagctactagaacttataagtgaatcttaaaaggtcaatgtataaatattaatttctgtttgctagcagtgaacaactggaaattgaaataaaatatacatttataatagcatctccaaataggaagtatttcaggataaatttagcagaatctattctacatttatacattacaaactgcaaaacattgagaaaattgaaaaggacttacatggagagatagatacctagcttcatctatccgacttaatattgttaagatgcaaggtgctcccaaagcgatatgtaaaatacg

SEQ ID NO: 87211 - DNA, 2276 bp, Homo sapiens
aggctacgtatctaagaccactcatgactcaaaggcttgcaaagggctctttaaatttgctcttttaatgcataaataaatccatatcatgtattactttctggaaaagggttaaactcaaatatctgaaatactttcattataccaggtcaagaaaaatgccacagccagaaaaatttattttaaaatagaaacatacattaagctttaaaacaaccaactctcaaacaaaagaggaaagagcctttgatcccagagtccatgcggaatgaattccatacgtgtttgaaattcacataaggagcacttagaaaaccacctgaaatggaaatccaacagcccccttgcctgtgagggctcccacccctgcccgcgtgaggacatggccgaaccccggacactcgtgtgccgggagccaccacagctcaaggtgaccggcagcacccagctctgtgaccaagacagatgttcacacgtgggggcatcgtaagcgctaccagctccaaatctgacgtgatgggaacttgggagatgtctgagaaatgtccgaagggattttggcaacacagaaaacgcaatgtctaggaattcctccaaatgcttccaaaaatactcattgacaattcaagttgcacttggctggcggcagcccgggcggccttcagtccgtgtggggcgcccgcgtggccttctcctcgtaggactccccaaactcgttcactctgcgtttatccacaggataaagccaccgctggtacaggtagaccagaaacaccacgtcgtcccggaagcaggccagccggtgagacgtgggcatggtgatgatgaaggcaaagacgtcatcaatgaaggtgttgaaagccttgtaggtgaaggccttccagggcagatgtgccactgacttcaacttgtagttcacaaagagctggggcagcatgaagaggaaaccaaaggcatagaccccgttgacgaagctgttgattaaccaggagtaccagctcttatatttgatattcaggagtgaatagacagcacccccgacacagagagggtacagcaggtatgacaagtacttcatggcctgagtatcgtactcctcggttttcctctcagattcgctgtaagtgccaaactgaaattcgggcatcaggcctctccaaaaaatagtcatcttcaatgccttcttcactttccacagctcaatggcggctccaacacccgccgggaccagcaccagcaggctcgtctgctcgtccagcaggaacagaaagatgaccacggtgctgaagcagcgccagagcactgccttggtggacatgccgatcatgctcttcttcttcttccagaaactgatgtcatttttaaaggccaggaaatcaaagagaagatggaacgctgcgacaaagaaggtcagcgccaggaagtataagttggtatctacaaaaattcctttcacctcatcagcatctttctctgaaaacccgaactgctgcagggagtacacggcgtcctgcatgtggatccagaagcgcagccgccccagtgagaccttgtcgtaggacacggtgaggggcagctcggtggtggagcggtttatgaccatcaggtccttcacgcggttgctgagctggtcgatgaacaggatgggcaggtaatgcacggttttccccagctggatcatcttcatgtaccgatgcacatcggcaggcagggaggacccgtcaaagacaaagttgtccgccatcacgttcagcgccagccgcggtcgccagtgggacactggctcatccagggcactcgtcggcttcttgtccgcctcgatctgctgtgtatcagactccccggtgagcaggttgatttcttctggcttggggaccatgtaggtggtcagaggactgaccaggtgcacctgcttcccgtcgtgccacggcaggaccccagcgtgatggaggaagatgtaggcatacagcgtcccattgtttctcgttttctttggtacagaaacattaactgtcctttcaaatttggactccacatcaaagtcttccacattcaagaccaggtcgatgttgttctcagcacccaggtgggacctcgtcgtggtgaaggagtgcgctcagctgcagcttgggccgccgcgccaggtagggctggatgcagcttgcgtcgccggagcacgggcgggtgtagacgatgccgtacatgacccagcaggtgtgcaccacgtagaccacgaacacgccgcaccaccaagctggtgaaggagctgcggccgc

SEQ ID NO: 87212 - DNA, 6171 bp, Homo sapiens; identical to SEQ ID NO: 71919

SEQ ID NO: 87213 - DNA, 579 bp, Homo sapiens
ctgaatggtcgtcaagaaggagagaacaatgtcttctttacccgtgccacacagaaggcgtgtcctcgtccattggttcttgcatgacaatcagagggacacggatcctccctttcatcaatgacccagagctgcgggtggaattctacactgggatgaatgagaactcagacatcgccttccatttctgagtgcactttggccattgtttggtcattgacagccatgtgtgtggggcctggaagtgtgaggggagatgccacaatgtgttcttcaaggacggcaaacaatttgatctgagcatcttggtgctagacaatgaataccaggtaataataaatggccaacgccatacatctttgcccatccacttccaccatgttctatgaagattttgcaagtgtgggaagatgtctccctgacctcaatgtctgtctgcaatttatggagatgaccacacccctcattgttgaggaatccctctttccatgtgaccataggatccccagagcctgctaacagcatgatctctcctcacccttttccctacacttggtcattaaaacatcaccaaacttc

SEQ ID NO: 87214 - DNA, 380 bp, Homo sapiens
gtaccacaagttaattcccacaagaaagcatcagccaagcaggcagagtgactcagccagctgatgtcagatagcctctgtcatgggccccattagtgccactctcgaagactggtctagctattgctgctgcaaatgcccaacctgccagaaacagaaactgttactcagtctcaatacagcaccatcctttgaggagacaatccaatcatttggtggcaaattgattacattgggccttcttcagtctggaagagataacagtttaccttgactggggattaaaacctattccatgaactcaaatgaatcacagatatacatgtaaaatgtaaagttatataacttttagaaaaaacagaggagaccgccaggcacgg

SEQ ID NO: 87215 - DNA, 1735 bp, Homo sapiens; identical to SEQ ID NO: 60332

SEQ ID NO: 87216 - DNA, 390 bp, Homo sapiens
gatgattgattttagagttttattcttttctaatataagcattagcttctttgagtttccctctaagcactatgctagctgtgtgccataaattttgatacattgcattttagtttttatttggttcagactatcttctaatttctcattaaacttcctctttgaatgctggcttatttagaagttatttaatttctagtgtttggagtttttctgccatctttttgttacctatttctggttcaatttcattatgatcagagaacatactttgtatgatttcaattctctgcatatatttgatgtctagatatgagattttatctgtgggacttatcctggatagatttactaggttgtagattatgtcagtcttcagttttgctagaa

SEQ ID NO: 87217 - DNA, 505 bp, Homo sapiens
  misc_feature (1)...(505): n = a,t,c or g
ggctgataaaggtaactgccatctccaatgcagtgtaactacttggtgccagcatgcatcgtggtgctcatctttctggccttccagcagagggcatatgtggcccctgccaacctgcctgctctcctctgttgctactactgtatgggtgaggcccccagtccctcatggcctattcttactaccccttactgccttccacattaatgctgctgagatagaactctgcagtgactcccaaggagaggatatggaggtctgaggtgatgccgtgtgtgatccaattcagtggtgtgccaaggtggccttaaaagctcatcttatcctgactcatattagtaggagttcttaagggcagcccatgcctgttaatttccagttacttttggggagggccgaggcagggagggattgctttgtgggccagggagtttttgaggacccagcctgggggaaaccataggaggagaccccacctttttaaaaaagganaggaaaggaggag

SEQ ID NO: 87218 - DNA, 366 bp, Homo sapiens
aaaagatatggtactcattatggaaatgcaaagtatgatcacaatgaaatgcccacaatacctatgagaatagagaaaaattcctgatattaccaaatgttggtgaggatgtggatcaactggaatcctcatattttgctgtcatagccactttgaaaaacaatttgacaacctcgttgatttaagcagatttaaacgatacttaccatcatatattctatcatgtaagaacatacttttcataatgcaggagtctgactctcagatatttacccaagatttatgaaaggttatgttcacactgaaatctgtacatgaatgtttattgcagttttatttgtagttgtcaaaacctggaaacaattc

SEQ ID NO: 87219 - DNA, 338 bp, Homo sapiens
agactagccttggcaagagtgagacccgtttctattttaaaaaatgttcatagattgtgaagtaaaatgtacagctataaaatatttgaaagaaaacataggacaaaaatatttttgaccatgggtcaggcagagatttcttggacatgatgccaagaacatgattcataaatgaacaaactgataaattagacttcatcaaaattaagaaattctgctcttccaaacacactgttgagagaataaaaagacttcacagactgggagaaaatattccccatcacatatctgacaaaaaatagactgtataaggaactcaaagctgggcatggtggctc

SEQ ID NO: 87220 - DNA, 400 bp, Homo sapiens
ggtacttccaacagcccagggcaagctttatcaagacgatttgaaggttaatccagctaatgtctcccacttggtttcccctttcacctggcagggacccggtgggcaccttaaggcacctcagtggaccacttcttccctctttccctttcagatccgaaatgtgggcacagggctgtgtgcagacacaaagcacggggccttgggctccccactaaggctagagggctgcgtccgagggccgtggggaggctgcctggaacaacatgcaggtaagggccgcccctcagggactggcagccaggttctctgaaacatctgcagcctggggtgctgacacggccagctgggagggagaggcatgggtcagtgataaatgacaagagtcagccccggggat

SEQ ID NO: 87221 - DNA, 407 bp, Homo sapiens
  misc_feature (1)...(407): n = a,t,c or g
actggatttttcagtagaaatcaacaaattgattctaaaattataagaaaaagcaaaagaactagaatagccaaggcaatttttaaaataacaaagttagaggagtcattcgacttgatttcaagattcagattaaataatcaagacagtgtagactgggaaaggattctcaatagatcaatgaaacaaaacagaaataggtcaacccacatatatatggtcagttcatttctgaaaaagacagcccaataaagaaaggctagactttcaacaaatggtgctggaataactaagtatctgtattttaaaaaaagaatgtcaacccatatctcacacaaaaattaactcaacatgaatcctanatgtacaatgtaaaattccaaattcttttggaagaaactataagg

SEQ ID NO: 87222 - DNA, 1134 bp, Homo sapiens
cttttcccaaggggattaaattgggtaacccccgggtttttcccctccccccgtttttaaaccccggccccggaatttaattttggggcccccttaaaaaaatttttcctttccaacccccgggcgttaaaattggttcctttaaaagggcccccccttttttttttttttgcttataaaaaccattttaaattaaaaaagggaggaagcatcagtgcacacagatggggacacaggggcagagggcccagccccaagtacagtgtggtcaccccacagcccagtgggcaccagggcagactcccctcgcagcacagacagctgaggcccgggtgctggttcctctaggtacagctttggtccttgtgggctcagaggtctgcctttcggaaacttgctctgttcaaggagttcctgaggccgggtggggtgggtgccatcagctggggcaggcgctgggtaagcaggggctgcagagcctcccgcaggcggcagtagttgcgctccagctcacggtggtactccttctggtccggcccaatcagggccttatttttccgcagcgcatcctcacatttctttgcagaagtccttgaagcagagccgcaatttgttgtgatgccggaagagcttggggtcttccgggatctctgctaaaaacacctgggccacctccaggggaccctggttcacggtgggccctacagagccctgaagcaccatctgtagcatcttagcatctggtgggtcctgctcggtggcaaaggccagctcccgtgtcttcttctgcatgtcctcgatggccacctccactggcgtcagcaccgtctcctcccggtggcacacacggatgcgagtcttgatgtaggggaaggcgtggtcggtgctgagcagcgtcttacgcttgtgttgctcgggcagctccccgtgtgcgcgcccatccggcgtgaacggcgtgcagaacaggaatgtgcgaagcccatagttgcggtcaaagtaggtcacccggtccttgagctcgtaggtatcaaagtacggttccacatacgtgatctggatgtaggccttttgtgagtcaagcttggacttgtccacagggttagagtctttgataatctcaacgacgtcgtcgcc

SEQ ID NO: 87223 - DNA, 340 bp, Homo sapiens
  misc_feature (1)...(340): n = a,t,c or g
gtagatattaataacgaggagcactattgctggattgtgttgtaagagtatgtttagttttgttaagaaaccttgaaattgtcttccaaagtggctgcaccactctgaattcctaacagcaatgaatgagaatttctggtataccacaccttcaccaacatttgataatatcagtgttttggacttttgccattttagtaggtgtgtaatgtatcttgctttaatttgtggctaattatatgtgatgtggagcatctttttatttgccatccttacatctttgggaaagtgtttctttggatcttttgcctattttttaatcaaaatgttttattatttn

SEQ ID NO: 87224 - DNA, 336 bp, Homo sapiens
ctggaagcagaaaaccaatagagaaaaatgacacgaccaaaatctagtttaaaaaaaatcaatatagttgataaacctctagccaggcttactaagaaaaagagaagacacaattactaatatcagaagtgaaagagaagcatcactacagatcccatggacactaaaagaataataaaggaatattattaataactctatgtccacacatttgataacctacttaaagacacaatctgccaaaattaacacaaaaagaaatcaatacttttaataaacctatattgattaaaaaaattggattaataactaataaactttccaaaacaaaaataa

SEQ ID NO: 87225 - DNA, 12513 bp, Homo sapiens
ctgcttcacttcacggggcgaacatggcgcacagctgtcggtggcgcttccccgcccgacccgggaccaccgggggcggcggcggcggggggcgccggggcctagggggcggcccgcggcaacgcgtcccggccctgctgcttccccccgggcccccggtcggcggtggcggccccggggcgcccccctcccccccggctgtggcggccgcggcggcggcggcgggaagcagcggggctggggttccagggggagcggccgccgcctcagcagcctcctcgtcgtccgcctcgtcttcgtcttcgtcatcgtcctcagcctcttcagggccggccctgctccgggtgggcccgggcttcgacgcggcgctgcaggtctcggccgccatcggcaccaacctgcgccggttccgggccgtgtttggggagagcggcgggggaggcggcagcggagagctaacaacacagatcccatgtagttggagaaccaaaggccacatacatgacaaaaagactgaaccgttcaggttacttgcatggagttggtgcttaaatgatgagcaattcttaggttttggctcagatgaagaagtcagagtgcgaagtcccacaaggtctccttcagttaaaactagtcctcgaaaacctcgtgggagacctagaagtggctctgaccgaaattcagctatcctctcagatccatctgtgttttcccctctaaataaatcagagaccaaatctggagataagatcaagaagaaagattctaaaagtatagaaaagaagagaggaagacctcccaccttccctggagtaaaaatcaaaataacacatggaaaggacatttcagagttaccaaagggaaacaaagaagatagcctgaaaaaaattaaaaggacaccttctgctacgtttcagcaagccacaaagattaaaaaattaagagcaggtaaactctctcctctcaagtctaagtttaagacagggaagcttcaaataggaaggaagggggtacaaattgtacgacggagaggaaggcctccatcaacagaaaggataaagaccccttcgggtctcctcattaattctgaactggaaaagccccagaaagtccggaaagacaaggaaggaacacctccacttacaaaagaagataagacagttgtcagacaaagccctcgaaggattaagccagttaggattattccttcttcaaaaaggacagatgcaaccattgctaagcaactcttacagagggcaaaaaaagggggctcaaaagaaaattgaaaaagaagcagctcagctgcagggaagaaaggtgaagacacaggtcaaaaatattcgacagttcatcatgcctgttgtcagtgctatctcctcgcggatcattaagacccctcggcggtttatagaggatgaggattatgaccctccaattaaaattgcccgattagagtctacaccgaatagtagattcagtgccccgtcctgtggatcttctgaaaaatcaagtgcagcttctcagcactcctctcaaatgtcttcagactcctctcgatctagtagccccagtgttgatacctccacagactctcaggcttctgaggagattcaggtacttcctgaggagcggagcgatacccctgaagttcatcctccactgcccatttcccagtccccagaaaatgagagtaatgataggagaagcagaaggtattcagtgtcggagagaagttttggatctagaacgacgaaaaaattatcaactctacaaagtgccccccagcagcagacctcctcgtctccacctccacctctgctgactccaccgccaccactgcagccagcctccagtatctctgaccacacaccttggcttatgcctccaacaatccccttagcatcaccatttttgcctgcttccactgctcctatgcaagggaagcgaaaatctattttgcgagaaccgacatttaggtggacttctttaaagcattctaggtcagagccacaatacttttcctcagcaaagtatgccaaagaaggtcttattcgcaaaccaatatttgataatttccgaccccctccactaactcccgaggacgttggctttgcatctggtttttctgcatctggtaccgctgcttcagcccgattgttttcgccactccattctggaacaaggtttgatatgcacaaaaggagccctcttctgagagctccaagatttactccaagtgaggctcactctagaatatttgagtctgtaaccttgcctagtaatcgaacttctgctggaacatcttcttcaggagtatccaatagaaaaaggaaaagaaaagtgtttagtcctattcgatctgaaccaagatctccttctcactccatgaggacaagaagtggaaggcttagtagttctgagctctcacctctcacccccccgtcttctgtctcttcctcgttaagcatttctgttagtcctcttgccactagtgccttaaacccaacttttacttttccttctcattccctgactcagtctggggaatctgcagagaaaaatcagagaccaaggaagcagactagtgctccggcagagccattttcatcaagtagtcctactcctctcttcccttggtttaccccaggctctcagactgaaagagggagaaataaagacaaggcccccgaggagctgtccaaagatcgagatgctgacaagagcgtggagaaggacaagagtagagagagagaccgggagagagaaaaggagaataagcgggagtcaaggaaagagaaaaggaaaaagggatcagaaattcagagtagttctgctttgtatcctgtgggtagggtttccaaagagaaggttgttggtgaagatgttgccacttcatcttctgccaaaaaagcaacagggcggaagaagtcttcatcacatgattctgggactgatattacttctgtgactcttggggatacaacagctgtcaaaaccaaaatacttataaagaaagggagaggaaatctggaaaaaaccaacttggacctcggcccaactgccccatccctggagaaggagaaaaccctctgcctttccactccttcatctagcactgttaaacattccacttcctccataggctccatgttggctcaggcagacaagcttccaatgactgacaagagggttgccagcctcctaaaaaaggccaaagctcagctctgcaagattgagaagagtaagagtcttaaacaaaccgaccagcccaaagcacagggtcaagaaagtgactcatcagagacctctgtgcgaggaccccggattaaacatgtctgcagaagagcagctgttgcccttggccgaaaacgagctgtgtttcctgatgacatgcccaccctgagtgccttaccatgggaagaacgagaaaagattttgtcttccatggggaatgatgacaagtcatcaattgctggctcagaagatgctgaacctcttgctccacccatcaaaccaattaaacctgtcactagaaacaaggcaccccaggaacctccagtaaagaaaggacgtcgatcgaggcggtgtgggcagtgtcccggctgccaggtgcctgaggactgtggtgtttgtactaattgcttagataagcccaagtttggtggtcgcaatataaagaagcagtgctgcaagatgagaaaatgtcagaatctacaatggatgccttccaaagcctacctgcagaagcaagctaaagctgtgaaaaagaaagagaaaaagtctaagaccagtgaaaagaaagacagcaaagagagcagtgttgtgaagaacgtggtggactctagtcagaaacctaccccatcagcaagagaggatcctgccccaaagaaaagcagtagtgagcctcctccacgaaagcccgtcgaggaaaagagtgaagaagggaatgtctcggcccctgggcctgaatccaaacaggccaccactccagcttccaggaagtcaagcaagcaggtctcccagccagcactggtcatcccgcctcagccacctactacaggaccgccaagaaaagaagttcccaaaaccactcctagtgagcccaagaaaaagcagcctccaccaccagaatcaggtccagagcagagcaaacagaaaaaagtggctccccgcccaagtatccctgtaaaacaaaaaccaaaagaaaaggaaaaaccacctccggtcaataagcaggagaatgcaggcactttgaacatcctcagcactctctccaatggcaatagttctaagcaaaaaattccagcagatggagtccacaggatcagagtggactttaaggaggattgtgaagcagaaaatgtgtgggagatgggaggcttaggaatcttgacttctgttcctataacacccagggtggtttgctttctctgtgccagtagtgggcatgtagagtttgtgtattgccaagtctgttgtgagcccttccacaagttttgtttagaggagaacgagcgccctctggaggaccagctggaaaattggtgttgtcgtcgttgcaaattctgtcacgtttgtggaaggcaacatcaggctacaaagcagctgctggagtgtaataagtgccgaaacagctatcaccctgagtgcctgggaccaaactaccccaccaaacccacaaagaagaagaaagtctggatctgtaccaagtgtgttcgctgtaagagctgtggatccacaactccaggcaaagggtgggatgcacagtggtctcatgatttctcactgtgtcatgattgcgccaagctctttgctaaaggaaacttctgccctctctgtgacaaatgttatgatgatgatgactatgagagtaagatgatgcaatgtggaaagtgtgatcgctgggtccattccaaatgtgagaatctttcaggtacagaagatgagatgtatgagattctatctaatctgccagaaagtgtggcctacacttgtgtgaactgtactgagcggcaccctgcagagtggcgactggcccttgaaaaagagctgcagatttctctgaagcaagttctgacagctttgttgaattctcggactaccagccatttgctacgctaccggcaggctgccaagcctccagacttaaatcccgagacagaggagagtataccttcccgcagctcccccgaaggacctgatccaccagttcttactgaggtcagcaaacaggatgatcagcagcctttagatctagaaggagtcaagaggaagatggaccaagggaattacacatctgtgttggagttcagtgatgatattgtgaagatcattcaagcagccattaattcagatggaggacagccagaaattaaaaaagccaacagcatggtcaagtccttcttcattcggcaaatggaacgtgtttttccatggttcagtgtcaaaaagtccaggttttgggagccaaataaagtatcaagcaacagtgggatgttaccaaacgcagtgcttccaccttcacttgaccataattatgctcagtggcaggagcgagaggaaaacagccacactgagcagcctcctttaatgaagaaaatcattccagctcccaaacccaaaggtcctggagaaccagactcaccaactcctctgcatcctcctacaccaccaattttgagtactgataggagtcgagaagacagtccagagctgaacccacccccaggcatagaagacaatagacagtgtgcgttatgtttgacttatggtgatgacagtgctaatgatgctggtcgtttactatatattggccaaaatgagtggacacatgtaaattgtgctttgtggtcagcggaagtgtttgaagatgatgacggatcactaaagaatgtgcatatggctgtgatcaggggcaagcagctgagatgtgaattctgccaaaagccaggagccaccgtgggttgctgtctcacatcctgcaccagcaactatcacttcatgtgttcccgagccaagaactgtgtctttctggatgataaaaaagtatattgccaacgacatcgggatttgatcaaaggcgaagtggttcctgagaatggatttgaagttttcagaagagtgtttgtggactttgaaggaatcagcttgagaaggaagtttctcaatggcttggaaccagaaaatatccacatgatgattgggtctatgacaatcgactgcttaggaattctaaatgatctctccgactgtgaagataagctctttcctattggatatcagtgttccagggtatactggagcaccacagatgctcgcaagcgctgtgtatatacatgcaagatagtggagtgccgtcctccagtcgtagagccggatatcaacagcactgttgaacatgatgaaaacaggaccattgcccatagtccaacatcttttacagaaagttcatcaaaagagagtcaaaacacagctgaaattataagtcctccatcaccagaccgacctcctcattcacaaacctctggctcctgttattatcatgtcatctcaaaggtccccaggattcgaacacccagttattctccaacacagagatcccctggctgtcgaccgttgccttctgcaggaagtcctaccccaaccactcatgaaatagtcacagtaggtgatcctttactctcctctggacttcgaagcattggctccaggcgtcacagtacctcttccttatcaccccagcggtccaaactccggataatgtctccaatgagaactgggaatacttactctaggaataatgtttcctcagtctccaccaccgggaccgctactgatcttgaatcaagtgccaaagtagttgatcatgtcttagggccactgaattcaagtactagtttagggcaaaacacttccacctcttcaaatttgcaaaggacagtggttactgtaggcaataaaaacagtcacttggatggatcttcatcttcagaaatgaagcagtccagtgcttcagacttggtgtccaagagctcctctttaaagggagagaagaccaaagtgctgagttccaagagctcagagggatctgcacataatgtggcttaccctggaattcctaaactggccccacaggttcataacacaacatctagagaactgaatgttagtaaaatcggctcctttgctgaaccctcttcagtgtcgttttcttctaaagaggccctctccttcccacacctccatttgagagggcaaaggaatgatcgagaccaacacacagattctacccaatcagcaaactcctctccagatgaagatactgaagtcaaaaccttgaagctatctggaatgagcaacagatcatccattatcaacgaacatatgggatctagttccagagataggagacagaaagggaaaaaatcctgtaaagaaactttcaaagaaaagcattccagtaaatcttttttggaacctggtcaggtgacaactggtgaggaaggaaacttgaagccagagtttatggatgaggttttgactcctgagtatatgggccaacgaccatgtaacaatgtttcttctgataagattggtgataaaggcctttctatgccaggagtccccaaagctccacccatgcaagtagaaggatctgccaaggaattacaggcaccacggaaacgcacagtcaaagtgacactgacacctctaaaaatggaaaatgagagtcaatccaaaaatgccctgaaagaaagtagtcctgcttcccctttgcaaatagagtcaacatctcccacagaaccaatttcagcctctgaaaatccaggagatggtccagtggcccaaccaagccccaataatacctcatgccaggattctcaaagtaacaactatcagaatcttccagtacaggacagaaacctaatgcttccagatggccccaaacctcaggaggatggctcttttaaaaggaggtatccccgtcgcagtgcccgtgcacgttctaacatgttttttgggcttaccccactctatggagtaagatcctatggtgaagaagacattccattctacagcagctcaactgggaagaagcgaggcaagagatcagctgaaggacaggtggatggggccgatgacttaagcacttcagatgaagacgacttatactattacaacttcactagaacagtgatttcttcaggtggagaggaacgactggcatcccataatttatttcgggaggaggaacagtgtgatcttccaaaaatctcacagttggatggtgttgatgatgggacagagagtgatactagtgtcacagccacaacaaggaaaagcagccagattccaaaaagaaatggtaaagaaaatggaacagagaacttaaagattgatagacctgaagatgctggggagaaagaacatgtcactaagagttctgttggccacaaaaatgagccaaagatggataactgccattctgtaagcagagttaaaacacagggacaagattccttggaagctcagctcagctcattggagtcaagccgcagagtccacacaagtaccccctccgacaaaaatttactggacacctataatactgagctcctgaaatcagattcagacaataacaacagtgatgactgtgggaatatcctgccttcagacattatggactttgtactaaagaatactccatccatgcaggctttgggtgagagcccagagtcatcttcatcagaactcctgaatcttggtgaaggattgggtcttgacagtaatcgtgaaaaagacatgggtctttttgaagtattttctcagcagctgcctacaacagaacctgtggatagtagtgtctcttcctctatctcagcagaggaacagtttgagttgcctctagagctaccatctgatctgtctgtcttgaccacccggagtcccactgtccccagccagaatcccagtagactagctgttatctcagactcaggggagaagagagtaaccatcacagaaaaatctgtagcctcctctgaaagtgacccagcactgctgagcccaggagtagatccaactcctgaaggccacatgactcctgatcattttatccaaggacacatggatgcagaccacatctctagccctccttgtggttcagtagagcaaggtcatggcaacaatcaggatttaactaggaacagtagcacccctggccttcaggtacctgtttccccaactgttcccatccagaaccagaagtatgtgcccaattctactgatagtcctggcccgtctcagatttccaatgcagctgtccagaccactccaccccacctgaagccagccactgagaaactcatagttgttaaccagaacatgcagccactttatgttctccaaactcttccaaatggagtgacccaaaaaatccaattgacctcttctgttagttctacacccagtgtgatggagacaaatacttcagtattgggacccatgggaggtggtctcacccttaccacaggactaaatccaagcttgccaacttctcaatctttgttcccttctgctagcaaaggattgctacccatgtctcatcaccagcacttacattccttccctgcagctactcaaagtagtttcccaccaaacatcagcaatcctccttcaggcctgcttattggggttcagcctcctccggatccccaacttttggtttcagaatccagccagaggacagacctcagtaccacagtagccactccatcctctggactcaagaaaagacccatatctcgtctacagacccgaaagaataaaaaacttgctccctctagtaccccttcaaacattgccccttctgatgtggtttctaatatgacattgattaacttcacaccctcccagcttcctaatcatccaagtctgttagatttggggtcacttaatacttcatctcaccgaactgtccccaacatcataaaaagatctaaatctagcatcatgtattttgaaccggcacccctgttaccacagagtgtgggaggaactgctgccacagcggcaggcacatcaacaataagccaggatactagccacctcacatcagggtctgtgtctggcttggcatccagttcctctgtcttgaatgttgtatccatgcaaactaccacaacccctacaagtagtgcgtcagttccaggacacgtcaccttaaccaacccaaggttgcttggtaccccagatattggctcaataagcaatcttttaatcaaagctagccagcagagcctggggattcaggaccagcctgtggctttaccgccaagttcaggaatgtttccacaactggggacatcacagaccccctctactgctgcaataacagcggcatctagcatctgtgtgctcccctccactcagactacgggcataacagccgcttcaccttctggggaagcagacgaacactatcagcttcagcatgtgaaccagctccttgccagcaaaactgggattcattcttcccagcgtgatcttgattctgcttcagggccccaggtatccaactttacccagacggtagacgctcctaatagcatgggactggagcagaacaaggctttatcctcagctgtgcaagccagccccacctctcctgggggttctccatcctctccatcttctggacagcggtcagcaagcccttcagtgccgggtcccactaaacccaaaccaaaaaccaaacggtttcagctgcctctagacaaagggaatggcaagaagcacaatgtttcccatttgcggaccagttcttctgaagcacacattccagaccaagaaacgacatccctgacctcaggcacagggactccaggagcagaggctgagcagcaggatacagctagcgtggagcagtcctcccagaaggagtgtgggcaacctgcagggcaagtcgctgttcttccggaagttcaggtgacccaaaatccagcaaatgaacaagaaagtgcagaacctaaaacagtggaagaagaggaaagtaatttcagctccccactgatgctttggcttcagcaagaacaaaagcggaaggaaagcattactgagaaaaaacccaagaaaggacttgtttttgaaatttccagtgatgatggctttcagatctgtgcagaaagtattgaagatgcctggaagtcattgacagataaagtccaggaagctcgatcaaatgcccgcctaaagcagctctcatttgcaggtgttaacggtttgaggatgctggggattctccatgatgcagttgtgttcctcattgagcagctgtctggtgccaagcactgtcgaaattacaaattccgtttccacaagccagaggaggccaatgaaccccccttgaaccctcacggctcagccagggctgaagtccacctcaggaagtcagcatttgacatgtttaacttcctggcttctaaacatcgtcagcctcctgaatacaaccccaatgatgaagaagaggaggaggtacagctgaagtcagctcggagggcaactagcatggatctgccaatgcccatgcgcttccggcacttaaaaaagacttctaaggaggcagttggtgtctacaggtctcccatccatggccggggtcttttctgtaagagaaacattgatgcaggtgagatggtgattgagtatgccggcaacgtcatccgctccatccagactgacaagcgggaaaagtattacgacagcaagggcattggttgctatatgttccgaattgatgactcacaggtagtggatgccaccatgcatggaaatgctgcacgcttcatcaatcactcgtgtgagcctaactgctattctcgggtcatcaatattgatgggcagaagcacattgtcatctttgccatgcgtaagatctaccgaggagaggaactcacttacgactataagttccccattgaggatgccagcaacaagctgccctgcaactgtggcgccaagaaatgccggaagttcctaaactaaagctgctcttctcccccagtgttggagtgcaaggaggcggggccatccaaagcaacgctgaaggccttttccagcagctgggagctcccggattgcgtggcacagctgaggggcctctgtgatggctgagctctcttatgtcctatactcacatcagacatgtgatcatagtcccagagacagagttgaggtctcgaagaaaagatccatgatcggctttctcctggggcccctccaattgtttactgttagaaagtgggaatggggtccctagcagacttgcctggaaggagcctattatagagggttggttatgttgggagattgggcctgaatttctccacagaaataagttgccatcctcaggttggccctttcccaagcactgtaagtgagtgggtcagccaaagccccaaatggagggttggttagattcctgacagtttgccagccagccgccacctacagcgg

SEQ ID NO: 87226 - DNA, 331 bp, Homo sapiens
attttgtaacaaaataaactcgtgctaacttggtataacaagtcacaggctctagtttgaggtactaaaaagggtatcagtttgcaaagagccccatcagagcaatatgaactctgttaaattgaagcaagaacaaacattaaattgctggtgaagcttgggtggaagaatggtgaaatcattgatgctttatgaaaagtttatggggatgatgccctgaagaaatcagcagtttacaaatggataactcattttaagtagagacaagatgatgttgaagaagaagtccacagtggcagaccatccgcatcaatttgggaggaaaaaaatt

SEQ ID NO: 87227 - DNA, 330 bp, Homo sapiens
ggaagggggagaagaccatataaacaagccagaaaaaaacaaataataaaatggcagtattaagtccttacttatcaataacaacatttaatataaatgaactaaactcagaagacactgagtgactaaatggattaaaaaacataagacccaatgatctgttgcctacaagaaacacacttcatctgtaaagacacacatacactgaaaataaagggatggaaaacgatattctatgcaaatggaaagcaaaaagggcaggaatagctatacttatatcagacaaaataggtttcaagacaaaaactataaaaagacacaaagaatgtg

SEQ ID NO: 87228 - DNA, 6962 bp, Homo sapiens
tcccgtgtcgacgatttcgaggcgctccaaggcccgcccgggagggccggggccgcgctcagaattttgatttggctgctgggctgctaccttgaaatccaagccctaaaaatgccagcttctttggacttagaagatgacctggataaatgataaaaattaagaaagagattttgaagttttcttattgtcctcttggcatatgcttctggaataatattcaccatggttttggatgaccttccaaacttagaagacatctatacttccttgtgttcatcaacaatggaagactcagagatggattttgactctggactagaagatgatgacacaaaaagtgatagtattttggaggattccacaatttttgtggccttcaaaggaaatatagatgataaagacttcaaatggaaattagatgcaatattgaaaaacgtgcccaatttgttacacatggagtccagcaagctaaaagtacagaaggtggagccctggaacagcgtgcgtgtgacattcaacatcccccgggaagcagcggagcggctacggatccttgctcagagcaacaaccagcagcttcgggatttagggattctctccgttcagattgaaggggaaggtgctattaacctggctttggctcagaaccgaagccaagatgtgagaatgaatggacccatgggagctggaaattcagttaggatggaggcgggatttcctatggcaagtggtccaggaataataaggatgaacaaccctgccactgttatgatacccccgggtggaaatgtgtcatcttccatgatggcaccaggccccaatccagagctgcagcccaggactcctcgccctgcttctcagtcagatgcaatggatccactcctctctgggctccatatacagcagcaaagtcatccctcaggatctttagctcccccacatcacccaatgcagcctgtctctgtgaacagacaaatgaacccagctaattttccccagctgcagcagcagcagcaacaacaacaacagcagcagcagcagcagcagcagcaacaacagcaacagcagcaacaacagttgcaggcaagacccccacagcaacatcagcagcaacagccacagggaattcgaccccagtttactgccccaactcaggtgcctgttcctccaggctggaaccagctgccttctggagcccttcaacctcctccagcccagggttctctgggcacaatgactgcaaaccaagggtggaagaaggctcccttgcccggcccaatgcaacagcaactccaggcaagaccatccttagccacggtacagacgccttcccaccctccccctccatatccctttggcagccagcaagcctcacaagcccacacaaactttcctcagatgagcaacccaggccagttcacagctcctcagatgaagagtttgcagggagggccctctagggtcccaactcccttgcagcagccccacctcaccaacaagtctcctggctcctcaccctcctccttccaggagggatcccctgcatcctccccaacggttaaccaaactcagcagcagatgggaccaaggccacctcaaaataacccacttccccagggatttcagcagcctgtcagctctccgggtcggaatcctatggttcaacagggaaatgtgccacctaacttcatggtgatgcagcagcaaccaccaaaccaggggccacagagtttacatccaggcctaggaggaatgcctaaacgcctcccacctggcttctcagcaggacaggccaatccgaactttatgcaaggtcaggggccttcgaccacagcaaccacccctgggaattcaggagcccctcagctgcaagcaaatcaaaatgtccagcatgcaggtggtcaaggagctggtcctcctcaaaaccagatgcaggtgtcccacgggccgccaaatatgatgcagcccagcctcatgggaattcatggcaacatgaacaatcagcaggctggtacttctggggttcctcaagtgaacctcagcaacatgcaaggccagccccagcagggcccaccatctcagctgatgggcatgcaccagcaaatcgtgccctcccagggccagatggtccagcaacaaggaaccttgaaccctcagaaccctatgatcctttcaagggcccagcttatgccacagggccagatgatggtgaaccccccgagccaaaatcttgggccctcgccccaaaggatgaccccacccaagcagatgctttcccagcagggcccacaaatgatggcgccacataaccagatgatggggcctcaggggcaggttttgctccaacagaacccaatgatagagcagattatgaccaattaaatgcaggggaataagcagcagtttaacactcagaaccagtccaatgtcatgccgggaccagcccagataatgaggggaccaactccaaacatgcaaggaaatatggtgcagtttacgggacagatgtcaggacagatgctgccccagcaagggcctgtgaacaacagtccatctcaggttatgggcattcagggacaggtcctgcggccaccagggcccagcccacacatggcccagcagcatggtgatcctgctactacagcaaataacgatgtcagtttatctcagatgatgcctgatgttagcattcaacaaaccaacatggtcccccctcatgtgcaggccatgcagggaaacagtgcctcgggaaaccacttctcaggccatgggatgtctttcaatgcacctttcagtggagctcccaatggaaatcagatgtcctgtggtcaaaatccaggcttcccagtcaataaggatgtcacgctaacgagcccattgttggtcaacttattgcagagtgacatatctgcaggccattttggggtaaacaataagcaaaataataccaacgcaaataaaccgaagaagaagaaaccccctcggaagaagaaaaatagtcagcaagatctaaacaccccagatactcgcccagctggtctggaagaggctgatcagccaccgttgcctggagaacaaggaattagcttggataactcaggccctaaactgccagaattttcaaaccggccaccaggttatccttctcaaccagttgaacagaggccacttcagcagatgcctcctcaactcatgcagcatgtggcacccccaccacagccaccacagcagcagccacagccacaactgcctcagcagcagcagccaccacctcccagtcagccacagtctcagcagcagcagcagcagcagcaacaaatgatgatgatgctcatgatgcagcaggatcccaaatcagttaggcttccagtctctcaaaatgtccatcctccaaggggccccctgaaccccgactcccagagaatgcccatgcaacagagtggcagtgtgcctgtcatggtcagtctgcaaggacctgcctccgtgccaccatcacctgataaacaaagaatgccaatgcctgtgaatactcccttgggaagcaattcaaggaaaatggtctatcaggagagcccgcagaatccttccagctcgccactggcggagatggcctcactccctgaagcaagtggcagtgaagcaccatctgtcccaggaggcccaaacaacatgccttcacatgtagtacttccccagaatcagttaatgatgacagggccaaaacctggaccatcgcccctttcagcaactcaaggtgcaactccccagcaaccccctgtaaattccctgcccagctctcacggccaccacttcccaaatgtggctgcgccaacccagacatctaggcccaaaacaccaaacagagccagccccagaccctattatcctcagacacccaacaaccgccctcccagcacagaaccttcagaaatcagtctgtcaccagaaagactcaatgcctccatagcaggactcttccctccacagattaatattcctttacctcctaggccaaatttaaacaggggctttgatcaacaaggcctaaatccgacaactttgaaggccatcgggcaagcaccttcaaatcttaccatgaatccttccaattttgctaccccacaaactcacaaattagattctgtggtagtgaattctggaaagcagtctaattctggagcaacaaaacgggcaagtccaagcaacagtcgcaggtctagtcctgggtccagtaggaaaaccactccaagccctgggaggcaaaattcaaaagcccctaaacttactctggcctctcagacaaatgcagccctattgcagaatgtggagttgccgagaaatgtattggtcagtcccactcctctgggccaatccccctgtacctgggagctttcctaacaacagtgggctgaatcctcagaattctactgtgtctgtggctgcagttgggggtgttgttgaggataacaaggagagcttgaatgtgcctcaggacagtgattgccagaattcccagagtaggaaggaacaggtaaacattgaactaaaagcagtccctgcccaagaagttaaaatggttgtccctgaagatcagtccaaaaaggatgggcagccttcggatcctaacaaacttcccagtgtcgaagagaacaaaaatttggtgtctcctgctatgagggaagcaccaacatcgttaagtcaacttcttgacaactctggagctcccaatgtgacaattaaaccccctgggcttacagatctggaagtaacacctccagtagtttctggggaggacctcaaaaaagcatctgtcattcccacactgcaggatctgtcttcttctaaagaaccttctaattccctaaacttacctcacagtaatgagctgtgttcatcccttgtgcatcccgaattgagtgaggtcagttctaacgttgcaccaagcatccctccagtaatgtcaagacctgttagctcttcctccatttccactcccttgcccccaaatcaaataactgtatttgtcacttccaatcccatcacaacttcagctaacacatcagcagctttgccaactcacttgcagtctgcattgatgtcaacagttgtcacaatgcccaatgcgggtagcaaggttatggtttctgagggacagtcagctgctcagtctaatgcccggcctcagttcattacacctgtctttatcaattcatcctcaataattcaggttatgaaaggatcacagccaagcacaattcctgcagccccactgacaaccaactctggcctgatgcctccctctgttgcagttgttggccctttacacatacctcagaacataaaattttcttctgctcctgtaccgcctaatgccctctccagtagtcctgctccaaacatccagacaggtcgacctttggtccttagctcacgagccacccctgttcagcttccttcccctccttgtacgtcttctccagttgtcccttctcatccccctgtgcagcaagtgaaagaattgaatccagatgaggctagccctcaggtgaacacctcagcagatcagaacactcttccctcttcacagtcaaccacaatggtttctccccttttgaccaatagtccagggtcctctggcaaccggcgaagcccagtctcgtctagtaagggcaaaggaaaagtggacaaaattggccaaattttgttgaccaaggcatgtaagaaagttacaggctctcttgagaaaggggaagaacaatatggtgcagatggagagactgaaggccaagggctagacaccacagctccggggctcatgggaacagagcagttatccacagagctggacagtaaaaccccaacgcccccagcacccactctgctaaaaatgacctctagccctgtgggcccgggcactgcctcagcaggacccagcttacctgggcggtgctctccccaccagtgtacgctcgatagtaaccactctggtaccctccgagctcatctccgccgtaccgaccacaaaaagcaatcatggtgggcatagcatctgagtcacttgcgggtggcctagtggaggagaaggtgggatcccatccagaacttctacccagcatagccccgtcgcagaatttagtctcaaaggaaacttcaaccacagcactgcaggcctctgttgccagaccagagctggaggtaaatgctgccataatctctggacaaagcagtgagcccaaagagatagttgaaaagtccaaaatcccaggccgaagaaactcccgaactgaagagccaactgtggcctctgaaagtgtggaaaatggacatcgtaaacgatcttctcgacctgcttcagcctccagctctactaaagacataaccagtgcggtgcaatccaagcgaagaaaatccaagtaaacaagcaggactgcgacttgatacttggaaatgtgtgtgacttttacaaagagcaattttgagctgtgacttttttaaatcaatttctgtacagttagtaattttaataatgtggcccttttcctagtccctgcaacctgtttcataaagtgcaatggggaaagcaggactgttgagcccttttggtgttgcgagttgaagttcaaggtttctaaaatgttgtcttgtattgaaaggagctaatgccattataaatgttactagttttcacatttcctaagcagcctagagtacagggtgagcatttttagatctcctaatggatgtattgtgcccgtgggaagtactgtgtgtgaatagcagtagtgggggcaatatatcaatcttctcatttggaaatgttgtaaaataattgtattatagaagtgttttgtaaggtatttgttgtgagaaattgggcaattgaataaaaggggatcctaagggattttgtaccaatgtggaaataacggtgttaaataaatgtcattgtcatagaacat

SEQ ID NO: 87229 - DNA, 1362 bp, Homo sapiens
agaagggaacagagaaggaggaacagaccttcgcctggcccaaaggatgagtcttggggggtcagacacaatgttgaagggagcagacacttcagaatctggagcagtcatacgtggaaactatagactgggacttagcaaaaagtcaagcctgttcagccaccagaagcatcatgtgtgccctgaatgcgggagaggcttttgccagagatcagaccttatcaagcaccagaggacacacaccggggagaagccatacctgtgtcctgagtgtgggcgtcggtttagccagaaggcctccctctccatacaccagaggaagcactcgggggagaagccgtatgtgtgcagggaatgtgggcgacactttcaggtattacatcctcttcttcactaattcacaaggagggtttcactccgggggaggagggcccttttgttattgttcagggagtttggggcgaggctttcgccagaagatagccctccttctacaccagaggacgcacttggaggagaagcccttcgtgtgtctgagtgtgggagaggctttgcagaaggcatcactcctccagcaccagagctcacacacaggggagaggcccttcctctcccttgagtgtgggcgtacgttcaggcagcagtcactcctccttagtcaccaggtcacacactcaggagagaagccttatgtctgtgctgagtgtgggcacagctttcgccaaaaggtcactctcatcaggcaccagaggacacacacaggggagaagccttacctgtgcccccagtgtgggcggggttttagccagaaggtcaccctcattggacaccagaggacacacacaggggagaagccctacctgtgccctgattgtgggcgtggctttggtcagaatggcaccctcatcagacaccagaggacacacacaggggagaagccttatctgtgccccaagtgtgggcgtgcatttggctttaagtcgctcctcacccgacaccagaggacacactcagaggaggagctttacgtagacagggtgtgtggacaaggacttggccagaagtcacaccttatctctgaccaaaggacacactcaggagagaagccctgcatttgcgatgaatgtgggcgcggctttggctttaagtctgccctcatccgacatcagcggacccattctggggagaagccgtatgtctgcagggagtgtgggcgtggctttagccagaagtctcacttgcatagacacaggatggaccaagtctggtcatcagctcctaccccaagaggtcttctgacctttcctttccccgtgagtgtgaagctggcagaaatcactagtaaatgcttcagtttcctga

SEQ ID NO: 87230 - DNA, 357 bp, Homo sapiens
cagaacattacatttgacaaccatagaggatgcattctttttaagcacacgtaggacatttaccaaaactcaccatatactaggacatcaaatatcaacacatttcacaagattgaatcaatatagagtatattctctgactgcggtgcaactaagctagaaatcaataacaaaagataaccaaaaatcacaatatgtttggtaattaagaaaaatacttctaaataagtcatggatcaaaacagacatcataatggaaattagaaaatgctttgaactgaatgatcatgaaaacactacatatcaaaatttgtgggaattgttagagggcaattttatagcctgaacttgatatag

SEQ ID NO: 87231 - DNA, 358 bp, Homo sapiens
ctggagtttttattttcttttccctaatgactataatcatgttgatctatatatctagcctatgtcagtaccacactgtcttaaaatcaagaaatagctttgcaatcaagaagcattaagtcctccaactttcttcttttgcaaaattgctttggctattctgggccctctgcatctccatatgtagtttaggatcagtttgttaatttctacaaaaattgacagggattgctctgaatctacagatcaatttgggaagaactaacacattaacaatattggaccttctaacccataaacactgaatatttttacattatttaaatcttctttgatttctctcagcaatggctggcag

SEQ ID NO: 87232 - DNA, 416 bp, Homo sapiens
gatgcctccaacattgtcatacttgctcaaaattgctttgaatatttgagggcttttgtgattctatgtaaattttaagattaaaataaattatgtaaaaaatgtctttaggattttgataggggttgtgctgaatctatagatggctttggataatatggacattttaacaatattaatttaatccatgaacacaggatgtttttccatctatttgtatctgccttaatttctttcattagcggtttataatttttagtgtacaagtctttcacctccttggttaagttaattcctaagtattctgtttgttgctgttggaaatgtgattgctttcttaaacttttttttggatagtttgttgttggtgtataacaggggcccccaaccctcaggctgcggaccagtgtggtgag

SEQ ID NO: 87233 - DNA, 389 bp, Homo sapiens
gtggaattttaaattacaaacacgttatcatttacatttggtgtaaatataacaaaatatatatatataagagcttaatgaagaaaactagaaatttatgatgaaagtgataaaaaaaattagataaatggagaggtatgccatgttcatcaaaatttgaatattgccaagatgtcagttcttctcaacttgatctatagattcaatgtaactgcaatcaaaatcctagtattttattttgtggatagcaataaacctatttgataacaaacgaaagagagagaccaggaataaacccacataaatacaatcaactaatatttgacaaaagagctaaggcaatgcagtgaagaataggtattctttttaacaaatggcattggaacaac

SEQ ID NO: 87234 - DNA, 401 bp, Homo sapiens
  misc_feature (1)...(401): n = a,t,c or g
ggtggaggcccagctgggggccggtgctggagttacctctgctccatgccattgcagatggacagatggttccattataaacttcatctcctgggcaccaggcaaacctcggcctgtcggcaaggacaagaagtgcgtgtacatgacagccagccgaggtgagggcaaggtgggggcagagtgcgcagtcagctgtgcagagggttgatgctgggcgagcctgggcagaagtcatcagtctgttctcattctctttgttcccacaacccaataaaggctagactcagcgaggggtggacctgtctccatggtccagaagacttgaattcggagctggacacaggccctgagcctctgcccagactcctctcaaggcatgaggctgagtgtgctgccagccn

SEQ ID NO: 87235 - DNA, 393 bp, Homo sapiens
ccaaatatctgttttcttgcatatttggatgcaagtgttccagtaccattcattgaagacaattatttcttcattggattgcctttgtacttctaccaaatctcagttgtccataaatatgtgggtctacttctgggcttcctattccactgcactgattaatttgtctatctctgtgccagcattgcatgggcttgataactgtagatttataataaagtttgaaattattttatgctagctctccaactttgtcctcctttttcaaagttgctttggttattctgggtcctttgaattctcatatgaattttagattaaacttctcagagtttaaaaaatgttgagtcttctgatttataaacaccgtatatcccttcattatgtctttat

SEQ ID NO: 87236 - DNA, 397 bp, Homo sapiens
aaaattgccattataattttgatagagattaaatagaatctgtagttcactttgggtagtatggatattttgacaacatgagttcttccaatccatgaacacaggatatctttcatatgaattcttctaatccatgaacataggatatctttccatttatctgtgttgcttcaatttctttcatttatgttttatagttttcagtgcatatatttttgtcatgttttgattttaatagatttattctgctgccatattttcttagctgtttaaataaaatacttcttgagcccttattttttttgttctgagccttagtgaatactgtaactatagtatttccatttacctcaagtaactaaaattggaaattactcaatattatgtggggaaaact

SEQ ID NO: 87237 - DNA, 868 bp, Homo sapiens
gttggccatgttaaatttcccacaccacaagtaactcttttccagaagccagtggcattcctgtctctgttggaagtcctggtctgaatgtggaccctctctccccgacctctatactctggctgtcttcttcctgtctggggagatctggcagccaccaccttgttgcctgggtctgtgagagcaaagctgagttctggtccggcttgtagcagaagaaggaatttgacaacatctataaggcccaggtgggctgtggcagggccggtgggttgagctgcgcctgtaggctgtgggcagctaatcctttcctgcctgtgctctctcccctgttttttggtgagaaccacgagaaggaaagctccgagatcctcaagtgcctggcccagcaggccatggcccagcagcacactgtgaatgggagatactggtcggctgcagtgccagcatcctgcccctccagctatatccctgggtggagctgggcccccacccggcctgggtaggatgagcctcactcacagctcatccccccacggcccctcagttcacagcccccagtatggccagcgtcttggagcagctccaggtcatcggtgatgtcctcttcattcttctcagctgaggcccctccatggctccctacttagaagttggcctttagttttttaagatatgtaataggctgacatggctcaaaattgaaaagtgtagccagtgatgagaacttccttgtgaatccttccagaaatactccatgtgatctttatccccctctttttttttctttggaattgtggcatgccacggtatgaaggttattattgtttacttcatttaacaacgtatcttggtgatcttccaaaaa

SEQ ID NO: 87238 - DNA, 396 bp, Homo sapiens
  misc_feature (1)...(396): n = a,t,c or g
caggggcgggagcgacgccgcanaagacaactacctgtagccaccgcccctgcggacggcgtggctcaacagcccacctctgagtctcagctttgcttcggggaccctatccccagggcccccccatcacacctggcggggccggggggtcttcactccagggtctcgctccctgcccttggggcccggggccatgcagtacctggagtgtcctgcagggggaaagcgaagccgggccctgaagtccggggcagtcacccggggctcccgggccgctctgccgggctggggctgagcagcgatcctgctttgtcccagaagtccagagggatcagccccagaacacaccctcctccccgggacgccgcagctttctggaggctgaggaaggcatgn

SEQ ID NO: 87239 - DNA, 2990 bp, Homo sapiens
tgaaaaaaaggaggaactggcacagacatgactacacagaaattgatgatggttccaaaccagtgcaagctggaactagaactttcattaaggaattacgctctcgagtcttcccaagtgccgatgaaataattataaagatgcatggcagccagctgacacaaagatatctggagaaacatggatttgatgtccctattatggtcccaaaattagatgatctaggactcaggctcccttcacctacattttctgtgatggatgtggaacgttatgtaggtggtgacaaagtgatagatgtcattgatgtggcgaggcaggcagacagcaaaatgacacttcacaattatgttaaatacttcatgaatcctaacagaccaaaagtgttaaatgtgatcagccttgaattttcagatacaaagatgtctgaattggtggaggtccctgatatagccaaaaaactttcctgggtggaaaattattggccagatgattcagtctttcccaagccatttgttcagaaatattgcttaatgggagttcaagacagctatacagatttccacattgacttcggtggaacttcagtctggtaccatgtcctctggggtgagaagattttttatttaataaagccaacagatgaaaatttggcacgttatgaatcttggagttcatctgtgacccagagtgaggtgttctttggagataaggtggataaatgctacaaatgtgtggtaaagcagggacataccttatttgttcctacagggtggatccatgctgtgctcacttctcaggactgtatggcttttggggggaacttcctgcacaaccttaacattggcatgcagctcagaataagcagcacagagaaaaccttaaatgacctgatggagctgaaaaccatggcaaaagaactatgtgacgcatgcacaagcctcaggagccgatgcgatcaactggaagaaagggtatcagcaatggaagatgaaacgaaaaatgaatgaaatgaagtgagaagggaaggttagagaaaaaagaataaacagaaatgagcaaagcctccaagaaatatgggactatgtgaaaagaccaaatctatgtctgattggtgtacctgaaagtgacggggagaatggaaccaagttggaaaacactctgcaggatattatccaggagaacttccccaatctaacaaggcaggccaacattcagattcaggaaatacagagaacgccacaaagatactcctcgagaagagcaactccaagacacataattgtcagattcaccaaagttgaaatgaaggaaaaaatgttaagggcagccagagagaaaggtcgggttaccctcaaaggaaagcccatcagactaacagcggatctctcggcagaaaccctacaagccagaagagagtgggggccaatattcaacattcttaaagaaaagaattttcaacccagaatttcatatccagccaaactaagcttcataagtgaaggagaaataaaatactttacagacaagcaaatgctgagagattttgtcaccaccaggcctgcctgccctaaaagagcaccaggcctgccctaaaagagctcctgaaggaagcactaaacatggaaaggaacaaccgactaaaccaggaagaagttgaatctctgaatagaccaataacaggctctgaaattgaggcaataattaatagcttaccaaccaaaaaaagtccaggaccagatggattcacagccgaattctaccagaggtacaaggaggagctggttccgttccttctgaaactattccaatcaatagaaaaagaaggaatcctccctaactcatttcacgaggccagcatcatcctgataccaaagcttggcagagacacaaccaaaaaagagaattttagaccaatatccctgatgaacatcaaagcaaaacttctcaataaaatactggcaaaccgaatccagcagcacatcaagaagcttatccaccatgatcaagtgggcttcatgcctgggatgcaaggctggttcaacatacacaaatcaataaacataatcagttacataaacagaaccaacgacaaaaaccacatgattatctcaatagatgcagaaaaggcctgtgacaaaattcaacaacgcttcatgctaaaaactctcaataaattaggtattgataggatgtatctcaaaataataagagctatctatgacaaacccacagccaatatcatactgaatgggcaaaaactggaagcattccctttgaaaatgggcacaagacagggatgccctctctcaccactcctattcaacatagtgttggaagttctggccagggcaatcaggcaggagaaagaaataaagcatattcaattaggaaaaaaggaagtcatattgtccctgtttgcagatgacatgattgtatatctagaaaactccattgtctcagcccaaaatctccttaagctgataagcaacttcagcaaagtctcaggatacaaaatcaatgtacaaaaatcacacgcattcctatacaccaacaacagacaaatggagagccaaatcatgagcaaactcccattcacaatcgctacaaagagaataaaatacctaggaatacaactaacaagggatgtgaaggacctcttcaaggagaactacaaaccaatgctcaaggaaataagagaggatacaaagaaatggaaacacattccatgctcatgggtaggaagaatcaatatcgtgaaaatggccatactgcccaaggtaatttatagattcaatgccatccccatcaagctaccaatgactttcttcacagaattggaaaaaactactttaaagttcatatggaaccaaaaaagagcccacaccgccaagtcaatcctaagccaaaagaacaaagctggaggcatcacactacctgacttccaactatactgcaaggctacagtaaccaaaacagcatggtactag

SEQ ID NO: 87240 - DNA, 475 bp, Homo sapiens
  misc_feature (1)...(475): n = a,t,c or g
cggcacgagcaccatggctgatttcaagctactaatgtgacatcgctgaacacagggtacggaagagatatacaagatcagttcttgtgaatgggtgcaagccagtttcagcacaccacttattacactacatgattttaagatttatcataaagccacagtaatcaaaatggtatggtactggcataggcaataaaaattcagtaagaatgtatagagagttcagaaatagagccacacatatatgaccaattcatttttgacaaaggtgaaaagataattcaggagaaaggaaacagttttttcaacaatagtgctggaagaattggatatttacataaaaaagaactatccatacattatacaactgttaacttagatcatggttctaaatataaaatataaaacttcagaatttttaggataaaaactttgtaaccttgagttatacaaaatacttactatgtatgacccn

SEQ ID NO: 87241 - DNA, 4305 bp, Homo sapiens; identical to SEQ ID NO: 64877

SEQ ID NO: 87242 - DNA, 364 bp, Homo sapiens
ccgggacagagcggatcagctgggcacggcgtccagggcagctagggcctgggccgcggttcggccgcgccggccggaatggctgaggaaagagacttactggtatctacagactgggtcatcctatctacttgttttttacaattctcctctactgaggacatcctttggtgatcatagcgaacttcccatgaggttacagctaccggctgagaagaggagccattgtagctaagcagaaaccatggacatttgtgccacttcttcatggaccttacttgtgccttcaggacctgcctgggtttgattatgtatataccacttacattgatgatgaagtgctgctgtgcatgcctaactattg

SEQ ID NO: 87243 - DNA, 469 bp, Homo sapiens
  misc_feature (1)...(469): n = a,t,c or g
gcggcctgtgggccacgggttgggcaagcctgctgtgataaccattgctgtagtgcttgtcatctttgtaggaaggcgtgtagtgaggcttacaaattttgaacttgggaatgtctgtctgcctccgtcacatgggagctgagagccatattgaaatggtgctcacgtggtggatagaatagggtcttcaggctacgtgggagtcatagaggctacctgagagagaacaggcttttcttggttcagaaattctaggtttgagaaggaaagccctacatacaagccatctccacacctgcacaataaggtgagcaagttttcagcagacaatctccacattggtgttctttattggtctaaatgtacaccctgggtcagaaatgggttttccatgggcccccagatgttccaggaaagaactacatgaactcntgttgatgaagtccttttaaatggttaagacattttg

SEQ ID NO: 87244 - DNA, 1806 bp, Homo sapiens
ttttttttttttaaacccacaaatgggttgatttatttctgactctcagcccgtctctcacgaagacagagcctattgaccaaaaacttcaggatctgcatctgagcagatcccaggaaggggaagtcaaagggcccaggtcagaggcccaagttcagacttcagcagcagactagggtcagactttaccaaagtcagaactcgaggttcatgtaagtccttagatcccgctcccaagccctgtctttctcctccctccttctctcctccctccagctcagtgtgggccacccgagggaggtctctccctcccagccacagctcggggtatcccaaagctgggaaaatgtgtcactcggggctggggtgctgatctgtagcctagtccttcctggtccctcttgaggacagtggggatgggattggcacggccctcaccccggggtcccagccccattcctggctcccagccccccctcagcagcagtttgaagcccgggctggagatgggcaccccaagtggaaggttgggaggctgaggaccctgcgacagtgacagcaggtgagcagtggatgtgcggtggttggaatcttggaagtgggtgtcacagttctcgcagtactggagggagggagtaggagaccggttttccgggctccttgtctctccatggctctccctgaccatgcgggctacctcagggaagccagcttcttcagcgagctgagccgcatccctgccactcagctcacagacccccacccaggcagccccacggcccaggagatagctcacagctgccccctggcccgctcgagcagcacacatcagtggggtccaccagaaggcatcccgggcgttgatattccccccagctcctcctgcctcatgcggttccagcagtctcctaagttctggcaggtccccctcctgggctgccctcagtatccggtgagtcatcttatcctcagcctcaagggatctcccttgtccatgtcttcctgatgctccttctgccactgcttctgctgctggtgccttcattattcttcttttctttctctttctttctctggcaggttcagtctgagatctctgggagtcaggagcgctgctctcatccccaatcagggcctcatagaaagctcgggctgcagccccatccagggtggactctggcttctcgggctgtggctgctgctgcccatccttccagaggtcgctggggtcagtggctggggtgaaggtgatgagcaagggccgggacatggcttttgggagaactgagaaaatgataccaggcaagggaaggatgagacaagtaagccaagctcgtggtgaccctgtagcaaccacagcctcagagaccagtaggaaaaaaaaatcagcctggccctttaagtcttccgcgatcccatttcggagtttcctcttcccaaacaaaaatagatgggtcactccctagaagatctcggggagagtctcctatacgtgttgctgtgtagcttccgtaccgcaaaatggcgccattctctcccctcatgaggcaggagcccggaggaaacagtatgcccgtcaagggtctctggcgggactgattcgcactaggggcccaacaggcaataaggacccagcggattggccgaggataggccagtcccctgggcagcagcgccgcgccgggactagaggggaacgtgaggagagctgcggaaagagatccagcctggctccctcctttccccgccctaagtcagcctcttcacccagtgagcacaaaactgtattgcccagactcccgggcc

SEQ ID NO: 87245 - DNA, 346 bp, Homo sapiens
ggtgttgtatctaaaacctcattgctaaagcctaaggtcatgcaagttttctgttttcttctagaagttttataattttctgttttatatttagattcgtgatccattttgaattaattttcatgtgaagtgtgaggtttgtgtcataattttattttgcacatggattccagttgtttcagcaccattttttttggcaaagattgtccttctccattgaattacctttatgcttatgtaaaaaaaaatcagttgactaaatgaaataaactgattaaaaaataggcaaaagacctgaacaaagacacctcaccaaagaaaatataccgataatatataagcatgt

SEQ ID NO: 87246 - DNA, 352 bp, Homo sapiens
cccataccaatcaattcagcctgatccaactttttgtttcttccacctttatcatacacccttgatatccatatcaatgtatagtctttagatttgcctgcataaattaaatgaatcgtgccggtcttttggtgtacacacatcctcatgggtcattctttgtacttcaccttttgggacctgctttgacttaagtccagctatatgtctaaaagcaaagaagggtggtgagcataggctcttaagggaattggcagtgcctgtcaaggcaagtacctcaggggaagccactgaaagtgcttcaggcaaagtaagggtaaccctctcagataaggtagaagggctggctctg

SEQ ID NO: 87247 - DNA, 1497 bp, Homo sapiens
ccatcaaagtgttactgtggtcctctttcaagacgagaataccttagtctcagcaggagctgtggatgggataatcaaagtatgggatttacgtaagaattatactgcttatcgacaagaacccatagcatccaagtctttcctgtacccaggtagcagcactcgaaaacttggatattcaagtctgattttggattccactggctctactttatttgctaattgcacagacgataacatctacatgtttaatatgactgggttgaagacttctccagtggctattttcaatggacaccagaactctaccttttatgtaaaatccagccttagtccagatgaccagtttttagtcagtggctcaagtgatgaagctgcctacatatggaaggtctccacaccctggcaacctcctactgtgctcctgggtcattctcaagaggtcacgtctgtgtgctggtgtccatctgacttcacaaagattgctacctgttctgatgacaatacactaaaaatctggcgcttgaatagaggcttagaggagaaaccaggaggtgataaactttccacggtgggttgggcctctcagaagaaaaaagagtcaagacctggcctagtaacagtaacgagtagccagagtactcctgccaaagcccccagggtaaagtgcaatccatccaattcttccccgtcatccgcagcttgtgccccaagctgtgctggagacctcccttttccttcaaatactcctacgttctctattaaaacctctcctgccaaggcccggtctcccatcaacagaagaggctctgtctcctccgtctctcccaagccaccttcatctttcaagatgtcgattagaaactgggtgacccgaacaccttcctcatcaccacccatcactccacctgcttcggagaccaagatcatgtctccgagaaaagcccttattcctgtgagccagaagtcatcccaagcagaggcttgctctgagtctagaaatagagtaaagaggaggctagactcaagctgtctggagagtgtgaaacaaaagtgtgtgaagagttgtaactgtgtgactgagcttgatggccaagttgaaaatcttcatttggatctgtgctgccttgctggtaaccaggaagaccttagtaaggactctctaggtcctaccaaatcaagcaaaattgaaggagctggtaccagtatctcagagcctccgtctcctatcagtccgtatgcttcagaaagctgtggaacgctaccgtcttcctttgagaccttgtggagaagggtctgaaatggtaggcaaagagaatagttccccagagaataaaaactggttgttggccatggcagccaaacggaaggctgagaatccatctccacgaagtccgtcatcccagacacccaattccaggagacagagcggaaagacattgccaagcccgctgcagtctgcaaaggtcttcacaaatcagaatcaactggtaatta

SEQ ID NO: 87248 - DNA, 384 bp, Homo sapiens
  misc_feature (1)...(384): n = a,t,c or g
cgtttcgagcggttttagaatgatcttctagaaaacttcaagttctgggaatagtttaaagagtaattagagaacataaatggaacagtaactgagaaagaaacaggaggagtgtacaaagaattatcctccccaaaatactctggtactaggcagttttatgggcaaactatttcaaactttccaggaaaaataatttctatggtatataaactatttcagaataccgaaaagaaggaaggcatcctatttcactatatgaatttagaataactctaataaccatacccaacaaagataacatttacttacaaatctggatgccagtctcacttatgaatatagttaccctaaaatgccctacctaanacaatagcaaaatag

SEQ ID NO: 87249 - DNA, 1727 bp, Homo sapiens
gtccactggtctctcattactgtgacactctctaatcgaattatttcattttatgattcccaaggcattcattttaagttttgtgtagagaatataagaaagtatttgctgactgaagccagagaaaaaaatagacctgaatcttcagggttggcagactgctgttacgaagtgtattccacaacagaaaaacgacagtgactgtggagtctttgtgctccagtactgcaagtgcctcgcccttagagcagcctttccagttttcacaagaagacatgccccgagtgcggaagaggatttacaaggagctatgtgagtgccggctcatggactgaaactcagcagggactctgggaagtctgaccaagttggagcagatggtttgttacttgaatctccaaacacttagttgaatttttacagatatttcagatcagtgggtgttggggccactattgttacctccaaattttattttttgcccttaattccatttctcccagctaccatgtactattgtttaatgttcagtttggtttcatttttaattttatggttctgtgcgtcccccatatttaatatttattattcaaacgcatgcatatagacagagcatgcagtgaagagtattaaaaaaaaaagcttagtagatttggtgcagcttttgaaacttaggttagacgtgaaactgaaatacaggtttcaaatttacttccccagaacctaaaaatgcaagatgtttttgataccaaccataacctcctgagaatagtaagtgttcccccggggcattaagggtaagcctgggggtggtttttgaccaaatcccagtccctgttttacctttacccagcggcaactttcacccaacttcccctctcccaagtgagtcttagagagtgcagtcccattcctttttgaagggtgagatggaagtggtcgtaaactgactggtgtcttctgtttctgggaggcacacttgtaaggcacagtggctgctttgggaggagtaaggtgtgagaaaaagcaaccttggaggccagtaacaatgacagatttcaatcgtggttttaggaattataatacgtggcatacatctcataaaggcttttgctgggatattgaattccctgaatttttctgttttcgacctgttaaaaaaatcttaacatccatcaaactagtggtcaaacaaatgagaatgcagctgttctcagagtaatttttaagttgtcatttccctgtgttgcctcccaattggaagaagttaaggtttaccaaatgcatttctatttcaagggtatctgaaacgtaaacattcaaaactgaaggctgactgacttgagatgttttgcaggtggctggagagaagagggaaggtaatatgagacaacttagtcccatgggagcgcagcaaccgtgtcaggttctttctcctgtcccattagtgacctcagtaacatgcagggtacgtctggcttctgcatggccagtgctgacactagcacagctgttcttctccttctgttgaacctcatcttctgaagaaaggccaagtggccctttgtccatacacttagctgcattaggatgaatatcacgcgtctcacatctttaatccagcctttcgtgacatgttggaaaagatacatgtgaaacctacccagttaccctttctgaattgggaggaaaaccaaccaatgtatgtatgagaaactcagaagtct

SEQ ID NO: 87250 - DNA, 1156 bp, Homo sapiens; identical to SEQ ID NO: 64624
  misc_feature (1)...(1156): n = a,t,c or g

SEQ ID NO: 87251 - DNA, 4888 bp, Homo sapiens
atgcagagtctgtgctcccaggccttcttctccttcaagaaaaaccgtggggttgtaaagcttaagacctgtacctggttcaagtcacggggcctggtactgtgcttgtgcatggtggacctcaagaaagagggagcaggtccagcagggatatgggccttggactggctccagggcctggtgaagcagtgtagcctggtggttaagagcccagctggcaagagctgggaattggcaggcaggggctggggcgcctcccactgcatctcatctggggagctggccacgactgctgcatccttcccgtctgccgagcccgtcatgaaagtggccgagagcctcccctctgatggggggtatcatgtcctgccaggtccaggcaagtgttgtgaagggaaaaggcgctcccccttcattatctgccgcccctctggcgtgccctctgcagacaggaaggccctggtgtccacttgcttccggcccctgcccctccccacagccccctgcagccgttggccagctgcacagcctcagcccgcgtgctgtcgagaagctggctctgtccttgtttctcggcagccctgggaattgcctctaatatcctctctgccttctcttgcagatggtgatgacgacccacaactctcctgggtggcctcgtctccctccagcaaggatgttgcgtcacccacgcagatgatcggagatggttgtgacctcggcctcggcgaggaggaagggggcacgggcctgccatacccttgccagttctgcgacaagtccttcatccgcttgagctacttgaagaggcacgagcagatccacagcgacaagctgccgttcaagtgcacctactgcagccgcctcttcaagcacaagaggagccgtgaccggcacatcaagctgcatacgggcgacaagaagtatcactgccacgagtgcgaggcagccttctcccgcagcgaccacctcaagatccacctgaagacccacagctccagcaagcccttcaagtgcactgtgtgcaagcgcggcttctcctccaccagctcgctgcagagccacatgcaggcccacaaaaagaacaaggagcatctggccaagtcggagaaggaagccaagaaggacgacttcatgtgcgactactgcgaggacaccttcagccagacggaggagctggagaagcacgtgctcacccgccacccgcagctgtccgagaaggcggacctgcagtgcattcactgccctgaggtcttcgtcgacgagaacacactgctcgcccatatccaccaagcccacgccaaccagaaacacaagtgccccatgtgccctgagacagttctcctcagtggtaaggtgtctactgccacctggacagccaccggcagcccgactccagcaaccacagtgtcagtcccgaccctgtactgggcagcgtggcctccatgagcagcgccacacccgactccagcgcctctgtggagcgtggctccaccccggactccaccttgaagccgctgcgggggcagaagaagatgcgggatgacgggcagggctggaccaaggtggtctatagctgcccctattgttccaagcgggactttaacagcctggccgtgctggagatccacctgaagaccatccacgcggacaagccccagcagagccacacatgtcagatctgcctggactccatgcccaccctctacaacctcaacgagcacgttcgcaagctgcacaagaaccatgcctaccctgtgatgcagtttggcaacatctctgccttccactgcaactactgccccgagatgttcgccgacatcaatagcctgcaggagcacatccgcgtctcccactgcggccccaacgccaacccctctgacggtaataatgctttcttctgcaaccagtgctccatgggtttccttactgagtcctccctcaccgagcacattcaggcagggcccactgcagtgtggtcagtgccaaactagagtctccggtggtgcagcccacgcagtccttcatggaggtctattcctgcccctactgcaccaactcccccatctttggctccatcctgaaactcaccaagcacatcaaggagaaccacaagaacattccactggcccacagcaagaagtccaaggccgagcagagcccagtctcgtccgatgtggaggtgtcttccccgaagcggcagcggctctcagcaagcgccaactccatctccaatggggagtatccttgcaatcaatgcgacctcaagttctccaactttgagagcttccagacccacctgaagctgcacctggagctgctgctgcggaagcaagcgtgcccccagtgcaaagaggactttgactcccaggagtccctcctgcagcacctgacagtgcattacatgaccacgtcgacccactatgtgtgcgagagctgcgacaagcaattttcctcggtggatgaccctgcagaagcaccctgctggacatgccacaccctttgtgttgtacccactgcacccctgtgtcaggaggtcttcgactcccaaggtgtccatcccaggtgcacctggcggtgaagcacagcaatgagaagaagatgtaccgctgcacggcctgcaactgggacttccgcaaggaggctgacctgcaggtgcacgtcaaacacagccacctgggcaacccggccaaggctcacaagtgcatcttctgtggggagaccttcagcaccgaaggtggagctgcagtgccacatcaccacacacagcaagaagtataactgtaagttctgcagcaaggccttccacgccatcatcctgctggagaagcacctgcgggagaagcactgtgtgtttgatgctgcgaccgagaacggcacggccaatggggtacccccaatggccaccaagaaagctgagcctgctgacctgcagggcatgctgcttaagaaccctgaggcacctaacagccatgaggccagcgaggatgacgtggacgcgtcggagcccatgtacggctgtgacatctgcggggcggcctacaccatggaggtgctgctgcagaatcaccggctgcgggaccacaatatccggccgggcgaggatgatggctcacgcaagaaggctgagtttatcaagggcagtcacaagtgcaacgtttgttcacggactttcttctcggagaacgggctacgggagcacctgcagacgcaccggggccctgccaagcactacatgtgtcccatctgtggtgagcgcttcccttcgctgctgacgctcaccgaacacaaggtgacccacagcaagagcctggacacgggcacctgtcgcatctgcaagatgcccctgcagagcgaggaggagtttattgagcactgccagatgcaccctgacctgcgcaactcactcacgggcttccgctgtgtggtctgcatgcagacagtcacttccacgcttgagctcaagatccatggcaccttccacatgcagaagctggcgggcagctcagcggcgtcctcccccaatggccaggggctgcagaagctctacaagtgcgccctgtgcctcaaggagttccgcagcaagcaggacctggtgaagcttgacgtcaatgggctgccctacggcctctgcgccggctgcatggcccgcagcgccaacggacaggtgggtggcctggccccgcccgagcccgccgaccggccctgtgccggcctccgttgccccgagtgcagtgtcaagtttgagagtgccgaagacctggagagccacatgcaggtggaccaccgtgacctcacgccggagaccagtgggccccggaaaggcacccagacatcgccagtgccccggaaaaagacataccagtgcatcaagtgccagatgaccttcgagaacgagagagagatccaaatccacgttgccaaccacatgattgaggaaggcatcaaccacgagtgtaagctgtgcaaccagatgttcgactccccggccaagctcctctgtcacctcattgagcacagcttcgagggcatgggcggcaccttcaaatgccccgtgtgtttcacagtcttcgtccaggccaacaagttgcagcagcacatctttgccgtgcacgggcaggaggacaagatctacgactgctcacagtgccctcagaagttcttcttccagaccgagctgcagaaccacacgatgagccagcacgcacagtgagggatcgctcaacaggacacctctccgcagaaggcttgccggagacgccgtggggagggccatttgaacattacatccaatcaaagtgtcatttgcaacccagatgtaaaactctaatgatttggccatgaggcgctgctattataagcagctggaaatgaatattaatggcagagattaaaagtattccatgctcagtattttttattgtcctgctacagctagtgtgcttttagactttccgccgcagactacatttctagagttagagaaacctgctttttaaggctattgtcctttgttccttcatgtattatattgatagtttttaaaaaagaattagtgtgattttttttctttgcttcttttttctctttcttgtttttcttcccccccacccccccacccccttcggttaactactttttaattgcaattctaggtaattgtgcatcgtgatgtgattgcttggctattgtctgaatatttccttttaattttttaattaaagactaatgctttgattggatttgccagttcaccggacagtgattaaaactatgtaatgaatataatcggtttcagtgcaactggatggtctgcttttaaatgtgacttaatctgactgcagtaactagtacagttcaataaagggaatccatgcgaaaaaaaaaa

SEQ ID NO: 87252 - DNA, 378 bp, Homo sapiens
gagcaagtgcagcaggcagtgtgcctacagctctgcaaagaaacttcagtttgaacagaggagtgtaaagaaattccagcagctgcagcagtagctgtgactgcaatgggacccacaatcactgcaatcaaagtaaaaatgaatcctttggatctagttagaaatcgttttaatacttctgctaaaagatggacagatggggaagcctcctgcagtcagtccatggacacagggatctacacgccctctcttgccctcaccagcagaatactgtgctgccaatcaaaagtcgaatcaatgcaagcatacagcaccattttcaacataaaacataaaaacccattcaaaatggaggtgatggtagatgcctggacagaa

SEQ ID NO: 87253 - DNA, 366 bp, Homo sapiens
aagtgagatttcactggggaagagaaaaccagcgtggttctgagcacacggttaatttcaaagcttttcccatggaggtaagaataacaaatcatcttgtaaaaatcttgttttctgaataaagtattcagcgatttactgaaaatgatttagtttaaaagtagatgcatagctcttgaattttatcagtttatactaaaatttaaaaaatgcttaatgcaatggaagcctagggcagcacatgaaacctcctgtctactctcgtggcttggcgtgtgcgcatgagcacatggccagaaaggcaatctacagtattaaatttcaccctagtgttactattcttgtaaaaattctgcctctgcaaat

SEQ ID NO: 87254 - DNA, 358 bp, Homo sapiens
aaactaatttagcaaagttgcagcatataaaatcaaaacaaaatcagttgtgttcctatatagcaggtatgaacaatccaaaaaggaaattaagaaagcaattttatttccaatagcatctaaaagaattaaatacttaggaataaatctaaccaagctggtgaagggcttgtatcctgaaactacaaactattactgaaagaaattaaagacttaaataaatgaaaaactatcctatgttaatgaataggaaggaagacttaacattgttaagatgttaatacagtccaaagtgatctacagattcaatgcaatcccaatcaaaattccaatagactttttcacagacatagaaaag

SEQ ID NO: 87255 - DNA, 357 bp, Homo sapiens
ccaatacgcaagtttaccaaagttgcaggatagaaaagcaacacaccaaaatgacttgcatttctacacattaacaatgaacaatttgaaaataaaattaaacaaatattcatttataatagcatcaaaaagaataaaatattcaggaataagcttaaccaaggagatgaaagacttgtacactgaaacattactgagaaaaattaaagaagacacaaataaatggaaagacatctatgtttctgggttggaagactaatattgttaagatgccaaaatgatctgtatattcaatgcaattcctatcaaaatgccaatgatgtgcatggcaaaaatagaaaaaaattcatcctaaaa

SEQ ID NO: 87256 - DNA, 970 bp, Homo sapiens
  misc_feature (1)...(970): n = a,t,c or g
gcacgaggggctgcggaggaagaggataagagagggggctgaggcggtttcggagttggccggagaaggtgggcatttctcgcttttcctccccttcttgcgctctccccctccctcttgccccgcaccccacgtgaagcagaatataaaggggggtgtgaggctagaggggaaagtgaatggcgaaggactgaagggatccccccttcgggtccccggccgccctgttcaccctcgttcatcctcctttccgaagctcgctctcgaaggcaggagcgaccggcgcctttggctgaggaggaggagaaggaggaatcgcgccaggcggagcgtcaggtcccgttttcctctccggcgtctccaatacaaagattacggtgcagaaggaaattgcactcgtctcctccgcgcccccggtacccaacacaatgcaccagccgcctgaatccaccgccgcggccgccgccgctgcagacattatcgctaggaagatggcgcacccggcaatgggtccctcgaaggggcagcggtagtgggcagcgcctctgcctctcaatgcagcaggtaccggcgtcggtagtaatgccacatcttccgaggattttccgcctccgtcgctgcttcagccgccgccccctgcagcatcttctacgtcgggaccacagcctccgcctccacaaagcctgaacctcctttcgcaggctcagctgcaggcacagcctcttgcgccagggggaaactcaaatgaaaaagaaaagtggcttccagataactagcgttaattcctgctcagatctccgctagtatcagctctaacaacagtatagcagaggacactgagagctatgatgatctggatgaatctcacacggaagatctctcttcttcggagatccttgatgtgtcactttccagggctactgacttaggggagcccgaacgcagctcctcagaagagacctanataact

SEQ ID NO: 87257 - DNA, 364 bp, Homo sapiens
gttagatattaataacagaaggacaactagaaagttcacaaatttgtggaaattaaataacacactgttaaacaagcaatgattaaacaaaaattcacaagggaaagagaaaatacttagagacaaatgaaaatgaaacaacataccaaaattatgggacacagagaaagcagtgcaaagggggaaatttacagctatacttgcaagaagaagaaagatctcaaaataacaacctaactttacagtttgaggaactagaaaaagaagaacaaactcaacctaaaactaccagaaggaaggaaataaagattggagcagtgggaaataaaaccagaggatagaaaaataatacagaaaatcaatg

SEQ ID NO: 87258 - DNA, 1032 bp, Homo sapiens
ttttttttttttagacctgtacagtttttattacataaaatatcacaaaattcacaagtacaacactgcttattttcttgcttgaagatcagatctctggtttatttaagatcaacattcaccacagctgaaggaaattaaactgaaacctttaaaaggtaccgccatacggaacctggttggggttaataatacaataataattccattgtagttgagggtataacccatctggattcagaattcctgtgtcacttgctggtcctaatggcactgtactcccattcctgccaaatggaaaaaaagtgtgtcaacatcagtctctggttcagaagctgcaatagagaacgtagtcttatctggccaaaaggagtcttctagtcctcctggttctgagtacttacagggtgacgaagtgggcagaactgggagccatcttgcccagccccttggtgctatgtttaccttgaagcaatccttcggccttaggattggcctctagtagttcattacactgacctagagctacctctgataagagcagcagtcctgtattctttaggcgagaggcaaagcagtaattggcactcttggaagacatgtcagcaaagtagattcctttcccaaacatgtaacctgtgatgggagcttcaggtggggcaattcgaagcccatggctcaagattcccacccagttactcatcctggaaccatgccatagaagcatcctgttatgaaggtcctctctgaaggcttctttctcaccatccttctccacttcaaacaaatccagcaaggtcatggtatagtcgctgtgtgtgggagcatgggtagattgtaggtactgggaaatcactttgaactcataactttcatggtcaagggggcgcaaggcacaatgtaggtttctatagtgttggtccaatgggtgttctgggctttgtagctctgttttcaccagcttaatagcaatttcaatgtctcccaaagcctctagtaattgtattttttctgacagttccttctgtgtcc

SEQ ID NO: 87259 - DNA, 383 bp, Homo sapiens
gacgcacctaacactggaactcccagatttgtaaaacgattactgctagacctaagaaatgagatagacagcaaaacaatagcagtggtagatttcagtacaccactgacagcactagacagatctttgagactaaaagtcaactgagaaacagtggacttaaacgaaatgctagaacaaatggactgatatttagagaacattctacctaagatctgcagaatatacatttttatcagcacatggaacattggccaagatagattatatgataggccacaaagcaagtctcaataaattttaaaaaatcgaaattatatccagtatccctgcagaccacagcggcataaaactagaaatcaactctagtttgtactagtcag

SEQ ID NO: 87260 - DNA, 385 bp, Homo sapiens
ttcgagaaaagtttgaagttccccaatcataacttagtggctaggagaagtatttagtgactgcctgttctaggactcctcggatagtgacagatctggaggacagttggccgggacaggagagtaagactgagaaggccacgtcagtgtccaggagacagttaacctcctgtccctcaatggtcaagcatacctggggctctgtgagggtgatggcatgggctggcacttgtcctgggcatcctcaatcctgctcctggatcatctggttagtggcttctgactcagaggacttttgtcccctgaggcagtgggccttccagtgattcccttgacatcacgggcatggacgagggggcagcttatttttattcggacagtcttt

SEQ ID NO: 87261 - DNA, 392 bp, Homo sapiens
tttcacgagaattttttgacaagtttgccaagggtatcgctgatgaaaatctgatgccagaacaaatctgtaatgctgattacacatctctgttctggcattattgtcccagaaagacattaactacagctaattagacagcccctacagtaattaagaatgccaaagacaggataactgtgccgggatgtgctaatttagtaggcatgcataaatgtaaatttgctctgataggcaaaagcttgtattctccctattttcaaggggtgaacttttatcagtccattattatggtaacaaagaggcatagaccaccaacaacatcttttctgattggcttcacaaatatttttgtaccatttgcctcatgcttcattgcagggaaagctgga

SEQ ID NO: 87262 - DNA, 669 bp, Homo sapiens
ttttttttttaccttgtctgtattaaggaaacaaacaggattgttgggttcaaatactcccatcaaccaaggattatcagaatagtcagcataaaattccagttccagcttcacataaattaaagtgacgtaggtttatcacagcattggccactttgtctgatccacactccagcttgccctcataggtcagcttattacttaaggacataattttactaagggaattacaaaagataactttagttttggtagatggaaacaaacatgaaaaccactcctagctaacactgttacaaatacctgttcattctgtactgcacggttaactgtacaacagcactcttattctgctccagcctcttgaataagctttcactcatgccaagagctctgtcaataaatcagattcatgtttatcagtgtactaaatctgttccttgaaaataatctagtttaaaattaacacttaagtgtctgcctaccttgcttcacggtttagcaccaggggaggaagctgctgatggtcccccactaacacaaatctccgtgaaaaaaaaagggggcccagacaaattggttggctaatttgagaggcttcttcacaatacagaaatcgaagatttacggggaaattattggatgggttattcccgatctggtggtggc

SEQ ID NO: 87263 - DNA, 379 bp, Homo sapiens
agacattctgaaattttgtgctactctttctgaagacacagaaacagtcaaggcatacctaatacttatgagcataaagctttgataaaattcaagaattatttgcattttgaggaaaaagactttgtcgctaaagcagagaagaacctaaaacggactcctcatagtgagctaatattttataaaaaggtgtcagtcaaggtgtggcttacaaaaatactttcaaggatgtttactttccagccatctcactggacaagaactgggtgggtttcattaactttggactgagcttcaatttcctcaaaatgatggcacttactggccttgatggacatggattggatgcttgggtaagcacactttgctggaggctttg

SEQ ID NO: 87264 - DNA, 974 bp, Homo sapiens; identical to SEQ ID NO: 67996

SEQ ID NO: 87265 - DNA, 384 bp, Homo sapiens
cgcttaattattatcctcatagcgggaataatggttactaacagaaaataacacatgggcctttccaaaccagcacctctgcctcttattaggaaaggaatgttgtttctatatcagccaatcagacctagtaaaaagcgctattaaaaaaaacaagctaaaaagctaaggagtaccaaaacaaacaaacagattcttggtttgggaacaaaatcatagatagcatgggtcatcccattcctgggccctctcctaataatatacctaattatgggactaatgttcttaccctgcctaattaacctttttcagagattttttaaactgacaggatcatggccatttcacagacaactacccaaaaatatctacagacggcactgc

SEQ ID NO: 87266 - DNA, 1205 bp, Homo sapiens
  misc_feature (1)...(1205): n = a,t,c or g
tacaggacgtatgatttgttcagaagcactgcctgccggctgtttcctagcaccacatttcacgggagcaccaggttgagatgatggaattatttacttttaaatgtaacatctcgtacagtgctcaaatgcagacgtgaacgtggactgtaaccttaaaaacaaaggcagtacatgccacactactacccttcctgctcttgtgcgcacacctaccctgatgatgcagccttcactggatatcaaaccatttatgtcttttccagtggacagtagttctgctgttgggctctttccaaattttaacacaatggatcctgtgcaaaaagcggttattaaccatacatttggagtatccattcccccaaagaagaaacaagttatttcttgtaatgtctgtcagcttcgctttaactcagatagccaggccgaggcccactacaaaggaagtaaacatgccaagaaggtcaaagcactagacgcaacgaaaaataaacccaaaatggttccttccaaggacagcgcaaaggctaatcccagctgctccatcactccaatcacaggcaacaactctgacaaatcagaagataaagggaagttaaaagccagcagttccagtcagccatcaagctctgaaagtggctcatttctcctcaaatctggcacaacacccctgccacctggagcagccacttctccctccaagagcacaaatggagctcccggtactgttgttgaatcagaagaagaaaaagccaaaaaattactttattgttcactatgcaaagtggctgtgaactccctgtcacagctagaggcacacaacacaggatctaaacacaagaccatggttgaagctcgtaatggggctggtccaattaaatcctatcctagacctggatcaagattaaagatgcagaatggcagtaaggggtcaggactacagaacaagacatttcattgtgaaatctgtgatgttcatgttaattcagaaattcaactcaaacagcacatttctagccgaacgataaagatcgagttgcagggaaaccactgaagccaaaatacagcccttacaacaaactccagcggacgccgagtattctagcagcaaaacttgcattccagaaagatatgatgaagcctttggcccagccttcctgtcctcacctctcgcagcggcggcacgtnngtcctcagcgctg

SEQ ID NO: 87267 - DNA, 2618 bp, Homo sapiens
agataatagactcctcaaccaggagaatggagagcgaaagatcaccgctttatcgccagctaattgacctgggctatctgagcagcagtcactggaactgtggggctcctggccaggatactaaagctcagagcatgttggtggaacagagtgaaaagctgagacacttgagcacattttctcaccaggtgttacagactcgcctggtggatgcagccaaggccctgaacctggtgcactgccactgccttgacatctttattaaccaggcatttgacatgcagcgggacctgcagatcactcccaaacgtctggaatatactcgaaaaaaggagaatgagttgtatgaatcattgatgaatattgccaaccgaaagcaggaggaaatgaaggatatgattgttgagacacttaataccatgaaggaggaacttctggatgatgctactaacatggagtttaaagacgtcattgtccctgagaatggagaaccagtaggcaccagagagatcaaatgctgcatccgacagatccaggaactcatcatctcccgacttaatcaggcagtggctaataagctgatcagctcagtggattacctgagggaaagcttcgtcggaaccctggaacgatgtctgcagagcctggagaagtctcaggatgtctcagttcacatcaccagtaattatctcaaacagatcttaaatgctgcctatcatgttgaagtcacgtttcactcagggtcgtcagttacaaggatgctatgggagcaaatcaaacagatcatccagcgcatcacatgggtgagcccacctgccatcactctggaatggaagaggaaggtggcccaggaagccattgagagcctcagcgcctccaaattggctaagagcatttgcagccaattccggactcggctcaatagttcccacgaggcttttgcagcctccttgcggcagctggaagctggccactcaggccggttagagaaaacggaagatctatggctgagggttcggaaagatcatgctccccgcctggcccgcctttctctggaaagccgttctttacaggatgtcttgcttcatcgtaaacctaaactgggacaggaactgggccggggccagtatggtgtggtatacctgtgtgacaactggggaggacacttcccttgtgccctcaaatcagttgtccctccagatgagaagcactggaatgatctggctttggaatttcactatatgaggtctctgccgaagcatgagcgattggtggatctccatggttcagtcattgactacaactatggtggtggctccagcattgctgtgctcctcattatggagcggctacaccgggatctctacacagggctgaaggctgggctgaccctggagacacgtttgcagatagcactagatgtggtggagggaatccgcttcctgcacagccagggacttgtccatcgtgatatcaaactgaaaaatgtgctgctggataagcagaaccgtgccaagatcactgacttaggattctgcaagccagaggccatgatgtcaggcagcattgtggggacaccaatccatatggcccctgaacttttcacagggaagtacgataattccgtggatgtctacgcttttggaattcttttctggtatatctgctcaggctctgtcaagctccctgaggcatttgagaggtgtgctagcaaagaccatctctggaacaatgtgcggaggggggctcgcccagaacgtcttcctgtgtttgatgaggagtgctggcagttgatggaagcctgttgggatggcgaccccttgaagaggcctctcttgggcattgtccagcccatgctccagggcatcatgaatcggctctgcaagtccaaattctgagcagccaaacagaggactagatgattctacttgaaagcaaagaccctttcctctttcactctcctagttatttcccttccccctcaccttttggcccatggggagaatttgacatttattcactataggacacaactcccaagggaactggtgcttgctgggaaacttggaaccttcccaggcagggatgactcctggacagtgaagagttgaatgactgagcatattcagcagctcactgaagcgccaagctatccctttagcaaaaaagtgtctcagatgtgtaaaagctgaggaatgtggtgttctggcttcacaaatgaaaaggaggcagatgttaccattgtcttttcactgtatatacttctaagacagcaagcgggacactgcagtggcaatagtgttaaaaaatctcattctcatgatttttggctctagctaggaatagtttagtcaggactcagaaaatttgagcttagttctgggattatgaaaacatggggacaaaaacaataacttgtggatgtctggttcctgctgtctgcagccaggtatctcaggttgcaatggtcagaagtcccagtgagggagctagaaacagagctatctgttcctcatagtgccagtgtgtttacatttataggaccacatatccctggtttctgggggagggtttcactgttacatcaccaagaggccctgaaaagaggaaaaaaaaaa

SEQ ID NO: 87268 - DNA, 382 bp, Homo sapiens
  misc_feature (1)...(382): n = a,t,c or g
ctggaagatgcaaacatgactgtcgtcaacatggccacactggctgttaaaatattgaaatgttatctgtgccagatgtatcccctggtgagaagtaggtcatttcctcattccccaggcctcccccaactccatttaccatgacttcatagcctccccttcaagatgctacccctgtgtgactcccaccaggtgtgccactggtgaggcatggcaggagataatgcttgccagccttcccggaaatcggcgtgatcctgagtctgacttcggccctggtgaagagattacctgaggtagcaaatttgccatcgcctatttcatcagcttcttcatgctctgtgccttcctggggacgcatcatacactcggatggggttgn

SEQ ID NO: 87269 - DNA, 417 bp, Homo sapiens
ggccctaatgccgcacgaggctaactatgaggaaatcttcctgaaaactgataaagatatggacggatttgagtctggattggaggtccgcgaaatattcttgaaaacacgtgtttaccttctaccttactagcccatatatgggcattatgcgactcaaaggactgtgggaagctttcaaaggatcattttgccttggcttttcacttaatcacggcagaagttaatcaagggcattgatcctcctctcgttcttactcctgaaaagatttctccatcaaacagggccagtttacaaaaggtaacagagcttacaaggaaacctgtgtgtattattttcaaaggaacaatactctggcgaattacagattcaatttggatgaaacataacagaaaacgtatctggctaagagcaca

SEQ ID NO: 87270 - DNA, 386 bp, Homo sapiens
gtgacattttgtaatgaattttgtgatgtcttttctgtacataaagataaaagaccatttttaggaagctcgaactcagtggactaccccttggaaacggactgtgatcttactttctacctgtccccagattcattctttacatttctaattaagactcatcttattttcatacctccttgagttttccgctggtgaaggttggagacagcaatgaccggattctcttccattcttcatcctcagctaaagagatggcacttttcataaatcccactgggcctaaagactagagttcaacagaaacattttttctcacattagttgtggggatcttcatggttgcacaaaatatattgaagaggcatccttatttaacaaatatt

SEQ ID NO: 87271 - DNA, 1062 bp, Homo sapiens
gtcgacgcggccgcgctcgttctagctgcggccgcaggagctgtggcggttttcctaatcctgcgaatatgggtagtgcttcgttccatggacgttacgccccgggagtctctcagtatcttggtagtggctgggtccggtgggcataccactgagatcctgaggctgcttgggagcttgtccaatgcctactcacctagacattatgtcattgctgacactgatgaaatgagtgccaataaaataaattcttttgaactagatcgagctgatagagaccctagtaacatgtataccaaatactacattcaccgaattccaagaagccgggaggttcagcagtcctggccctccaccgttttcaccaccttgcactccatgtggctctcctttcccctaattcacagggtgaagccagatttggtgttgtgtaacggaccaggaacatgtgttcctatctgtgtatctgcccttctccttgggatactaggaataaagaaagtgatcattgtctacgttgaaagcatctgccgtgtagaaacgttatccatgtccggaaagattctgtttcatctctcagattacttcattgttcagtggccggctctgaaagaaaaagtatcccaaatcggtgtaccttggggcgaattgtttgacaaatggcaactgactttctttagaattttgcagttaacagtagtatgtactcaaattggggggaaaaaaaccctacatgtttcttgtaaaggcgtctgacagtcctgagaattattgatggtaaggaataaaaaatgtacagatgactcagtgaagaaactgaggcttctcttatgaaacaaacattgataaacgtaactactaaatgtttatgcctctgtaaaccaaatttcttttctagataaaaatatgtattactacctgcaaattttcttctggctgttttagtagtattttttttacagaactaaatatagagtttgtatgattagtaatatttcctgtcctacagctttttttttttttttttttttttggaaaaaattttcgctttgaaaaaaaaaa

SEQ ID NO: 87272 - DNA, 382 bp, Homo sapiens
gggaactctgaccagcatttgctcatagaacaaacgcacgcagtacaatctcaatcgagtaaaaagtctgtaaggaaatacctcagaatgtcagcagggattcttcctgggggatgagattataggtggttttgttttactttcttgtagctttctgaagtttccctcgtttttatgagtgtgcactaattcctctgataattgggggcagggggagtagaagtctatatcaaaacaaaaagccggagcaaggccagtgaccattaacaccttttgatactttgtagggagattttgcagctgctgccgccaacctacaaacctgcctggcagttttgggccgggcactggccacctcccgcctggacctggcctgcaacct

SEQ ID NO: 87273 - DNA, 1236 bp, Homo sapiens
ttttttttttttaagtgctcaacaaacatttactgcccaaatgaattataaactaggaaacatatttaagatgtgaagtgtcttgtcacttctggagcttatagccaagtagtggatgacaagggttcaggacggtaatgggtatttccccaaggaagatcggatgactgaactgatattgggtcgggccagccgggcaggaggaatctgcggtgcaactgcagacagtctcaggccagtgtccaatggcttggtggcactgcccagccggctgcggaggatgaatggcaatagctatgtgcttctgaggcagagcaacaatggagtaccagcagggccctgctccttcgccgaggaactcagccgcatcctggaaaaaaggaagcacacgcagctcgtggagcagctagatgagagctctgtctgagcccagcctcccagaacaaatgctcttccaagccagcctatctgtcccaggctgggccactgcctccctaacacagccaccctcccttcattacccccactccatacccttctcccaactttttgatgtccctgtagggcttggccagtcaggcccagccaaaagccccctcctcagtctccacagacccacatgtgagcagcccaggcccatcggtggctcctcagaggcagggctctgcagggtccatatggggctcaatgtcacccaccttctgcatggccctgtgtgctgggatgggtcctggaaaccagacaaagtcttctgccagccacctaagccctgcgtacattcacatgcacatggaagaatgtttatcggctgggctgcagtgcccccaccctcaccttctcctggtgcattcttgtttcatccctgcttctggacttggggtaccctcccaattgccacatcctatctggtcctcttccccagccccaatgtggtgaccctctttgtcaaagagcttggggaacgggccagccctggggagctatgactagtctgcttcatctagatgcgcccacccctgatcacccaggggacaggctcctgagcctatacagaaggtgatatctgcctcccaggattggctctgctccccaatacaactatttgcagaggaaattgggatcctccgcttccatcctgactccttggcaggcacacaggcctctttagtaaggttcacactattcattgatcatggtgttagggcatgacaagaaaatgacaacagttcaagaatt

SEQ ID NO: 87274 - DNA, 3575 bp, Homo sapiens
atgtcgaggcgcaagcaggcgaaaccccagcacatcaactcggaggaggaccagggcgagcagcagccgcagcagcagaccccggagtttgcagatgcggccccagcggcgcccgcggcgggggagctgggtgctccagtgaaccacccagggaatgacgaggtggcgagtgaggatgaagccacagtaaagcggcttcgtcgggaggagacgcacgtctgtgagaaatgctgtgcggagttcttcagcatctctgagttcctggaacataagaaaaattgcactaaaaatccacctgtcctcatcatgaatgacagcgaggggcctgtgccttcagaagacttctccggagctgtactgagccaccagcccaccagtcccggcagtaaggactgtcacagggagaatggcggcagctcagaggacatgaaggagaagccggatgcggagtctgtggtgtacctaaagacagagacagccctgccacccaccccccaggacataagctatttagccaaaggcaaagtggccaacactaatgtgaccttgcaggcactacggggcaccaaggtggcggtgaatcagcggagcgcggatgcactccctgcccccgtgcctggtgccaacagcatcccgtgggtcctcgagcagatcttgtgtctgcagcagcagcagctacagcagatccagctcaccgagcagatccgcatccaggtgaacatgtgggcctcccacgccctccactcaagcggggcaggggccgacactctgaagaccttgggcagccacatgtctcagcaggtttctgcagctgtggctttgctcagccagaaagctggaagccaaggtctgtctctggatgccttgaaacaagccaagctacctcacgccaacatcccttctgccaccagctccctgtccccagggctggcacccttcactctgaagccggatgggacccgggtgctcccgaacgtcatgtcccgcctcccgagcgctttgcttcctcaggccccgggctcggtgctcttccagagccctttctccactgtggcgctagacacatccaagaaagggaaggggaagccaccgaacatctccgcggtggatgtcaaacccaaagacgaggcggccctctacaagcacaagtgtaagtactgtagcaaggtttttgggactgatagctccttgcagatccacctccgctcccacactggagagagacccttcgtgtgctctgtctgtggtcatcgcttcaccaccaagggcaacctcaaggtgcactttcaccgacatccccaggtgaaggcaaacccccagctgtttgccgagttccaggacaaagtggcggccggcaatggcatcccctatgcactctctgtacctgaccccatagatgaaccgagtctttctttagacagcaaacctgtccttgtaaccacctctgtagggctacctcagaatctttcttcggggactaatcccaaggacctcacgggtggctccttgcccggtgacctgcagcctgggccttctccagaaagtgagggtggacccacactccctggggtgggaccaaactataattccccaagggctggtggcttccaagggagtgggacccctgagccagggtcagagaccctgaaattgcagcagttggtggagaacattgacaaggccaccactgatcccaacgaatgtctcatttgccaccgagtcttaagctgtcagagctccctcaagatgcattatcgcacccacaccggggagagaccgttccagtgtaagatctgtggccgagccttttctaccaaaggtaacctgaagacacaccttggggttcaccgaaccaacacatccattaagacgcagcattcgtgccccatctgccagaagaagttcactaatgccgtgatgctgcagcaacatattcggatgcacatgggcggtcagattcccaacacgcccctgccagagaatccctgtgactttacgggttctgagccaatgaccgtgggtgagaacggcagcaccggcgctatctgccatgatgatgtcatcgaaagcatcgatgtagaggaagtcagctcccaggaggctcccagcagctcctccaaggtccccacgcctcttcccagcatccactcggcatcacccacgctagggtttgccatgatggcttccttagatgccccagggaaagcgggtcctgccccttttaacctgcagcgccagggcagcagagaaaacgggtccgtggagagcgatggcttgaccaacgactcatcctcgctgatgggagaccaggagtatcagagccgaagcccagatatcctggaaaccacatccttccaggcactctccccggccaatagtcaagccgaaagcatcaagtcaaagtctcccgatgctgggagcaaagcagagagctccgagaacagccgcactgagatggaaggtcggagcagcctcccttccacgtttatccgagccccgccgacctatgtcaaggttgaagttcctggcacatttgtgggaccctcgacattgtccccagggatgacccctttgttagcagcccagccacgccgacaggccaagcaacatggctgcacacggtgtgggaagaacttctcgtctgctagcgctcttcagatccacgagcggactcacactggagagaagccttttgtgtgcaacatttgtgggcgagcttttaccaccaaaggcaacttaaaggttcactacatgacacacggggcgaacaataactcagcccgccgtggaaggaagttggccatcgagaacaccatggctctgttaggtacggacggaaaaagagtctcagaaatctttcccaaggaaatcctggccccttcagtgaatgtggaccctgttgtgtggaaccagtacaccagcatgctcaatggcggtctggccgtgaagaccaatgagatctctgtgatccagagtggggtaggttcctaccctcccggtttccttgggggccacctccgttgtgaataacgccactgtctccaagatggatggctcccagtcgggtatcagtgcagatgtggaaaaaccaagtgctactgacggcgttcccaaacaccagtttcctcacttcctggaagaaaacaagattgcggtcagctaagggagaacttgcgtggaaggagcaatgcagacacagtgaaatctctagaatctgctttgttttgtaagaactcatctcctcctgttttctttttcttactgatatgcaaatgatgtttactacgttggttgtgaccacaacctcaggcaagtgctacaatcacgattgttgctatgctgctttgcaaaaagttgaaaaaataaaaaaaaaatgcataccaaaacaaatacagactctttttttttgagatggagtctcgctctatcacccaggctggagtgcagtggcatgatctcggttcactgcaacctccccattctgggttcaagtgattctcctgccttagcctccagagtagctgggattacaggcaggtgccaccacgcccggctaattttgaattttgagtaga

SEQ ID NO: 87275 - DNA, 412 bp, Homo sapiens
aattaatataagcccatataaaatgttatatgggaggccattttaactaatgatctaattactgatccagaaacggctgagttaataaaatacctagttaacctaggacagtttcagcaggtctcgcaagagtttggaactcaaaggctccccgcaccaggaactaaccagcaaaccaaggtcaggccaggagataaggtacttgttaaaacatggaatgaggagtcacctgctcaacaactacaaccctaatggaagggactattttcactggtgttggccatgccttccatggccaaagtactaggattagatagttggatacctctttccaggtttaagcctgcaacatctgaagccctggacctggaaccggagactcccaccagccactatacctgtgaacccgtag

SEQ ID NO: 87276 - DNA, 467 bp, Homo sapiens
gccgagagcgggtggctgagccgggacctcgcgtgattctcggaacccgaggagaagcggcgtccggggctatggctgtgactctggacaaagacgcttattatcggcgagtgaagagactgtacagcaattggcggaaaggagaagatgagtatgccaacgttgatgccattgttgtatcagtgggtgttgatgaagaaattgtttatgccaaatcaactgccttacagacatggctctttggttatgaactaactgatactatcatggtcttttgtgatgacaaaatcatctttatggccagcaagaaaaaagtggagttcttgaaacagattgccaacactaagggcaatgagaatgctaatggagcccctgccatcacactgctaatacgagaaaagaatgaaagtaataagagtagctttgacaaaatgactgaagccattaaagaaagcacgaatggcgaa

SEQ ID NO: 87277 - DNA, 705 bp, Homo sapiens
attctataggacaccaccctaccttttcatgatgttgcctcccagatatctctgtaaccgagctctcattttgccactcagctgttctatcaagctagttactttaggagataagcatgtgttaaaaccattgaattcacttccattgccataaactgtgtacctggttggaagaaatgtttttgggattcctatgcaatggataaaaccttcagaaatgtcaagaatattagtgccagtggaaacactgcaggcagagaatgcagatttataccttgaatgtgaattatctttgtgaagacaaagtgctacctatttcttatggaaattgcccaatgtaaccatcatgttaccgggttgccagcaagtctcattgacagtaatgccatattaggaacccagccttggaaatgtagtcacactccacgttgttgccaggttgggcattcggcaatgatagtagccaaataatgtaggtaaggagaagaccatactattgaacctctgtcactgctttgatagccacttggtacatgggcccattaaccaagccctgggttggctggagaaaaagactgacatctaccagacaattcatcttggtcccccttttttttggaaaaattttccccctgaggcgccccgtgtagggccttttgggggagaaagaatatttttccaggcccctcccacttcaagagggcc

SEQ ID NO: 87278 - DNA, 368 bp, Homo sapiens
aaggctcaaatctgctttaaaagtttccagtatttaggcttctatgtaagccaagggaaaagatggcttggtggagaatgaaagcaggctgtttgtgcacttcctactccaaccacccagcaccagataagaaagttcctagagacagcagggttctgccacatttggaccctaagtttcttgctcatggctaacccattatatgaagccacaaaggggggggaaaggaacccctcctgtggggaaaagagcaggtcatggccttcaaagaaatcaagaaggctttgatccaggccctggcattaggactgccaaacacacaaagcctttttactgtacgtccatgcaagaaaaggaatagctacagg

SEQ ID NO: 87279 - DNA, 951 bp, Homo sapiens
gtggagcatccctgtgggggactctggccagcttgagtgacgcagatcctgagaccactcccgggtaggcaattgccccggtggaacgcctcatcagagcagtgcgtggcaggcccccgtggagtatcaacgcagtggctgaacaccgggaaggaacaggcacttggagtccggacatttgaaacttggtaatcgagtgtggatcaaggactggaacgtaacttctttgtgcccacggtggaaagaccgtagtctgtcgtcctgaccactcccaccgctgtgaaggtagagggaatcccagcctggatccaccacagccgtgtaaaacctgcagcacctgaaacctgggaggcaagaccaagcccagacgacccttgcagagtgaccctgaggaagacgacaagccctgctccagtcacacccagaagctgactggtccacacatggccgaagcatgaggaagctcatcatgggattcatttttcttaaattttggacttatacagtaagggcttcaactgaccttactcaaactggggactgttcccagtgtattcatcaggtcaccgaggtaggacagcaaactaaaacaatctttctgttctatagttattatgaatgtatgggaacattaaaagaaacttgtttgtataatgccagtcagtacaaggtatgtagcctgggaaatgactgacctgatgtgtgttataacccatctgagccccttgcaaccatcgtttttaaaataagattaagaaatggccttttcctaggtgatacaaggaaaataataactagaacagaagaaaaaaggaacccccaaacaaataactttaagatttgatgcttgtgcagccattaatagtaaaaagctagaaataggatatggttatcttaactgagaaaggagctacagcgtagaaaataaatatgtttgtcataaaaaaaaaa

SEQ ID NO: 87280 - DNA, 2710 bp, Homo sapiens
ttttttttttttatttgggatcttttttatttttatacacatgacaagattttacatcaagaatagtcagttaaatagtacaaatttacattcatgaggaatgttaaaaaaaattcaactaaaaaacccactttttcctgtgacccataatcccacattttacagtgcaggggagaaggggattagggggcatccaaaacaagtctctcccaaaaagaaatgatgtaaatttcacattccctctccacacaggatccaaatggtgagagtataatttacaattcatctttttcagctgtagattcctttgctgtttcttcttcttcatctgttcccacatccatttcttcatcttcgtcttgctctgtgtcttctgttgtgtcttctgctgtctcttcaggttcttcttcgggctcttcttccacctttgcatcagggtcaatgttcaaactgaggcgaagcattctttctattctatctccatatgctttagtgtctggtaaaagataccctgaccgaagcgttgctgtttcaaacaaaaccacagcaagatccaaaactgttttatcatcttcatcttccttaattcgtcgaagcatgtctctgatccagcggtggtctgggaattaatttcaaatgttttctttctgactcgcatagtaaattgggtaagatgttctttgcccggttggtacgcttgtgctttccatgattctctcccaatgttggccaagaccaatcccgtactggctgggccaccaaaagcaacacgggagattctgtcaaggcggctgaagacacccacagccttttcaaatcttgtccttaagggctttatctttcatccaattcagcagaggctcaaattctttctcaactgcttcacgactctccttagttttctcactttcatcgaacttcactccttccttggcaacattctggaacctcttcccatcaaattcgggaagggcctgaatacagtattcatccacaggttctgtgaggtaaataacttcatagccctttttcagaagtcgctcaacaaatggagaagattcagcctcttttctgctggacccagccatgaagtagattttgtcttgtttttccttcattctttccacatactggtctaggctagtaatgtcagttggatgatgagaagactggaacctaagaagtttagcaagacgttgttcgattcgagtggtcttcaatcacaccaaagctttgtggtgggaccaaattctttccaaaaagtatcattgtatttatcatcagcaatcttcttgatcatgtccagcgttttacgaacaagcttcttcctaatcaccttaagcagtttatgttgctgaagagtctcgcgggaaacattcaaggggagatcatctgagaccaccacacccttgacaaaattgaggtatttaggcatcatatcatggaagtcgtctgtgatgaatacacggcgcacatagagcttaatgtaatcgctctttttagatccatattcgtcaaacagaccacgtggagcagatgtgggtacaaataaaattgatttgaaggtaacttccccttcagcagtaaagtgaatataagccatggggtcatcactttcctttgaaaatgatttgtagaaagctttgtattcatcttcttctacttcttttgatggtctctgccatattggtttgatatcattcataagttcccagtcccagacagttttttcaacttttttagtctttggtttcttttcttcttcttcttcctctactgcagcttcatcatcagattcttctttctcttctttggctgcttcttcttcctccatgggctcctcaacagtttcagtcttgctgctccatacataaataggaaagtttatgaactgtgaatattttttgacgagatttttaattgtatccaattcaaggtaatcagatgcttcttcttttaagacaagggtaattgtcgttccccgtcctagagtgtttcctcttgggtcagcaattacagaaaattcattggagtcagactcccagatgtgctgggtatcgttgttgtgttttgaagtgacaataaccttatctgctacaaggaaggcggaatagaaaccgacaccaaactggccaatcaattcagaagttgactggccatcttcctgtgcttcagtcattttgtttaaaaactcgcttgtcccagatttggctatggtaccaaggtttttaaccaactcttctctggtcattcctacaccggtgtctgtgacatgcagcaggttcttctccttatcacacttaattttgactgttagttcctcatttccagaaagagcattttcatcagtcagtgatattagccttatcttatctaaagcatcagaagcatttgaaatcagttctctcaggaaaatctctttatttttatacaatgaattgatgataagtttcatcattctgttaacttcggcttggaaggcaaacttttccgacttctctctaagttctcttatttgtgatgcatttaatccatccaactgaatagcttcttcctctctctgtactacttcatcatccgtccttgatccttctctacttttacccagatcctcttctactgtaccatccacatcaacttcatcgtcagctctgaccgacccgaaggtcagcaggacgcagcagaggcccagcacccacagggccctcat

SEQ ID NO: 87281 - DNA, 864 bp, Homo sapiens
ttggtgtttttaactcaaacagataatcagcaactgctgtgatgagatgctgcctttaatgctgctgcatgtggtcaaacctccactcccagtctacccagaccaggacttggcttccaggatccaggggtgtctgtgtgaaatgatcagcctgggcccccaagcaggtcactcccagcacagagatgtcattgattgtacctccgtcatcaggctgtcttccgccctcagggaaaagtagcatgtcttccagcaccatatgacaactgctcagcacttatttcttgtcattgctcccttctgactgcagctccgtgggatcacaggagattatggtggtggtggactcccaggcattgctattctcctgacaccagaacaccatcatggtcatctctgaggcatcagtagtgtttctatatgccaacagtgaacaatctgaaaaagatattaaaaagtaatctcatttacaatagccacacataaaattaattcctaggtatttaaccaaagaagttaaatatctctataatgaaaactataaaacactgatgaatgaaattgatgagatcaccaaaaatgaaaaaatattccatgttcatggattggaagaatcaatattgttaaaatgtccatactacccaaagcaatctacagattcagtgcaatccctataaaaataccaatgacattcttcacagaaatatgatcctaaaatgtatacagaaccacaaagacccaggaataggccaaagctatcctaagcaaaaaggaacaaaacttggaggaatcacattacctggactttaaataatactacagagctgtttaactcaatcagcatggtattgtcttataatcagt

SEQ ID NO: 87282 - DNA, 1746 bp, Homo sapiens
tttttttttttttaatttttgcgttgaaaactttattaaaataaggattaaacctgaaaaaagaacaatcagaatgccagccctttgcataaaatcagcaagaaaaaggacagaaagagaaaaaagaagagcatcagtcctctccacttcttcccagagacttaggtggggaggagaatacccgctgccctgcagtgcctgcagcctgtagcggggagagctgtgggcaggttctctgtctcggggctcagtgggctatagagaagtaagttcccaccagagcagaggcccaagagtcacagatacctaagctagagaatagattatcctgaggggatataaactccaggaagttgatcagggaacaggaatttgggaacaaacaattattctgaaagcctggagagcctgaagaggcaggggccatgcacacgagcctctaactgcccttgggtgccacgatctgctggacatagttgacaacattgctgtggagctgggaggcggtggatgcaaaagtctccttggcgagggtctgggccacctgcactgccacccatcattgcgtggtacagcagaagtatacacttctggcttcccctggttatgcaggaactccttcactttccagaaatccttcctggtggtcgttcttaaggacgatttggccccatcgcagccggagctctgcattccgggcatttgagatacttgggtatgtgtctcccaaatttttttcaacattcccaggagggaaaaggggatttctggaggaatctttatcccaggaagtagaccagctggtaggtcttcccagggagagatggccacggcttcaatggccttcatgtccagctcctcggctgcccacagttgggctagctctttcagcaggcttcaatgagtgaagtccccaggggagagatcagggaggtaacgggggcccagccgggggtattccagcccatcgatcaaactcaaaaccctggaatgatatcccactctctttttccttaagcctcagggaaatattcccaagtagaagtccagaaagtcatcggctaagatgcttcggaatttgaattcatgcacataggccttgagaaaactgtcaaactgatcctgatccaccaccaagtgggccaggtatgagacaaagcagaaacctttctcgtagggggtctcattataggtgtcgtccgggtcaacgcctggttcaatcttcacgcggagttgttgagtgggttttcctctccagtgatgtccatgtgttgacgcagcagagcccgccccgttgcagcctccaagcaggtgtacgcagcgccaaagaggatggtggagatcctcctctgggcgtacatggtgaaacttcattgtgccagaattctccccagttggcgttggtgaccaggttcccaaaccaactgtgggagatctcatggatgatgacatctgccaaggagcggtccccagctagcaggcagggggtgacaaaggttttttttttaaatattaacgcacactttttttttattatattaaaatcaggcaatgggtctgacaataaaaaggctgcttatggaatactgttatgttaaacttcacttacaggatgttaaatccttagaactaaggttttccccccagaaaaagattaatcggaaacatccaattgccttttccagacttgatagttgcctgccttcaaaaggtggttttacaccaaatactaaattaaaaaaaaaa

SEQ ID NO: 87283 - DNA, 419 bp, Homo sapiens
  misc_feature (1)...(419): n = a,t,c or g
caaataaccctgaagtgcaaggtgattcttgtgacttttgtaacattgtgttttctatagattgcgagcaccttatccgaaggatgttggtcctagacccatccaaacggctaaccatagcccaaatcaaggagcataaatggatgctcatagaagttcctgtccagagacctgttctctatccacaagagcaagaaaatgagccatccatcggggagtttaatgagcaggttctgcgactgatgcacagccttggaatagatcagcagaaaaccattgaggtaaagtgatcagagatttcggggttctactgcacttagctacttgaaatttcatgctcacacctgtcatcctggtcttttagcacatgtatctccagcgcctaggcgtactgttcagtgttccctatagatgacatn

SEQ ID NO: 87284 - DNA, 396 bp, Homo sapiens
aaaaagccgcttattggattaatgtaatttctaaacaatggcctacctgcaccatacacattcaaggaaaaaaggttgagggcctagctgatactggggctgatgtttctattatttcctctaatttatggccttcctcctggcttaaacatcccactaacatgaaactagaaggtgttagaaaagctgaagaagttcaccagagcacatttatcttggcttgcactggccctgatggtcaaaagggaacaattcagccttatatcatgcccatccccattaatcttcggggcagagatttgctggcacaaattggggctgaaattaatattccacataacttttacagtgctcccagtcaacatataatggaaaacatggggtttgtttccagaa

SEQ ID NO: 87285 - DNA, 465 bp, Homo sapiens
  misc_feature (1)...(465): n = a,t,c or g
atcacttataaatatgggagtctttccctatcagttcgtaggaagatttctcaattcttttgacaggcatctactccatttatgtggacatagcacagtttattcaaccgttcttttatgtatagacttttagattgtttctaatatttagcaattacaaacaatgctgcaatgaaaacctctgctaaccttgtgagtgtttatttttatattgctataggagtaactttaggatagcatcctataagtgagattgccaggtcaaaaggtaagagcattttattttgttggatattgccaagttcctctccagaaggatgtatcaggttgaattcccaccagatcatcttgtatctcactgttcagaanatggattttttttctagatatgtcacattttctgaccttaattacaaattttcttttgaaacttttcacattcacgtttagatattttgactgagc

SEQ ID NO: 87286 - DNA, 382 bp, Homo sapiens
  misc_feature (1)...(382): n = a,t,c or g
ggaaaattaatatacctactcatactcttttttgattagtgttagcagtatacctttcttcattcctttacttttaatctattaatatatgtgtttatatgtgggtttcttgtagacagcataccattgggtcttgtttttccatccactccgagaatatctacgttttaattggtgtatttagaccattgatgtttaaagtgattgttgatgtagttgaattaatatctacaacattcgttactgttttctcttcattgccattgttctttgttcctgtttttgttctcacttgctttgtgccttttttggtttaaaatttgtggctttaattgagcatttatgtgagtctttgttcattcttttttagcatatcaattan

SEQ ID NO: 87287 - DNA, 384 bp, Homo sapiens
ctctttgatgagtttgacaaaaacagagagcccaggaccatgaggcttccgcctgctggacagcaaggacttccagtagcttctcagctgttttcccagtcactttcataagcaaggctgctatagctaattgatgtatgcaagatgtaattacagccattgatagggaaaatatcaccaatatgatgcccttggaagctcataaaaaagtcaaaaggctgtaccatgactctcacaatagccagatctgaatataaaatctagtctcttctggggatggagaaaaggaagtgtcatccatacaagatgaatttacactctgaaccccaggaggtcctgcacgtaggaagtgcctacaatccaagtaccatgctctttactgcc

SEQ ID NO: 87288 - DNA, 549 bp, Homo sapiens
gccatgaaagtatgggataatggattgggggaggaagtatttttaaaaagccttcttgagtttttatgcatattacatttttattcaataaaaaattccccattgttttattgaaatggattaggtggccgaccctctgaattagacatattcctttaaaaataagatccgttgtcagccatctaaaatgtttttataaattcatacttacattcttttttgccggttgcagtcagcctttagtgccaagagagaacattacagcatggatgaatgcaattggtttgatcatcactgccctaccagtgagttaataattgtgatttgtacttagtgatgaaatacagccagctgttccatgtcagcaaaaagaaaaagatgcatataggatgcccttgtacgggacgtcatgcaaattaatgaagtattttatgtttttaaagttttttcatattattactgctttaaaaatctacagtgactagtttttgcttttctgtattagatctaaatatatctatgtgacttacgggtctctgcattttctgg

SEQ ID NO: 87289 - DNA, 718 bp, Homo sapiens
  misc_feature (1)...(718): n = a,t,c or g
gaggtggcagcatagagatgatgggggaactgccccatgtgctaaggaaagctcacccatctgtgcgaaatgctctggttgacattgggtttttgcgcaccaaactgggccatgaccaagggttataaccaaggtgtctccgggcatgggcactttggctcttgtagaaaccaccccactggcaggagacggcggtagctgtggtcattgaaaacaagctcctgctgataaatctcagacaccagacacagaagaacctggagaccctgccagagagcttgaggcaaatggatggactgttggagcagctgagggtgaagcagcacaaactcctcaaagttgaatagcaaagcagccaccagagatggacaagaaaaatgaacaaagaaaattagcagaaatcaaaggcagatgctaaagcagtgcaaaatcattcattcaatgatagaaatgaaattgatgaaggagtctggaaaatgaatgacagaagagaattaaacagcagtgaccatagtaagggccttgacattctgggccactgaattccatcatccctatgacggtaaatatattcccaggccccccccccaagtttcccccacccgattttccttgttgtttccaaatggaataaggaagaatttcatcaccaagggccctttttttaataaaaaaaaannnnnnnnnnnngggggtatttttttttttggcggcggcc

SEQ ID NO: 87290 - DNA, 395 bp, Homo sapiens
attaaggtgatgctggcttcatagaatgaatgagggagggttccttctctatatatcttggggaataatggccacaggattggtaccaggtcttccttgaatgtatgggaaaattctgctgtgaatctgtatgggcctggactttttttatgttgcgaatttttaaatcatcatttaaatctcgctgctggctattggtctcttcaaggtatctacttcttgctgattaaactaggggtaagaatgtccccatggcctggaagcttaaggagatgtataactcctcgcttttcaagcccagtcccaaggcgcaaggccacttgcgtcagctgagtgtgcggcagcatgcaccatcacgatagctgaggcagaagaatagccagtcagaatacacg

SEQ ID NO: 87291 - DNA, 371 bp, Homo sapiens
gtctcatctctgccccacggctcctccaactgtatgctttattcatagaaaccccccaaatcaccgtgctaaccagctcctgtctaaacccggccacactcttacctgaagccactacctcccaagaccctgcacacttctgtgtggacactgttcaaacttttcttaccttttccacacctaacagcccaaccccttccagatgcctcctttacttggtttgtagatggcagctccttcctacatcaaggatgccaacatgctggctatgctatagtgtcacccacccacactattgaagctaatctggtccccctaggaaccacctcccaaaaggctgaactcatcgtcctcacttgagctctcactcg

SEQ ID NO: 87292 - DNA, 446 bp, Homo sapiens
  misc_feature (1)...(446): n = a,t,c or g
gggcgcagaacctccgggtctatcgacgagtccgcctactggctggccgtgggagcacctccctgcctgtgggcactcccagcctcctgggtgccgtgtcgtctgggtcggcagcctcagccacccctgacacacccacgctggtcgcctcgggagctggagactcagcccccgtggctgccgcctctgtcccggcaccacccgcctccatcatggagaggatctctgcaagcaagggcctcatctcgcccatgatggccaggctggctgcagctgccctcaagccctctgccacctttgacccaggaagcgggcagcaggtcaccccagccaggttccccccggcccaagtgaagccggaacccggtgagagcaccggcgccccaggcccccacgaagcctcccaggaccgcagtctagacctgactgtgaaggagcccaccaan

SEQ ID NO: 87293 - DNA, 850 bp, Homo sapiens
cccaaattggaagacttttaccgcttctcctgggaagacgtggacaacatcctcatcccagagaaccgggcccatttgtccccagaggtgcagctgaaggagctgctggagaaactggacctggtgagcgccatgcggtccagtggggcccgcacccgtcgtgtccgcctgctacgccgggagatcaatgcccttcggcagaagctggcacagccaccaccaccacagccaccatcactcaacaagacagtatccaatggggagctgccagcagggccccagggggatgcagctgtgctggagcaggccttgcaggaggagccagaagacgatggggacagagatgactccaaactgcctcctccgccaaccctggagcccactgggcctgcaccttccttgtctgagcaagaatcccccccggagccccctactctgaaacccattaatgatagcaaacctccaagcaggttcctaaagcccagaaaggtggaagaagatgagctcttggaaaaatcaccactgcagctagggaatgagcctttgcaacgcttgctcagtgacaatggcatcaacagactatccctcatggcccctgacaccccggccggtaccccacttagtggtgtgggtcgccgcacatcagtcctcttcaagaaggccaagaatggggttaagctacagagaagcccggacagggtcctggagaatggcgaggaccatggtgtggcaggctctcctgcctctccagccagcatcgaggaagagcgccactcccggaagcggccaaggagcaggagctgtagtgagagcgaaggggagaggtccccccagcaggaggaagagacag

SEQ ID NO: 87294 - DNA, 3145 bp, Homo sapiens
gggcggacggaggcggcggcggcggcggcgggagcgggagcgggcggcgagtggggagcggggccgggagtggagcagccgccgcggcgggactggaccgagcctcgccggcgcgcacctgcccgcagcgcccgcggagcgcgcagcgcggcccgagcgcgacgacctgccgagcggcggccgaggcggcggtgtgggcgcgtcaggccgcgacgagggcgctgagacaaatttacatgtattggagaccagaccagaagcccttctgaattaagatctcacattcttgaaggtggcattgaagagcactaagatcggaagatgagtgagcttgaccagttacggcaggaggccgagcaacttaagaaccagattcgagacgccaggaaagcatgtgcagatgcaactctctctcagatcacaaacaacatcgacccagtgggaagaatccaaatgcgcacgaggaggacactgcgggggcacctggccaagatctacgccatgcactggggcacagactccaggcttctcgtcagtgcctcgcaggatggtaaacttatcatctgggacagctacaccaccaacaaggtccacgccatccctctgcgctcctcctgggtcatgacctgtgcatatgccccttctgggaactatgtggcctgcggtggcctggataacatttgctccatttacaatctgaaaactcgtgaggggaacgtgcgcgtgagtcgtgagctggcaggacacacaggttacctgtcctgctgccgattcctggatgacaatcagatcgtcaccagctctggagacaccacgtgtgccctgtgggacatcgagaccggccagcagacgaccacgtttaccggacacactggagatgtcatgagcctttctcttgctcctgacaccagactgttcgtctctggtgcttgtgatgcttcagccaaactctgggatgtgcgagaaggcatgtgccggcagaccttcactggccacgagtctgacatcaatgccatttgcttctttccaaatggcaatgcatttgccactggctcagacgacgccacctgcaggctgtttgaccttcgtgctgaccaggagctcatgacttactcccatgacaacatcatctgcgggatcacctctgtctccttctccaagagcgggcgcctcctccttgctgggtacgacgacttcaactgcaacgtctgggatgcactcaaagccgaccgggcaggtgtcttggctgggcatgacaaccgcgtcagctgcctgggcgtgactgacgatggcatggctgtggcgacagggtcctgggatagcttcctcaagatctggaactaacgccagtagcatgtggatgccatggagactggaagaccattccaacttggacgcgttaccatgagagcatatcctatccaaccgtactaacgtggacaccctacacctcccctcagaacttcaaaagggcaagatcttttttccttcacttattgctgaaaccaagagcacaattcccattgagagaaagatctctgtgctgtaaactaaaacaaattgtgcattccttccggggccatcgtctttgttttcttttttgtcttgaatgaattttaaaaggaaatatataataaaaatgttaaccagaaggtaaacttgagtgtaattgtcagacagacacacttttccaccagtgtatttgaattttaaaccagtgaccctgttttgtggcattcatgcaaaacatgctgagggctttgttcatctggtcatcgtgtccaaatttcagtcatgtttgtagcaagattttggaagcattcatatttcctttttaaaatgtattcctttgtgttcaacagttaatcaaaaccagagagtctagggcagcctctctgatgttgtcaatgatgtaaattcagtccctggtttttaattttctgtctgatgtcacagatcattgttgcacacaaacgtggcatagaaaagaacatgttcagaagccatggggccaagcacatgcggggacggtctcaaatgcgtgatcagagaatccttcacctttgctgaaaagtgagctcagatccagcaccatgttcctcctgacccatcctgtctatcttctcagttgagtttttaatctcactttgggtttccttgtgaagttggagggaagtttataatagcctaacactaccccacccccaactaggaggaacctctgttttcaagagagatgcctgtcctgtgcttggatagtcagtcaattatttgtgtatgaaacaatgtacaaatcaatgttttgaaaataatgatctcagactttctaagttaaattttaaaaattttgattgtttgccatattgggtgggtttactcttagaatcgcatgctgtagaaatgctcaaaagtgcatatgggactcagtccttaggtgttctttttcttttaagaaataacctcttacagttgtaaccattgcggctctgtccacttctcgctgtccacttctcgttgctgctctgtggcacatatcggaagcagtacagcgcgcggctctacacgcttgggtagcgggataagtcactgttttctttatttctttaaaaaaaaaaaaagttctgttgcaaacgactgctgttggattctgagggtggggagggagagagagggagggagagggagtgaagagcctgccctcctatatggattcttcagggccctccacatctgaggtggctcattcccatcacacacagattgtcctggtgttcatttcaaggccagtgttcagcagcagcgtttggaaagcaggttctgtgggaccccccgccccgccccccgcactccttcatagcagcagtagtggcttctccatcctgttttctgcaacattctatacaaaactgtgctgtgaccttgcggtaggcctggatctggcaaagagaatacaaatgaaaccccttctttctctttccgtccaacaactctgtagagctctctgcacccttacccctttccaccttttgtatttaattttaaagtcagtgtactgcaaggaagctggatgcaagatagatactatattaaactgtactgttatttaagatgtaataaagcagtttgacatgagggaaaaaaaaaa

SEQ ID NO: 87295 - DNA, 419 bp, Homo sapiens
cgtcctcgtctacctccacctccatggccgtggcggtggcctcgggctccgcgcctcccggtggcccggggccaggccgcacccccgccccggtgcagatgaacctgtacgccacctgggaggtggaccggagctcgtccagctgcgtgcctaggctattcagcttgaccctgaagaaactcgtcatgctaaaagaaatggacaaagatcttaactcagtggtcatcgctgtgaagctgcagggttcaaaaagaattcttcgctccaacgagatcgtccttccagctagtggactggtggaaacagagctccaattaaccttctcccttcagtaccctcatttccttaagcgagatgccaacaagctgcagatcatgctgcaaaggagaaaacgttacaagaatcggaccatcttgggc

SEQ ID NO: 87296 - DNA, 479 bp, Homo sapiens
ggataggaccatgattactccaatgcttggcacgaggggctgaccagtgggcggctgtggcaagaagttcactacggtctataacctcagggcgcacatgaagggccacgagcaggagagcctgttcaagtgcgaggtgtgcgccgagcgcttacccacgcacgccaagctcagctcccaccagcgcagccacttcgagcccgagcgcccttacaagtgtgactttcccggctgtgagaagacatttatcacagtgagtgccctgttttcccataaccgagcccacttcagggaacaagagctcttttcctgctcctttcctgggtgcagcaagcagtattgataaagcctgttcggcttgaaaattcacctggcggagccatacaggtgaaagaccatttatttgtgactctgacagctgcggctggaccttcaccagcatgtccaaacttctagggcacagaaagaaacatgacgat

SEQ ID NO: 87297 - DNA, 2399 bp, Homo sapiens
ttttttttttttagagcaaatcaacttttatctccaccgaaaagacccattccactggaggggcccgtgagctagacggacttgccgtccagccctccaagccccctgcggggcggccaggaggatccctgagtccagcttgtaaacaccagagccagccctggagcctcaggcctctggagtcacggcagcccctccagacccttggattggggacatctgaggcttcacgagcccgggcagagctgcaccctgggctgtccactcggtcaccccagtaccagggaccacctcgaagcccccctctggtcggcccacagagacctgctcaggcttcagcaatcgtgagtcatgattcgtgtcttctggaggaagcaggcggaggctccagcggcccagcccaccccgcatcacaccaagactgacggcctcacttgtcctcacggtgtcctgattaaagcagagacgaggaggagcccagagccagttcagagcctgggccacttggcggttgccggtgctacgtgggcccttggaaaatgccacagacccagcaaggtgcctctgcccacccgaagtccccacaccagcagccatccaccctaggcaggggtccagataggcagagggtgggcttcggtgttgaacacgtaggcgtccaggctgagcaggtttgggtcatcggagaagagcaagaacagatacttgagcgtctcccccaggaagaagctctccatcttgtccctaggctcgggcttctgaggatcctggacattgttgatggaagaatagccacccgaggggacccgtgtgaatcggctgaagctctgcagaatctcccagccccagtcctggtatttgcggtcccctgtgacgcggtacaggtagaacaggctctccacggtctctggccgcagcaggttgtgcctgtctgctggcttgacctccacgtcccgacggcccggctgggggtaaaggttgaagtgcacgatctcgggactcagccccgtctccatctgccggttcatctggtaacaagtctccatgagctcctgggccagctccatgtggctggcgggcaggccgtggtagacgcccagagccagcgtccctggcaggaagcacaccaggtggtccatcttggcactgaagcggccgtgggcaagctcccccacaaaggtgagcttactgggctcggagtgccgcagcaggtgcgttctgacaccctcgatggcttccacgtagtcttccagcagctgtgtctcctgcttcccgccctggatccactgcttcagcaggtactcatagtagctgtcggccctggcgcccagcgtgaatacgcccaggtgggtgaagaggccactgtgggtattgatgaacatgggcaccagcccatccttcttcccagacaggccgtggatgtgctgtgtcaccttctccactgcctcctgaaacttcttatcccctgtgagacgggagagctcccggaactccagctgaatgctggtcacctcggccacagtgctgtcggaggtccaccgtggcgggtgggcaactccagtaccgatgttcacatccgagtaaggaatcttggatggtgttctgaaggcaggcattagccgatttccaaaatcctcagctttcctcaggaagaggctgtccccagacaggtggtaggcactcaggagcccccccaggatgcggatcgtgctctcaaacaggttgacgtccacgtccttttcaaagtgtaacttcttcgacacccacttcctggcttcctcaaattctttcctcagacccaagatccacatggtgtccagcgcgtcgatcagtgtgagaccgaggccaaaccactcactgaaggacctggacacaggcttcagctcgtcatggccccatgcaaacttgcggtatcctttccatgcatgcaggagaacgtcaatcacgcccttctggcgatagttcagaatgcactggtgtgccctgtgtcctggccggtggcaggggaggcttggtgggcacttctgctcttcttgaagggagctcggtgccctgctcaggctcgatcaccgctcccctccagcttcgggggagaaggaagggtgtcagctgccgtcaaacatttgtggctccatgtttcccacccccacgctccatacccacggccaaggcacagccctgcacccaaagcggccccatcatcctgaggtgcaggctgctgagtggcaggaaacacacagttcagtcctgagctcccgtgcctgagagccaagaccacagcactgctccagggtcaaggctggcctgaggtcagagaccagagcttggagaatcgtgagaaatccctctgcagaggccggaggcggggggcctctatggtggaggagtagagaatcttt

SEQ ID NO: 87298 - DNA, 836 bp, Homo sapiens
ttttttttttttccactctacagagtttattgggtttgtaactggacgaagtcacacgtgtacaaaatgaagctcacactatcccaaagcagagtagggactgaggccggggatccattactggcctttgggggagctctgaggtgaggggcaaccaaccctcccactccagagctgtggccacaggggtgggaaggaaagggaacccacctggctttggtcacagaactcagagcctggcattaggccaggacagacaggtggatgggagagcaggagcctcagaactcccctgcccagggagcccaggggctgctccaccggtcccacttgtaatgtgcttggcccagacctagactcgggctggtgcaaagggaaggcagcaaagcaggagggaggagacactgatgtgtggtgggggagggagcggcacctggacctgtggaggagggtggctggggaggtgggctagctgcctagtggcagctagcagcgagtttcataaatgccacttgcggccaattttagcgcacccatttgatgacattatggtcgctgtagttcagcttcggttcaaacacccttcagtagcgcaccttgaggccagagggcgcgaatggcacctcaagttcatggaaatggggggtccagcccatttctttctagtcgttgtaggcagaagcttaatctctgggcctatctgggattcttcatgcctgccatgcgcttgatctttccacgatggcattcaagctagccttggtacttggccttccctttattgagatcaacctcacccccgcttgttttcagggggttgaggatcccacctcaat

SEQ ID NO: 87299 - DNA, 395 bp, Homo sapiens
tgtggtgtgggtggcagtgtgcactgatggagtggagagggtgtcagaatccggtgtttgtgtggtgggaaggaattgactgctggctagagaatgaggagcgctgaaacctttgcaccattgcagtggacccgctgagaagggtgttctggggaggctgctctggtctctcgatggagtcaggattgggggacagatagacaccccggtgtgagccagtgatggtatagatgagggaggcagtgaggacaggctcagggagggaagtcttgtctctagacctgagaccaggaagcaggaatggactggacaggttggcccagctgagggaggtgactggtgagatgggtcctcggtgtgaggggctgggttgccaaaggagctgtgggctgggg

SEQ ID NO: 87300 - DNA, 1768 bp, Homo sapiens
  misc_feature (1)...(1768): n = a,t,c or g
tttgtagacactagtccatgtggaggaattcgaacatctccatgtgcagtctcatctcttatagtcagcaacaggtatccacggggagggccctacatcatctgctaccctgaaggatctggaggtaggaggctctgggcggaggtgcagtgaccccgcaagccagccctccaacctcctcccgcagcggggactgggtgcccctctgccagctgagacagcccacacacaacccagccctaatgatcgttctctctacctctcccccaagtcctcctccgcctcctcctctctgcatgcgcgtcagagcccgtgccaagaacaagcagcagtcctgaactcgaggtccataaaaatcagtcgactgaagaacaccatcaaatctttgaaacaacagaagaaacaagtggaacatcagctggaagaagtaacgtgatttcgtttcctcgcgacatgactgctgggtttggggggcactcagacatagaggccccagtctcgtctcacccactcccagcctggggaagaaggctgacccctcagattccaccccatccccacagggcccctgataacctggtcccatgggtgggcctgtcctggggcattggtggcattctgggggcatgtctcttgctgtgccatctctgcctccccctggtaagagctctgtcttcctcttcctacaggaaaagaaagcaaacaacgagagacagaaagccgaaagggagctagaggttcaaatccagacattgatcatacagaaagaggaactaaatacggacctgtaccacatggaacgttctctcagatactttgaagaagagtccaaggacctggctgtccgcctgcaacattcattgcagtgtaaaggagagttagagagggctctctctgctgtcatcgccacagagaagaagaaggcaaaccagttgtccagctgcagcaaagcacatacagagtgggagttagagcagtccctacaggaccaggcactgctgaaagcgcagctgacacagttgaaggagtcatttcaacaactccaattagaaagagatgagtgtgctgaacatatagaaggagagagggcccggtggcatcagaggatgagtaaaatgtcgcaggagatttgcacattaaagaaagagaagcaggatatgcgttgggtagagcagctggagtggagcttgtccaaactcaaaaaccagacggctgaacccttgcccccggagcccccagcagtgccctctgaggtggagctgcagcacctgaggaaggaactagagagagtggcaggagagctccaggcccaggtcaaaaacaatcagcacataagtctcctgaaccggcgacaagaagagaggattcgggaacaggaagagaggcttcggaagcaggaggagaggcttcaggagcagcacgagaagcttcggcagctggccaagccacagagcgtcttcgaggagctggtgcgttgccccaactggggagcctgccctcctccctagccctccgggcctttgtttccccacctctaaaatggggcagtgtagccctcgcgtgaaaggttacttctaaaggcacctgtgagccaggtggctgtgggagaaaagggtgnntntnntatnntnnntnnannnnttttagtgttatgtatgtatattntaatatntattatttttatttatattttttttttgttaaattttttttttgtataataaattatataaaaaatataatttattttaatattaatttaaaaaaa

SEQ ID NO: 87301 - DNA, 6305 bp, Homo sapiens; identical to SEQ ID NO: 72492

SEQ ID NO: 87302 - DNA, 433 bp, Homo sapiens
  misc_feature (1)...(433): n = a,t,c or g
aaaggtaaaatcttaaaaagcatccaaaggaaaaaagataatatgcgtaaagaaacaaagaaaagtatatcagcagatttctccttagaaacagtgccagcaataagacagtgggaccacatgttaaaaatactaagcaaaacaaaacaaatgcaaaaatgtctctcaaaaactaagatgaaatgcttttatagacatacaaaagctaaaagaattcatcactaggagatctggattactgaaaatgttaaaggaagtcctaaggaagaagcaaaataatacttcacagaaatatgaatctgctctatgcaaaagatttggggagcgtggcaaatggtacctatgtgggtaaaaatgtaataagagtacaattctgtattcttcaagtcctttctttgcttatcactttggtggggttctcttcctctgtagn

SEQ ID NO: 87303 - DNA, 425 bp, Homo sapiens
ggccctactgctccttgcagccatgctcctgggcgacaccaagtctggacttctctcgtctgagccctgagtactacgacctggcatgagcccacctgcgtgatgaggagaaatgctgcccgtgcctggcccaggaggacccccagggtgacctgttgaccaaaacacaggagctgggccgggactacaggacctgtctgacgatagtccaaaaactgaagaagatggtggataagcccacccagcatgctggcactgcaggctatgcacttatccctggatacccagattcatcctcctcccctgtgatggcatataacagactttataaccatgtgagccatgacttcaagctctgaccacacctgccacccccaccagtcttctctatgcaccccctgtatctggagcccccagacaggacc

SEQ ID NO: 87304 - DNA, 429 bp, Homo sapiens
catggctacctgggccctcctgctccttgcagccatgctcctgggcaacccaggtaaggccttcccctcgggatcgatcctgatggcccacccagcctcgcactctcaggctggctgaacctggagcttggactctgtgggcacccaggtgcccctgcctccccccggccttctcccccgtcatggaggcctggccctcccctcagagccaggcttagtccggtgtgctgcccagcctgtcactggcctggccaaggaggagagacaggccagggattctggtcctaactctactggccacactgtgtggcctgagacccccctttccctcccaagcccctgcctccgcatctgcgtggtgaaggccattggccctcatcggtggatctgcggttcctcgggcctacactgtctaggattgtgcggggg

SEQ ID NO: 87305 - DNA, 473 bp, Homo sapiens
ttctgggtcgattacgcgtccggagacgcagagccttccctccttctgggctgtactcaaaatcagcagcttttcaggccgctcagtaaaccagctggagcaacacacgcaaatgagaaatgtgttgtcttcgaagtccagagaggcctgctagatgttatgcctcttttttgatgcaggaggcgccagattcaacaatttatccttcaccttagaaaggatatctccatataccctacaacactggacccctagaaatttcactgagatagaaggcccctaaatttttgtcagatttatttcccactttttgacacacaaatgtcttaccaataagtttagagtggttgttaacttctcactcactagttacaatcagcaaaatatcgtcaacataatgggccagtgtgatattaatatcctatggaagggaaaggtgatcaagatttctgtgaactaaattataatacagg

SEQ ID NO: 87306 - DNA, 430 bp, Homo sapiens
cggcattcttgggtcgacccacgcgtccggggctggacaccttctctgtggtccaggctcagggattggtccagggccgcccaccctcccccatcccccaggccgaacactgacctctggtgccaggctcctcactgccaaacccatgactcccaaacccactgctgtcactgggggcctctcatccagccagcgccgggcagctctgattccagaaccttcccggcacgttcctgacctccaggccagtctgcagctacctccacttcccaccgtccccaggagcagccagcggccctccctgcccacacctgtccttcccagctcactcaggtccggccgccaccctgagtccccggggccacttccctccttcgcaggcaaccgaggccacttgcagtgggaggggaaccgctgtatggaccagccc

SEQ ID NO: 87307 - DNA, 446 bp, Homo sapiens
  misc_feature (1)...(446): n = a,t,c or g
ttcccttcttgacccacgcgtccgctggatggctcatgacaggtggtgctacagtcccgagactatcaatgcactctccatgtctgngatggcattcgtggcggggatctacccactggaatatatgtttcctgtcatcccgctgctacccacctgcatggcatcagcagagcaggtgagtctcaaggcgacttccggctttctcacctctgtcttcctgagggaggaggcttaatgctcaaagaagttgtaagtgagtgctggtcctcaatcctttgtcataacttatttgtctacaaaatctgactgatttgaactgatctggtggcaaggcttatgctattttagttttcatttatcacaacaaatgttaatgactgtaggccactggctacactgcagcaggngttacgtgtgttacgtaatacagtagttcctccttatct

SEQ ID NO: 87308 - DNA, 483 bp, Homo sapiens
  misc_feature (1)...(483): n = a,t,c or g
ctgagtcgacccacgcgtccgcttgttgggggcggtgccgggctgggcttcgcgagtagcggtcggaggcggagtgtagccccaaggggctgccggcgtgcangggaggggttcggctgagcgggaaaagggaagtttgcgggaggtcaaaaccaccggggccctcccgtatggctgctgctctgaggcctgcctctggtcgccctggcggctgcccccgtgcttcctcatttcttgttgactgttcaggagcaccaggctgctcgcgccagtgccccgaccgcattctcgccgagtaatggggaggaggcggacgccggtgctgcgcggcccagggctcgggagggcccgggtgagcccgggtggagcccagcggcatccttgtcaacacatccagacggctctagtgtcgggccgcgggcttgaaactgagacgcgcgcccagggcctgcccctncgaaacgagggtgccaagtggggctg

SEQ ID NO: 87309 - DNA, 5662 bp, Homo sapiens
ggcgccgctggatggagaggttgagttgttacaacaaaagttgagagaaaagttggatgaatttaatgaattggctatacagaaagagtcggcagatagacaagtgttaatgcaggaagaagaaattaaacgtctggaggagatgaacatcaacatcaggaaaaaagtggcccagctccaggaagaagtggaaaaacagaaaaacatcgtgaaagggctggaacaggataaagaggtgttaaagaaacagcagatgagtagcttgcttctggcgtccacgttgcagtctacactagatgcaggcagatgtcccgagcctccttcgggcagccctcctgagggtccagaaatacagttagaggtgacacagagagcactcctgcggcgcgagagcgaggttttggacttaaaagaacagctagaaaagatgaaaggtgacttagaaagtaaaaatgaagaaatactacatctgaacttaaaattggacatgcagaacagccagactgctgtcagcctcagagaacttgaggaagagaacacgagcttgaaggtcatatataccagaagttctgagattgaagagctgaaagccactattgaaaatctgcaagagaatcagaaacgattacaaaaggagaaagcagaggaaattgaacaactccatgaagtcattgagaagctgcagcacgagctgtccctcatggggcctgtggtgcacgaagtcagcgacagtcaggctggcagtctgcagagcgagctgctctgctcccaggccgggggccctcgtgggcaggccctacagggcgagctcgaggctgcgctggaagccaaggaggccctgagccggctgctggctgaccaggagcgcaggcacagccaggccctggaggccctgcagcagcgcctccagggcgcagaggaggctgcggagctacagctggctgagctggagcgcaatgtagccctcagggaggctgaggtcgaagacatggcctcccggatccaggagttcgaagcggccctgaaagcaaaggaagcgacgattgccgagagaaatttagaaatcgacgctctgaaccagcggaaggcggcccactctgccgagctggaggccgtcctgttggccttggcccgcatccgccgcgccctggagcagcagcccctggcagccggggcggcgcctcccgagctgcagtggctccgagcgcagtgtgcccgcctcagccgccagctgcaggtgctgcaccagcggttcctgaggtgccaggtggagctggacaggcggcaggcccgcagagccacagctcacacacgggtgcccggggcccacccacagcctcgcatggatggtggcgccaaggcccaggtcaccggcgacgtggaggcctcccatgatgctgctttggagccggttgtccctgacccacagggtgatctgcagcctgtcctggtgacgttgaaggatgcacctctctgcaagcaagaaggcgtgatgtcagtgctcaccgtctgccagaggcagctgcagtcggagctgctcttggtgaaaaatgaaatgcgcctgagtctggaggacggcggcaagggtaaagaaaaagtactggaagattgtcagctgccgaaggtcgatctcgtagctcaggtgaaacagcttcaggaaaaactgaaccgtttgctgtattccatgaccttccagaatgtggatgctgccgacaccaaatctctgtggcccatggcctcagcacacctgttggagagcagctggagtgatgattcctgtgacggagaagagcctgacatatcaccccacatagacacatgtgatgccaatacagccacggggggtgtaactgatgttatcaaaaatcaggccatagacgcgtgtgatgccaatacaaccccagggggtgtaactgatgttatcaaaaattgggattccttgataccagatgaaatgccagattctcccattcaagaaaaatcagaatgtcaggacatgtctctttcttcaccgaccagcgtacttggtggctcccgccaccagagccacactgcagaggctgggccccggaagagcccggtcgggatgctggacctgtcttcctggagctcccctgaggtcctcaggaaggactggaccctggagccctggcccagcctccccgtgacaccccactcaggagccctgagcctgtgcagtgccgacacatccctgggggacagggcggacacctcgctgccacagacccaggggccggggctgctttgttccccaggcgtgtctgcagcagcgctggcactgcagtgggccgagtctccgccggctgacgaccaccatgtgcagaggacggctgtggagaaagatgtcgaagattttatcacaacatcctttgattctcaagaaacattaagttcacctcctcctggattagaaggaaaagctgatagaagtgagaaaagtgacggctcgggttttggagcaagactgagcccggggtcaggaggccctgaggctcaaactgctggtcctgtgacccctgcttccatctctggaaggtttcagccgctgccggaagccatgaaggagaaggaagtgcgtccgaagcacgtgaaggctttactgcagatggtgcgtgacgagagccaccagatcctggcgctgtcagaaggccttgcacccccaagcggcgagccacacccaccccggaaggaagacgagatacaggacatctcgctccatgggggaaagacgcaggaagtgcccaccgcgtgccccgattggagaggggaccttctgcaggttgtgcaagaggcctttgaaaaagagcaggagatgcagggggttgagctgcagccccgactcagtggctcagatctggggggtcacagctccctgctcgaaaggctggagaagatcatccgtgagcagggagacctgcaggaaaagtccctggagcatcttcgcttgccggaccggagcagcctgctgtccgagatccaggcgctgcgtgcccagcatgcgcatgacgcacctgcagaaccaggagaagctgcagcacttgcgcacggcgctgacaagcgcagaggcgcgcgggagccagcaggagcaccagctgcgcaggcaggttgaactgctggcttataaagtagagcaggagaagtgcattgctggggacttgcagaagacgctgagtgaagagcaagagaaggcaaacagcgtgcagaagctcctggcggcggagcagactgtagtgcgagatttgaagtccgacctctgtgagagcaggcagaagagcgaacagctgtcccggtccctctgcgaggtgcagcaggaggtcctccagctgagatccatgctgagcagtaaggagaacgagctgaaggccgcgcttcaggagctggagagtgagcacgggaaggggcgtgccctgcagagccagctggaggaggagcagctgcggcacctgcagagggagagccagagtgccaaggccctggaggagctgcgggcgtctttggagacacagcgtgctcagagcagtcgactctgcgtggcactgaaacacgagcagacggccaaggacaacctgcagaaggagctgcgtatcgagcactcacgctgcgaggccttgctggctcaggagcggagccagctctctgagctccagaaggaccttgcggctgagaagagccgcaccctggagctgtcagaggccttgcggcacgagcggctcctgaccgagcagctgagccagaggacacaggaggcttgcgtgcaccaggacacacaggcccatcacgctctgctgcagaagctgaaggaggagaagtcccgggtggtggacttgcaagcgatgcttgaaaaggtgcagcagcaagccctgcattctcagcagcagcttgaggctgaggctcagaagcactgtgaggcgctcaggagagagaaggagcgagaattagaactgcagcgtcagcgtgacttgcataagatcaagcagcttcagcagacagtgagagacctggagtcgaaggacgaggtgcctggcagccgcctccacctaggttctgcccgcagggctgccggctcggatgcggaccacctccgggaacagcagcgagagctggaggcgatgaggcagcggctgctctctgccgcccggcttctcaccagcttcaccagccaggccgtggacaggacagttaatgattggacgtcatccaatgagaaagcagtgatgtctttactgcacacgttggaggagctggagtctgacttgagcaggcccacctcctcccagaaaaaaatggcagcagagctgcagttccagtttgtggacgtcctgctgaaagacaatgtttccctcacaaaagcgctcagcacggtgacccaggagaagctggagctgagcagagccgtgtctaagcttgagaagttgctgaagcaccatctgcagaagggctgcagcccaagcaggtcggaaaggtctgcttggaagccagacgaaacggctccacagagttccctgaggcgcccagaccccggccggcttccaccagctgccagcgaggaagcacacaccagcaatgtcaagatggaaaaattgtacctgcattacttgagagcagagagctttagaaaagctctgatttatcaaaagaagtatcttttgctgttgattggtggattccaggattctgaacaagaaacactctccatgattgcccatttgggggtatttccttccaaagcagaacggaaaatcacatctcgtcctttcaccaggttccgcacggccgtcagggtggtcattgcaatattaagattacgttttttggttaagaaatggcaagaagtagatcggaaaggagctctggcacaaggcaaagcccctcgcccagggccccgagcacgacagccgcagtctccacccagaaccagagagtcccccccaacccgggatgtaccctctggccacaccagggaccctgccagaggccgcagactggcagcagcagcctccccacacagtgggggaagagccactccatccccaaattcaagattagaaagatccctgactgcttctcaagatccagaacattccttgacagagtatattcaccatttagaagtgatccagcaaagattgggaggggtactaccagattctacttcaaagaaatcctgccacccgatgattaaacagtgaataaaatgtcatggctctttcctgcgacaattctatttgaggaaaagatttgtttttcccttttcccaaggaagctcgtgggacagcatgggcactactcttcatgtgcggtgacaccagcccccagatgccttgaattaagtgtcctcacctttatgcatgactgcaaagccagctggagcattttctatggagcctccgtatgttttaggcccatgaccttcgtgaggtgacgggcactcactcccatgagccctggctgtgtgctgttgtgtgcctatcggcagatccatccttcctgcctccaaggaggatacacagagaatggcttcctgttgttttgtttattttcttaacgtgtacagatggaaacttcatttaaaaataaaaacaaaacaactcaaaaaggaataaaatttaatcactgttttgtttgtgaataaaaaaaaaaa

SEQ ID NO: 87310 - DNA, 426 bp, Homo sapiens
  misc_feature (1)...(426): n = a,t,c or g
ccgggtcgacccacgcgtccgcccacgcgtccgcggggcacggagggcggtggcggcgggctcctgcgagaagcaagcggaacttcctgaggtgactgacgcgggcctcggttctgggcgcaggggtgtggggctggaggagtggccgcgatccccgtctgcacccaggtgcctcttttttttcctgcgctcctgggggctccttccaggtgctccagcagctgcccggggatcagggcccggtccgctgggcgaggagctggggcgggggctgtgcggggcctgtcacccccgtcttctgcagctcggtgtcgacggcgattcggtgggcttgtgcgtttgttttgtcagcgtgcttaggtgtcacagctgggtgaccctccgaaggaaggttttgccgctggcgcgtctggtgtatcgcggccn

SEQ ID NO: 87311 - DNA, 504 bp, Homo sapiens
tatatgtactcgggaacgttcgtcctttaggttttctcctggcgcatgggcgccgccaatcatttcggggcttattttggttctaaagcccggggcagccaggcctccctgcctggcctcggcggggacgcgggacctggggccccggaccgggcctaaccgccctggccggtccccactgatggtggcggtcggtcctgatcgtcctgatggcagcgaccaggctggactcgggctgtgcaggggcgaggggagcagggcggggtgacgcccggagagcggcctggagagcgcgtgcttcagaaggcgtgggcaccctgtcccctttgcagatggggatgcaggccctggtggcggtggaggggagatgggggcagggacgttgccgggcagaggaagctggccattcctgggggattcctgggagccatgtgggagaggcgtgaggaagtgagaccttcaccccgagacaggtcctgacacaccctctggtgcctctactcg

SEQ ID NO: 87312 - DNA, 4118 bp, Homo sapiens; identical to SEQ ID NO: 64088

SEQ ID NO: 87313 - DNA, 387 bp, Homo sapiens
cccacgcgtccgctttttgttcatataataatagactagtaagaaaatcactccttgaaaactgtgagatcatagccttttcctatcataacaaattacgcttatgcatgcctactgcattagaacatcccaacacagctgttctgtctttggcatccttaattcctgtaggagctgtctcatcagctgtggccagtgtcgttctgggaccatacaccaaaacagtgatgttttaacagcattatagacttgttctggcatcagatttccatcagcgatgaccttggcaaattcatcagtgaattgctctgctccttcatggtcagcagatgctttctcactgtataaatctttaaaacaaattgaattccatgtttaagtttctac

SEQ ID NO: 87314 - DNA, 2304 bp, Homo sapiens
acatgtactgcacagagcccttccggatcccctttgctggcaaggtcgaaggttgggttgctttgacaaagacgggaccgttgaccagggacagctgggtggtgcgcggtgtatcccggcctattagcgggaaggaggtgaccgcagtgtccagcatccctgtagaaacaccccgggccctggcctagtgccactcgctcatgcagctggacgacggcaccctcgtgggtgaccctctagagaaggccatgctgacggccgtggactggacgctgaccaaagatgagaaagtattcccccgaagtattaaaactcaggggctgaaaattcaccagcgctttcattttgccagtgccctgaagcgaatgtccgtgcttgcctcgtatgaaaagctgggctccaccgacctctgctacatcgcggccgtgaagggggcccccgaaactctgcactccatgttctcccagtgcccgcccgactaccaccacatccacaccgagatctcccgggaaggagcccgcgtcctggcgctggggtacaaggagctgggacacctcactcaccagcaggcccgggaggtcaagcgggaggccctggagtgcagcctcaagttcgtcggcttcattgtggtctcctgcccgctcaaggctgactccaaggccgtgatccgggagatccagaatgcgtcccaccgggtggtcatgatcacgggagacaacccgctcactgcatgccacgtggcccaggagctgcacttcattgaaaaggcccacacgctgatcctgcagcctccctccgagaaaggccggcagtgcgagtggcgctccattgacggcagcatcgtgctgcccctggcccggggctccccaaaggcactggccctggagtacgcactgtgcctcacaggcgacggcttggcccacctgcaggccaccgacccccagcagctgctccgcctcatcccccatgtgcaggtgttcgcccgtgtggctcccaagcagaaggagtttgtcatcaccagcctgaaggagctgggctacgtgaccctcatgtgtggggatggcaccaacgacgtgggcgccctgaagcatgctgacgtgggtgtggcgctcttggccaatgcccctgagcgggttgtcgagcggcgacggcggccccgggacagcccaaccctgagcaacagtggcatcagagccacctccaggacagccaagcagcggtcggggctccctccctccgaggagcagccaacctcccagagggaccgcctgagccaggtgctgcgagacctcgaggacgagagtacgcccattgtgaaactgggggatgccagcatcgcagcacccttcacctccaagctctcatccatccagtgcatctgccacgtgatcaagcagggccgctgcacgctggtgaccacgctacagatgttcaagatcctggcgctcaatgccctcatcctggcctacagccagagcgtcctctacctggagggagtcaagttcagtgacttccaggccaccctacaggggctgctgctggccggctgcttcctcttcatctcccgttccaagcccctcaagaccctctcccgagaacggcccctgcccaacatcttcaacctgtacaccatcctcaccgtcatgctccagttctttgtgcacttcctgagccttgtctacctgtaccgtgaggcccaggcccggagccccgagaagcaggagcagttcgtggacttgtacaaggagtttgagccaagcctggtcaacagcaccgtctacatcatggccatggccatgcagatggccaccttcgccatcaattacaaaggcccgcccttcatggagagcctgcccgagaacaagcccctggtgtggagtctggcagtttcactcctggccatcattggcctgctcctcggctcctcgcccgacttcaacagccagtttggcctcgtggacatccctgtggagttcaagctggtcattgcccaggtcctgctcctggacttctgcctggcgctcctggccgaccgcgtcctgcagttcttcctggggaccccgaagctgaaagtgccttcctgagatggcagtgctggtacccactgcccaccctggctgccgctgggcgggaaccccaacagggccccgggagggaaccctgcccccaaccccccacagcaaggctgtacagtctcgcccttggaagactgagctgggacccccacagccatccgctggcttggccagcagaaccagccccaagccagcacctttggtaaataaagcagcatctgagatttta

SEQ ID NO: 87315 - DNA, 5116 bp, Homo sapiens
aagacaatgggaagcccccgtcctccgccccgtcccggcccagacccccgcggaggaagcggagagagtccacctcggcagaagaggacatcattgatggatttgccatgaccagctttgtcacttttgaagcgctggagaaagatgtagcacttaagcctcaggaacgtgtggagaaacgccagacgcccctgaccaagaagaaacgagaagcacttaccaatggcttgtcctttcattcaaagaagagcagactcagccacccacaccactacagctcagatcgagaaaatgaccgcaatctctgccagcaccttgggaagagaaagaaaatgccgaaggcactcagacagctcaagccaggacagaacagctgcagggacagtgacagtgaaagtgccagtggagaatccaagggcttccaccggagcagctctcgggaaaggctcagtgatagttcagctccttccagcttgggaacaggctacttctgtgacagtgacagtgaccaggaagagaaggcatcagatgccagctctgaaaaactcttcaacactgttattgtaaacaaagatccggagttaggtgttggcacgctaccagaacatgacagccaggatgcagggccgattgtccccaagatatcgggtctagagagaagccaggagaagagccaggactgttgcaaagagccaatctttgagcctgtggtgcttaaagacccctgccctcaggtcgcacagccaataccccagccgcagacggagccccaactccgagctccttctccggaccctgacttggtgcagcgcacagaggccccacctcaacccccacctctgagtacacagccaccacagggccctcctgaggcccagctccagcctgccccgcagcctcaggtgcagaggccacccaggccacagtcccccacccagctgctccatcagaacctcccacctgtgcaggcccacccctctgctcagagcctctcccagccattgtcagcctacaacagcagtagcttaagcctcaacagtttaagcagcagcagaagcagcactccagcgaagactcagcccgccccacctcacatctcccaccacccctctgcctccccgttccccctctccctgcccaaccacagccccctgcacagcttcacacccaccctccagccccccgcacactcacatcaccccaatatgtttgcccctcccactgctctgcctcctccaccaccactgacatcaggaagtctgcaggtggccggacacccggccgggagcacttactcagagcaagacatcttgcgacaggaactgaacactcgttttttggcctctcagagtgctgaccgcggggcttccctgggccctccgccctacctgcggaccgagttccatcagcaccagcaccagcaccagcacacccaccagcacacgcaccagcacaccttcacgccgttcccccacgccatcccacccaccgccatcatgccgacgccagcacctcccatgtttgacaaataccctacaaaagttgacccattctaccggcacagtctcttccattcctatcctcctgcagtgtcgggcatcccccctatgatcccacccactggcccttttggttcactacaaggagcatttcagccgaagacatccaaccctatcgatgtcgctgctcggcctgggacagtcccacacactttactccaaaaggacccgaggttgacagatcctttcagacctatgttaaggaaaccagggaagtggtgtgctatgcatgttcacatcgcctggcagatttaccaccaccaacagaaagtcaagaaacagatgcagtcagacccacataagctggactttggactgaaacctgagttcctgagccgccctccaggccccagtctttttggagccatccaccacccccatgacctggcacggccttcaactttgttctctgccgctggtgctgcacacccaactgggaccccttttgggccacctcctcatcacagcaacttcctcaaccctgctgcccacctagagccttttaatcggccgtctacattcacaggcctagcagcagttggtggcaatgccttcgggggacttggaaatccttccgttacacccaactcaatgttcggccacaaggatggccccagtgtgcagaactttagcaaccctcacgaaccctggaaccggctgcaccgaacgcctccgtcgttcccgacccctccgccctggctgaagccaggggagctggagcgcagcgcgtccgctgcagctcatgacagagatagagatgtagataaacgagactcatctgttagtaaagatgacaaagaaagggaaagcgtcgagaagagacactccagccacccttcaccagcacctgtcctcccggtgaatgccctgggacatacccgcagctccactgaacagatccgggctcatctgaacactgaggctcgggagaaggacaaacccaaagagagggagagagaccactcggaatcccgcaaggacctggccgccgacgagcacaaggcgaaagagggccacctgcccgagaaggacgggcacggccacgaggggcgcgccgcgggcgaagaggccaagcagctggcccgggtgccgtctccctacgtgcggaccccggtggtggagagtgccagggcccaacagcacctcgagccgggaggccgagccgcgcaagggtgagccggcctacgagaaccccaagaagagctccgaggtcaaggtgaaggaggagcggaaggaagaccatgacctgcctccagaggccccgcagacccaccgggcctcggagccgccgcctcccaactcctcgtccagcgtgcacccggggcccctggcctcgatgcccatgacggtgggggtgacgggcattcaccccatgaacagcatcagcagcctggacaggactcgcatgatgacccccttcatgggcatcagccccctcccgggcggagagcgcttcccgtacccttctttccactgggaccccatccgggaccccttgagggatccttaccgagaacttgacattcaccggagagacccgctgggcagggacttcctgctaaggaacgacccgctccaccggctctcgactccccggctgtacgaagccgaccgctccttcagggaccgggagcctcacgactacagccaccaccaccaccaccaccaccacccgctgtctgtggaccctcggcgggagcacgagcggggaggccacctggacgagcgggagcgcttgcacatgctcagagaagactacgagcacacgcggctccactccgtgcaccccgcctccctcgacggacacctcccccaccccagcctcatcaccccgggactccccagcatgcactatccccgcatcagccccaccgcgggcaaccagaacggactcctcaacaagacccctccgacagcagcgctgagcgcacctcccccgctcatctccacgctggggggccgcccggttcttttccagaaggacgacttctcttttcgcagagataaggggagaggcccccttcccacacgctgaaggatatcgaggcccgataagccgagaacaggagcaagaacgaggaagaagaaaccctaggcagacaccaggccaggcttgagagacagaactcctgcatggctcacacagactgggggggaaagccccaccccttccccttgtaaaaaatgtatagactcagtgcacattttgaaatgttttgtatattatatgttgagatttttcagatcttttagcccagtcatatgttctcacgtctcctactttttgtttctcgtataaaactttttgatttgaaccaaaacagtgaagatgacaacacacaccaattggatgataattgtagcgggggcggtggggggggagaagtccacgccatccatcatgcaaaattctttcagatgaggtgggaaggccgtgtacatagttatgtaaaaagagattgcttcatgagctaatggttcatatatgcaaaagggtaagatgaaagctttactttgtacaaatgtaaatagataaagtaacataatacattaatacttcttaaaatgtgctatttgcaaacttacttaatatcagtgaacacagtcggctaaagctgtgttcccatatattgttatagacagctaaacccttcaactatgcaatgaatgttcgggcttttcacaaaagcccgcctaactcaaaggagccttttcaaatccatttacagcatacttaaggtcatattttccctgaacaagcgcttacgtgatatgactctgttttccttgcttgttttttttcaaacggagaaacatcctgttttgcaaattggaccccaggctggaacttagcatctgaagttgccgcttgtgggctctgggggaaagtgtagccccggagaggtaactgaggacatgagcaaccagtgccagggagggtgggatttgccagatgccaaaatcaggggacgggtggtggtgtctgtcagacacacacaggtcgccagtgacttcacacacacctcatgtgagaaccatgccttttttagtgtgtcctatttcatacctgtacacacttcctcgttttgtaatgagatttacttacacccaaacagatcctgaaagaaagcttcaagttttctcagatgatggatatgttttcactgtattcaataactgacggatgtaaggtgcacgtttcctgatgtgacgcactgtattccagctggtgatcaagtctgggaacagccgtaacaggtcaaccttgtggagccatcgcgagttagagggtgaaagatggcagaaaaaaaagtcttgtgtgtgagtgtgttttttgagtttgcatcaatcttaatgtctcttcataatacttttataatacattaagcctcttgtctacatatttggagagaatatgactttactagcagagaaatacaatatatcttgtctactggactgtaaaatatatgtatgaaataaaattagttccatttggtcttctagtatattaaagtgctatctgacgttgttatcctgtttttgcaaaaaaaaaa

SEQ ID NO: 87316 - DNA, 451 bp, Homo sapiens
  misc_feature (1)...(451): n = a,t,c or g
gtcctcggccggaactcctgggcctttaacattttatatagatgctatttggaatcagtagtcccatcagtgggaaaagttggaatggtagctctggattgagctttcaactcctttagctttgttcagttttttcttagaagctttcagctttcttattctagaacgcctgaggaagaacattgtgtacctggacaactgaaaatgtgtgtttacaaattgtattttaggtaatgaggagtacctgatcaatctgatagactctccaggacacgtggacttttcctcagaagtatcaaccgctgttcgcatttgtgatggatgcatcattgtggtagatgctgtggaaggagtctgtccacaggtaatggattgtgatgagaaaatacttaaatggttaagggtgaggaaagagggggaactgactgactttaggcatttcactgacaan

SEQ ID NO: 87317 - DNA, 402 bp, Homo sapiens
cccacgcgtccgcttcctgttctgagtgcccactgttgttctgagcgccccctggtgtcctgagcgtcccctcgtggtcctgagcttccttcccctcgcggttcagagcgtcccttggttgcctcagcgccccctggtggctccagcacgctgacatgtcctgaggtcctcctggtggccctgagggctccctggtggtcctgaatgccctctggtgccctaagagccccctggtggttctgagcgtcccccgctgtatcctgagtgaccccctggtgtcctgagcgcccccagctgtatcctgagggcccccttgtgttgagtgcccgctggtgcttctgagcagcatctatcatgcagatccctcctgtctctgcagatttttgtgtctgggctcgtgcc

SEQ ID NO: 87318 - DNA, 1668 bp, Homo sapiens
attcccgcgtttccggccggaacggttctccagcctttcccggaagctgcgctcgctacccgggtaacggtcccggctgtggaagctcccgcggcgccgcgattggacctcgaggagtcggaagagtttaaagaacgctgtactcagtgtgctgctgtctcatggggtcttactgatgaaggcaaatattattgcacttcttgccacaatgttacagagagatatcaggaagttacaaacactgatcttattcctaatacccaaataaaagccctcaaccgggggcttaaaaaaaaaaacaatactgaaaaaggctgggattggtatgtgtgtgaaggtttccagtatattctttatcaacaagcagaagccttaaagaaccttggagtaggcccagagttaaagaacgatgttttacataatttttggaagcgctaccttcagaagagcaagcaggcatattgtaagaacccagtttataccactggaaggaaacctacggtattagaagataatctaagtcattcagactgggctagtgagcctgagctgctaagtgatgtcagctgtcctccttttcttgaaagtggagcggagtctcagtctgacatccacactcgaaaacctttccccgtcagcaaagcatcacaatcagaaacgtctgtctgctctggatctctggatggagttgaatactcacaacgaaaggagaagggaatcgtgaagatgaccatgccacagacacttgccttctgttatctgtccttactttggcagagagaagcaataacactttcagatcttttgaggtttgttgaagaggaccatattccttacataaatgcttttcagcattttccagaacagatgaaattatatggacgtgacagaggaatctttggtatagagtcttggcctgactacgaggacatctataaaaaaacaatagaagttggaacatttttagatttgcctcgttttccagacataactgaagactgctatcttcatcccaacatactgtgtatgaaatacttgatggaagtcaacctccctgatgaaatgcatagcttaacttgccacgtggtaaaaatgactggaatgggagaagtggattttctgacatttgatcctatagccaaaatggcaaaagctgttaagtacgatgtacaagctgtagctatcattgtggtggtattgaaactgctctttctattggatgacagtttcgagtggtctttgtctaatcttgctgaaaagcataatgaaaagaacaaaaaagataagccatggtttgatttcagaaagtggtaccaaattatgaagaaagcttttgatgagaaaaaacaaaaatgggaagaagcaagggccaagtacctgtggaaaagtgaaaagccactctactactcatttgtcgacaaaccagtagcatataaaaaaagagaaatggtggtgaatctacagaaacaatttagcacactggtcgattcaacagcaactgctggaaaaaaaagcccttcaagttttcagttcaactggactgaagaggacactgatagaacgtgtttccatggacacagccttcagggagtcctgaaagagaaaggccaatcactgctgactaagaattcattatattggcttagtacacagaaattctgcagatgg

SEQ ID NO: 87319 - DNA, 2269 bp, Homo sapiens
atggagtccatgtttaataaattgaagagtactgttacagaagtaacagctgatgtcactagtgctgtaatgagaaatcctgtcactagagaatttgatgttgacattaaggattataaactttatgatgtagaaaccaaatgtggtttgcttcaggtttctaaaggattgtcattcttgcatagcagtgtgaaaatggtacatggaaatattactcctgaaaatacaattttgaataaaagtggagcctggaaaataatgggttttgatttttgtgtatcatcaaccaatccttctgaacaagagcctaaatttccttgtaaagaatgggacccaaatttaccttcattgtgtcttccaaatcctgaatatttggctcctgaatacatactttctgtgagctgtgaaacagccagtgatatgtattctttaggaactgttatgtatgctgtatttaataaagggaaacctatatttgaagtcaacaagcaagatatttacaagagtttcagtaggcagttggatcagttgagtcgtttaggatctagttcacttacaaatatacctgaggaagttcgtgaacatgtaaagctactgttaaatgtaactccgactgtaagaccagatgcagatcaaatgacaaagattcccttctttgatgatgttggtgcagtaacactgcaatattttgataccttattccaaagagataatcttcagaaatcacagtttttcaaaggactgccaaaggttctaccaaaactgcccaagcgtgtcattgtgcagagaattttgccttgtttgacttcataatttgtaaaccctgacatggtaccttttgttttgcccaatgttctacttattgctgaggaatgcaccaaagaagaatatgtcaaattaattcttcctgaacttggccctgtgtttaagcagcaggagccaatccagattttgttaattttcctacaaaaaatggatttgctactaaccaaaacccctcctgatgagataaagaacagtgttctacccatggtttacagagcactagaagctccttccattcagatccaggagctctgtctaaacatcattccaacctttgcaaatcttatagactacccatccatgaaaaacgctttgataccaagaattaaaaatgcttgtctacaaacatcttcccttgcggttcgtgtaaattcattagtgtgcttaggaaagattttggaatacttggataagtggtttgtacttgatgatatcctacccttcttacaacaaattccatccaaggaacctgcggtcctcatgggaattttaggtatttacaaatgtacttttactcataagaagttgggaatcaccaaagagcagctggccggaaaagtgttgcctcatcttattcccctgagtattgaaaacaatcttaatcagttcaattctttcatttccatcataaaagagatgctgaataggttggagtctgaacataagactaagctggagcaacttcatataatgcaagaacaacagaaatctttggacataggaaatcaaatgaatgtttctgaggagacaaaagttacaaatattgggaatcagcaaattgacaaggtttttagccacattggagcagaccttctgactggcagtgattccgaaaataaagaggatggtgctttgagtgttcctcctgctggtgcaaagcagacccaacaaagacccacagatatgtctgcccttaataatctctttggccctcagaaacccaaagttagcatgaaccagttatcacaacagaaaccaaatcagtggcttaatcagtttgtacctcctcaaggttctccaactatgggcagttcagtaatggggacacagatgaacgtgataggacaatctgcttttggtatgcagggtaatcctttctttaacccacagaactttgcacagccaccaactactatgaccaatagcagttcagctagcaatgatttaaaagatctttttgggtgaggtgtcttacttctattttgaaggattatttcagtttcaatcatgggtgagctgatttacatctttatatagttggcttggaggaagtacttctatgggaaagtgaacagttctgtgacaggaaacatctctgtccatgccagcatagtagttgtatggacttctaaccagttgagttttttaaagcattgaggattttttcctcttaccaactcctcttcagggttttaaaagacccagccccttcccaatctcaaag

SEQ ID NO: 87320 - DNA, 1793 bp, Homo sapiens
tttttttaaaataactttagcaagagccttcattttaatgaaaattgaatttaaacaaaagttgtgtatcttcttctggctcacagttgtacagtaactgtagttcaaatccgtgggttcattcactagtttagtgacacggattttgcatccctacttataaaatggaaatgatactgcctaaatcacggttgtgctgagaattaagtattacatgggaatgtgtgtaaagtgcttagcacattgcctgggacatatacagtaactgcttcccaccatacagatactgaaaagcccaatcactaataacaatttgttatatttactttacgtggtgttttttaatgtgagttcgcttatgagtaatgagatgcaaattcgacttgaaagttttcccacacacggtacatttaaaaaggttccgctagcatgtggctcttctggtggcatgcaagttctgagtccaaagcaaaactttcctcgcatgttttgcacttaatggggcctttcctctgtatgaatgttctgatgggaaataagctcagagaaacaaggaaaggtcatgtcacagtcaggacactgtaagggcttgaattttgagaatgagaagaaattgtccccatcatccgctgcaggtttcagagtcctcgtcgtggctcttctcggaaagggcaggatataaggactgcctgaagctcttcatgcacttagtgtgctggtactgggggcctgatacgaatgtttcctcaggcaaagcaagatttggtttctcattaaaatgtttatcacagttagtagattcgtaggtgttttcagcactgtggcttttctgatgctgtgccaatcctgggagccacataaaacctctaccacatatgctacatgtatagggcttctcctttacgtggctattcatgtgtcgggatagatgagagtgctggcgaaagctggcactgcacttggcacacttataaggtttctcaccagtatggattctcctgtgtgtcctcaggttggctctatgattgaagatctttccacagtcaccacatttatgttttttctctcctgaatgaattttctgatgcaaaactaggtatgaatgatcgctgaagttttggtcacactcaggacatttgtacacatttttggctccttcccagggagaatcaagaatttcagaaagtgtgttggttcctaaatattcagagagttctactaatggggtgtggttttcaatggtaactaaaaggctgatgacccttctcttgtaagtgggagttccacttaatattttcgcttcagggtttccaactccatcctcagaggatttttctgggtaagggacaaggggtgcagcaatggggtacttttctaaggcaagctcgtcaagttccatagactctaggcttaactgctgattaatctcaggcttgccttcctctcccatcaaagccgcatcctccaaagactcttttgtaccatctttgctgagggacctctgggcagggtgcagagtcacgcactcctcttgagaaaaatacacagccagatcctcaaagagtattggtccctgggcctcgggcgtcgggggcatggacgccatttggcgggtggggaatgccttcttcaagacgccacagggacttcgtgacaaagcgctccgcggttaataacaggcctcgcgctccctgacaggagctgcagaaagcgacgcccgaccgagacgcgacgaagaacgccacggccactgcaaaactcccacgctctcatgctcctttacgcagacgaaa

SEQ ID NO: 87321 - DNA, 2064 bp, Homo sapiens
tcacttagcagcctcgacattaaccgcgctcgcgctctcatccctttctggtcctactccttggagaaccttcctgcacctccaagaacttgccgatcgggtctgcggcggtctggacgaggtcactccacaggcgcccaggaccttctcatccgtagtgacgtgcgccggtgacgccatacagtgacgtgtggtgaccggagccaggtgccggcagggcagccacaccctggggccccctgttctggaggggcagagggtcgggccgatgcgaaaaagccgcggaagctgccttaggcgactttctgggcctgcatcgccggacccagcagcccgctgtcgatcggttgctaagtgacgccagcgcgcagtggcgcgtgcgcggccacggcggagtgcgtgaaagcggacgcgcgccgcagcagccggggcggcggcgaggacggcggccacggaagcggccaagggggcggtggcgcagagaggggtgcggagcgggcggaagaggcgtctgtgtcgcagcttggtctcagaggagcatcgctgggaacaacgactatcgtctattccacaagatgagtaacagccaccctcttcgcccctttactgcagtgggggaaattgatcatgtgcacattttgtctgaacatattggtgccttgttgattggggaagaatatggcgacgtcacattcgtggtggaaaagaaacgttttcctgcccacagggtaattttagcagccaggtgccaatattttcgagcattattatatggtggaatgcgagagtctcagcctgaagcagaaattcctctccaagacaccactgcagaagcattcacaatgctactcaaatatatctacactgggcgggcaacgctgacagatgagaaggaggaggtgctgctggactttttgagcctggctcataaatatggatttccagagctagaggattctacctctgagtatctctgcaccatacttaacattcagaatgtctgcatgacttttgatgttgccagtctctactcacttcccaagttaacttgtatgtgctgcatgtttatggataggaatgctcaggaagtcctctcaagtgaaggtttcctctccctttctaagacagcacttttaaacatcgtgttaagagactcatttgcagctcccgaaaaagatattttcctagccttattaaactggtgtaagcacaattcaaaggagaatcatgctgaaatcatgcaggctgtgcgtttacctctcatgagcctcacagagcttctgaatgttgtgaggccttcaggactgctgtctcctgatgccatcctggatgccattaaagtgcgatctgagagccgggatatggacctcaattatagaggcatgctcataccagaagaaaacattgcaactatgaagtatggagcccaagttgtaaagggggagctgaaatcagccttattagatggtgatactcaaaattatgatttggatcatggattttcaaggcacccaattgatgatgactgccgttccggcatcgagattaagctaggtcagccatccattatcaatcacgtacggatactcttgtgggaccgagatagccggtcttactcatacttcattgaagtgtcaatggatgaacttgattgggtcagagtgatagatcattcacaatatctgtgtcgttcttggcagaaattatattttccagcccgtgtctgcaggtatattcgaattgttgggactcacaacacagtgaacaagatttttcacattgtggcttttgaatgtatgtttacaaacaaaaccttcactcttgagaaggggctgatagttcccatggagaatgttgcaacaattgctgattgtgccagtgtgattgaaggagtcagtcggagccgaaatgccttgctgaatggggacactaagaattatgactgggattctggctacacatgtcaccagctaggaagtggtgcgattgtggttcagttggcacaaccgtacatgattgggtcaatacgggtactactttgggattgtgatgatcgaagctata

SEQ ID NO: 87322 - DNA, 417 bp, Homo sapiens
tgctcttctcggcatgtcacatgcttgaagtcgagagataagacattagtttttaagatatgtttagagtttttaagttttagttgtaaaatacagtttgctgtttatacttcgcagccattcattttttagtgtgaagtttaatgtctttcatttttatcagttctttttttcttatggttaagccatgtgaaaatgaattacagtattacagtttcaatagtcatgggcattcccacagtgaagagagaagttaaatcttacctcatagaaactcttcattcccttattgataacctgtatcctgaagagaagttggactgtgttatagtagtcttcataggagagacagatattgattatgtacatggtgttgtagccaacctggagaaagaattttctaaagaaatcagttct

SEQ ID NO: 87323 - DNA, 2348 bp, Homo sapiens
aagggattaagctggcggccgccgccgccgaggcttacccgggaatgtctgggtctcgcgcctcgcggcccccaagctccacgctgcgcccgctgtcccggcctctaaaggccgccacgtccctgcggcgcgcgcaggcaagaaagcggcttcgtgccggcggagggggcccgggcgggccgggaggggctgccccaggccctgcgcctacccccatcgaccgcggccggcgccgggccgggaggactgcgcggtgtggggctctgaagcatggagggggtgttgtacaagtggaccaactatctcacaggctggcagcctcgttggtttgttttagataatggaatcttatcctactatgattcacaagatgatgtttgcaaagggagcaaaggaagcataaagatggcagtttgtgaaattaaagttcattcagcagacaacacaagaatggaattaatcattcctggagagcagcatttctacatgaaggcagtgaatgcagctgaaagacagaggtggctggtcgctctggggagctccaaagcatgtttgactgatacaaggactaaaaaagaaaaagaaataagtgaaaccagtgaatcgctgaaaaccaaaatgtctgaacttcgcctctactgtgacctcttaatgcagcaagttcatacgatacaggaatttgttcaccatgatgagaatcattcatctcctagtgcagagaacatgaatgaagcctcttctctgcttagtgccacgtgtaatacattcatcacaacgcttgaggaatgtgtgaagatagccaatgccaagtttaaacctgagatgtttcaactgcaccatccggatcccttagtttctcctgtgtcaccttctcctgttcaaatgatgaagcgttctgtcagccaccctggttcttgcagttcagagaggagtagccactctataaaagaaccagtatctacacttcaccgactctcccagcgacgccgaagaacctactcagatacagattcttgtagtgatattcctcttgaagacccagatagacctgttcactgttcaaaaaatacacttaatggagatttggcatcagcaaccattcctgaagaaagcagacttatggccaaaaaacaatctgaatcagaagatactcttccatccttctcttcctgaagaaactgaagtgtccaacttcctctaagtattgctatgcaaaagctgctgtaattaaactattgttatagggagtagttttttcccttaggactctgcactttatagaatgttgtaaaacagacaaacaagaaaacaaaccacatacttttgaagtgtattttatctttatatagtttgtttgcaagagtattttcctaataacttcacagtatgaatgtgcatcttttttttttgaacaaatgatggggtaacattttgacatccataaggacaaaggtagatatttttcttaaaaactctgaggggactgacagcatggtcagggtgtattgtagcttataaacatgaaatcttataaggtttcagtttgacaaaagggggatatatgtaacttgtgccatggaccaaagggtcactttaccacagctaaaaatgagttacgatagcacctggagggggattgtattgtattcctttaatcaaaaaggaaaccaatttttctaagtatctttagcccaaataccatgacatattgagcatctttaaataaccagcctgtattgtccttcatatgtgaagttgacactactgatttgtcaataccaaattttgggttaaagtgtttaatttttatgtatttattttcttgttgcctcaaaagatgattgcattctaacttttgtgacctaccaaatttaagatgtgtatacgttgttctttacgttgttctagaaaagagattttaatgctgtagtgactttgctcacttacactagagaaataaacaactttcaatggaagagaattttagtgctttttttttcctaaaatagatattaagctgctgttgtaaagtattgtttgcagctctttccaatatctagagacatttttatttatgaatatttatacaaaaaggaattctgtcaagatgactgctctatatcacttgagaatggcattatttaattaaagaacaaatagcattttttggtagtgcctgtccatacctattgtcattgtttgccttgtaatctgtttttttgaattcattttgggctgatagttttgtttaaggttttggataaggagcactttaaaacaaactggtgtgttgtttttaagttaatcatatgtttaataaatgcgtggtttttgcattcaaacacaaa

SEQ ID NO: 87324 - DNA, 704 bp, Homo sapiens
cccgtcgcctcgacaggtgagaggatcttgaagagaccgacggcctcgacctggccgggcggcggcctcgcgctgctcaggcgtcatggctcccgacgggcgctgctccctggcgcgctctgttgaggcgccggccggctggcgcagtcctgtgggcggcgtggcgcttgcaagcgcatgaagagtcctggggggacagcggtgggcgggagacctttggcgccggcgcttcctctttctcccggcttgttcccgacgcttgttcccgacggtgctcgctcctggggccgccctggcccgggctttctggccgatcgcgcaccccgtagtacccgcgcggcctagttctcgggggcttgggcacccgggtgctgtatcggcgggtttcttcccatctcctggacatatactttatatgctgcggcggaggtcgtacctccttggcctggatgaacccagtggggactgacgcagctccgggtgagctttggcggctgcgtcgagtgacaaggtaggcatctcagcgcggacatttgcaatggcccgacggcgcaaatgacactgaaagtccccttgttttgagtatgaggtgtttgtcgctgtccctttgtaagggtccagctccactccgctcctcatactcacctccctcgcccccctccccgcccggaacactttggtagctgcctttgcttaaaaaaaaa

SEQ ID NO: 87325 - DNA, 778 bp, Homo sapiens
ggtcatcagcaagggctgggtttcaggcagggcatggggtggaggccccacccatcactgttgcggggaacttttcaggcttgagcaggggttctggaggacgccatagacagggccagccaggggagcttctgaggaagagcgagtgagaagggagaacataggggcctcatgggaagaagggaggatgatgggtttaggaggtggccaagggtgatagggacaggaaacctggaaccaactggtcttgtggtacttaggggaactaggggtgggaataagggactttggggtaccctaatggtgctcggggacagcctcaagataacttctttgctcaccaaggtctcccaccacccccctatctcggcctgccatgcagagtctgagaacttcgccttctggcaagatatgaagtggaagaacaagttctggggcaaatccctggagattgtgcctgtgggaacagtcaacgtcagcctgcccaggtttggggaccactttgagtggaacaaggtgacatcctgcattcacaatgtcctgagtggtcagcgctggatcgagcactatggggaggtgctcatccgaaacacacaggacagctcctgccactgcaagatcaccttctgcaaggccaagtactggagttccaatgtccacgaggtgcagggcgctgtgctcagtcggagtggccgtgtcctccaccgactctttgggaagtggcacgaggggctgtaccggggacccacgccaggtggccagtgcatctggaaaccca

SEQ ID NO: 87326 - DNA, 434 bp, Homo sapiens
aagggccccccgtatcgtgtggacccacgcgtccgcccacgcgtccgttgacgcgtacgtttgtaatgacattgttttctcctacagaaccaccatcaccttattggagggcgcatgactaacccaccgctacgtggcacaggacccgaaacaagggcagctgcgttccctgcacctgacatgtgacagcgccccagctgggagccagggcacctggagcaccagctgcagaatcaaccacctcatcttccgtggcggcgcccagatcaccttcttggctacctttgacgactcccccaaggctgtcctgggagaccggctgcttttgacagccaatgtgagcagtgagaacaacactcccaggaccagcaagaccaccttccagctggagctctcggtgaaggatgctgtctacactgtggttagcagccacc

SEQ ID NO: 87327 - DNA, 397 bp, Homo sapiens
gccagaaaatcgacacctcaaagcactagctctttgaaccgttctctgcctcaccctaacttcctgcagctttcgccagtcattggccacttagtcctttgggggctgggcagcggctccgtgcactttggagtcgggggcgccttcctagagcccagcatccactggggctccgaagccgtagcctgtctgtgtcctccacccactttgtgccctcatcctcctctggggctatggcagcggcgatgccagcgtcctctgcaggtccgacaggctgctgacgggcaccaagatcaccacgcagaacatccacgaccacttggttcctacctggacaaggtgcgggctctggaggaggccgggtgagctgaaggtgaagatctgcgactgggcccct

SEQ ID NO: 87328 - DNA, 603 bp, Homo sapiens
cccacgcgtccgcccacgcgtccgcccacgcgtccgtatctgcctgaggagggaccctctgcaaatgcactggggtgaactctggccctgggagtgccgaggcgaggtcaccgcaggccagaggccccttcggtggcgtgatgtcctttctccgcccgcagcccacaaacacaagaagcaggacccgctgcagccctgcgacacggagtaccccgtgttcgtgtaccagccggccatccgggaggccaacgggatcgtggagtgcgggccctgccagaaggtatttgtggtgcagcagattcccaacagtaacctcctcctcctggtgacagaccccacctgtgactgcagcatcttcccaccagtgctgcaggaggcgacagaagtcaaatataatgcctctgtcaaatgtgaccggatgcgctcccagaagctccgccggcgaccagactcctgccacgccttccatccagaggtgcgggttgaggcggatcgagggagaatgcccaggactgcggcggcgcctcggacacctcagcctcgccgcccctactcctgctgcctgtgtgtgcctgggggctactgccccaactcctgcggtga

SEQ ID NO: 87329 - DNA, 401 bp, Homo sapiens
ctctggggatgggccacctgccctctgagcaaccctggacggtggggcaggaccgtggggctgcagcacccagctgtggtcagtgccttccgggctctcctgctgctcatgctgaccgtgcacgtctcctacctgagcctcatccgcttcgactatggctacaacctggtggccaacgtggctattggtgaggccctggggggcttgggccatctgcagaagtgctagcttggggtgcgagtgggaggttggtgccattcctggagaaggaggttctagagagactcttggggtagaggaatggagaagaatttgaggtgggagagagaggaggctgggaggagagtccaaggatgatcctggggtcagagagcatggagtttcgggtggccttggggaga

SEQ ID NO: 87330 - DNA, 521 bp, Homo sapiens
aaaccacttagtattttatagtgaggtgactttacaagtaaagatcttcaagaagatttttatgtgatttaaaaaatcagcttagatgcttggaatttggattgttgcattcttgttctttggcacatcaagaggaaaagaagtttgctatgaaaggttagggtgtttcaaagatggtttaccatggaccaggactttctcaacagagttggtaggtttaccctggtctccagagaagataaacactcgtttcctgctctacactatacacaatcccaatgcctatcaggagatcagtgcggttaattcttcaactatccaagcctcatattttggaacagacaagatcacccgtatcaacatagctggatggaaaacagatggcaaatggcagagagacatgtgcaatgtgttgctacagctggaaagatataaattgccattaattttaagattgggatcaaccggttcacggggaatacatccatgctgtaaaacaaatctccgtggtttggggctgg

SEQ ID NO: 87331 - DNA, 448 bp, Homo sapiens
attctgctgacatttaccatgaagactgtttacttatacatatctgcatatttgccatttctggtgctcatcacttttttgcatagatccacattccatctgatatccttttctattgcttgaaggatctttcttgtaatacaggtttattggtgatgaattctttcagcttttgtatgtctgaaaaagatctgtatttcacctttatttttgaaagatattttcactcattaaagatggtccaagttgacattttttctttcagtacttttaagattttgcttctctgtgttttagcttgcattattctaatgaaaaatctaatattctgatctttttctctgtatgtaatttgttctttttctctgggtgcttttaagattttctccttatcattggcttgaagcaatttaatgatgcttcttgatataggtttcttcatgtttct

SEQ ID NO: 87332 - DNA, 677 bp, Homo sapiens
  misc_feature (1)...(677): n = a,t,c or g
tttcgtctcaccagcaccatgatgagtgtgagcccctactgaagagccttctcacagcctcctggacctccttgttcatcagactgtagatgaaggggtttagcatagaggtcaccacagtgtacatgatggttgctatggcgtcctgggctgagaaggagtctgggggtcatatgcagatccccaggacagttccatagaacagggtgaccagagacaggtgggagctacatatggaacatgccttgcgccttcttgtaggagatggaatccggaggatggctgcagcaatgcggatgtaggagaccaagatgagcgcacagggagccaggaacaggaccacagcccccaggaacacatgctgattgtcatgtatgtgagcaggcaatcttcatgagcaggtaggcgtcacggtagaagtgtgaaatctgggcggaggagcagaaggccagtctgctcatgatgaccgtgtggaccggggagatgaggctggagcctgctcacgctagcacggncagcccctgacagagccgggggtgatgatggagcactactgcagggcgctgcagatggccacatagtggtccagtgccatgatgggcagcagaaaggtgtccacgttggcaaaggagatgaggaagtacatctgagtcaggcactggggataagagatcgtc

SEQ ID NO: 87333 - DNA, 2206 bp, Homo sapiens
tttcgtccgggccgcagtcctgacgagcgggtcagggcttgtcgggcggaagcctggcctggagcctggaagggggagacggcccgagcgggagcgggagcggacgcggcctcagtcctgcgcggaatattgaaggatgtttgttccaagatctctaaaaatcaagaggaatgctaatgatgatggcaaaagttgtgtggctaagataattaaaccagacccagaagaccttcagttggacaaaagcagagatgttcccgttgatgctgtagctacagaagcagccacaatagacaggcacatcagcgaatcatgccctttccccagcccaggtggccagttggcagaggttcattcagtaagtcccgagcagggtgcgaaggacagccatccttctgaagagcccgttaagtcattttccaaaacacagcgctgggcagaaccaggggaacccatctgtgttgtctgtggtcgttatggagagtatatctgtgataagacagatgaagatgtgtgtagtttggagtgtaaagcgaaacatcttctacaagttaaggaaaaggaagagaaatcaaaactcagcaatccacagaaggctgattctgagccagagtctccactgaatgcttcctatgtctacaaagagcacccctttattttgaaccttcaggaagaccagattgaaaatcttaaacagcagctgggaattttagttcaagggcaagaagtcaccaggcccattattgactttgaacattgtagtctccctgagggcttaaatcacaacttgaagaaatcaggctatgaggtgccaactcccattcaaatgcagatgattcctgtgggacttctgggaagagacattctggccagtgcagatactggctcaggaaaaacagctgcttttcttcttcctgttatcatgcgagctttattcgagagcaaaactccatctgcgctcattcttacaccaaccagagagttagccattcagatagagagacaagctaaagaattgatgagtggcctgccacgcatgaaaactgtgcttcttgtagggggcttacccttacccccacagctttatcgtctgcaacaacatgttaaggttatcatagcaacccctgggcgacttctggatataataaagcagagctctgtagaactctgtggtgtaaagattgtcggtagtagatgaagctggataccatgttaaagatgggttttcaacaacaagtgcttgacattttggaaaacattcctaatgattgtcagaccattttggtttcagccacaattccaactagcatagaacagctagcaagccagcttctgcataatcctgtgagaattatcactggagaaaagaacctaccttgtgccaatgtacgtcagattattttgtgggtagaagacccagccaaaaagaaaaaattatttgaaattttaaatgataagaaactctttaagcctccagtgttagtatttgtggactgcaaactaggagcagatcttttgagtgaagccgttcagaaaatcacagggctgaaaagcatatctatacattcggagaagtcgcaaatagaaaggaaaaacatattgaagggattacttgaaggagactatgaagttgtagtgagcacaggagtcttgggacgaggcctagacttgatcagtgtcaggctggttgtcaattttgatatgccttcaagtatggatgagtatgtccatcagctgaatattatttgggttgtgcccttctctggaattaatatcaacgcatctcttattgcccttgttatacagtctactcaccacaatcaatatgaagtttaccccataaacagaggtatggtacaagaggtaacgtgtcatccaaggtgactttcctggcagccaccagtaaactgactccggacagataggactcttttgttgccgccaaggcatacttacaatgacctcagaggctctagggccacagtgtgaaaaccaaccaatggataattaagtaaacacagttctcttgttctactgttagtgtgagaacctattttatattttataatgtgttgcacgtgtgatgatataggacaaaattacaaataaagcataagacgagtgtttatttttgtaatgtttacaaatagtaacttacaaataaattttagctttgaaaaatttgcaaaaaaaaaaaagggggggg

SEQ ID NO: 87334 - DNA, 411 bp, Homo sapiens
  misc_feature (1)...(411): n = a,t,c or g
tttcgtgggtcttatcccaggtcaccttgagggnnnnnnnnnnnnnnnnnnnnnnnnnnnnnnnnnnnnnnnnnnnnnnnnnnnnnnnnnnnnnnnnnnnnctcagcactagtggagtgtctgtgagctggatccgtcagcccccagggaaggccctggagtggcttgcacgcattgattgggatgatgatgaatacttcagcacatctctggagaccaggctcaccatctccagggacccctccaaaaaccaggtggtccttacaatgaccaacatggaccctgtgnnnnnnnnnnnnnnnnnnnnnnnacggacagatgttctactataatggtagtggttattactcggggtttgacttctggggccggggagccctggtcaccgtctcctcagcctccaccaagggc

SEQ ID NO: 87335 - DNA, 674 bp, Homo sapiens
  misc_feature (1)...(674): n = a,t,c or g
tttcgtggatcctcaccctgggcctgagaggcagtcactgttcccaaaaggtttcctgggatgggatgatgtgccagcccttagtggtgtttgcgagggagccaggcccacaggggggcctggctgacccagcaggaaggtggggccagcttcccattcttaccctggaggcccaggggagccgcctgccagagtcatcagcagagccaggctctacctgggtttcctgcttctgcacctcacttgcagcacctgttggtcccacttcaggaggctgagggccccctgtcccctcttgctggccagactgtcccctgatatagcaactgctgtccagttagcactaaccggggctcagaagccagctttcctgaccactcccaggaggtgccggggggtcttagttcagcctcagccttgccccagcctgaaaaaggctggactggctcatgggccggtgaaagaatcaccatcttctcgcttttgccacgagtggaccttgcatcacagtgctttgcgtttgtcatttaatcctcaggaaaacctgcgcaatggttctgtgctatcacccccgtgtcnnnnnnnnnnnnnnnnnnnnnnnnnngctttgtaactgccctgcccgtctcctgccttatctgcttccacccccggccccctccttccggccaggg

SEQ ID NO: 87336 - DNA, 1307 bp, Homo sapiens
  misc_feature (1)...(1307): n = a,t,c or g
ctgcaggaattcggcacgagaggttgctggggaaaggaagagaagttggctgagagaacactccttcgttatttattgcgtcttcatctctacatgcgtttctcattaactctctctggccaggtgaacatgaggaatactaattccggtaaaaccaaggcatgttcctgacagccctaagctgacagccctaagctgttgggaacatggttagtgttattcgtaatgttctacacttatttaccaaaaatcctactgtggactaccgatagcaggggagacatgttgttgagggctcagaggttattgacctgtgacagacctgtctcactgtctctgtctctgttgcccacatgttatttaatatgccttatatttctgcagaattctgtacttttctaagcaaagcacctccacttgcagtatcttacgtaatgttactataattccataaaatcaagccatgtattattaacttcatatgaagacccaaacaattcatgtttttaccctannnnannnnnnnnnnnannnnaaaannnanaaatctggggggggggccggggccccatttccctaaaaagggggggggaataaaattcggcgggccgcgtttgaaaacgggggggtgagggaaaaaccgcggctcggcctcgcgcgcgtggggattgtggccccggactngcggatccgggacggggaatgggggaatcgggcacagccgggcgggccgctgcgggacagcgcaatagagggagtcgggaatcggcgtatcgggaccggggggatgcgggagaggcgggtgtcggggatcggaggtgtgtataattgttgatccggcgccccggggagcgggaaacgggcgcacccgggccccgggggacaggtggatatggggaaatcgggaatcggggcagagggggcaaaggcgagagccgggctgcgggcaggcgcggggacacgcggggcgcgggatcgcggggcacgggcgactcgcgagaaacggggcnncgggggcaattgcggggaatnacggaaggtggggcagttgggggaaacgcggcggagacgtcggaactgccgggcaggacgcgcgaactgcgcggagagatgggagcggggagcgtgcaaacnggcggaaacgccggcgacggcgggggatacccgacgtcggcgcggcgtcactcgcgccatcggcgggagatcgagcggagcgacccggggagaactcgcggggaacagcggggggctcatggggcgaacatgtgaggcgggtgtgcggggcggacatcggtgcgaaagtccgt

SEQ ID NO: 87337 - DNA, 742 bp, Homo sapiens
gattactctatgcccaggctggagtgcagtagctcaatctcagctcactgcagcctcaacctgctggactcaagcagtcctcccaccccagcctcccaagtagctgggactacagatactcaacaccacacccggctaatttttttgtagagatggaatttcaccatgttgcccaggctggtctcgaactcctaggctcaggcgatctgcccacctcaacctcccacagtgctggtattacaggcgtgaagccaccacgcgccaccaagattgatttcttctgaggggtctcttcttggccatcttctgtgtcttcccatggtcttccctctgttatgcgtctttgtcctgatttcttcttccttggctggtgaggaggccgccgggctccgggtccagaagctctggccggctgttgttctgagccatctgccggtctgctggtttcactgctctggaatctggagtgaggtcattgagctgaaggttggacgggagggacatgttctcccgtggcaggcgcacgttgttgagttttaggttgttggagtcacttgatatcagagatgggtgccgggaggggcctgtggagaaagaaaccatgtccctaattctcagtgtgccctcccacgctgggctgtcctaccctttcagacccaggaccctcaggcaaggggtctctcaaatgcccaggcctggccctggggccagagactgggttcccagtgcttgaccggattct

SEQ ID NO: 87338 - DNA, 3046 bp, Homo sapiens
gtcattaaaacacaaaaatggggaacttagcaattcggatccttttaagtataacaattcaactgggatcagctatgagaccctggggccggagagcttcgcagcctgctaaccacgcttatattcctcttccagcaatgtggggtgatttctgaacacaccaagaagatgtgcacaaggtccctgcgctgcccacagcacacagatgagcagaggcgaaccgtacggatttattttctcgggccctcggctgtccttccagaggtcgagagctccctggataatgacagctttgacatgactgacaggccaggccctgatcagccggcttcagtggggacggcgtcctctgacctctcaccctctgattcaggctcctccaagacgagtgaaaatcagggatggggtctaggtaccaacagctctgagtcacggaaaaccgagaaaaagaaatcccatctgagcctggtagggactgcctccggcctaggttccaacaagaagaagaagccaaagccaccggcacccccgacgcccagcatctatgatgacatcaactgacttgggtgcaagggatagcctttggctgagcagagccctctctcctgacccccacccaggtggcatagcctggcaaatggacggctgctgggggttggggctttggggaagctttggttggggcaggcaggcagaggattccgattatgcgcccctgggggttggtcaaagtcctcttgcaattggagcacgactcctcgcgcgtgcaggactcagacctggacatattatgccttggacataagtttggtggggaggcggttttcatatttattctgtgagttactggatgtcccaagctaggtcaggggcttgacctgggcactgtgccagggcactgcctgccccccaccccaggaactggactaagctcctgctgaggggccaatgtggcgacccgggaggctgtgggttggaagctgagcctggagggggcctgcctcggccgccctcagcaatgtgaatgggtccggtgcttggagctgaggggcaaggctgggcatgtcctgtctgtgtgcagaatcttatcaaatgcccccagtcccaggggtaggcaggcacagagtgctgtctgctgaggtgggcgtccagaactgccgccaccttccctgcccctcacaggggcagccctttcccctcagtccccatgggcctccttggcagcaggagctgtccttttgttgggtgccaggaaagggcctccagcctctacagcttcaaggaatgggaaagggagggtaggaagagggagaagtgtcagaattcctccccctgcctctcctccctgacccagggctggtgaggagtggggccccaaggtgagagggaacggtgctgctttatttgaaatgttttcttacctcattccctgccccaggaagggacccagcctcaccctcctggggtggccccgtgttcctcctgcccaccctgccccactgccctaccggggcagcccaggttcccaactgctgcttccacccccttcaccttgactggcttcagttcctctcagcgctcctgcctccaaagcgtgccctgtttcccttccttagcgcttttaagttatttattctgtacttgtggtttggggctctgaggaaaatcctaatcttgtgcctctccccctttgctaggagttgggtgggaagagagggtggcctctgtgccccaggttgtcagtggaggggaaggggtgtcactgcccctctgtgggactgtcatgccagtgtgcccacctgcctggtctacatcctaaagagatgtaccgtcccccctccatgcgggcaccaccactcccaggagccaagctggaggaccgcgacctgggctgggagcagagctgactgacacgggtggaggtgaccctgagccaagttctctggcacttgctggacatgtcccctaccctcttcccaagaggagccatcccacatttgggtagttagtacccaggactggttggactgatcgggttagggaccctagagggttaagggaacaacagagatggggctgcaatgccctgtctggaactccgctctcccgctggggtggttctgattgtggctcatgcctggttgcaaattggtttttaacccacaaattgtgattattttttaaaaagccaaacagattttggcaggagttagaataaatcccggggcctgggcttctctattcttggccctccgtagtctccctccgagaggaggccagagggagaggaggatctcagcaggcctctagccgcttccagatgcagtctggggagtgggctgaaggtgaagggaggaaggctgtgggccactctcccttctgagaggcagctgcagctcaggccctaatacactctttgccctgtggcctctcccttttccccccttctggttggaggagggagaagtgggaagtagcttgggaactggtttgtccacataaacttccccattgttccttggcccgccctcagggcagagccccctgcccaggctgggtaagagatgggcttggtccagcagggaccctgagggaacaaacccttttccttctggggagagagtgcccccccctaccatgtagttgaacaggggctaggagctccccactcccctccctctaacagcaggctgtgtgggtttcaattcccatccttcccaccccggctaggtgtcgtccaccctgtatcctgtgtctgagtgtgtgtgggggggttctgtactaatttccatggccggtggcttttccttccatgcatcactcccccccgcatgcccaggggccacccgcctggcattaccgcatgctggggtcattgggggaggggggtggggctcacgctgtcctgtggtcttgagatttttatttttgcatatgtaatccattctgtacaggtaagctaactttgtaaaacgctgtgtattccctctgcccccatggctgctggtgtaaataaactgcaatcttcccgttggtaaaaaaaaaa

SEQ ID NO: 87339 - DNA, 412 bp, Homo sapiens
cacccgcttggcctaggcctcgtgccaagcgagatcttcagcccccaggacaagaaggccgccgacggcagcatcctggcgcccgcccggggcgaggacctggaggccgggctcaagggcagtttcatggacggccggctgcaggccagcgtgtcggtgttccgcatccagcgcgtgggcagcgccatgcaggacacggcatcggccatgccctgcctgccgtactacccgaccagccactgcttcatggccggcggcaagagccgcagccagggctgggagctggagctgtccggcgagcccgcaccaggctggcaggtgctggccggctacacctacacccaggccaggtacctgcgcgacgcctccgaggccaacgtgggccagccgctgcggcccgtggacccgcgct

SEQ ID NO: 87340 - DNA, 2390 bp, Homo sapiens
tttcgtcacccaggcagtccctgacgtgtcggggaggagccgggcgcggaggtacgctgagtggagctcggggctgcgtaggggagctgagccgagcggctgggcgggcctggccgggccagcggaggggagacgtcggttgagcggcggcgaacatgcgcttttgacacattggaggctttcttgatcatggatggtgaagatataccagatttttcaagtttaaaggaggaaactgcttattggaaggaactttccttgaagtataagcaaagcttccaggaagctcgggatgagctagttgaattccaggaaggaagcagagaattagaagcagagttggaggcacaattagtacaggctgaacaaagaaatagagacttgcaggctgataaccaaagactgaaatatgaagtggaggcattaaaggagaagctagagcatcaatatgcacagagctataagcaggtctcagtgttagaagatgatttaagtcagactcgggccattaaggagcagttgcataagtatgtgagagagctggagcaggccaacgacgacctggagcgagccaaaagggcaacaatagtttcactggaagactttgaacaaaggctaaaccaggccattgaacgaaatgcatttttagaaagtgaacttgatgaaaaggaatctttgttggtctctgtacagaggttaaaggatgaagcaagagatttaaggcaagaactagcagttcgggaaagacaacaggaagtaactagaaagtcggctcctagctctccaactctagactgtgaaaagatggactccgccgtccaagcatcactttctttgccagctacccctgttggcaaaggaacggagaacacttttccttcaccgaaagctataccaaatggttttggtaccagtccactaactccctctgctaggatatcagcactaaacatcgtgggggatctcttacggaaagtaggggctttagaatccaaattagcagcttgcaggaattttgcaaaggaccaagcatcacgaaaatcctatatttcagggaatgttaactgtggggtgctgaatggcaatggcacaaagttctctcgatcagggcatacatctttcttcgacaaaggggcagtaaacggctttgaccccgctcctcctcctcctggtctgggctcctcgcgtccatcgtcagcgccgggtatgctgcctctcagtgtgtgagtgcctagcctccaggtgggggctcctgccctcctccaacaacccaggacacccacgcctcacccctcggtgcctgggcccagccccgtgcccctccgtctgcctccgcacggctggcagagggcaggctgcatgcagtggcggctactgggccctgcccagccccggaactctgcgcgatatcaatactggctattttctcttctcgccgtagtgccgttggtttcacatgattgcacttttgtgggtcgcaaggtgatacatacgtgtattacttggtcactggatgcagaagtacccattcatcacacctgccccatagcccccactctgctgtactgataggatttagttgtgttttaggacattgcaaatcttctagaagttctcccccaaatcaggtcaatgtgtgccctcctgagctcccacccaggcatctccagtgctcatgatcatgtgtcccccaactccacccctcacagtttgggcctgtttctggcaaagagtcaggaaggttactgaattagggaacattttctgcaccttctgattttacttaagcagctaccattccatggacttgcctcccagagcagcacaatgcccgtctgagccccacgtggcaggagcctctgggacggggcacacacaggcccagcctctgtgctgtctcctcctctgtgcgcctcagactcggggtgagggaggcgggcagcctctcgccagccttcccgtccttcagttcaacgacatctttggagtgtttttgttttctcttccaagggccgtcccgttgtgttaggaagggtgagtggctggttccagggtgggccggtgccagctccggggtggactgaacagcggcggctgtccctgtgcatcctttgattactctcatgctgcatttactgtttacatttgttttattgtacataggtttgtaaacattattgcctgagatatttgtatataacttgggctttgtagcttttatttattcagaacgcatacggcatgttaatgactctgatggtgtcctcctctgggcagctgtataggatcatcatgtggttacaaaaaatacttccctcaaaaaaattcttttaatgtggaaacaataaatttcacagaaaaaaaggattgacgttgctttaaaaaaaaaa

SEQ ID NO: 87341 - DNA, 663 bp, Homo sapiens
ttttttttgcttttcaaatctgcttcagtttattatatttgtttctgtaagtttataacatcttttctaaacagacactaacggatctcttttttttcttcctttcttagccaggctaatcctaaaagggctctgctaaaggagatcactggaatttcccagatccctgccctaagcgtggagggtccttctcaaacactcttccatacagggccataactaagacaggcaaaggggctccacttcggctcctcaagcgtccatctcttgaaatctcataatgtctttcaggggcaagctgactcccacttagaatgatctgtgggaaaacataacgcgttccaaatgtgccactgagggagaagtcttcaaacttggtaaaagctgaccccacaggttctccacacgtttccaggtcagtggtttgacacttcagtaatgcacatatctgtaagtaatattggccttctactgtgtgcagtccatcaaaagcacctaggggcataggatctcgtctgttcgcttctcaggacatcttgtaaggttaagtgacaacacagatctgtctggcaagctgtgtaatttcctgtatttcttcttaagcttggtggaggtaaactcatcaaaataaatcatcccccaaaaaatctgactgttcagagg

SEQ ID NO: 87342 - DNA, 583 bp, Homo sapiens
  misc_feature (1)...(583): n = a,t,c or g
tcaagatcctgaagcatttcttgaaaaaattaaaacagatgaaacatgtctttaccaatatatcctgaagacagggcataattaaagcaatggctaccaagaggtggaagtggtccagtcaaagcaaaatggactggtcatggcaacagttttttgggatgctcaaggtattttgcttgttggttttctggagggccaaagaatgataacatctgcttattatgagaatgttttgagaaaaccaaagctttagcagaaaaacactagggagaaatttgttaaagagtccttctccaccatgacaatgctcctgctcattcctgtcatcaaacaagggcaatttttaaagagtttcaatggaaaatcaatatagtcctgatttggctccttctgacttctttttgtttcctaatctttttgtttgtttgtttttgaggatagtgtcttgctctgtcacacaggctggagtgcagtggggtttggtatcttggggtcactgcgaccttgacctctggggctcaaggnaagatcctacctcagcctcccaagtagctaggactacaaggtgtgccaccatgcctgg

SEQ ID NO: 87343 - DNA, 489 bp, Homo sapiens
cggcacgagcggcacgagtacaaatcttggagaaattcaagagctaagagacaccacaccagaggaattaacagaagaccacttgatggagatgactccttctgaacccagtgccagacgatgaggaagaagacgaagcagtgccagaaaacaaattgacattagacaatctggcagaagggttccacttattcaatatggcttttgacttctcttataacatggacttttctatgaaacaggcactgaatctaaagcaaatggtggaagaagaattggtgctaaatggaaacatgtttagagaaatggaaaagcaaaaaagtcagacaaattatgatgtatctccatcagattacacttattgtgcctccctctcctgcctcctcttccacctcttctacttctgccacccctgagacagcaaagccaacccccgcttctcagcctattcaaggtgaaaattatgaggacggagacatttatgatgat

SEQ ID NO: 87344 - DNA, 383 bp, Homo sapiens
cttcttggttggtgtaggtagtagttttccaattttgtttaaattttcaaagaaccaactttttgttttattgatacttctttttggtctctatttcatttagttctgctgtgacctttatttcttctgctaatttttggcttgattatttttctagtctcttgaggtacaatgtaagatttttaatttttgaactgtttttttgatggagacgttgaatgccataaacttctctctaagcactgcctttgctatatcccagaagttttagtatgtcgtttttctattttcatttgtctcaaatgttcttaatacccatattcatttttacaatgactcagtgatagttcagaagcatgttgaatttccatatatttttatag

SEQ ID NO: 87345 - DNA, 1049 bp, Homo sapiens
cttagaattcacacgggtgagaaaccttatgactgtaaggactgtgggaaggcctttggtcgtacatcacaacttattctacatcagagacttcatactggtgtcaaaccttatgaatgtaaagaatgtgggaagacctttaggcagcattcacagctgattctgcatcaaagaactcacacaggcgagaaaccctacgtatgtaaagactgtggcaaggctttcattcgtggctcccaactcactgtgcatcggagaatccacacaggggccagaccctatgagtgtaaagaatgcgggaaagcctttagacagcactcacagctgactgtacaccagcgaatccacactggtgagaaaccctacgagtgtaaggaatgcggaaagggctttattcacagctcagaagttactcgacatcaaagaattcattctggggagaaaccctatgagtgtaaggaatgtgggaaggccttcagacagcacgcacagctcacacgacatcagagagtccatactggcgacagaccctatgaatgtaaggactgcgggaaggcatttagtcgtagctcatacctcattcaacatcaaagaattcatacaggtgacaaaccctacgaatgtaaggaatgtgggaaggcctttattcgtgtttcacaactgactcatcatcagcgaattcacacttgtgagaaaccctatgaatgcagggagtgtggaatggcctttattcgtagttcacaacttaccgaacatcagagaattcatcctggtatcaaaccttacgaatgtagagagtgtgggcaggcatttattcttggctcacaactcattgaacactacagaattcatactggttagaaagccttgagtgtaagggataaagataagcctttatgtggagttcacatctggctcagtactaggtaatttttaatgtagtgtaattaatgtcagaaaacacctgtcacttccatcatagaacatcagaaaactcacacccaaagaaaattaaataaatgtgggaattctttttgcctcaaaaaaaa

SEQ ID NO: 87346 - DNA, 1835 bp, Homo sapiens; identical to SEQ ID NO: 65964
  misc_feature (1)...(1835): n = a,t,c or g

SEQ ID NO: 87347 - DNA, 848 bp, Homo sapiens
taggttgcccatctactgagtcaataatcttatgattattctactcgatgtcttgtgaagtatgtttccttcttagatgaaacataagttattcctgctactgtgtgagcccttgggattgttccctctgcccattttagttacttatttttctgctttaggtacattcctcacaaagcacgtgctgatactttcagtaaaaccttgagggaaccctctgcagatctactcctgtctgtctctgcagttctcttctcccggtattctactaggcaaattctaacaagcatggccttcaactttgtttcctcaactcagggagattgccagcttccacctgggtttcttatccctctgctccgtggaagctgttaagtggggagctattgaagaaggacttacaatgggttgtttcccgtctctcagggattactgtcctatgctggccaatgtctaatgtgtaaagaccattgatttacatgcttttctgtttattaattatttcaggcagtgggtaaatgtattccctattatttcaccttgactcaaaaccctgcctactcgtttttaaagtttaagctcaagcattaaatcctctccaaagtgtttcatattccattttctattcaggaaatgatttgtttgcaaagaccaacagctctttcaaaaaagctgtaattggccaggtgtggtggctcacgcctgataatcccattcagcactttgggaaggccggggcaagaaaaattgtttgaggcaagattgcttgaggagtctctaactcctcaagcaggagttaaagaccaggctgggcaacataccaagacctcatctttgttaaaaattga

SEQ ID NO: 87348 - DNA, 2064 bp, Homo sapiens
  misc_feature (1)...(2064): n = a,t,c or g
ccccagtagctgtcctctattaaagtaaagtaatggttgggctttttaccctgaagaatggttgctacattttcttttcagtaacttcaggatatgtatctgtagaaacattatagtcttaccatcatcaaaatgctgaagtcattttttgaaaacattatagattttttttttaatggcaagagtagtctatagttatgtaacctagtgttgtaaatacaatataataaaggttttttttttaaacattaatattcacattatgacgaagctggaaaaacaaagtgtggagggaccaacaactgttcagtactttgaccttaatgcttcagtgtaggggctggagcaagtggtcatgctgaatacaggcaggtgctgtccagtcaattaaaaagtttttttttaattaataggttttatagctcatgaaggaatggaaataatgatgacatcattttccattctgttaagagacagaggaaaagtgggttagaggctttaagtggtaagcctaaaatgcgcttcctgtattattgggttaagatactcttaacgtgctataattgggaaattaattcttaaaggtggggaattaaaatgggtccggaactgatttagaaatacaggaaaaaatttaagatcaaccttgaaggggctacaaataattggaaatgattagcctggagtcatgaggaattattctttatattttacattttggggcctaatatttttttcctgacaagtatcaatgaaagcagaagaaaatcccactcccaatacttagttttcaagacacaatccctaaatatttaaaccccttgtagctggcctataatatatatatattagatgttatatacagtagacttaccaagtcaatagtttaagcaatcaagccacttcactgttcagtttctttacatcatgaaatgaatacttggtattaacctctcaaatttcaagaaaatgtagaataactacagatgtatataattagcatttaactgtccacaaatactttaggaaatcctatcatagtgtttcctctatataaaactgggaaaaaaacaagaattaagtccttttggtgaatatagcaaggcaatgtttagttcatttggcctgtaatatatatattagatgttatatacagtagacttaccaagtcaatagtttaagcaatcaagccacttcactgttcagtttctttacatcatgaaatgaatacttggtattaacctcccaaatttcaagaaaatgtagaataactacagatgtatattaattagcatttaactgtccacaaatacttttggaaatcctatcatagacagtgtttcctctatataaaactgggaaaaaacaagaagtaagtccttttggtgaatatagcaaggcaatgtttagttcatttttataatgcggaaatcctgatacatggtgctttcatctttgaacttccaaaaggctataaaattggctcttctcaaatattttagaatttcatttcagctatttcctttttacgttcagaagattgggtgcagacactttcactttgccaggaatgtttcttgataaatctgtgtcctaaaaaaagaaaattgctgaatatcttcacatcctgtatggtcaatcatgtttcttttatgacaaaaacgaaaaacatttccaaacttttagctgagatggttttactgcttctaataagacagcattttctactaaaataacaaaaaactgctaacattttaaattgtactgtcagtctccacattccttttctgaaggagaactttacctttacgctgcggaataagtctttttctcttgctgttgcttctttggaatgcatgaaactattcaaggctgtttttgcagctgtaaatacaaaaaagagtaagaataatctactgttaagtcactgaactgtttaaaatcataattcaaaaaaacaaatttaaataccttttccctttttctgcactccaggagtaagtttcactttatatccttaaaaagggaattacatgnggtactnaattggatggtacaaaacaa

SEQ ID NO: 87349 - DNA, 396 bp, Homo sapiens
aaattctttggtaaattatctggccatatagtttgcccattttttgattgaggtttgtcttattgaattgtaggagttattcataaattctggagaaaagtcctttattagatatgtattttgcaaatactttttcccagtgtgttgcttgtcatttcatgtttctagtagtgccatttgaagtctataagttgaattttaacaaagtccaacttactaatttttttctgttttggagaatgcttttgatgttgtatctaaatttttttttacctgagtcacatctcgaagatttttctactgtatgttcttgtaaaagtttattattttagcttttacatttaagtctgtgaatctatttggagtcatttttgtgcatggtatgcggtgagagtt

SEQ ID NO: 87350 - DNA, 531 bp, Homo sapiens
gaagcctattttatctattttttctttatattggttggggttttggtgtcatttttaaggaatcattgcctagtctgaggccaaggactattctctccctattgtttggtgctggcaaacttgtcaaaagtcagttggccataggtatatatgggtttatttctggattctcaattattttccagtgatctgtatatctttactatgccagtatcacactgtctggattactgttgttttgcagtaaatcttgaaatcgagacccctaacttcgttttattttcccccaagattatattggctattctggatcccttatgttaccttatgaatttcaagatcagcttgtccatttctacaaaaagtgcagttgagattttgataaggattgcactgaatctatagattgctttggggagtattgccatctcagcagtattttaagtctcccactccatgaacatgggatgtcttttcatctatttaggttgtcttttctttcaactgtgtctcatggttttcagtgtatgc

SEQ ID NO: 87351 - DNA, 354 bp, Homo sapiens
gtcgataagttgggctacattaaaattaagtttctatttatgaaaagaccactaataaaagaatgaaaagtcaaagaatgggaatagatatttacaatgcatatatctaacaaaggactcttatccaaaatatattatttttctacattgtatgtatatatccgaaaaaacacagagccgaacagatacttgagcaaaaaagttgaattggtcaataaacatgaagtgatttaccactttatcaatcttaagggaaatgcagatttaaatggtagtatcataccatctgacacccaccagttgattaaaatgaaaaataaggaaaatagcaaacatactttaactctcatttag

SEQ ID NO: 87352 - DNA, 396 bp, Homo sapiens
agagctcgggggaccccgttgctgctgctgctactactgctgctgctctggccagtgccaggcgccggggtgcttcaaggacatatccctgggcagccagtcaccccgcactgggtcctggatggacaaccctggcgcaccgtcagcctggaggagccggtctcgaagccagacatggggctggtggccctggaggctgaaggccaggagctcctgcttgagctggagaagaaccagtgagtgccaggctggggtagggctgggaggaggggatcagtgttggggggcagggactgacacagatctgtgcgggtggctggatgggcagaggatcccagagagggtgcagatgacagggagagtcacgcaggcctgggggtggctccctggaagctg

SEQ ID NO: 87353 - DNA, 1250 bp, Homo sapiens
  misc_feature (1)...(1250): n = a,t,c or g
cgaagcacggaatgtgtctcctgctgggggccacgggcgtcgggaagacgctgctggtgaaacggctgcaggaggtgagctcccgggatgggaaaggcgacctgggggagccgcccccgacacggcccacggtgggcaccaatcttactgacatcgtggcacagagaaagatcaccatccgggagcttggggggtgcatgggccccatctggtccagttactatggaaactgccgttctctcctggcctgtgccgcggataccagtatggagaactgatggccacatgaggacagagacgagtgacaccaggtcgtcttcataaaactcgattccctctgcttctgcttgttcccaaagctttgtttaaagctacnnnnnnnnnnnnnnnnnnnnnnnnnnnnnnnnnnnnnnnnnnnnnnnnnnnnnnnnntgtgatggacgcctctgaccccacccagctctctgcatcctgtgtgcagctcttaggtctcctttctgcagaacaacttgcagaagcatcggtgctgatactcttcaataaaatcgacctaccctgttacatgtccacggaggagatgaagtcattaatcaggcttccagacatcattgcttgtgccaagcagaacatcaccacggcagaaatcagcgcccgtgaaggcactggcttagcaggggtgctggcctggctccaggccacccacagagccaacgattgactgcacggcagaggcgcagctggcctgagctggggagaggtggcagagggcagtatggctttgctgccaatagtttcttctcacaggggcagaataacccaaagtaaccctacatgatggggctctgtgctgagatgcaatgatgtgtaaactgaggcatgtggagatggaagttgacatctggcctctgaaaaaagtgtccccaggggctaggcatggtggctcacacctgtaatcccagcactttgagaggcgcgaggcgggtgtatcacctgaggtcgggagttcgagactagccctgaccaaacatggagaaaccctgtctctactaaaaatacaaaattagctgggtgtgctggtgcatgcctgtaatcccagctacttgggaggctgagacaggagaatcccttgaacctgggaggtggaggttgcagtgagtcgagatcatgccattgcactgcacctgggcaacaagagtgaaactccgtcttaaaaaatataagaaataaaaaaataaaaacctgaaaaaaaa

SEQ ID NO: 87354 - DNA, 2368 bp, Homo sapiens
gcggccgcaccgggcagcaaccccactcccactcggaggccccctgccctctcccccacttccccccggcccatggtgcgaggctgggagccgccgcccgggctggactgcgctatctctgaagggcacaaatcagaaggcaccatgcctcctaataaagaggccagcggtctcagtagttcaccagcggggctcatctgcctccctccaatctctgaggagctacagcttgtgtggacgcaagcagcccagaccagtgagctagacagcaatgaacacctgctcaaaaccttcagctactttccctatcccagcctagcagacattgcccttctctgcctacgttatgggttgcagatggagaaagtcaagacttggtttatggcccagcgcctccgctgtggtattagctggtcatctgaagaaatagaagagactcgagcccgagtagtctaccgtcgggaccaactccatttcaaatcccttctctcttttactcatcatgcgggacggcccccagaggaggtgcctcctcctccagtgccagctccagagcaagttggtattggaataggtcctccaactcttagcaagcctacccagacgaaaggattgaaggtagagcctgaggagccctctcagatgccaccactgccacagagtcaccagaaattaaaggagtccctgatgacacctggcagtggagcattcccctaccaatcagatttttggcaacatcttcaaagcagtggcctctcaaaggagcaggcaggcaggggtcccaaccagtcacatggcataggtactgcttcctggaaccactccacaaccgtcccccagccacaagctcgggataaacccccaccaattgcattaattgccagtagttgtaaggaggagtcagcatctagtgttactccctcttcttcctctacctcttcttctttccaggtactggctaatggagctactgccacctctaaacccctccagccactaggctgtgtcccacagtcagtgtcacccagtgaacaggcattacccccacatctggaaccagcctggccccaagggctacggcataactcagtaccaggtagagttggccccacagagtacctttccccagatatgcaacgccagcgaaagaccaagcgcaaaaccaaagagcagctggctatccttaaatccttttttttacagtgccagtgggcacggcgtgaggattaccaaaagttagaacagatcactggtttacctcggcctgagatcattcagtggtttggtgacacacgctatgccttgaagcatgggcaactaaagtggtttcgggacaacgcagtacctgggtgcccctagtttccaagacccagcaattcctacaccaccaccatcaacccgctccttgaacgaaagggctgagacaccacctctgccgatccctccacccccaccggatatacaacccttggaaaggtactgggcaacccccacccaacagcctacgggaaacctgatatccccctcaaattgagtccaggccattcaaggcctttagcaccccagcaggtgcctggattggtttgactctcgattaccctcagcccagctgaggtggtagtttgtcctagatgaagaagaggaagaggaggaggaagaactgccagaagatgatgaggaagaggaggaggaggaggaagatgatgatgatgatgatgatgatgtgatcatacaagactgagtggggagctgggggaggggaggtctgttactgaaagatgaaccaacttagtaactgtttaaacaaagaaaccacatttttaaaattaccttgtggcagagaactaaaaagctttgtgttcttcatggtgggtggcaggcggatataccgagggtggaccagggagaatgaccatagggcactaagtaaggctgggattggatcagcagaaatccaaccctctaaccttagggtagggagtgctaaggatctggggaaaccatgggctgggaagctgctcttgctctcctcgtgtctgctgtttttttcccttggtgtactatacagaggccagatgttggcaccacctctccaggaggattggaaaggaggagtaaaggattctgatttgattgatgattccagtgcatccccaatcccaccatcttacctggaatataaggctgccttgtaccccttttctgagcacaagtctgtgcgtaatgcaactgactctcttacttttttcttagtaactgatcatttcctagacaaccaagattctcaataagtcccagtctcatcacaaatattaatatttccttttcctcataccaacttgactatgtttcacccgcttcatgactg

SEQ ID NO: 87355 - DNA, 3039 bp, Homo sapiens
tttcgtcctacctcctgggagatgcagtccccactgtagagcgggaggcgcaggcggctgaggaactgggggtggtggcggtgggaaagacagggaagattgtagaggaggaagcccaggaggacctggagggccttagaggcagccaaaacgagggggctggaaggctgagagggcctggagatgacagaagacatgaagtggggagctcagctgtagaacagacctggggctggggagatggcagctcccatgggtcccaagcagagaggcaggacagtggggctggggagacagccaaggctgccaggtgccaggagccaagcgcccacttggaggccagaaagaaatccaaggcagggtctggggcttgccaagacaggagcggccaagcccaggagaggcaggagtcccatgagcaggaagtgaacagagaagagaggctgagaagctgggaacaggaggaggaggaggaagaggtcagggcaagagagccagggatggccagaggggcggagtcagagtggacctggcatggggagacggaggggaaggctggtgctgttgggccaaaggcggcaggggacaaccgggagatggagcagggggtcagggaggcagatgcaggggaaactgaggagcctggggccgaaggggctgggaaaggagaagaggtggtagtggtggagaaggcctgtgaaagcactagggcatgggggacgtggggcccaggggcagagcctgaggactggggaatcttaggcagagaggaggccaggacaacctcaggcaaagaggaggctgacctgctgggagtcagacagacagaatatggagcagtcccaggagaaaggctcctagaggctactggaaaagtctgggtcctagaggaggagggggatgaggagagagaggctgaggtgagccctttccccaaacagccccaggtcctgggcactgaaagaacagaagaggctgctgagagccagaccgcagggagggaagctgtgggaggccaggaggcaggggagagctttgagggccaggtagacctgcgtggtaaggaggctgagatgaggcaggacttggggatcagggccgaccgggccaggatggaagagctggtacaggcagaggaggcccaggaggagagagggagcagcagggatccagtggctgagctgccctcagatggagaggctgaaggcactgccgacttggaggcaactccagaggccaggcctgaggaggagctcacaggggaggagagtgaggcggcccagactagctgtggcctactgggcgtggaatggggtggcctcacacacagcgtcaccaaaggccagggacctgagctgatggggggtgcccagaccccaactaagcaacccgaggaaagggaggcaggggaggtggagctcatgggagttctggccctgagcaaagaggagcaggagaggagcctggaggcaggtcccaggcacgcggggtctgtaaagcctgaggcctccgaggccttcccaggagcctgggaaaaccgcacgagaaaggacatggagagaggaaatactcaggaggatgcggccgatggcgagcagcgggaggaggaggagactgcgggaggccagaccctggcggctgaggctgaaggagaccgagagtctgaactatcagaagtcccagaggcaggcggggaggggctgacaacccaggacgcgggatgtggaactgaggagggagaggcgtctgtctcagagaaccaggagctggacggaagcacaggggcagacgcaagggccttgcccgtcactgggagaggcctatgccagagaaactgaggatgaggaggcggaggctgacagaacatccagaagaggctggaggctgcaagcggtggctgtgggcctcccggaccgtgaggatgcacagactggctctgtggctgctgggattatggggggtgatgtggtcccacacatcagcgctgctggcgctggtgaagctttggaaggggcgcttgggcaaggctgggactcgaaagaaaaggaagaggcagcagcaggagagcatgcaggtgggcaagaatttggtctggagggctcagcagaggaagaggtgactggcagaggcagccaagtagaggcttttgagtccagggagggaggaccttggggagggcgggtagaggccgaggaatctgcaggcgcagaggacagctgtgggctggatcccgcgggctcccagacagcgagggcagaggggatgggagccatggtggaggctggggggcttctagaaaagtggacgctgttggaagaagaggctgttggatggcaggagagagaacagagggaagacagtgaggggcggtgtggggactaccaccctgagggagaggcaccaaggctccttgatgcagagggtctcatggtgaccgggggccggagggcagaggccaaggagactgagccagaaagcctggaacatgtcaggggccaggaggagcagccaacacaccaggcccctgcagaagctgcgccggagtcagtcggggaagccgagacggctgaggccatgggcagtgccagaggaggtgctgccaacagctggagcgaggtgagggctcttggtggggtctcggggggaacgagtggaatcccgaagccggccccatggtcctctgtgccccctttcctgcaggccccgctccccgggtccctcctagacgtctctgtcccaaggagtcgcgtgcacctctcgagaagctcctcacagcgtcgctcccggccctcttttcgtcggactccggcctgggagcagcaggaggagcccccagcccccaaccctcctgaggaggagctgtcagctcctgagcagagacccctccagctggaggaacccctggagccaagccctctgaggcatgatgggaccccggtgccagccaggagaaggcccctgggacacgggtttggcctcgcgcaccctggcatgatgcaggagctgcaagcccgtctgggccggcctaagccccagtga

SEQ ID NO: 87356 - DNA, 304 bp, Homo sapiens
ttttttttttttgtaaaggcaatgagctagtcccagaaaggatccttcagttacatacaatttgtttaaatgaaatgtccatggctctgttccatatttttgtccttgttccttcccaattggtatatacaactttcagagcctcttgtatttggaaggctggaagggcccagactttggaatagtgtcttggtttcactgtttttgttttgatttttttttttgttttgatttttttttaaactaaagctatataaagcttgtggattaaacagaataaatttctaaatttaaaaattttaaa

SEQ ID NO: 87357 - DNA, 1425 bp, Homo sapiens
ttttttttttttaaatgaatggcatggccgtgttctagtaaaattttatttgcaaaagtaagcagcccggttgggtccctggattgaggctgaggaagacattacttccctgctgggaaatacttggggacttaccatttggaccacaggcctaaaagtatgggatgagagaggaacaaaagcttacaaacaaagagcagccagtttggccaaagaggaatgtgcatgaaagaaggtggcaacagactgacatgtaattcggtaaggataaatacatttacaaatgtgcaaactgaccttttgctggttcatctttattttagtcatactacttaaaaatatatatttaaaaaatattattttaaaagtcatcttccacttgaatcataaacttcttccttgtatcaaaagttgtgccactatcctggttacttgtggattcaccaagcagtccagcaagtcatccgtagaaatgaatgtttgaggagtcgtagtagtatttgaggcaatctgttcctcaattgcattttcactgttgctcattatttgttgtctcttggcacaatgcaattttccaaagtgttctccatccttgtccacaaagtctttcccatcacttccaaatatgcctcctctttctgaaggcggttcttcggacctctcggacctctgtgctacagggaccagatcagggccaaagggacttgctgcctccggtttgtctgttcctgtggtcaagttctggctacctgtttggcccacctccatgtggttgcacacatttaattcttcctttttcatgtgctctccatctgttctcagtgcttggatttctactacctcagatgttctgcagcgatcaaaaaatgcagaaacagctgcatttaagtagcaacagttgactgcatgggacgtttcctcaacctcagtggggtttaaccaggctctggtattttgtggattctctgcagttttcagggcacacacaagcatacgggtgattgcctcttctacccgggctaggtgatcctcttcctgaattaaaaaaacacgcttttaacttctgttaagtctcatggctttttaagagataataaagtctgttttaatttcatcttctgttctctcattaatataagctttgttatagaaggaatgaatatgctattggtagaaccacaatttttgtgtatttactatcacctgccatctagaagagctgcagaatatttccccaatcaaatttaagtatgtattctatctataagacatggccttaagtatgaatccccttatgatattttctccaatcttttccattatttgacatgtttaaagttttttttttaaagtaccacatacagaggaataatccctatagagtctgacaagcaaattatttcagagatggatgaaaaattacac

SEQ ID NO: 87358 - DNA, 2048 bp, Homo sapiens; identical to SEQ ID NO: 80072

SEQ ID NO: 87359 - DNA, 2369 bp, Homo sapiens
  misc_feature (1)...(2369): n = a,t,c or g
ttttttttttttggggagcaggaggttttattgtaaagaggccgattgtacagagcaaagtttgtttctgaacacggggggctgggtggtgggacccagaggtccagagctgggtgaaggatgaggggtggcatcgccccatccaggcagtgggcagggcagggaggactaaacggctgcctcccagttcccttccctgcccctcattactgggtaagagggagccaggctatttccacggatccaggagaatatagcaggagaccctcaccaccccacaccatgccccaaggatacgggaggtgccccagtctggcttttgcagtcggccagctcccagcctcctcgaggagcagcctggccacacctttttcccctggagcctggaacagctggctttgggttaggaggctggaagcacccccttaccctgtccaggcacctcaagggacagcccgtggttccctggtcaaaccccttagggcacagtgacccattggcttctgcctctggggctgggtagcacaggagtgggtgggcactgaggggccagcactgagccaggtcttaaagagggagtccgagtgttgggggcagtggtctctggtgggggcatagccccagagatggggctcctgtgagtccagcctaggggttgagggggatctgagccagttcacattgtcctggccacaggggtctctagggcatgacactcagggccactctgcctgttccaggccctgatcgtggtaatttaaagctcagaatggtggatgggggaagcctcagggaccaaggccctgccttcccctagactgagcccctcgtcggcttcatcctcacacccgctgtatctcaaacagcttcacgtcggtgtcgtaccagacaggggggtccacattcctcagatagatgacgccccacatgtaggtgcggaaccacatggcagtgcccgagttggcctggtacttgcggatgaggatggggtggggcacgggcagcagccccaccagggtgccatgctgcaggaaccgcaggatctcagactcatccgtcaggcccttgtcgatgcagatcttctccacctgcggaaccagcacctgcagcagcctcatgatggtctgcagcggcagcttcgacttccaggagaggacccactctggcgttgggctccactgcccactggctgatgaggtggacggtcgccgctgctccctccatgcctggctgggctcccccttagccgggctgccatcctccaagctctgctggggctcaggttccagggaccgcaaggtgccatcctctgacacctgggacttctcggtcagcttgtcaatgcctggagtagccaccagactggtcttgagggtgcctggctctgcaggggcagcggggcgggagccctccatggaggtgcccctccctgggagccggtgcgagacaagggctcaggtgtccgccggcgccgctgcagggccttgtgaatggtgggcgggtccgtgggcaggttggccagctggtggaagatgctgcgcttgcggatgatggcgtagaccaggttggagttgccatcaaattggtactggatgatgttgttgaagacctccaggaggaagaagaccaggtggtggttctgggcggcagagaagaggaaccaggtggtggagaaggcctccagcaggtgcagcaacttgttggcggtcaccatggacaggctcttgaggtagggggacacgttgaccacgatggtgagcaggcagtcgaagaggggctgcaaccgctggtgcccgctggtgatgatcttgtggaacacccacaatgagcaggtcggcgtgggtccctgtgaagactgggatgtccatgggcacgcggattgagtagggtttgttcagccgcaccccgaagttncgctccccgctcagaagcagcaagatgaagacaccaatgtgcatcaggcccacccgagactgatcggcccgggcatcgttgaggaagaagaggatggggacaaggatgtctaggacgtcgctgctcttcagcacgaagaagaggaatttctaggggtgcggggaggggccaagtgggctgagttcaagggaggggcagctctgccccacccccctcagtctgacactgtccctgcccccgggttattggggcagctgctctccatctccctgcagggcccctcgaggctggcccaccttgttgaagtcgcagagcttccagaagagaactagcagctcctggtggaactggatcttcttggtggagttaggcaggtaggtctggagcagggggttggacagcagccgggctatacccttgaggatgaactggaagtcctcctcacgatggatgcg

SEQ ID NO: 87360 - DNA, 871 bp, Homo sapiens
  misc_feature (1)...(871): n = a,t,c or g
aatggcccccgggcccccttcagccaagagggacagagcacaggccccccacccctgataccacgcctagggcagcacggagcacaaggtcgcattccccctctgaaccccggacaaggacctggccccaacaaagatgactcccgcggccctccaaaccatcacatgggcccgatgtcagagaggcggcatgagcagagcggcgggcctgagcatgggcccgagagggggcctttgcggggtggccaggactgcaggggtccccctgataggcgtggccctcacccagacttccccgatgacttcagcagaccagatgacttccaccctgacaagcgctttggccaccggttacgtgaatttgaggggcgaggaggacctttaccgcaagaagagaagtggaggcgagggggccctgggcctccgtttccccctgatcacagggaattcagcgagggggatggccggggtgcagcccgaggccctccgggggcatgggaaggccgcaggcccggaggatgaacgtttcccccgggatcccgaggacccacgttttcgagggcgcagaagaagaaagtttcagaagaggagccccgccgaggcatgagggccgtgctccccccagaggaagggatggttttcctggtcctgaagactttggtccagaggagaattttgatgcttctgaggaagcggcccgaggacgagatctcagaggtcgaggtcggggtaccccacgaggtgagcgagttactaaagacacctggtctggaaggatagggtgcagaatacactggttgtgaatacaccaggaacagtctgagtgcagcattgtttgctctgttgtgtangaggaaggaagggtttactt

SEQ ID NO: 87361 - DNA, 3013 bp, Homo sapiens
  misc_feature (1)...(3013): n = a,t,c or g
acgtgtcccgcgcttggcgcagcaggaagcggcggcgaacgcggcctgaattcccggcgccggccccagctcctctgccgctgccgccatgctcgactttcttcaccattttctccaaggancgtgcttgtgctctggtgcttccagggcgttagcgactcatgcaccggacccgttaacgcgttgattcgttccgtgctgctgcaggaacggggngaggtaacaaccttctttcacccatgaggcactcacactcaagtataaactggacaaccagtttgagctggtgtttgtggttggttttcagaagatcctgacactgacatatgtagacaaattgatagatgacgtgcatcggctgtttcgggacaagtaccgcacagagatccaacagcaaagtggctttaaagtttattaaatgggcacttttgatttccaaaatgacttcctgcggctccttcgtgaagcagaggagagcagtaagatccgtgctcccactaccatgaagaaatttgaagattctgaaaaggccaagaaacctgtgaggtccatgattgagacacggggggaaaagcccaaggaaaaagcaaagaatagcaaaaaaaagggggccaagaaggaaggttctgatggtcctttggctaccagcaaaccagtccctgcagaaaaggcaggtcttccagtgggtcctgagaacgaggtagaactttccaaagaggagctgatccgcaggaagcgcgaggagttcattcagaagcatgggaggggtatggagaagtccaacaagtccacgaagtcagatgctccaaaggagaagggcaaaaaagcaccccgggtgtgggaactgggtggctgtgctaacaaagaagtgttggattacagtactcccaccaccaatggaacccctgaggctgccttgtctgaggacatcaacctgattcgagggactgggtctggggggcagcttcaggatctggactgcagcagctctgatgacgaaggggctgctcaaactctcaccaaacctagtgcgaccaagggaacactgggtggcatgtttggtatgctgaagggccttgtgggttcaaagagcttgagtcgtgaagacatggaatctgtgctggacaagatgcgtgatcatctcattgctaagaacgtggctgcagacattgccgtccagctctgtgaatctgttgccaacaagttggaagggaaggtgatggggacgttcagcacggtgacttccacagtaaagcaagccctacaggagtccctggtgcagattcgtgcagccacagcgtccgtgtagacatgctccgggacatcatggatgcccagcgtcgccaagcgcccttatgtcgtcaccttctgcggcgttaatggagtggggaaatctactaatcttgccaagatttccttctggttgttagagaatggcttcagtgtcctcattgctgcctgtgatacatttcgtgctggggccgtggagcagctgcgtacacacacccggcgtttgagtgccctacaccctccagagaagcatggtggccgcaccatggtgcagttgtttgaaaagggctatggcaaggatgctgctggcattgccatggaagccattgcttttgcacgtaaccaaggctttgacgtggtgctggtggacacggcaggccgcatgcaagacaatgcccctctgatgactgccctggccaaactcattactgtcaatacacctgatttggtgctgtttgtaggagaagccttagtaggcaatgaagccgtggaccagctggtcaagttcaacagagccttggctgaccattctatggctcagacacctcggctcattgatggcattgttcttaccaaatttgataccattgatgacaaggtgggagctgctatttctatgacgtacatcacaagcaaacccatcgtctttgtgggcaccggccagacctactgtgacctacgcagcctcaatgccaaggctgtgggtggctgccctcatgaaggcttaacgtggctcttgcccaataccaaatcgccgctttccccacaagcccttcttcctgtatcaagaatgtgctttagagtatgtgagcaacctggtcttcagtgtagtacaaaggcaagagtgaggggggcttgtggctcctttccaaccccaatccccggttcagcacagccgccattctgcaaggagggcctaatcatgttacaatcactgcccgactgaccctctcccagctggcctcccccctcctaattcaggcaccccctttcactctggcctaacagactcagtcttatttacagctttgaccaatggttgggaacccaacaccagagctttgctaataatgagtgtggtcaagagccgtctgagcctaatgagtcccagctgcattaggttaagagactcttccagagccagcgccaggtcttgaatggcacctctccctaggatacacagcctgcaggtccccaggacctgatgacacccgcctcactgtggcagtgtattgcctgttaattgctgctaattctaattctgatgatgactcctactccattgtttaccccaaagcatcagctaggctggagtgatttgttacaaatgagcaaaagatgagtccttgcttccctcagaaataaaagtagcccagctgcagcgttgcattggcttcttggcctcccaactcttccactcccagaatcagaagtaagctctgcatgttcccttcctggaggaaaccaattgtcagaaggtgtatgatgaccccctcccctcccatccttcacctcctaagcagtcctggcttttcctcatcactcccctctacagtgcctggtagacaagtgctacattgaagaacacaaacctcttgttaagacttgtcctgtagcttgatattacaggtgtgctattagtgcaataaggtgaaggctgtctgcccagagaaataagtaatttatataagaaaataaatttcataaataaattggaaattcc

SEQ ID NO: 87362 - DNA, 1297 bp, Homo sapiens; identical to SEQ ID NO: 63991

SEQ ID NO: 87363 - DNA, 650 bp, Homo sapiens
ggctgttggaatggttacgtggcttttgatgggctggaaaggaggactgccacttgagctgcaaaaatcctccgcaatatctgagcatgatgtaccaatggctgtgtccccactgtcggctacacttgaacagcggctgaagcggctccgaaagggctccgagataactggggtctgccattcagtccccagggaactgcccttctgaatcacatcggaactcggtgaagtgacgtgagagatcccctcagttggatatttctcctgcatggccatcaatcacagttatttaagccaaacgggcctgaaagcgggcggcgaaatccctcactcgggaagactgactgcagccaccacgtctgcggtgagcggtggttccctccctcagctcctctaacggccgttgcacgcccgccaggccgcgcgccacagaacgcgcgtcgtttggccccaccccgttctgccgcctctggccaatcgggagtcgagccgcgccggcttcccgcccctttctatcctcttctgaccaatcggcagccgagccgcgtcggtatcccgcccccacacgctaccctctgctcagagagccggacggatctttctgcgcatgaccacgtcgccacttggctccttctctgccccttgccgcg

SEQ ID NO: 87364 - DNA, 435 bp, Homo sapiens
agataattttaatactgcaatgcaagtgcttcgagatgcaggtgatttggccaaaggagaccagaaagggcggaaaggaggaacaaaaggaccatcaaatgttttcaaaattgtgaagatgattatggaaagaaatttccaacctgtgattattttcagttttagtaagaaagattgtgaagcctatgcacttcaaatgaccaaattagatttcaacacagatgaagaaaagaagatggttgaagaagtattcagtaatgcaattgattgcttatccgatgaagataaaaaactccctcaggtagaacatgtacttcctcttttgaagaggggaattggtattcaccatggtggtttacttcctattttgaaagaaactatagaaattctcttttctgaaggattgataaaggccttatttgccacggagacctt

SEQ ID NO: 87365 - DNA, 2627 bp, Homo sapiens
tttcgttcttgatctgcgtggcgtggttctgtgccttgggaagagatgaatgggaagcggccagcggagcccggcccagcccgggtgggaaaaaagggaaagaaggaggtgatggcggagttttcggacgctgttacggaagaaaccttgaaaaagcaggtggctgaggcctggagccgcaggacgccgttcagtcacgaagtcattgtcatggacatggacccttttcttcactgtgtgatcccaaacttcatccaaagccaagacttcttagaagggcttcagaaggaactgatgaacttggacttccatgagaagtataatgatttatataagttccagcagtctgatgatttgaagaagagaagagagcctcacatctccactttaaggaaaattctgtttgaagatttccggtcctggctttctgatatttctaaaattgacctggaatcaaccattgacatgtcctgtgctaaatatgaattcactgatgccctgctgtgccatgatgatgagctggaagggcgccggattgccttcatcctgtacctggttcctccctgggacaggagcatgggtggtaccctggacctgtacagcattgatgaacactttcagccgaagcagattgtcaagtctcttatcccttcgtggaacaaactggttttctttgaagtatctcctgtgtcctttcaccaggtgtctgaagtgctgtctgaagaaaagtcacgtttgtctataagtggctggtttcatggtccatcattgactcggcctcccaactactttgaaccccccatacctcggagccctcacatcccacaagatcatgagattttgtatgattggatcaaccctacttatctggacatggattaccaagttcaaattcaagaagagtttgaagaaagttctgaaattctcctgaaggagtttcttaagcctgagaaattcacgaaagtctgtgaggccttggagcatggacatgtggaatggagcagccgaggtccccctaacaaaaggttttatgagaaagctgaggagagtaagcttcctgagatattgaaggagtgcatgaagttatttcgctctgaggcactattcttgctgctctccaacttcacaggcctgaagcttcatttcttggccccttcggaagaagatgagatgaatgataaaaaagaggcagaaaccactgatatcactgaagaagggactagccatagtcctcctgagccagagaataatcagatggccatcagcaacaacagccaacagagcaatgagcagacagacccagagccagaggaaaatgaaacaaagaaagaatcaagtgttcccatgtgccaaggggaactgaggcattggaagaccggtcactacactttaattcatgaccatagcaaggctgaatttgccctagacttaattctgtactgtggctgtgaaggctgggagccagaatatggcggttttacttcttacattgccaaaggtgaagatgaagagctgctaacagtgaatccagaaagcaattctttggcattggtctacagagacagagagactctgaaatttgtcaagcatattaaccaccgaagcctggaacaaaagaaaaccttcccaaacagaacaggtttctgggacttttcattcatctattatgaatgacagcactgggcaaagctgaacaaaaatgtgacccttcgtaattactgggaagtctgaaagagctaagcatggagtcaaggagaactacatggtagcttgcctgacagtgttcttaaaactggttgtcttttactaggactcataatgattgtcctcaaccgagaccttgagcttgcagctacgtacttatctcttgattaaaaaaaaaaaagttggctttttttttttaacatttagccctttttccatatgggcttcttcagggaatttttaagttcaatttgtttttattgaggtaaaatatttataacataaaactgaccagcttacccatttttaaatatgcaattcagtggattaagtacattctcattgttgtccagccatcaccatcatccatctccagaagttttccatcttcccaaattctgtgcccattgaacaataactccccacctccccttcccctagcaacagccatactttttgtctctatcatcaacttcactactcatatttctcatgtaagtggaatcatacagtatttgtccttttgtgactggtttcacttagcataaagtctttaagatgcatccatgtttccagtgtttcggtttttttagaaaaactcatacgtgattgcagccgggcatggtggctcacgcctgtaatcccagcacttgggaggccaaggcaggcggatcacctgaggtcaggagttaaagacgagcctgacaaacatggagaaaccccatctctactaaaaatacaaaattagctgggcgtggtggcacatgcctgtaatcccagctactcaggaggctgggacaggagaattggttgaacccaggaggcggaggttgcagtgagctgagattgtgccactgcactccagcctgggcaacaagagtgaaactctgtctcaaaaaaaaaaaagaaaaaaaaaccttatg

SEQ ID NO: 87366 - DNA, 270 bp, Homo sapiens
tttcgtaacaccagggtcctcactcttgggacatgggcagccgtcggccgttttggaggcagtgtcaggacttgaagggccagggggaggcagtggccgtcgtgtcccgtcgtgttcgtcttggtcagttcgcccatcttctggtctttctctctgcgtctgtctcttctctttggtctcttcttccctgtcggctccgcctcttgtgtcttccagcctgacctgctggcaggatgaggtgccgtgcctgccctccatgagccctaccta

SEQ ID NO: 87367 - DNA, 618 bp, Homo sapiens
ccctggccagcctgggctaaagggtctaccaggaccccaaggacctcaaggcttaccaggtccaactggccctccaggagatcctggacgcaatggactccctggctttgatggtgcaggagggcgcaaaggagacccaggtctgccaggacagccaggtacccgtggtttggatggtccccctgctccagatggattgcaaggtcccccaggtccccctggaacctcctctgttgcacatggatttcttattacacgccacagccagacaacggatgcaccacaatgcccacagggaacacttcaggtctatgaaggcttttctctcctgtatgtacaaggaaataaaagagcccacggtcaagacttggggacggctggcagctgccttcgtcgctttagtaccatgcctttcatgttctgcaacatcaataatgtttgcaactttgcttcaagaaatgactattcttactggctctctaccccagagccccatgccaatgagcatgcaacccctaaagggccagagcatccagccattcattagtcgatgtgcagtatgtgaagctccagctgtggtgatcgcagttcacagtcagacgatccagattccccatt

SEQ ID NO: 87368 - DNA, 403 bp, Homo sapiens
gtcacggacacaggcagggactgggatgtgacaggctggagctcagggacttgttgggggaatgggggtcagtgacaggctggaggcttaatgcgaggatggaggcttggctctaggggcagcacctggggtggtcatgggatctcagggaggggagtgggagtcagagaaagggtcttacagaagctggggctttgtgaggagctaagggagactcactgatcgaggtggggaccctgcaggcagaaacctgactgtagtgatagaggtggggtttctccgcacgcaggtcatgggggccttggcaggagcggttttggcagagggtggggctggtgcctctggaaggtatgaagatgtaaatgaaggtgacggaggcaggctgcgagtgagggctttgcgg

SEQ ID NO: 87369 - DNA, 849 bp, Homo sapiens
tttcgtccagggctctggtgaacagcaaatgctccacgctgggacgggccattgcctgatgcctgtacatggtgggcactgagagacaagattcctgggccctgccttccatacactccccacgatcttggaggaagctctggggaccccgctgagaacccacagacaggaggacaactgcgctatgacagcaataaaggccaagaaggagaaagttgaggaccgctgacagccccgtgtgctgttgggagctgccctttctacttcaaaccttcctctagcagactgtgcagggaccccccaccaccaccatctgccgccatggttgtgcaaaacagcgcagatgccggggacatgagggcaggcgtgcagctggagcccttcctgcaccaggtcggggggcacatgagcgtgatgaagtatgacgagcatacggtgtgcaagcccctcgtctcccgggagcagaggttctatgaatccctgccgctggccatgaagcggttcaccccacagtacaaaggtaccgtcacagtgcacctctggaaagacagcacaggccatctcagcttggttgccaacccagtgaaggagagccaggagcccttcaaggtctccacagagtcggcggcggtggccatatggcagacgctccagcagaccaccggcagcaatggcagcgactgcacccttgcccagtggccgcatgcccagctggcacgctcacccaaggagagcccggccaaggctcttttgaggtccgagccccacctcaacactccagccttttcgctggtggaagacaccaacggaaaccaggttgagaggaagagcttcaacccgtggggcctg

SEQ ID NO: 87370 - DNA, 857 bp, Homo sapiens; identical to SEQ ID NO: 60974

SEQ ID NO: 87371 - DNA, 2276 bp, Homo sapiens
attcggcacacggggagtgacatcgccggggtttgcgggtggttgttgctctcggggccgtgtggagtaggtctggacctggactcacggctgcttggagcgtccgccatgaggagaagtgaggtgctggcggaggagtccatagtatgtctgcagaaagccctaaatcaccttcgggaaatatgggagctaattgggattccagaggaccagcggttacaaagaactgaggtggtaaagaagcatatcaaggaactcctggatatgatgattgctgaagaggaaagcctgaaggaaagactcatcaaaagcatatccgtctgtcagaaagagctgaacactctgtgcagcgagttacatgttgagccatttcaggaagaaggagagacgaccatcttgcaactagaaaaagatttgcgcacccaagtggaattgatgcgaaaacagaaaaaggagagaaaacaggaacctgaagctacttcaagagcaagatcaagaactgtgccgaaattctttgtatgccccactatgatattgacagtgcctcagtgcccagcttagaagagctgaaccagttcaggcaacatgtgacaactttgagggaaacaaaggcttctaggcgtgaggagttttgtcaagtataaagagacagatcatactgtgtatggaagaattagaccacaccccagacacaagctttgaaagagatgtggtgtgtgaagacgaagatgccttttgtttgtctttggagaatattgcaacacctacaaaagttgctacggcagcctggaaatgcagaaatcacaaaatgaagcagtgtgtgaggggcctgcgtactcaaatcccgagagctctgggacaggttgcaaatacctgaagaagaaagagaagctgtggccaccattatgtctgggtcaaaggccaaggtccggaaaagcgctgcaatttagaagtggatcggttggaagaacttgaaaaatgcaaaaccatgaagaaagtgattgaggcaattcgagtggagctggttcagtactgggaccagtgcttttatagccaggagcagagacaagcttttgcccctttctgtgctgaggactacacagaaagtctgctccagctccacgatgctgagattgtgcggttaaaaaactactatgaagttcacaaggaactctttgaaggtgtccagaagtgggaagaaacctggaggcttttcttagagtttgagagaaaagcttcagatccaaatcgatttacaaaccgaggaggaaatcttctaaaagaagaaaaacaacgagccaagctccagaaaatgctgcccaagctggaagaagagttgaaggcacgaattgaattgtgggaacaggaacattcaaaggcatttatggtgaatgggcagaaattcatggagtatgtggcagaacaatgggagatgcatcgattggagaaagagagagccaagcaggaaagacaactgaagaacaaaaaacagacagagacagagatgctgtatggcagcgctcctcgaacacctagcaagcggcgaggactggctcccaatacaccgggcaaagcacgtaagctgaacactaccaccatgtccaatgctacggccaatagtagcattcggcctatctttggagggacagtctaccactcccccgtgtctcgacttcctccttctggcagcaagccagtcgctgcttccacctgttcagggaagaaaacaccccgtactggcaggcatggagccaacaaggagaacctggagctcaacggcagcatcctgagtggtgggtaccctggctcggcccccctccagcgcaacttcagcattaattctgttgccagcacctattctgagtttgcggatccgtccctctctgacagttccactgttgggcttcagcgagaactttcaaaggcttccaaatctgatgctacttctggaatcctcaattcaaccaacatccagtcctgagaagccctgatcagtcaaccagctgtggcttcctgtgcctagactggacctaattatatgggggtgactttagtttttcttcagcttaggcgtgcttgaaaccttggccaggttccatgaccatgggcctaacttaaagatgtgaatgagtgttacagttgaaagcccatcataggtttagtggtcctaggagacttggttttgacttatatacatgaaaaagtttatgggcaagaagtgcaaattttagcatatgggggcctgacttctctaccacataattctacttgctgaa

SEQ ID NO: 87372 - DNA, 1348 bp, Homo sapiens
ttttttttttttctgtacaggctcatataatagaggggacttttattattttttcagagaattcggatagccatagattatacagagccatttctcagcactcttttccttccacttaagaagctggaatacaacatgatgaggatgatgccaaaacaagactgctggttcatatcatctagggtacaaatacacacttaatcacttgacactttactgaatgcaaagcaagatttagcatctttgccctcgttgtacagagctgaagcaggagaccagggaggggaggactgcatggttttccttggcaggggagttgtgcaccctgcagtcctgtggtgttgtgggaagatcagcccatgttctgtcggttcccatagcccctaggatgggtgtccttccagtcatcccactcccgggctctgtggagtgtttgttcatcatcctcttcctccttttcttcttgttcttcctgttgctgagctgcttttctgaattcctctggtgctgccttggctattccctgatccggtaatgctccatatttccgatgttgctcataccagtcactcaccgtcatagttggcagacttggataaccagctccaaatactttggcttgagccatgttccgagtgagaatgaagggtttcactggaggcctctcctggcgagatgagttagaagttgatgcctctcttgaagagtctctttctctcaggatctttatttcctggtcaatgctctcaatctcttctaagctgatatcaatccacctctgaaggtgaagaagataatattcacgaacacgctcatcatccgcttgaccactttccacagcagatttcattgcagacaacctatgctccaactccttcttctgcttgtatctctgtattttagcctgtctttgagatgccatagcaacgagactaggataagccatggaggaattggcagtgtgattttcagcagagttgttcatggttttgggcagctcaaactctgccacatgatagcaatggcactgagttaagtagtttataaagtgttctcgagcccgctgcaaatgatctagacgcttgctggggttgacttgtttcaatgggaggggctccttgaaaagcctggaccccaaaaggtaatcaagtgcgtgggggacaaatctttccaaaatctacattcgcggccgaacaaggtggactgggaataacatttcggcagccctcctcaaggaggtccaaagcccttgaacacttcctccgggactatcccggaaacggcggggtcaagtcgccacttctacttcctccagtaactgtctacagtttccgaacagctcggggac

SEQ ID NO: 87373 - DNA, 3173 bp, Homo sapiens
aagcttggcacgagggtcttgtcagcagcccggccattggagcatatctttctgccagttacggagacagcctcgttgtgctggtggccacagtggtggctcttctggacatctgcttcatcttagtggctgttccagaatctctgcctgagaaaatgagaccggtttcctggggagctcagatttcttggaaacaagcagacccttttgcgtcgttgaagaaagttggaaaagattctactgtcttactaaatctgcatcaccgtgtgtctttcataccttcctgaagctgggacagtattcaagttttttttctctatctcagggcaggtcatagggtttgggatctgttaaaattgcagcattcatagctatggtaggaattctgtctattgtggctcagacggcctttcttagcatcttgatgagatcattaggaaataagaatactgtcctccttggcttgggcttccagatgctccagttagcctggtacggttttggatcacaggcctggatgatgtgggcagcagggaccgtggctgccatgtccagcatcacgtttccggcaatcagtgccctcgtctctcggaatgcagagtcagatcagcaaggagttgcccaggggatcataactggaataagaggactatgcaatggcctggggccagcactgtatggcttcatattctacatgttccatgtggaactgactgagttgggcccgaaattgaattctaacaacgttcccctgcagggagctgtcatcccaggcccgccgtttttatttggggcatgtatagtccttatgtcttttctggttgccttattcattcctgaatacagtaaagccagtggagttcaaaaacacagtaacagcagcagcggcagcctgaccaacaccccagaacggggcagtgatgaggacattgagccactactgcaagacagcagcatctgggagctctcttcatttgaggagcctgggaatcagtgcactgagctgtaaactcggcagaaagtgggattctgcatacgccatctctgagagccatggagggagccacacccctggtgacttcatggtgctggatgggagacgctagcggcatccttcagggccaagtttgataaataccaccgccatcattctgctcatcctcctcctgtttttttttttctcttacattcttttttttttcccggttaatccttaaaacaagaaaaaaatttgaaatacttccttgcaaataatgtgcaactcccaaggtgaaactcaaatagaaaaagtcatctctctggtagaaaggatggctttcctgtaatgactatagagtaagagtggcagcaatctttccatgcccttttcagcagaaggcacagaacagtagcgggactgccatctctggcaagatttcaggtaaagaatctcttcttaatttctaccttcctgtttctctgaatcagcccataggtgttgatgagtggccactcttaaagagtcactcagtatcagggatctactgtctttgttcaaaggtcaaataaaaacctagtctccttttattctactttctattcttagctagaatgaaactcagcatatatacacttctggacataataatattgaatagtaattacctttactagatgaaagaaattttcattacaaacttaaatcatgtaaaactcaacaactcagattcctggacctggtgtcctggttgggtccaaggtgattttacagaagaaaaaaacaactcaagcattctggtggcaacatagagattgtaggctgcttctaagaaagttattaacaatttggaaattcctaagtaggatgagagttagtaactggatacgagtgaagtttatatccaagttcagactcaaaggcattattatgatttgcttcttcccatgtcttccatgtcctgcttctcaaagtttttctcatccatcacactcctgccttaactgctctgagtatgcatttgttttcaattcatctttatttcaatctgtttaacttttgaatcgcatgggaatacgcacattaagttcctttctaaaataaggttttatgaagctgagtttcacgataagtgtcttgctattttttgagatgttttatggacaaagaaaactttacagatttatatgtattttgctgcaccagtaaatggaccattaactagggcccacctttaacagagcacccctttgaaagttttataggtatgaaatatatgtagatatttgtaaagggttttaattttttttttgatggggtgctgtgtaaatcttgtatttataaatgtaatgaaggtattgacagaaaaaaatatatacaacttttataaaggattgtgtactgactgaatacatttaaaagaaaatatattttgaaacctgttctgctatgaacagagataacatatctttttactatgctattatgcattaggaagcttaacctaaaaaccaatagcatagtaaaaagatatgttatctctgttcatagcagaacaggtttcaaaatatattttcttttaaatgtattcagtcagtacacaatcctttataaaagttgtatatatttttttctgtcaataccttcattacatttataaatacaagatttacacagcaccccattcaaaaaaaaaattaaaaccctttacaaatatctacatatatttcatacctataaaactttcaaaggggtgctctgttaaaggtcacctagttaatggtccatttactggtgcagcaaaatacatataaatctgtaaagttttctttgtccataaaacatctcaaaaaatagcaagacacttatcgtgaaactcactcagcttcataaaaccttattttagaaaggaacttaatgtgcgtattcccatgcgattcaaaagttaaacagattgaaataaagatgaattgaaaacaaatgcatactcagagcagttaaggcaggagtgtgatggatgagaaaaactttgagaagcaggacatggaagacatgggaagaagcaaatcataataatgcctttgagtctgaacttggatataaacttcactcgtatccagttactaactctcatcctacttaggaatttccaaatatgttaataactttccggacgcgtgggcggacgcgtgggtcg

SEQ ID NO: 87374 - DNA, 344 bp, Homo sapiens
ggcacgaggtgaagttagtagtgagtgttacattttatgcttcaggataggattctcttgaccatttctgttacttccccagttggtggttggtgcactctcgatgccctttgccgcgttcctcgctttgcccctccgcccctcgcttgctgcttgctggtttctctcgtctttcctcgctccgctcctcgttttctttccctcttctcttctttcttctctccttccttccccctttcccctcctttcttcgtcttctcttcttcctctccttctcctctctcctcttcctctccttttcgtttccttcctctttcctctcctcttgtctctcttcctccccc

SEQ ID NO: 87375 - DNA, 4236 bp, Homo sapiens; identical to SEQ ID NO: 65359

SEQ ID NO: 87376 - DNA, 14302 bp, Homo sapiens
cgcgcggccccctccagcccccggctcccggcagcagaagcagaaggcagcgccaggggccgccgccgccgccgagctccgcggggctcgggagccggccccggcgaggaggcgcggaaccatggccgatgggggcgagggcgaagacgagatccagttcctgcgaactgatgatgaagtggttctgcagtgcaccgcaaccatccacaaagaacaacagaagctatgcttggcagcagaaggatttggcaacagactttgtttcttggagtccacttccaattccaagaatgtgcccccagacctctccatctgcacctttgtgctggagcagtccctctctgtccgggcgctgcaggagatgctggctaacaccgtggagaaatcagaagggcaagttgatgtggaaaaatggaaattcatgatgaagactgctcaaggtggtggtcatcgaacactcctctacggacatgccatattgctgcgccattcctatagtggcatgtatctgtgctgcctgtccacctcccggtcttcaactgataagctggcttttgatgttggcttgcaagaggacaccacaggggaggcttgttggtggaccatacaccctgcctctaagcagcgatcagaaggagaaaaagtacgagttggagatgacctcatcttagttagcgtgtcctctgaaaggtacttgcacttgtcttatggcaacggcagcttacacgtggatgccgctttccagcagactctctggagcgtggccccaatcagctcaggaagtgaggcagcccaagggtatctcattggtggtgatgtcctcaggttgctgcatggacacatggacgagtgtctcactgtcccttcaggagaacatggtgaagagcagcggagaactgttcattatgaaggtggcgctgtgtctgttcatgcacgttccctttggagactagagacgctaagagttgcgtggagtggaagccacataagatggggacagccattccgactacgccatgtcacaacaggaaaatacttgagtctcatggaagacaaaaaccttctactcatggacaaagagaaagctgatgtaaaatcaacagcatttaccttccggtcttccaaggaaaaattggatgtaggggtgagaaaagaagtagatggcatgggaacatctgaaataaaatacggtgactcagtatgctatatacaacatgtagacacaggcctatggcttacttaccagtctgtggacgtgaaatccgtgagaatgggatctatacaacgtaaggctattatgcatcatgaaggccacatggatgatggcataagtttgtcgagatcccagcatgaagaatcacgcacagcccgagttatccggagcacagtcttccttttcaatagatttataaggggccttgatgctctcagcaagaaagcgaaggcttccacagtcgatttgcctatagagtccgtaagcctaagtctgcaggatctcattggctacttccaccccccagatgagcatttagagcatgaagacaaacagaacagactacgagccctgaagaatcggcaaaatctcttccaggaagagggaatgatcaacctcgtgcttgagtgcatagaccgtttgcacgtctacagcagtgcagcacactttgctgatgttgctgggcgagaagcaggagagtcttggaaatccattctgaattctctgtatgagttgctggcggctctaattagaggaaatcgtaaaaactgtgctcaattttctggctccctcgactggttgatcagcagattggaaagactggaagcttcttcaggcattctggaagttttacactgtgttttagtagaaagtccagaagctctaaatattattaaagaaggacatattaaatctattatctcacttttagacaaacatggaagaaatcacaaggttctggatgtcttgtgctcactctgtgtttgccacggggttgcagtccgttctaaccagcatctcatctgtgacaatctcctaccaggaagagacttgttattgcagacacgtcttgtgaaccatgtcagcagcatgagacccaatatttttctgggcgtcagtgaaggttctgctcagtataagaaatggtactatgaattgatggtggaccacacagagccctttgtgacagctgaagcaactcacctgcgagtgggctgggcttccactgaaggatattctccctaccctggagggggcgaagagtggggtggaaatggtgttggagatgatctcttctcctatggatttgatggccttcatctctggtcaggttgtattgctcgtactgtaagctcaccaaaccaacatctgttaagaactgatgatgtcatcagttgctgtttagatctgagtgccccaagcatctcgttccgaattaatggacaacctgttcaaggaatgtttgagaatttcaacatcgatggcctcttctttccagtcgttagtttctctgcaggaataaaagtacgctttctgcttggagggcgacatggagaattcaaatttcttcctccacctgggtatgctccttgttatgaagctgttctgccaaaagaaaagttgaaagtggaacacagccgagagtacaagcaagaaagaacttacacacgcgacctgctgggccccacagtttccctgacgcaagctgccttcacacccatccctgtggataccagccagatcgtgttgcctcctcatctagaaagaataagagaaaaactggcagagaatatccatgaactctgggttatgaataaaattgagcttggctggcagtatggtccggttagagatgacaacaagagacaacacccatgcctggtggagttctccaagctgcctgaacaggagcgcaattacaacttacaaatgtcgcttgagaccctgaagactttgttggcattaggatgtcatgtgggtatatcagatgaacatgctgaagacaaggtgaaaaaaatgaagctacccaagaattaccagctgacaagtggatacaagcctgcccctatggacctgagctttatcaaactcaccccatcgcaagaagcaatggtggacaagttggcagaaaatgcacataatgtgtgggcgcgggatcgaatccggcagggctggacttatggcatccaacaggacgtaaagaacagaagaaatcctcgccttgttccctacactcctctggatgaccgaaccaagaaatccaacaaggacagcctccgcgaggctgtgcgcacgctgctggggtacggctacaacttggaagcaccagatcaagatcatgcagccagagccgaagtgtgcagcggcaccggggaaaggttccgaatcttccgtgccgagaagacctatgcagtgaaggccggacggtggtattttgaatttgagacggtcactgctggagacatgagggttggttggagtcgtcctggttgtcaaccggatcaggagcttggctcagatgaacgtgcctttgcctttgatggcttcaaggcccagcggtggcatcagggcaatgaacactatgggcgctcttggcaagcaggcgatgtcgtggggtgtatggttgacatgaacgaacacaccatgatgttcacactgaatggtgaaatccttcttgatgattcaggctcagaactggctttcaaggactttgatgttggcgatggattcatacctgtgtgtagccttggagtggctcaagtgggtaggatgaactttggaaaggatgtcagcaccttgaaatatttcaccatctgtggcttacaagagggctatgaaccatttgccgttaatacaaacagggatattaccatgtggctgagcaagaggcttcctcagtttcttcaagttccatcaaaccatgaacatatagaggtgaccagaatagacggcaccatagacagttccccatgtttaaaggtcactcagaagtcttttggttctcagaacagcaacactgatatcatgttttatcgcctgagcatgccgatcgagtgcgcggaggtcttctccaagacggtggctggagggctccctggggctggcctttttgggcccaagaatgacttggaagattatgatgctgattctgactttgaggttctgatgaagacagctcatggccatctagtgcccgatcgtgttgacaaagacaaagaagctactaaaccagagtttaacaaccacaaagattatgcccaggaaaagccctctcgtctgaaacaaagatttttgcttagaagaacaaagccagattacagcacaagccattctgcaagactcaccgaagatgtccttgctgatgatcgggatgactatgatttcttgatgcaaacgtccacgtactattactcagtgagaatctttcctggacaagaacctgctaatgtctgggtgggctggattacatcagatttccatcagtatgacacaggctttgacttggacagagttcgcacagtaacagttactctaggagatgaaaaaggaaaagtgcatgaaagcatcaaacgcagcaactgctatatggtatgtgcgggtgagagcatgagccccgggcaaggacgcaacaataatggactggagattggctgtgtggtggatgctgccagcgggctgctcacattcattgccaatggcaaggaactgagcacatactatcaggtggaaccgagtacaaaattatttcctgcggtttttgcacaagctacaagtcccaatgttttccagtttgagttgggaagaataaagaatgtgatgcctctctcggcgggattattcaagagtgagcacaagaaccccgtgccgcagtgccccccgcgcctccacgtgcagttcctgtcacacgtcctgtggagcagaatgcccaaccagtttttgaaggtagatgtgtctcgaataagtgaacgccaaggctggttggtgcagtgtttggatcctctgcagttcatgtctcttcatatccctgaggaaaacagatctgttgacatcttagagttgacagagcaggaggaattgctgaaatttcactatcacactctccggctctactcagccgtctgtgctcttgggaaccaccgggtggcccatgccctgtgcagccatgtggatgaacctcagctcctctatgccattgagaacaagtacatgcctggtttgctgcgtgctggctactatgacctgctgattgacatccacctgagctcctatgccactgccaggctcatgatgaacaacgagtacattgtccccatgacggaggagacgaagagcatcaccctgttccctgatgagaacaaaaaacacggccttccagggatcggcctcagcacctccctcaggccacggatgcagttttcctcccccagttttgtaagcattagtaatgaatgttaccagtacagtccagagttcccactggacatcctcaagtccaaaaccatacagatgctgacagaagctgttaaagagggcagtcttcatgcccgggacccagttggagggactactgaattcctctttgtacctctcatcaagcttttctataccctgctgatcatgggcatctttcacaacgaggacttgaagcacatcttgcagttgattgagcccagtgtgtttaaagaagctgccactccggaggaggagagtgacacgctggagaaagagctcagtgtggacgatgcaaagctgcaaggagctggtgaggaagaagccaaggggggcaagcggcccaaggaaggcctgctccaaatgaaactgccagagccagttaaattgcagatgtgcctactgcttcagtacctctgtgactgccaggtccggcaccggatagaagccattgtagccttttcagatgattttgtggctaagctccaagacaatcaacgtttccgatacaacgaagtcatgcaagccttaaacatgtcagctgcactcacagccaggaagacaaaggaatttagatcaccacctcaagaacagatcaatatgcttctcaattttaaggatgacaaaagtgaatgtccatgtccagaagaaattcgtgaccaactattggatttccatgaagatttgatgacacattgtggaattgagctggatgaagatgggtctctggatggaaacagtgatttaacaattagagggcgtctgctatccctggtagaaaaggtgacatatctgaagaagaagcaagcagaaaaaccagttgagagtgactccaaaaagtcctccactctgcagcagctgatttctgagaccatggtccgatgggctcaggagtctgtcattgaagaccccgagctggtgagggccatgtttgtgttgctccatcggcagtatgacggcattgggggtcttgttcgggccctgccaaagacctacacgataaatggtgtgtccgtggaggacaccatcaacctgctggcatcccttggtcagattcggtccctgctgagtgtgagaatgggcaaagaagaagagaagctcatgattcgtggattaggggatattatgaataacaaagtgttttaccagcaccctaatctcatgagggcactggggatgcacgagactgtgatggaggtcatggtgaacgtccttggaggtggagagtccaaggaaatcacctttcccaagatggtggccaactgttgccgttttctctgttacttctgtcgtataagtaggcagaatcaaaaagctatgtttgatcatctcagttatttactggaaaacagcagtgttggtcttgcctccccagctatgagaggttcaacaccactggatgtggctgcagcttcggtgatggataataatgaactagcattagctctgcgtgagccggatctagaaaaggtagttcgttatttggctggttgtggactgcaaagttgccagatgctggtgtctaagggctatccagacattgggtggaacccagttgaaggagagagatatcttgactttctcagatttgctgtcttctgtaatggggagagtgtggaggaaaatgcaaatgtcgtggtgagattgctcattcggaggcctgagtgttttggtcctgctttgagaggagaaggtgggaatgggcttcttgcagcaatggaagaagccatcaaaatcgccgaggatccttcccgagatggtccctcaccaaatagcggatccagtaaaacacttgacacagaggaggaggaagatgacactatccacatggggaacgcgatcatgaccttctattcagctttgattgacctcttgggacgctgtgctcctgagatgcatttgattcatgccgggaagggagaagccatcagaattaggtccattttgagatccctcattcccctgggagatttggtgggcgttatcagcatcgcttttcagatgccaacaatagccaaagatgggaatgtggtggaacctgacatgtctgcggggttttgcccagatcacaaggcagccatggttttattccttgacagggtctatgggattgaggttcaagacttcctcctccatcttcttgaggttggctttctgccagatctccgggcggctgcttctttagatacggcagctttgagtgctacagacatggccttggccctcaatcggtacctttgcacagccgtcttgccattgttaacaagatgtgctcctctctttgctggcacagagcaccacgcttctctcattgactcattacttcatactgtgtatagactttctaagggctgttcacttaccaaagctcagcgggattccatagaagtttgtttactctctatttgtggacaactgagaccttctatgatgcagcacttactcagaagattagtatttgatgtcccattattaaatgaacacgcaaagatgcctcttaaactgctgacaaatcattatgaaagatgctggaaatattactgcctgcctggagggtggggaaactttggtgctgcctcagaagaagaacttcatttatcaagaaagttgttctggggcatttttgatgccctgtctcaaaagaaatatgaacaagaacttttcaaactggcactgccttgcctgagtgcagttgcgggagctttgcctccagactacatggagtcaaattatgtcagtatgatggaaaaacagtcatcaatggattctgaagggaactttaacccacaacctgttgatacctcaaatattacaattcctgagaaattggaatacttcattaacaaatatgcagaacactcccatgacaaatggtcaatggacaagttggcaaatggatggatttatggagaaatatattcagactcttctaaggttcagccattaatgaagccatataagctattgtctgaaaaggaaaaagaaatttatcgctggccaatcaaagaatctttaaaaactatgctggctaggactatgagaactgaaagaactcgggagggagacagcatggccctttacaaccggactcgtcgtatttctcagacaagccaggtttctgtggacgctgcccatggttacagtccccgggccattgacatgagcaatgttacactatctagagacctgcatgctatggcagaaatgatggctgaaaactaccataatatatgggcaaagaaaaagaaaatggagttggagtccaaaggaggaggaaaccatcctctgctggtgccctatgatacactgacagccaaagagaaagccaaggatagagaaaaagcacaggacatcctcaagttcttgcagatcaatggatatgctgtatccagaggatttaaggacctggaactggacacgccttctattgagaaacgatttgcctatagtttcctccaacaactcattcgctatgtggatgaagcccatcagtatatcctggagtttgatggtggcagcagaggcaaaggagaacatttcccttatgaacaagaaatcaagttctttgcaaaagtcgttcttcctttaattgatcagtatttcaaaaaccatcgtttatacttcttatctgcagcaagcagacctctctgctctggaggacatgcttccaacaaagagaaagaaatggtgactagcctattctgcaaacttggagttcttgtcaggcataggatttcactatttggcaatgatgcaacatcaattgtcaactgtcttcatattttgggtcagactttggatgcaaggacagtgatgaagactggcctggagagtgttaaaagtgcactcagagcttttctggacaacgctgcagaggatctggagaagaccatggaaaacctcaagcagggccagttcactcacacccgaaaccagcccaaaggggttactcagattatcaattacaccacagtggccctgctgccaatgctgtcgtcattatttgaacatattggccagcatcagttcggagaagacctaatattggaagatgtccaggtgtcttgttatagaattctgactagcttatatgctttgggaaccagcaagagtatttacgtggagaggcaacgttctgcattaggagaatgtctagctgcctttgctggtgcttttcctgtagcatttttggaaactcatctggacaaacataatatttactccatctacaataccaagtcttcacgagaaagagcagctctcagtttgccaactaatgtggaagatgtttgtccaaacattccgtctttggagaaactcatggaagaaatcgtggaattagccgagtccggcattcgctacactcaaatgccacatgtcatggaagtcatactgcccatgctttgcagctacatgtctcgttggtgggagcatggacctgagaacaatccagaacgggccgagatgtgctgcacagccctgaactcagagcacatgaacacacttctagggaacatattgaaaatcatatataataacttggggattgatgagggagcctggatgaagaggctagcagtgttttcccagcctataataaataaagtgaaacctcagctcttgaaaactcatttcttgccgttaatggagaaactcaagaaaaaggcagctacggtggtgtctgaggaagaccacctgaaagctgaggccaggggggacatgtcggaggcagaactcctcatcctagatgagttcaccacactggccagagatctctatgccttctaccctctcttgattagatttgtggactataacagggcaaagtggctaaaggagcctaacccagaagcagaggagctcttccgcatggtggctgaagtgtttatctactggtcgaagtcccataatttcaaaagagaagagcagaacttcgttgtacagaatgaaatcaacaatatgtctttccttattactgataccaagtcaaagatgtcaaaggcagctgtttctgatcaggaaaggaagaaaatgaagcgcaaaggagatcggtattccatgcagacctctctgattgtagcagctctgaagcggttactgcccattgggttgaacatctgtgcccctggggaccaggagctcattgctctggccaaaaatcgatttagcctgaaagatactgaggatgaagtacgagatataatccgcagcaatattcatttacaaggcaagttggaggatcctgctattagatggcaaatggctctttacaaagacttaccaaacaggactgatgatacctcagatccagagaagacggtagaaagagtattggatatagcaaatgtgctttttcatcttgaacagaagtctaaacgtgtgggtcgaagacattactgtctggtggaacatcctcagagatctaaaaaggctgtatggcataaactactgtctaagcagaggaaaagggctgttgtagcctgcttccggatggcccccttatataatctgccaaggcatcgggctgtcaatctctttcttcagggatatgaaaagtcttggattgaaacagaagaacattactttgaagataaactgatagaagatttagcaaaacctggggctgaacctccagaagaagatgaaggcactaagagagttgatcctctacatcagctgatccttctgtttagtcggacagctttaacagagaaatgcaaactggaggaagattttttatatatggcctatgcagatattatggcaaagagttgtcatgatgaggaagatgacgatggtgaagaggaagtgaagagttttgaagaaaaagaaatggaaaagcaaaagcttctataccagcaagcccgactccacgatcgtggcgcggctgagatggtgctacagacaatcagtgccagcaaaggtgaaactggaccaatggtagcagctactctgaaacttggaattgctattttaaatggtgggaactccacagtacagcagaaaatgcttgactacctcaaggagaaaaaggatgtgggcttctttcagagcctggccggcctgatgcagtcatgtagtgtccttgacctaaatgcatttgagcgacaaaacaaagctgaaggtcttgggatggtgacagaggaaggatcaggagaaaaggttctgcaggacgatgagttcacctgtgacctcttccgattcctgcaactactctgtgagggacacaactcagattttcagaattatctgagaactcagactggcaataatacaactgtcaacataattatctccactgtagactacctactgagagttcaggaatcaattagtgacttttattggtattactctgggaaagatgttattgatgaacaaggacaacggaatttctccaaagctatccaagtggcaaaacaagtctttaacactcttacagagtatattcagggtccttgcactgggaatcaacagagtttggcacacagcaggctgtgggatgctgtggtcggctttcttcatgtgtttgcccatatgcagatgaagctgtcgcaggattccagtcaaattgagctattaaaagaattaatggatctgcagaaggatatggtggtcatgttgctgtccatgttagaaggtaatgttgttaatggaacgattggcaaacagatggtggatatgcttgtggaatcttccaacaacgtggagatgattctcaaattttttgacatgttcttaaaactaaaggatttgacgtcgtctgatacttttaaagaatatgaccccgatggcaagggagtcatttccaagagggacttccacaaagcgatggagagccataagcactacacgcagtcagaaacggaatttcttttgtcttgtgcggagacggatgagaatgaaaccctcgactacgaagagttcgtcaaacgcttccacgaacctgcgaaggacatcggcttcaacgtcgccgtccttctgacaaacctctctgagcacatgcccaacgatacccgacttcagacttttctggaattagcagagagcgtcctgaattatttccagccctttctgggccgcatcgaaatcatgggaagcgccaaacgcatcgagagggtctattttgaaatcagtgagtccagccgaacccagtgggagaagccccaggtcaaggagtccaaaagacagttcatatttgacgtggtcaacgaaggcggagagaaagagaagatggaactctttgtgaacttctgcgaggacaccatctttgaaatgcagctggcggctcagatctcggagtcggacttgaacgagaggtcagcgaataaggaagaaagcgagaaggagaggccggaagagcaggggccgaggatggctttcttctccattctgacggtcaggtcggccctgtttgcgctcaggtacaatatcttgacccttatgcgaatgctcagtctgaagagcctgaagaagcagatgaaaaaagtaaaaaagatgaccgtgaaggacatggtcacggccttcttttcatcctactggagtattttcatgaccctcttgcacttcgtggccagcgttttcagaggctttttccgcatcatttgcagcctgctgcttgggggaagcctcgtcgaaggtgctaaaaagatcaaagttgcagaactgttagccaacatgccagaccccactcaggatgaggttagaggagatggggaggagggagagaggaaacccctggaagccgccctgccctccgaggatctgaccgacttaaaggagctgacagaggaaagtgaccttctttcggacatctttggcctggatctgaagagagaaggaggacagtacaaactgattcctcataatccaaatgctgggctcagtgacctcatgagcaacccagtccccatgcctgaggtgcaggaaaaatttcaggaacagaaggcaaaagaagaagaaaaggaagaaaaagaagaaaccaaatctgaacctgaaaaagccgagggagaagatggagaaaaagaagagaaagccaaggaagacaagggcaaacaaaagttgaggcagcttcacacacacagatacggagaaccagaagtgccagagtcagcattctggaagaaaatcatagcatatcaacagaaacttctaaactattttgctcgcaacttttacaacatgagaatgttagccttatttgtcgcatttgctatcaatttcatcttgctcttttataaggtctccacttcttctgtggttgaaggaaaggagctccccacgagaagttcaagtgaaaatgccaaagtgacaagcctggacagcagctcccatagaatcatcgcagttcactatgtactagaggagagcagcggctacatggagcccacggtgcgtatcttacctattctgcacacggtcatttctttcttctgcatcattggatactactgcttgaaagtcccattggttatttttaagcgagaaaaggaagtggcacggaaattggaatttgatgggctttatattacagaacagccttcagaagatgatattaaaggccagtgggatagactcgtaatcaacacacagtcatttcccaacaactactgggacaaatttgttaaaagaaaggttatggataaatatggagagttctacggccgagacagaatcagtgaattacttggcatggacaaggcagctctggacttcagtgatgccagagaaaagaagaagccaaagaaagacagctccttatcagctgtactgaactccattgatgtgaagtatcagatgtggaaactaggagtcgttttcactgacaactccttcctctacctagcctggtatatgact

SEQ ID NO: 87377 - DNA, 1842 bp, Homo sapiens
gctgctgtgtccagtaaggaccatacatgtgaagtgagaaagcaggtcctgccgcattctgctgaagaatctcatttgtcatcacaagaagcagtatctgctcttgatacttccagtggtaatacagagaccttatcaagtaaaagttactcttctgaagaagtaaagctggctgaagaaccaaagtctttagtcctagctggaaatgtagagagaaacatagcagaggggaaggagattcattctttgatggagagtgaaagtttgctattggagaaagcaaacacagagctttcctggccttccaaagaagatagccaggaaaaaattaaactacctcctgaaagattcttccagaaaccagtgtctggcctatcagtggaacaggtgaagtcagaaacaatctcctcttctgtcaaaacagcccatttcccggcagaaggtgtggaacctgcattgggcaatgaaaaagaagcacacaggagcacacctccttttcctgaagagaagccattggaagaatcaaaaatggttcagtcaaaggttattgatgatgctgatgagggaaagaaaccatcacctgaagtaaaaatacccacacaaagaaaacccatctcctcaatccatgcaagagagcctcaatccccagagtcacctgaggtgacacaaaatccacctacacaaccaaaggtggctaagccggaccttcctgaggaaaagggaaagaaaggaatttcatctttcaaatcgtggatgtccagcttgttttttggatcgagcactccagataacaaagttgctgaacaagaagacttagaaacacagccaagtccatccgtagaaaaagcagtgactgtgatagatcctgaaggtacaattcccaccaattttaatgtagctgagaaaccagctgatcattcattatcagaggtaaaacttaaaactgctgatgaacccagaggtactttagtaaaatctggtgacggtcaaaacgttaaagaaaaatccatgattttatcaaatgtagaagatttacaacagccaaaattcatttctgaggtgtctagggaagattatggaaaaaaagaaatctcaggcgattcagaggaaatgaacataaactcagtagttacttctgctgatggtgagaaccttgaaattcaatcttattcactaatcggtgagaaattggttatggaagaagccaaaactattgttcctcctcatgttactgatagtaaaagagtccagaagccagcaatcgctcctccatctaaatggaatatttctatttttaaggaagagccaagaagtgatcaaaaacaaaaatcactcctttcatttgatgtagtagataaggtgccacaacagccaaaatcagcttcctccaactttgcaagtaaaaatatcacaaaggaatcagagaaaccagagtcaattattttgccagtagaagaatcaaaaggcagtttaattgatttcagtgaagacagactcaagaaagaaatgcaaaatcctacttccttgaaaatttctgaagaggaaacaaaactcaggtctgttagtccaactgagaagaaagataatttggaaaacagattcatataccttgggcagaaaagaaggtgctggcagaaaaacaaaactctgtgggccccattagagcttagagatagtaatgaaatagggaagacacaaattacacttggatctagatctactgaactgaaagaatcaaaagccgatgctatgccacaacacttctatcaaaatgaagactacaatgaaagacccaaaatcattgttggttctgaaaaggagaaagatgaaaaaaaaaaaaaa

SEQ ID NO: 87378 - DNA, 1633 bp, Homo sapiens
gcacgagggcggcaggcgcggcgcgcttagttgccggagctgaacggccgcggagctggtctgaggcgagccgagccgagcgagcgcggcggtggggccgagaggacgcagcaggtggcggcgttgccattgtcgcacggtcacagccacggcgggggtggctgccgctgcgccgccgaacgggaggagccgcccgaggcagcgcggcctgcgcctacggcctgtacctgcgcatcgacaaggggcggctgcaatgccttaacgagagccgcgagggcagcggccgcggcgtcttcaagccgtgggagcgagcggaccgaccgctccaagtttgttgaaagtgatgcagatgaagagcttctgtttaatattccatttacagggcaatgtcaagctcaaaggcatcattataatgggagaggatgatgactcacacccctctgagatgagactgtacaagaatattccacagatgtcctttgatgatacagaaagggagccagatcagacctttagtctgaaccgggatcttacaggagaattagagtatgctacaaaaatttctcgtttttcaaatgtctatcatctctcaattcatatttcaaaaaacttcggagcagatacgacaaaggtcttttatattggcctgagaggagagtggactgagcttcgccgacacgaggtgaccatctgcaattacgaagcatctgccaacccagcagaccatagggtccatcaggttaccccacagacacactttatttcctaagggctggccaaggctcccatagaggcgctgtgtcagtgaagatgtacgactacctgttgggaaggacaaagggatgaggctccagagagagttggctgccacagcctctgccaagctttgtctttggggcttgctgcagaaacctggcctacggaagatacgacaccactgggagggttgtgtaggtgccaggggaccatcgtggttctctagggcgctgtggaaattgggtcttgggctgggtggcatctggcagtcatgggtaacacttgcttttccagttaatgtggccatgtgattccaagtgtcatgttgctttgtggcaagattgttgtgtgacttgtttttttgtttttgtttttgtttttttaaaggaaactatttgtgggctataggaaactttctgatgcctccggattgtgttagtagtagccatcaggagggtctccaactaaaacacttgttcctgcttgctcctttcccctctcattgttcagcattcttgtcaagttgcccagcttggagttgtctgtcacgcacatgtgtcctgtggttatagctagaaggacaggagtctcctgctgatgcgtgatagcttaagcttggggagaaggtcttttccactgcctagctaagcagtctggggagagcatggggatcatttctatgtgtgtgggtaatctggtcagtaagattgagacttagttaagattccccttggaaattccttaatgtttattagcttctaactagtgttgtaagtccgatgccagaatttggagatttgagttcttcttttcatggcttttattcactgtgactaataagcttcctaataaatccttgccagacttaaaaaaaaaa

SEQ ID NO: 87379 - DNA, 1404 bp, Homo sapiens; identical to SEQ ID NO: 65386

SEQ ID NO: 87380 - DNA, 1694 bp, Homo sapiens
ttactcactgtctgggtatttggaggaggaacaacccccatgttgacttggcttcagatcagagttggcgtggacctggatgaaaatctgaaggaggaccccttctcacaacaccaggaagcaaataacttggataaaaacatgacgaaagcagagagtgctcggctcttcagaatgtggtatagctttgaccacaagtatctgaaaccaattttaacccactctggtcctccgctgactacaacattacctgaatggtgtggtccgatttccaggctgcttaccagtcctcaagcctatggggaacagctaaaagaggatgatgtggaatgcattgtaaaccaggatgaacctagccataaattacccaggagcaagcctcctcaccctgcagtcctcctgcaaggctaggtctggaccagaaagcttcaccccagacgccaggcaaggaaaacatttatgagggagacctcggcctgggaggctatgaactcaagcttgagcaaactttgggtcaatcccagttgaattaattggcatgaagagtacagatgtaatcacaagtaatgcaagactcactgaggaatacaagccaagctgatgaggcagtacaggggagaggctggaaaacatattaagagcataaattggagagaatcaaagccttgtcacatggatcctctggtgcctgaagaaatgagattttattatccctctctattatgcaaatgaatttagttttttgacagcagccattctgattactggattggctggggtggggatggaggtatcaggagtctagctgctggaggatgggacagctgtgctgggtcttcagggcatttctgctgcgaatgcggctctccaggcccttcacttctattctggattttattccctccattaaggagagtttaaaaataaaagaaagcttctgagagtaaacattttgctcctaagctgaagggaatgcacagctatttagtaagtgataagtttcttattttgaggacttgactcccatttgctctcagtgaccccagggcagagcccagagaagtgttccgtacccactgctgatggtttcccagagcccacactgagttgaagaacctattgttcttcttggcatccttcttatgctacttctcccatcgctcaaaggggttgcctatggctgggtgtgccctgccctaaatgcagcaccactttcaagcttagtaggaccattccaagaaaaccaggtttcttctccccataccacgttgtgcctgaagaacaagccttcccgtccttgcctgcatgtgagtcacttcttggctgtgcagcaggtccccccctccccgcgatatgctggagggtaggattctgcagcctgtgttgctctctacctggcagcagactgtgcaggagccccaacctgtcctccaattccagcattcacagctgatgagcagtgcaggagcagggcgagaggaacagagccaatgatgtgtgggttacactgaggagccaaggacagggcctcaggtctcccccttacaaggcgtggctcatggcctgcattccagagaccaacatgatagcttttaattcagctgcatgacctgtgccttttaagccataaagatacctcaagcctagcacctcttgaaatccagatgttcatattagactcgaaaaaataggct

SEQ ID NO: 87381 - DNA, 4872 bp, Homo sapiens; identical to SEQ ID NO: 65357

SEQ ID NO: 87382 - DNA, 807 bp, Homo sapiens
atcaccttcctttggtacaaaggggctgtaggtttaaaccttcagtcaaagacccagcgttcactgacagcagagtatgagattccttcagtgagggagagtgatgctgagcaatattactgtgtagctgaaaatggctatggtcccagccccagtgggctggtgagcatcactgtcagaatcccggtgtctcgcccaatcctcatgctcagggctcccagggcccaggctgcagtggaggatgtgctggagcttcactgtgaggccctgagaggctctcctccaatcctgtactggttttatcacgaggatatcaccctggggagcaggtcggccccctctggaggaggagcctccttcaacctttccctgactgaagaacattctggaaactactcctgtgaggccaacaatggcctgggggcccagcgcagtgaggcggtgacactcaacttcacagtgcctactggggccagaagcaatcatcttacctcaggagtcattgaggggctgctcagcacccttggtccagccaccgtggccttattattttgctacggcctcaaaagaaaaataggaagacgttcagccagggatccactcaggagccttcccagccctctaccccaagagttcacctacctcaactcacctaccccagggcagctacagcctatatatgaaaatgtgaatgttgtaagtggggatgaggtttattcactggcgtactataaccagccggagcaggaatcagtagcagaaaccctggggacacatatggaggacaaggtttccttagacatctat

SEQ ID NO: 87383 - DNA, 134 bp, Homo sapiens
ttttttttttttttttcagcattaatataaagatattttccataaaagagtttggcagtcaaaaaaaagcctcccccttccgaaaaacccaagcatttttttcctagtttacagagaattgtgtaaaaaaaaaa

SEQ ID NO: 87384 - DNA, 411 bp, Homo sapiens
agcaaatacaactggatcaagcaatggaaacttggactgaaatttgatgggaagaatgaggacctggttgataaaattaaagagtcccttactctgctgaggaagaagtgggcaggcttggctgaaatgagaactgctgaagcaagacagatagcttgtgatgaactattcacaaatgaggcggaggaatatagcctctatgaagctgtaaaatttctaatgctaaacagagccattgaactatataatgataaagagaaaggaaaggaagtaccatttttctctgtgcttctgtttgctcgggacacatcaaatgacccaggacagcttctgaggaaccacctcaaccaggtgggacacactggtggtcttgaacaggttgaaatggttccttcttgcctatgctgggcg

SEQ ID NO: 87385 - DNA, 3535 bp, Homo sapiens
cagacactgaaatctgatgttttgttgggaactgctgcattagatatttatgaaacattaaagtcaaacaatatgaaacttgaagaagtagttgtgactttgcagcttggaggtgacaaagagccaacagagacaataggagacttgtcaatttgtcttgatgggctacagttagagtctgaagttgttaccaatggtgaaactacatgttcagaaagtgcttctcagaatgatgatggctccagatccaaggatgaaacaagagtgagcacaaatggatcagatgaccctgaagatgcaggagctggtgaaaataggagagtcagtgggaataattctccatcactctcaaatggtggttttaaaccttctagacctccaagaccttcacgaccaccaccacccaccccacgtagaccagcatctgtcaatggttcaccatctgccacttctgaaagtgatgggtctagtacaggctctctgccgccgacaaatacaaatacaaatacatctgaaggagcaacatctggattaataattcctcttactatatctggaggctcaggccctaggccattaaatcctgtaactcaagctcccttgccacctggttgggagcagagagtggaccagcacgggcgagtttactatgtagatcatgttgagaaaagaacaacatgggatagaccagaacctctacctcctggctgggaacggcgggttgacaacatgggacgtatttattatgttgaccatttcacaagaacaacaacgtggcagaggccaacactggaatccgtccggaactatgaacaatggcagctacagcgtagtcagcttcaaggagcaatgcagcagtttaaccagagattcatttatgggaatcaagatttatttgctacatcacaaagtaaagaatttgatcctcttggtccattgccacctggatgggagaagagaacagacagcaatggcagagtatatttcgtcaaccacaacacacgaattacacaatgggaagaccccagaagtcaaggtcaattaaatgaaaagcccttacctgaaggttgggaaatgagattcacagtggatggaattccatattttgtggaccacaatagaagaactaccacctatatagatccccgcacaggaaaatctgccctagacaatggacctcagatagcctatgttcgggacttcaaagcaaaggttcagtatttccggttctggtgtcagcaactggccatgccacagcacataaagattacagtgacaagaaaaacattgtttcgaggattcctttcaacagataatgagcttcagtccccaagatctgcgaagacgtttgtgggtgatttttccaggagaagaaggtttagattatggaggtgtagcaagagaatggttttttcttttgtcacatgaagtgttgaacccaatgtattgcctgtttgaatatgcagggaaggataactactgcttgcagataaaccccgcttcttacatcaatccagatcacctgaaatattttcgttttattggcagatttattgccatggctctgttccatgggaaattcatagacacgggtttttctttaccattctataagcgtatcttgaacaaaccagttggactcaaggatttagaatctattgatccagaattttacaattctctcatctgggttaaggaaaacaatattgaggaatgtgatttggaaatgtacttctccgttgacaaagaaattctaggtgaaattaagagtcatgatctgaaacctaatggtggcaatattcttgtaacagaagaaaataaagaggaatacatcagaatggtagctgagtggaggttgtctcgaggtgttgaagaacagacacaagctttctttgaaggctttaatgaaattcttccccagcaatatttgcaatactttgatgcaaaggaattagaggtccttttatgtggaatgcaagagattgatttgaatgactggcaaagacatgccatctaccgtcattatgcaaggaccagcaaacaaatcatgtggttttggcagtttgttaaagaaattgataatgagaagagaatgagacttctgcagtttgttactggaacctgccgattgccagtaggaggatttgctgatctcatggggagcaatggaccacagaaattctgcattgaaaaagttgggaaagaaaattggctacccagaagtcatacctgttttaatcgcctggacctgccaccatacaagagctatgagcaactgaaggaaaagctgttgtttgccatagaagaaacagaaggatttggacaagagtaacttctgagaacttgcaccatgaatgggcaagaacttatttgcaatgtttgtccttctctgcctgttgcacatcttgtaaaattggacaatggctctttagagagttatctgagtgtaagtaaattaatgttctcatttagatttatctcccagtgatttctactcagcgtttccagaaatcaggtctgcaaatgactagtcagaaccttgcttaacatgagattttaacacaacaatgaaatttgccttgtcttattccactagtttattcctttaacaacaatattttatgtgtgtcaaaagtctcacttgggagtagtgtttttttcttttagacattctgcagacatgcagggaagtcctttggtaactgcaatatacaagattttcctattaagcctcttggtaagaggcatttgttaaaagtgcaagcttactcctgcttctggggatgtgagcaaaattcgggcttgtgttctccctctcattttagtctgacttgactattgtttttcctttctggcgcatgaatccatacatcattcctggaagtgaggcaagactcttgcatctctacaaagtagttttgtcaatttgaattcagggaaaagttggtcacagcctgcaaatgacttcatttggaagtctgattgtttcagttgcctgacaaatactacactttacaaacaatgttaacactgtgattccttcattgttttaagaagttaacctagggccgggcatggtggctcatacctgtaatcctagcactctgggaggccgaggcaggaggatccctttagcccaggagttaaagaccagcctgggcaacatagggagaccctgtctttttttttgggcagcgtggtgggggataaataaataaaaggaaaaaaaacttagcctagaattagaattaatttaattgaattcatctaaagatgtctctggtgatttttatatgttccgctatataattgatgctttatagttttatcataatccaacaacttcagttatatttaattattgttaaggagtttaagactagaaagactagagtgctttctagtccaaatagaggtcagtgaaacagcttttgacatcagattttcatttgagagggagagctgtggtactggctaaaaagaaaggaagataacatccagtaaccacaggaatatattctctgtgaattaaaag

SEQ ID NO: 87386 - DNA, 866 bp, Homo sapiens
ttttttttttttgagacagtctcactctgtcacccagcctaaagtgctcggctgggtgatctcggctcactgcaacctcatgcctccccaggttcaagcaattctcctgtctcagcctgccaagtagctgggactacaggcgcccaccaccacaccaggctaatttttctatttttagtagaaacgaggtttcactatgttggccaggctggtcttgaactcctgacctcacgatccacccgcctcagcttcccaaaatgctgggatgcctggccagctttttttcatatataaagcacacaaataatagcataaatcagtaaggaaaaactgaaagcttttcctctaagatccaggaaaggcaaggatgccccagtattaccactcctattcaatttaatactgaaattccaagagagaagacttaaggaataaaaggactccaaatagaaaacaggaaagaaaaattatctttttacaaatgatcatatatatgtagaaaaaccttacaactccacaacaacagaaaactgttagaactaataaatgaatacagtaaagctgctggatccaagttaatataaaaaaatcagcagcatttctaagtacaagcaggctatctgaaaacgcaattaagaaaacagtcccgtttaccacagcaacaaaagtattttacaatatgtagaaataaacttagccaaagaagtaaaagacttgtacactgaaaattataaaacactgaaggaaattaaagaagaaacacataaataaaaagacattccatattcatgcactgaaggaaaaatatcattaaaagtccataccacccaaaatctacagagtcaacgcaatccctatcaaaatct

SEQ ID NO: 87387 - DNA, 5250 bp, Homo sapiens
ttcggttacacagaagttactttttaatttttaaggaggaaccagtgatgattggtgacaaatctctcacaattaaaaatgggtggaagggccaaatataaaaacattttgcagtattttattctttcgtttaagaagctataacttaaaccatcttcagaaacaagatctgtcacccgtagagcttagagtccaaatagacacctatgaggcgagcacaagggggcggtgtgaggcaactgcaggggcctgaccaagggccggggttggcttgtgtcctaggcgggctggggcagccacttggcccccactgccccgttggacctccacagagccgagtcatgccgacgggggacccggttcaccgccagccttctcatgcagcccgcagtaaggcggtgggccaggggctggcacggccatgggcttcaagcagggccccccgagggtacagagggggcttgggggcaccagctgcagccgcccagcaaggggcccacacggtgtggtttgctctgcgcgtccacctccagccggagcacattcccgcttttcatcaccgctagccggtgccactggccatcacacagcactgaggggcgggtcacctgacgtggagaactcccctgctccgtcatccgcccgcagcaggacttgcttctcggtcacctgcaactgcaagtaggggggcgtccgggcctggcccaagtggaagatcagtccggtgactgccaggggccgcacctccagttccaggcccacatcaggcaattttagctcctgggaagttctaaagtgataattcccccgctgccttggaaagaaccaggcccgcctccaggggggccccaagatgcagggtgtgacccctgccatcccgttgttgggggccccaggggcctcccgtgcagcctcagtctcttcacacagccgctgaacccgacggtcaccggaagtttggagcttgtggcttgcttgccgggaggccgcccacaaagagggtgtggggctgggggtgctctgccccctggtgctgccggtgcggcccctcctggctccaggcccgggccccgtccgtcaccagcaggatccggttcttctcccagcgcacggagaccttgtgccagcggccaggccgggagcgctggcggctctgggcgcggagccgagtcccgaggccttccatctgtgcaacgaagtggccattgctcaggaagagcgccagggaggggctgccgggcctcagacgggcagtgaagaggaggaggcctcgggagcttcgcgggaggacgtgcatggagagactgggccagttcctatgtcgggccaggatgcccacaaactccaggtgactggacagggaacccccaaactggtaggagtctcgggtggtcctgaggtgtgggggcagcatgcaggcaggatgccgggcgggctgacggctgcggcgggaggccttccgggcggtggcctgcagtcctctaggccccaggcccggggtctgggcttgcagggcgggtgcacagcccgtgctcacattgacgctgcccaggttctgctgcagatcaaatacgcgctgtgggcccaggagccgctgcacgaagacgttgctgatgcagccactgaagttgtaaatggtgccagactcaggcaggcctcccaggaggagcctcgggggcccctcaggctgcggctggagctcggggggtggtccccggtggggcttcatctgctggagctggtcatcgacatacagccagactcccgtggcattgctgtagaaggcgacgtaatggggggcaccatcggcgaagcccgcttgagttttcacttcagtcctcaggagctgtaggctcacacggccctgctgcagggacacctggcatagcccatccggggacgcccggtagtagagcagggcactgtcctgggcgctgtggaagccgaagccggagtagacgttgccagtgagcggtgccacgttcgagagcgccaggcgaaggaagccgtggccatggaaagtcatggcgcgccccaccagcaggtcggcggtgcagccggcgctcacgcctgtcgtgttcagccgcttgaggtccacatacttgcccagggccttgatgcctttgacgcagccacggactgagcctccggtggggaagagccgtcgcaggctcgggggcagctggtcgggcggcacgccccccaggtagtaggcgtcggccagctccagatcattgtcctgctccacgctgtacaccgtggcccgctccacacgcaccagcacacgcttgcggctgccccccagcaggaacacctggatcgccttgctggccgaggtcaggggcggtgggggctgcagtgggacggcctttttcaggccagccccaaagtcatacaacagcacgaggctgccttcttgcacggccaagcacaggaactggctctgctgcttcaggaagaagagcaccccgctgtaggacacgagccgcagctcctgctcgaagcgcttggtggtgctgatctgactgtcgaagctgatgcgggcgaagccggtgccgtccaggtaggagccgtccgtgagccacgggtccccggtcgacttggagcgggcacaaggcctgtccacagccgtgtccagctggaaggtcctctcgaagttgtagaggctgaccacctcctcattcagcgtgtccatctcgatgcagccccggtagccggggaagcgaagcaggggagggggcgtgaaggtactggggtaccccccgacgtagaagacgaagtcgtctggccgcaggttgagcagcccctctgccccaggggccaccgtgtcacccttggtttcctggatcatctgtctctccactgtgacggacatgtggccaaactggagagtcctgtccaggctgacagctgcgaactgctccccaatgtcctcatcgatgcttaggactgcagggcccgcctcacccagctgatacacccagtgcaccttcttgtcacgcagagacacacccatgtagtccccagtggcctggcggctgcccatgtacatcacaaagcgatcctcggtaccctgcccaggctcaggctctgggccctgcaggtagaacttgagggcagtgtaggcagcaaggtcggcaagatcccgtggggtgcgcagctgcacccctgagcgcccgttgaacttcatgggcaccttgaccttactggcagccccccgggcctgggcaatgagctctcgcacgcggccaatgctggcggacagggccaggctggcgttgtgcaccccacggttctccaggatgctcagcttggccagcagctggggcagcgtcttctccagggtggacactgagtggcctgcgtcaagcactgcctggcccaggtcctggccccgcaggccctcgtactggccctgccaccgctccacattctcctgcatggcctgcagctgggactgcacacgggtggcggtgtcctgggcttcagcagccacagccttggcatgtgcgatcttcttgcttgtctcgtctgtgtccatggcaagcatggcctgcgccgcctggatgtgcgcctccagctggtccttcttggcccggacatctcggagctgggtcctggcaccctggagggcagcccacacaaggcccagcctctgctgttcctggagcatggcctcttctagtgcagtgctgttggccaggagctgctgggctcggtccaccaggccctgccgcaccaccgtcgcccacgtgtggtccgcctgctgcagggcctggccagcagcatcctcggcagcctgcacggcctgcaggatgcggctgtaggcgttggaggcctcgatggccctctgggtgaggcggtcctggttgacgtccaggatgatgctggacagattgagtgccagctggcccagctgctgtgcgtgggcctcggcggcctccactagacgcagcttgctgcccgccggggagaaggtctgcatcctctgcagcagtggggtccgagccccgtccaggctggcggcgaggcgctccagctcctccttagcctggtccaggctgtgcagcaatctgaagacgctggccagggtgtccctagccgcatgcagagtggcctgcagggtggcattgtcccgggacagctcctgcttcctttgcagggcttcctccaggcgctcctggttgcggctgttgagctcctgggcctcccgtgtggcgtccactgcccggttcaaagcctctcgcaggtccatgaggccggcctcgtgctgggccagccggtcgcgggtttgtgtggccagtgcctggttctcctcccagaggctgctcagctgctcctgcacccgggccagcaatctctgtgctgcagccaactcagcctcagctgctgcctgcggggcccccaggtcccgggcccgcatctcccagagcagccgctccacctcggccagtgtccggagcagctgctcacctgatggagccgaggcattggccagccccaggtggcccgtctgggacatgagctcgctcagggtgcggtccacagcccggatggccgccaacagcgtcttcgcatggcccagtgtggcctcggtgccggccagcaattggctcgcctggtctcgggtccccacggcctggccgcctagccgccgtgcgtcctgcccgaggcttgtgctctgctgctccagcacctccagctgctgtgccgtctcatggcgggggcccagggggctccggagctggctctgcaggtcagcgatggaggcgttcagcctgtgcagacgggcccaggccatggagctggcattgatgccacgcagttgctcgtgaatggcggggaggagggcgccggcccgttccaggtcatccaggagcaggaccacacagtggtcacacacttcacagtggatgctgtggcccacaggcccgcctggaacaggcacctgatgctgctggctgcaggtgtcgcagcgctccccgctgagccccggggggcagttgcagcggcccgtgtgagggtcacagcggcccccagggcactggcagcgcctgcagccctgctcagggagcccccagtagccaggggcacactcgcggcactggggtcccatggtccctggtcggcagtggcactgtccgctctgggggtggcactcggagccctcggcggccggtccacaagcacacgggcggcagcccccgcagccattgaaaccaaaatgtccctcctggcagcggtcacagc

SEQ ID NO: 87388 - DNA, 577 bp, Homo sapiens
  misc_feature (1)...(577): n = a,t,c or g
ttccgcacgccttcctgctctgtgctagcagcgtggccacagccttcattgcctccctggtactgggtatgatcatgattggagtcatcattggctctcgcaagattgggatcaacccagacaacgtggccacacccattgctgccagcctgggcgacctcatcaccttggcgctgctctcaggcatcagctggggactctacctggaactgaatcactggcgatacatctacccactggtgtgtgctttctttgtggccctgctgcctgtctgggtggtgctggcccgacgaagtccagccacaagggaggtgttgtactcgggctgggagcctgttatcattgccatggccatcagcagtgtgggaggcctcatcttggacaagactgtctcagaccccaactttgctgggatggctgtcttcacgcctgtgattaatggtgttgggggcaatctggtggagtgcaagccagccgcatctccaccttcctgcacatgaatggaatgccccgagagaactctgagcaagcttcttgccgctgtcccagnccttgtaccaccttctttcagccctgg

SEQ ID NO: 87389 - DNA, 600 bp, Homo sapiens
cccggcagaggagggcagggcctgcgcctccctacggagcctttgtttctggcgaccgtccccacccgggctcgcgtctccgtttctccgagaggcccaaggtgtcttcgccgcagcctctgtcgcgccgtgacctgtacaggtcgcgggagtcgtagggaggacgccgggacacctggaagccgagaaatggattcagtggcctttgaggatgtggctgtgaacttcaccctggaggagtgggctttgctggatccttcccagaagaatctctacagggatgtgatgcgggaaaccttcaggaacctggcttctgtaggaaaacaatgggaagaccagaacattgaagacccattcaaaattcccaggagaaatataagtcatattccagagagactctgtgaaagtaaagaaggtggtcaaggtgaagaaaaccttcagccagattccagatggtattctgaacaagaaaactcctggagtaaaaccgtgtgaaagcagtgtgtgtggagaagttggcatgggtccttcatcacttaataggcacatcagagatcacactggacgtgaacccaaatgaatatcaggaatatggaagaa

SEQ ID NO: 87390 - DNA, 3497 bp, Homo sapiens
tggcgtcgtggctgtcgggaaagaagggttggggcctgttgttcttcctcccgagtatcccctccagctggacgaccccacgctgcagcacgggcttccggcttctctcctcagtggccaattcgagggcacagcgggctccggaggcgcggcggcaagcctatcccgcctcccaaccacagcctccagcacccgagagaacggccgcccacagcacacgttctccggacaggagggcgaaggcccaagacctggagagatggtcagctctcaaaaaaggcacaaacaattgaaggatggataccatggcatatgttaaaagcgtgttgaaaggaaaataagaaagccaggaatctcaggatgaatcagtctagatcgagatcagatggtggcagtgaagaaaccttacctcaagaccataatcatcatgaaaatgagagaagatggcagcaagagcgtctccacagagaagaggcctattatcagtttattaatgaactcaatgatgaagattatcggcttatgagagaccataatcttttaggcacccctggagaaataacatcagaagaactgcaacagcggttagatggcgtcaaggaacaactagcatctcagcctgacttgagagatggaacgaattacagagactcagaagtccctagagaaagttcacatgaagattctcttctagaatggttgaacacctttcggcgcacaggaaatgcaactcgaagtggacaaaatgggaaccaaacttggagagctgtgagtcgaacaaacccgaacaatggagagtttcggtttagtttggaaatccacgtaaatcatgaaaatagaggatttgaaattcatggagaagattatacagacattccactttcagatagtaacagagatcatactgcaaataggcaacaaaggtcaacttagtcctgtggctaggcgaacaagaagccaaacctcagtgaatttcaatggtagtagttccaacattccaaggactaggcttgcttcaagggggcaaaatccagctgaaggatctttctcaacattgggaaggttaagaaatggaattgggggagcagctggcattcctcgagctaacgcttcacgcactaatttcagtagtcacacaaaccaatcaggtggtagtgaactcaggcaaagggaggggcaacggtttggagcagcacatgtttgggaaaatggggctagaagtaatgttacagtgaggaatacaaaccaaagattagagccaataagattacgatctacttccaatagtcgaagccgttcaccaattcagagacagagtggcactgtttatcataattcccaaagggaaagtagaccagtacagcaaaccactagaagatctgttaggaggagaggtagaactcgagtctttttagagcaagatagagaacgagaacgcagaggtactgcatataccccattctctaattcaaggcttgtgtcaagaataacagtagaagaaggagaagaatccagcagatcctcaactgctgtacgacgacatccaacaatcacactggaccttcaagtgaggaaggatccgtcctggagaaaatagagatcgggatagtattgcaaatagaactcgatccagagtagggctagcagaaaatacagtcactattgaaagcaatagtgggggctttcgccgaaccatttctcgtttagagcggtcaggtattcgaacctatgttagtaccataacagttcctcttcgtaggatttctgagaatgagcttgttgagccatcatcagtggctcttcggtcaattttaaggcagatcatgactgggtttggagaactgagttctctaatggaggccgattctgagtcagaacttcaaagaaatggccagcatttaccagacatgcactcagaactgagtaacttaggtacagataacaacaggagccagcacagggaaggttcctctcaagacaggcaggcccaaggagacagcactgaaatgcatggtgaaaacgagaccacccagcctcatactcgaaacagtgacagtaggggtggcaggcagttgcgaaatccaaacaatttagttgaaactggaacactacccattcttcgccttgctcacttttttttactaaatgaaagtgatgatgatgatcgaatacgtggtttaaccaaagagcagattgacaatctttccaccaggcactatgagcataacagtattgatagtgaactaggtaaaatctgtagtgtttgtattagtgactatgtaactggaaacaagctcaggcaattaccttgcatgcatgaatttcacattcattgtattgaccgatggctctcagagaattgcacttgtccgatctgtcggcagcctgttttagggtctaacatagcaaacaatgggtaaggtgatgggatctactcaaatactgttttttagtagaactgaatgttcaagcattgttttgctgagttatttgtgattagctaaccaggatgaaaaataacagattatatatagtttgaactatttttcgtgtgcttttttaaacttgttaaaaagaaatttatataaaatttaaaatacaaatgttaaattatccagaaatacagaatagttaatattgctagaaccaaataacctctaaaatgtttttattttggtaattttgtcatgctaagcacttttgtatctgcacaattcagtaggttaagaatcaatcttctttttcttaatagtacagcagactttagcttcaagtttcataggcttagtacttatatctagacatttgtgtctaaataagcttttcattaactttttattttaaggacagtatcttttcatgaaagagtatttggctgaatgtttgctatatatatgttacttgaaatgttaaatttaatatgcagcataccataggtgtatatataggtatataattttaaggttaaaatattcagtctacaagtttggttcttatttaagcttttgggctaatactgccatatggcacaatgtttaatattggcaagttcatctcagagaaaggggattcagatataattttaaagtagagataatttactgaagcgtctctgacaatctaacttattagacagcaagcaatatataatactgaaaaagtattcagaaatgggaaaatttacatccatatagggttatttaacttgtgttcagcctttttgtaacttttttgaaagtgcaaacaattctttggattattaaataaggtatacagtatgcatggtttctcaaatttagttttaaaatctaaaagtctataaagaatccagatgcataggcaatatgttaagttcacttggaggctaaaaatctccagtgaaaacaaaacgaaaacctttaagaagaaatgtagcagtttatataaacacaaagtatgcattgcaagcatctgtttctaccaataacacacttacaacaaagactgtaaaaaaaaaa

SEQ ID NO: 87391 - DNA, 1633 bp, Homo sapiens
  misc_feature (1)...(1633): n = a,t,c or g
agctgcagcggcagaggcagcatccagcggcggcgccagcagttccagtccgttgctttactttttgcttcaccgacatagtcattatgccgaagagaaagtctccagagaatacagagggcaaagatggatccaaagtaactaaacaggagcccacaagacggtctgccagattgtcagcgaaacctgctccaccaaaacctgaacccaaaccaagaaaaacatctgctaagaaagaacctggagcaaagattagcagaggtgctaaagggaagaaggaggaaaagcaggaagctggaaaggaaggtactgcaccatctgaaaatggtgaaactaaagctgaagagatccacatctctcgctcaactgttaatgtctcaacctccagaggcaccccacccagcacactgtcagtaaaggggcagattgaaacagtgagagttaagggcacagaaaactgaatctgtagataacgagggagaatgaattgtcatgaaaaattggggttgattttatgtatctcttgggacaacttttaaaagctatttttaccaagtattttgtaaatgctaattttttaggactctactagttggcatacgaaaatatataaggatggacattttatcgtctcatagtcatgctttttggaaatttacatcatcctcaagtaaaataaatatcagttaaatattggaagctgtgtgtaagattgattcagcattccatgcacttgctttaaaatttagtcctgtgcatactgtggtgtttttactgtgcatatttgaatttttttgcagacaagtaaaccttttattttaaaccacaaatagtcagcaggtggccacaactatccatgtttcattaaaatcacataaaacctaggtacaaaagcaccactgattattgctctagaaaaactgcatgaaaaattcaaatatgcacagtaaaaacaccacagtatgcacaggactaaattttaaagcaagtgcatggaatgctgaatcaatcttacacacagcttccaatatttaactgatatttattttacttgaggatgatgtaaatttccaaaaagcatgactatgagacgataaaatgtccatccttatatattttcgtatgccaactagtagagtcctaaaaaattagcatttacaaaatacttggtaaaaatagcttttaaaagttgtcccaagagatacataaaatcaaccccaatttttcatgacaattcattctccctcgttatctacagattcagttttctgtgccttcctttccagcttcctgcttttcctccttcttccctttagcacctctgctaatctttgctccaggttctttcttagcagatgtttttcttggtttgggttcaggttttggtggagcaggtttcgctgacaatctggcagaccgtcttgtgggctcctgtttagttactttggatccatctttgccctctgtattctctggagactttctcttcggcataatgactatgtcggtgaagcaaaaagtaaagcaacggactggaactgctggcgccgccgctggatgctgcctctgccgctgcagctgctcacgcgcagggcgagttcctccncatagacttcgatctccattggngccg

SEQ ID NO: 87392 - DNA, 774 bp, Homo sapiens
tgctgcaagagaaggtgaccttggtagaatctaaactactgtacttcttgacacagtgagggaaagcagttgatattggtattaacacaattatgttgttaaatgcatcacaggtgaggtatttaaagcaaattaaacaagtgacgttcttatttcataaatgcatttaatctcatgcttggctgtttttatggtagaattacagcaatggagaaaattaggcaagaacggaagaggaacagatttgttcataaacggacgcttagaatttgaacttaaagtgagtaaggagcatcaaaagtcaaataggacaaacagggtagatggtattcatggagacaaaggattaactgaggttattttaagactatttatatggaagggatgacattacatagggagacctccaggagtcctgactttgagccccagctatatcaatgactcacactgtgtaacctggaacaaattactcaacctctttgtactccatatttcttatttataaagtgtacataattttatatacgataaagttcttgcaagaatcaattagaaaagaggcaagaaaccaggtacggtggctcatgcctgtaatcctagcactttgggaggccgaggcggggggatcacctgaggtcgggagtttgtgaccagcttgaccaatgtggagaaaccctgtctctactaaaaacacaaaattagcctggccgtggaggccacatgcctgtggccccagctggtttggagggtgaggcaggagaaacgcctggc

SEQ ID NO: 87393 - DNA, 2329 bp, Homo sapiens
tttttttttaacaatagtccttacactgaattcatttatcctgaaatggcagacatcattcatttttcttgaaatggcagaatagcagctgcagacattaatctatggtaccatacccagccaattccaactttttcttgtaaatgtccagacttttctcttcttcttgggagccacttcccagtatccactagtgctaagtggcatcactttatacgaacgagtcttatggtattattcaaagtttacagtattgcattaaacacgatgaaaaatacatgagaaccacaagagattaccttttactgtggtaggcaatttactacagagacaaactgctgaaacagaggtgatcagtgccgattaaaatgtgtggcattttaagtggatacttgcagcacctgaactcactgcaatagcaataggaggtggctatgaaattattagagaagtatagtatataccacagtaactttttgccactctcacttaatactgcatctttacatttgtttcctcgtgccgaattcggcacgaggatcacaggaagcatgggaccgcaaggcgccctgggaccacctggtgtccctggagcaaagggggaacgaggagagcggggtgacctgcagtctcaagccatggtgagatcagtggcgcgtcaagtatgcgaacagctcatccagagtcacatggccaggtacactgccatcctcaaccagattcccagccactcctcatccatccggactgtccaagggcctcctggggagcctgggaggccaggctcacctggagcccctggtgaacaaggacccccaggcacaccaggcttccccggaaatgcaggcgtgccagggaccccaggagaacgaggtctaactggtatcaaaggagaaaaaggaaatccaggcgttggaacccaaggtccaagaggcccccctggaccagcaggaccttcaggggagagtcggcctggcagccctgggcccccgtggctctcctggaccaagaggcccaccaggtcatctgggggttcctggaccccaaggtccttctggccagcctggatattgtgacccctcatcatgttctgcctatggtgtgagagctccccatccagatcagccagagttcacccctgtccaagatgagctggaagccatggaactgtggggccctggagtctgatagcctcaggagaaatttgaagaccaactgcaagaactcttaaggaatcttgtttgagaaaatgttgttatgtggtttgtatgctacttttggggggcagggctcatttcagcagcctaaatctcctccttggataatgttaatattattattattattaacaaaaaatatatatttttaaaaagttcccttaatctatgacatggtagcaatgatttccctttggtgtcttaatggcatgtcagataatttgtttttccagagaagagagctcaaagaggaattgggaaaaataaattgaactctggaatcttctctctcaagtcctaaaatgaacaaacagatatgattgtgtttgagggaaatatgtccctagcaggaaaagaattcaaagaggttcaaagaatatgtcacttactcctacttgctataggaataaccttgctgataagaaaaaaagggacaatattggagaaactacctcttgtttaattgatctgtccaactctgagatcacttggtaactggtttcatgtgtatccaaaaatcagcatttggatttaagctttctgaatttgggtagtttaagaaacagatttagttttttcagtgggttttaactgcatgtgaaataatgattttccaccagctctgatgcaaagagatataattttaatgaacgatttatccagcagtttgttccaggggttgcctctccttatctacggggattactttgtacatgcagataagttttcgcaaacctatttccattttcttttgtaagcaaataaaactttaaaacaatgtatgtggattctttttcctgcatttctaagtatcaccttaagcttttgtagtcttaactgagtgtccaccagaaagacaacagttgtcttcctttaggtaagcattcaaactttcattcattcgtttactcactcactcattcattcattctgagtgcagtagaaaacagaagaagcagttaacttgggactaagagattagcgacattttattgttcatttataatctagcaggcagcaaagaccctgcaaatgcatgacctctgctaaataaatgtttatcaatagttgactgaggagcccacctatcttctgatattgaggaaagccta

SEQ ID NO: 87394 - DNA, 761 bp, Homo sapiens
gccatatccgtggtccacgttattcgggacatcacagtgcttttggctgcccgtattcagacatgaacttgaaaaaggaggcaacacttcacgatcgtttgagagaacaaacacaggcaaattttggaatcagactcttcacattcaaaatcaaaaagcctctgtagtttgaacttcaatggaaaacatgaaaaggtgaacagtcagcccagacttgtacagcaggcaaagtgtttgaaaatcaaaggaaaagaagatattgacttggataatctcttcagagaatactcggtggagcaggcgcagcaggtgcttcaccagtcagtgtccatgtccacggtgtcagcccacccttttcgggaccttcccctcggcagggagcaacactgcaagttgcttccaggcgtggctgacatccgggccagccaagtggcacgttggactgtggatgaggtggctgagtttgtacagtctcttctgggctgtgaagagcatgccaagtgctttaagaaagagcagatcgatggcaaagccttcctgcttctgacacagacggacattgtcaaagtgatgaagatcaaactgggcccagcactgaagatttacaactctatcctgatgttcaggcattcccaggaactccctgaagaagatattgcctcaggccaagaagtcaggggatgaatgggctccctgaacttcctctggcaccaagacctgcgctctttcagcaataaaagtggagcacattaaaaaaaaaa

SEQ ID NO: 87395 - DNA, 556 bp, Homo sapiens
  misc_feature (1)...(556): n = a,t,c or g
gactcgatcgcgttgtgcttttcggacgttataaatcaacacantcacctgttagcattagtattataaagtatgcgaaaacacatttgaaaccgtcganantttcgagaccntccgggncgacccacgcgtncgggcactcgccacactcacaccagatgaaaactcgctgtatttttcctcctgtatgttacggcctgggattaaaaatgctcaggagctggcctgtggagtgtgcctcttgaatgtggactcgaggagccgggcattcaactcagaaacagacagcttcaagctggcctatggtgggcaccagcttcacgccagctgtgccaacttctggctcaactgtgctgaaccaaaacctactggcactcgtcctgcctgacctgctctgaacaactcctctgtgaagcattgacttgccttttgatgggagaccccacggggcgacaggaaccataaaatagaaggcgagcactgcacagttcgcttccctgaatcgatatgaaaaacaccgcaggggacggggcccccgtcatccccacggccagtc

SEQ ID NO: 87396 - DNA, 3651 bp, Homo sapiens
cgtccctggaagccggtcatttaagctcattcctcgccacggcttagtcaacatgggtcgctcgggaaagttgccctctggtgtctcagctaagttgaagcgctggaagaaaggccacagcagcgacagcaaccccgccatctgccgccaccgtcaggccgcccgcagccgcttcttcagccggccgtcaggaaggagtgacctgacagtcgatgctgtgaagttacataatgagctgcagtcagggtccttgcgcttgggcaaaagcgaagccccggagacgcccatggaagaagaggcggagctggttctcaccgagaagtcctcgggtaccttcctgagtggcctttccgactgcacaaacgtcaccttcagcaaagtacagcgcttctgggagtccaactcggctgcccacaaggagatctgtgctgttctggctgctgtcactgaggtgattcgctcccagggagggaaggagacggagactgagtacttcgctgctctgatccggaaggctgcccagcatggagtatgctcagtcctcaagggcagtgaattcatgtttgaaaaggcccctgcccatcatcctgctgccatttccactgccaagttctgcatccaggagattgagaagtctggaggctccaaggaggccaccaccacgctgcacatgctgacgctgctgaaggacctgctgccctgcttcccggaaggcctggtgaagagctgcagtgagactctcctcagggtcatgaccttgagccatgtgctggtgacagcctgtgccatgcaggcctttcacagcctcttccacgccaggcctggcctgagcaccctgtcagcagagctcaacgcccagatcatcacggccctgtacgactatgttcccagtgagaatgatttacaacccctgctagcctggcttaaggtcatggagaaagcccacatcaacctggtgaggttgcagtgggacctggggctaggccacctccctcgcttttttggaactgcggtgacctgcctcctttccccacactcgcaagtgctgactgctgctacgcagagcctcaaggagatcctgaaggaatgcgtggctccccacatggctgacattggctccgtgacctcctcggcctcaggccctgcccaatctgttgccaagatgttcagggcagtggaggagggcctgacgtacaaattccatgcggcctggagctccgtgttgcagctgctgtgtgtcttcttcgaggcgtgtgggagacaggcccaccctgtgatgaggaagtgcctccagtccctgtgtgacctgcgcctctcccctcatttcccccacacggcggctcttgaccaggcagtgggggctgcggtgaccagtatgggacctgaggtggtgctgcaggctgtgcctttggaaattgatggctctgaggagactctggatttcccacggagctggctgctgcctgtcatccgagaccatgttcaggaaacgcgacttggttttttcaccacctacttcttgcccctggctaacaccctgaagagcaaagccatggacctggctcaggcaggcagcacagtggaatctaagatctacgacacactccagtggcagatgtggacactcctgcctgggttctgcacaaggcctacagatgtggccatctccttcaaagggctggcacggacgctgggcatggccatcagcgagcgtccagacctgagggtcaccgtgtgccaggccctgcgcaccctcatcaccaagggctgccaggcagaggctgaccgtgctgaagtgagtcgctttgccaagaactttctgccgatcctcttcaacctgtatgggcagcccgtggcagccggggacactccagcccctcgccgggctgtgctggaaaccatcagaacttacctcaccatcactgacactcagttggtgaacagtctcctggaaaaagccagtgagaaggtgctcgaccctgccagctctgactttaccagattgtctgtcctggacctggtcgtggccttggctccgtgtgctgacgaagctgccatcagtaagctatactccaccatccggccctacctagagagcaaggcccacggggtgcagaagaaggcctaccgagtgctggaggaggtgtgtgccagtcctcagggccccggggccctcttcgtgcagagccacctggaggacctgaagaagacactgctggactcgctgcggagcacctcctcacccgccaagaggccccgtttgaagtgcctcctacacatcgtgaggaagctctcagctgaacacaaggagttcatcactgccctcatcccagaggtgatcctgtgcaccaaggaggtgtcggtgggcgcacggaagaacgcttttgcactgctcgtggagatgggccatgctttcctaaggtttggctcgaaccaggaagaggccctgcagtgctacctcgtcctgatctaccctggcctggtgggcgcggtgaccatggtcagctgcagcatcctggccctgacccacctccttttcgagtttaaaggtctgatggggaccagtacagtggagcagctgctggagaatgtgtgcctgcttctggcctcccgcacccgtgacgtggtcaagtctgcactgggcttcatcaaggtggcagtgactgtcatggacgtggcgcacctggccaaacatgtgcagctggtgatggaagccattgggaagctttcagatgacatgcggcggcacttccgcatgaagcttcggaacctgttcacccaaatttattcccaaagtttggaattttaacctgggggaaaaaggctgttggccccaaggagtaccacagagtcctggtcaacatccggaaagctgaggcccgggccaagaggcaccgagccctgagccaggctgccgtggaggaggaagaagaggaggaggaggaggaggagcccgcccagggcaaaggtgacagcattgaggagattttagctgactcagaggacgaggaggacaatgaggaggaggaaagaagccgaggcaaggagcagcggaagctggcacgacagaggagccgggcatggctgaaagagggcggtggggacgagcccctcaacttcctggatcccaaggtggcccaacgagtcctggccacgcagccagggccaggccggggcaggaagaaggaccacagcttcaaggtgagcgccgatggccggctgatcataagggaggaggcagacggcaacaagatggaggaagaggaaggtgccaaaggcgaagatgaagagatggctgacccaatggaagatgtgatcatcaggaataaaaagcaccagaagctcaagcaccagaaagaggctgaggaggaggagctggagataccccctcagtaccaagctggaggctctggcattcatcgccctgtggccaagaaggctatgcctggggctgaatacaaggccaagaaagcaaaaggtgatgtgaagaagaaaggccggccggatccctatgcctacatccccctcaacagaagcaagctcaaccgcaggaagaagatgaagctgcagggacagttcaaaggcctggtgaaggctgcccggcgaggttcccaggtgggacacaaaaaccgcagaaaggatcgtcgaccc

SEQ ID NO: 87397 - DNA, 2039 bp, Homo sapiens; identical to SEQ ID NO: 65676

SEQ ID NO: 87398 - DNA, 3959 bp, Homo sapiens; identical to SEQ ID NO: 65385

SEQ ID NO: 87399 - DNA, 3341 bp, Homo sapiens
gaaccaagagagcctggtgcagtgccaggggcctgccatcatcggggccctcctgcgaaaggtcccaagctgggccatggacatgaacgtgctcatgtccgcccagctgctgatggagcaggtggcagctgagggcagcgggcccctcctgtacctactctaccagcatttgctcttcaactttcacctctggaccctcagtgacttcgccgtgcgcctcggtcacatccagtacatgtccagcatagttcgggagcacagacagaagctgcggaagaagtacggcgtccagtttatcttggatgctctgcgcacccactacagcccgcagcgggagcgccccctggctgctgacgacctacgcaccgtgcagacctccctcctgggcctggcgagggagttcctggtgcggagtctctcagcagatgacgtgcaggtcacgcagaccatgctgagctttttggcggccacaggcgatgacggtcaggcggtgggtgcgctggacctgctgctggccctgctgcacggttccctggtgcaggagtccttggctgtctttctgttggagccagggaacctcgaagtgctactggccctgctagtgcggccagggtcactgcccctgctgcccgatcgagtctgcaagatcctgcgcagactgcagcagaatgagcggctacctgagcggagccgccagcgcctccggctgcgggagtgtggtctccagggtctggttgcctgcttgcctgaggggactgtttccccccagctctgccagggcctctacaagctgttcctgggggcagattgcctgaacctctcagatctgctggctgtggtacagctgtccctccaggctgacctcagcgttcgcctagacatctgtcgccagcttttccacctcatctacggacagccagatgtagtgcggcttctggcccgacaggctggctggcaagatgtgctgacccggctatatgtcctggaggctgccacagccggcagcccccctccgtcttccccagagtcacctacctcccccaagccagccccacccaagccacccactgagtcacctgctgagccttcagatgtcttcctgccctcagaggccccctgccctgaccctgatggcttttaccatgctctctccccattctgcacgccctttgacctgggcctggaacggtctagtgtaggatcaggcaacactgctggtggtggcggcagcagtgggactcttactccagccagccagcccggcactccttcgccactggatgggccgcggccctttcctgctgctcctggccgccacagctccagtctctccaatgtgctggaggacggcagcctcccggagcccaccattagcggggatgatacctcgaacaccagcaacccacagcaaacctctgaggaagagttgtgcaatctgctcaccaacgtgctgttctcggtgacgtggcgtggcgtggaaggcagcgatgaggctgcctggcgggagccgtggccaggttttctcagtgctcacccagctgggggcctcagccacacttgtgcgcccaccagactgcatcaagcgcagcctcctggagatgatgctggagtcagccctgaccgacatcaaagaggcccccgtgggggtcctggccagcctcacccagcaagcgctttggctgctgcgtctgctgcaggacttcctgtgtgctgaaggccatggtaaccaggaactgtggagtgagaagctctttgaaggtgtatgcagcctacttgatcgcctgggagcctggccccacctggccaacggcacagctgatctccgtgagatggcgcagattggcctacggcttgtacttggctacatcctgctggaagacccacagctgcatgcccaggcctacgtgagattgcacatgctgctacagactgcagtgccagcccgccgcgaggaggcctgctatgtgctctccaagctggaggctgcactggggcgggtgctgaacacctcttctttggagtcagccactgatgaggcagggtccccacttgcagctgcagcagctgcagcagctgcagagcgctgctcctggctggtgccactggtgcgcacgctgctagaccgtgcctatgagccgctggggctgcagtggggactgccctccctgccacccaccaatggcagccccaccttctttgaagacttccaggctttttgtgccacacccgaatggcgccacttcatcgacaaacaggtacagccaaccatgtcccagttcgaaatggacacgtatgctaagagccacgaccttatgtcaggtttctggaatgcctgctatgacatgcttatgagcagtgggcagcggcgccagtgggagcgcgcccagagtcgtcgggccttccaggagctggtgctggaacctgcgcagaggcgggcgcgcctggaggggctacgctacacggcagtgctgaagcagcaggcaacgcagcactccatggccctgctgcactggggggcgctgtggcgccagctcgccagcccatgtggggcctgggcgctgagggacactcccatcccccgctggaaactgtccagcgccgagacatattcacgcatgcgtctgaagctggtgcccaaccatcacttcgaccctcacctggaagccagcgctctccgagacaatctgggtgaggttcccctgacacccaccgaggaggcctcactgcctctggcagtgaccaaagaggccaaagtgagcaccccacccgagttgctgcaggaggaccagctcggcgaggacgagctggctgagctggagaccccgatggaggcagcagaactggatgagcagcgtgagaagctggtgctgtcggccgagtgccagctggtgacggtagtggccgtggtcccagggctgctggaggtcaccacacagaatgtatacttctacgatggcagcactgagcgcgtggaaaccgaggagggcatcggctatgatttccggcgcccactggcccagctgcgtgaggtccacctgcggcgtttcaacctgcgccgttcagcacttgagctcttctttatcgatcaggccaactacttcctcaacttcccatgcaaggtgggcacgaccccagtctcatctcctagccagactcccagaccccagcctggccccatcccaccccatacccaggtacggaaccaggtgtactcgtggctcctgcgcctacggcccccctctcaaggctacctaagcagccgctccccccaggagatgctgcgtgcctcaggccttacccaggtgagagccctgggtgtgagggatgtgaagtcgggaccc

SEQ ID NO: 87400 - DNA, 486 bp, Homo sapiens
  misc_feature (1)...(486): n = a,t,c or g
ccttcgagcgctngatggaccgccctcggaacccgcgcggacccacgcgtccgcgatcagatcagcctcctgaactggctgggcttcgccctctgcctcttttgaatatccctccacgttgccctcaaagccctgcattccagagccccagctccgaggcttctgcagaaggggcggagagaggactgacctgcaggttcgagtttcaagagcttacctgcccaccacctctcccaggggcccacagtggaaggaaggttaatggctccaatatgtgaggacgtccacagttggtgttgtggtggcggtgagaatgggctgcagtttgcctgtgggagggacctgagccatcaggcagggcccggcataccttcatcttcactccggtacccttttctgccttgagggctcaagggattggctccatctgtttctgctttatcctgctgtgaaaaacctgaaaatcccagtggcttgagagtagtt

SEQ ID NO: 87401 - DNA, 1705 bp, Homo sapiens
ctgctcagcagatcgtgtacagaaatgtgatgctggagaactataagaacctggtttccttgggttatcagcttactaagccagatgtgatcctccggttggagaagggagaagagccctggctggtggagagagaaattcaccaagagacccatcctgattcagagactgcatttgaaatcaaatcatcagtttccagcaggagcatttttaaagataagcaatcctgtgacattaaaatggaaggaatggcaaggaatgatctctggtatttgtcattagaagaagtctggaaatgtagagaccagttagacaagtatcaggaaaacccagagagacatttgaggcaagtggcattcacccaaaagaaagtacttactcaggagagagtctctgaaagtggtaaatatgggggaaactgtcttcttcctgctcagctagtactgagagagtatttccataaacgtgactcacatactaaaagtttaaaacatgatttagttcttaatggtcatcaggacagttgtgcaagtaacagtaatgaatgtggtcaaactttctgtcaaaacattcaccttattcagtttgcaagaactcacacaggtgataaatcctacaaatgccctgataatgacaactctcttactcatggttcatctcttggtatatcaaagggcatacatagagagaaaccctatgaatgtaaggaatgtggaaaattcttcagctggcgctctaatcttactaggcatcagcttattcatactggagaaaaaccctatgagtgtaaagaatgtggaaagtctttcagccggagttctcacctcattggacatcaaaagacccatactggtgaggaaccctatgaatgtaaagaatgtggaaaatccttcagctggttctctcaccttgttactcatcagagaactcatacaggagacaaactgtacacatgtaatcagtgtgggaaatcttttgtcatagctctaggcttattagacaccagaggacacatactggagagaaaccctatgaatgtcctgaatgtgggaaatctttcagacagagcacacatctcattctgcatcagagaacccatgtgagagtgaggccctatgaatgcaatgaatgtggaaagtcttacagccagagatctcaccttgttgtgcatcatagaattcacactggactaaaaccttttgagtgtaaggattgtggaaaatgttttagtcgaagctctcacctttattcacatcaaagaacccacactggagagaaaccatatgagtgtcatgattgtggaaaatctttcagccagagttctgcccttattgtgcatcagaggatacacactggagagaaaccatatgaatgctgtcagtgtgggaaagccttcatccggaagaatgacctcattaagcaccagagaattcatgttggagaagagacctataaatgtaatcaatgtggcattatcttcagccagaactctccatttatagttcatcaaatagctcacactggagagcagttcttaacatgcaatcaatgtgggacagcgcttgttaatacctctaaccttattggataccagacaaatcatattagagaaaatgcttactaataaatatgggaatttttcacaaagagcaatgactttattttgcattggagaactcctggagataagctgtacaaattgaat

SEQ ID NO: 87402 - DNA, 740 bp, Homo sapiens
tctcctggattgactttgacatctgggtcctgacagcaacacctccccattttaaaacaaggttacatgcttctgatgtgggattccggttcacaatggatgctgataaagagaaagatttgcagaaatttcttaaaaatgtggatgaaatctccctaaaagaaaaagggaatgaagcatttgctgaaggcaattatgaaacagctatcctgcgctacagtgagggtttggagaagctgaaggacatgaaagtgctgtacaccaaccgagcccaggcttatatgaaacttgaggactatgagaaggcactggtggattgtgagtgggctctcaagtgtgatgaaaaatgcacaaaagcatattttcacatgggaaaagccaacctggccctgaagaactacagtgtgtctagagagtgttataagaagatcttagaaataaaccccaagctgcaaacccaggtgaaagtttacctgaatcaagtagatcttcaggaaaaagcagaccttcaagaaaaggaagcccacgaactgctggattcaggaaagaacacagccgtgaccaccaagaacctcctggagaccctttccaagcctgaccagatccccttgttctatgctggggggattgagatcctgactgaaatgataaatgagtgtaagccagagatgtgtgtgatctcatgagtgctgtcagtgtgaagggacacattcagaggtcatagcctttaccaggccaag

SEQ ID NO: 87403 - DNA, 1667 bp, Homo sapiens
atgattggcacagatcctcgaacaattcttaaagatttattgccggaaacaatacctccacctgagttggatgatatgacactgtggcagattgttattaatatcctttcagaaccaccaaaaaggaaaaaaagaaaagatattaatacaattgaagatgccgtgaaattactgcaagagtgcaaaaaaattatagttctaactggagctggggtgtctgtttcatgtggaatacctgacttcaggtcaagggatggtatttatgctcgccttgctgtagacttcccagatcttccagatcctcaagcgatgtttgatattgaatatttcagaaaagatccaagaccattcttcaagtttgcaaaggaaatatatcctggacaattccagccatctctctgtcacaaattcatagccttgtcagataaggaaggaaaactacttcgcaactatacccagaacatagacacgctggaacaggttgcgggaatccaaaggataattcagtgtcatggttcctttgcaacagcatcttgcctgatttgtaaatacaaagttgactgtgaagctgtacgaggagatatttttaatcaggtagttcctcgatgtcctaggtgcccagctgatgaaccgcttgctatcatgaaaccagagattgtgttttttggtgaaaatttaccagaacagcttcatagagccatgaagtatgacaaagatgaagttgacctcctcattgttattgggtcttccctcaaagtaagaccagtagcactaattccaagttccataccccatgaagtgcctcagatattaattaatagagaacctttgcctcatctgcattttgatgtagagcttcttggagactgtgatgtcataattaatgaattgtgtcataggttaggtggtgaatatgccaaactttgctgtaaccctgtaaagctttcagaaattactgaaaaacctccacgaacacaaaaagaattggcttatttgtcagagttgccacccacacctcttcatgtttcagaagactcaagttcaccagaaagaacttcaccaccagattcttcagtgattgtcacacttttagaccaagcagctaagagtaatgatgatttagatgtgtctgaatcaaaaggttgtatggaagaaaaaccacaggaagtacaaacttctaggaatgttgaaagtattgctgaacagatggaaaatccggatttgaagaatgttggttctagtactggggagaaaaatgaaagaacttcagtggctggaacagtgagaaaatgctgggcctaatagagtggcaaaggagcagattagtaggcggcttgatggtaatccagtatctgtttttgccaccaaatcgttacattttccatggcgctgaggtatattcagactctgaagatgacgtcttatcctctagttcttgtggcagtaacagtgatagtgggacatgccagagtccaagtttagaagaacccatggaggatgaaagtgaaattgaagaattctacaatggcttagaagatgagcctgatgttccagagagagctggaggagctggatttgggactgatggagatgatcaagaggcaattaatgaagctatatctgtgaaacaggaagtaacagacatgaactatccatcaaacaaatca

SEQ ID NO: 87404 - DNA, 2681 bp, Homo sapiens
aaacttatcgacatgctgagagggaacacccagagaccagttcagcaaccaaagtatcctatgactatcgtcacaaacgtcctaagctcttggatggggaccaggacttttctgatgggagaactcagaagtactgtaaggaagaagatagaaaatatagttttcaaaaaggccctctaaatagagagttagattgttttaatactggaagagggagagagactcaagatggacaagtcaaagaaccttttaaaccgtctaagaaagacagcattgcctgtacttattcaaataaaaatgatgttgatttgcgatctagtaatgacaaatggaaggaaaaaaaaaaaaaagaaggggattgtagaaaagagagcaattcttccagtaaccaacttgataaaagtcaaaaacttcctgatgtgaaaccctcgcctatcaatcttaggaagaaatcacttacagttaaagtagatgtgaagaaaacagtagatacattcagggttgcttctagctattccacagagagacagatgtcacatgatttggttgctgttggcaggaaaagtgagaactttcatccagtgtttgaacatcttgactcaactcagaatactgaaaacaaacctacaggagaatttgctcaggaaatcataacaataatccatcaagttaaagcaaattattttccatcacctggcattactttacatgagcgtttctccaacaatggcagatatacacaaggcagatgtaaatgaaattccattgaattcagatccagaaatacacaggagaatagatatgtctttggccgagcttcagagtaaacaagctgtgatctatgaatcggaacagactctgatcaaaataatagatccaaatgacctacgacatgacattgaaagaaggcgaaaagaacggttacagaatgaagatgagcacatttttcacatagctagtgctgcagagagggatgatcagaattccagtttttcaaagaattatactacgcagagaaaagacataattactcacaaaccatttgaggttgagggaaaccaccgaaacacaagagtaagaccttttaagagcaactttagaggtggcagatgccagcccaattataaatcaggcctggtacagaagagcttgtacattcaggctaagtatcagcgtttacggttcactggcccaaggggatttatcactcataagttcagagaaagattaatgagaaaaaagaaggtcccctagctctcaaagctagacaagccaagctggaaacgtgtcctactaattctcccagttctctttccaactttaatggtttcaagtcttctcatttccatcactcattcattactacatttgtttcatccattttaatggctgcatattattccactctgtggatatatgaattatttcagtggtcttcaacctttttgctccatactgtaaagttttgaaaagttatctaccttcttgcacattggaatatacagatgttgccacaggaatctaatctgaaatcgtacaaatggaaatgacgctacaggaggatgtttgggagcatctctctctttttgtcaggagttagaagtgacactaaggcactaatactgtaacttcttgataaaataactttattttttagtagtggaatgctgcaacttttttacacctaacaattgcttttaaattacagtattcaatttaaaagttgtattaactacagtttcctttgcaaaaagtctcaaaagaatcacttgaagggcattatttgttgatgcatttttctctgagcatggtttcatagagagaacttcaccaagtaatattcagacgtttatatgttgaaagttttgcttacataataaaaacaaaaacaagtgtctgaattgtatagtgtctttacatgaaagaactttaaacagtggccttatggtagaaaattttataccagatttttctttttctgatgacattttggcttataactcgaagttttcttaagtttctgaagatcaaggcctatataattcatacatttcatattataagaaggcaagagacaaggtgcttcaaatattccatcaggtagttgtgagtgcactgaatttttagtaatatgttcattcagtttttttccacaactatttgctcttttccaatttcaaaatgctattgtggaaaatatgtaaagattttgtaatctatagtccatcttatttttccctcagggcaagcttgtgcatatcatatttttaaaggctttttaaaaatctgacaaacaaaatctcatatttgaaaattgtactttactactacagcattacacattttgcaagcacatcttatagagtgtttacttttagttcagttgatatgtattgcatacctactatgtgtaagagcaaatggatgggatttttaaatgaaatttttaggccccaataccttatttctttatgttttctgtgttctgcttaacagtacatatacattcccaattacatttttgtgaaatgtttatttgtaataaaataaaatgttgttgctctttctgcttaaataagttacttgccagtttgtgagagcattattttaattttgtttgagacttatagccttggatagcacctctgtttaaacagtgtttaaagcactgttctgtgctt

SEQ ID NO: 87405 - DNA, 443 bp, Homo sapiens
cagcaccacatgcagcagctagacctcccagggcagctgaactctcttaccccagccccgtccccacttaatatagcccccactgccaggcttgcctgtgctggggccacgacttgcccacatatgtggtcacagagcacagaatacctgggcgggtgtgttggggggtggaaggagtgcctggccctggggaggaccctcttggtggaggggagtgggggactgggaccagccagggaggcagcagaggctggaacccagtttaggcccccaactgggtttggcctggggagggagggtccggctccccagcccttccttagggccaggctttcccgcgggcacgggggtgggggggggcacccgagcaggcctgtgagaggcctctcctgctagaattgggcatggccgaggggcaggggctggagctgcgagtccaccct

SEQ ID NO: 87406 - DNA, 4696 bp, Homo sapiens
ccgagccctgaggcaggcggcggcggaggagccctcaaggcgagcagcgcgcgcgcggctgccgcgggactgctgcgggaggcgggcagcgggggccgcgagcgggcggactggcggcggcggcagctgcgcaaagtgcggagtgtggagctggaccagctgcctgagcagccgctcttccttgccgcctcaccgccggcctcctcgacttccccgtcgccggagcccgcggacgcagcggggagtgggaccggcttccagcctgtggcggtgccgccgccccacggagccgccagccggcgcggcgcccaccttaccgagtcggtggcggcgccggacagcggcgcctcgagtcccgcagcggccgagcccggggagaagcgggcgcccgccgccgagccgtctcctgcagcggcccccgccggtcgtgagatggagaataaagaaactctcaaagggttgcacaagatggatgatcgtccagaggaacgaatgatcagggagaaactgaaggcaacctgtatgccagcctggaagcacgaatggttggaaaggagaaataggcgagggcctgtggtggtaaaaccaatcccagttaaaggagatggatctgaaatgaatcacttagcagctgagtctccaggagaggtccaggcaagtgcggcttcaccagcttccaaaggccgacgcagtccttctcctggcaactccccatcaggtcgcacagtgaaatcagaatctccaggagtaaggagaaaaagagtttccccagtgccttttcagagtggcagaatcacaccaccccgaagagccccttcaccagatggcttctcaccatatagccctgaggaaacaaaccgccgtgttaacaaagtgatgcgggccagactgtacttactgcagcagatagggcctaactctttcctgattggaggagacagcccagacaataaataccgggtgtttattgggcctcagaactgcagctgtgcacatggaacattctgtattcatctgctatttgtgatgctccgggtgtttcaactagaaccttcagacccaatgttatggagaaaaactttaaagaattttgaggttgagagtttgttccagaaatatcacagtaggcgtagctcaaggatcaaagctccatctcgtaacaccatccagaagtttgtttcacgcatgtcaaattctcatacattgtcatcatctagtacttctacatctagttcagaaaacagcataaaggatgaagaggaacagatgtgtcctatttgcttgttgggcatgcttgatgaagaaagtcttacagtgtgtgaagacggctgcaggaacaagctgcaccaccactgcatgtcaatttgggcagaagagtgtagaagaaatagagaacctttaatatgtcccctttgtagatctaagtggagatctcatgatttctacagccacgagttgtcaagtcctgtggattccccttcttccctcagagctgcacagcagcaaaccgtacagcagcagcctttggctggatcacgaaggaatcaagagagcaattttaaccttactcattatggaactcagcaaatccctcctgcttacaaagatttagctgagccatggattcaggtgtttggaatggaactcgttggctgcttattttctagaaactggaatgtgagagagatggccctcaggcgtctttcccatgatgtcagtggggccctgctgttggcaaatggggagagcactggaaattctgggggcagcagtggaagcagcccgagtgggggagccaccagggggttttcccagaccagtatctcaggagatgtggtggaggcatgctgcagcgttctgtcaatggtctgtgctgaccctgtctacaaagtgtacgttgctgctttaaaaacattgagagccatgctggtatatactccttgccacagtttagcggaaagaatcaaacttcagagacttctccagccagttgtagacaccatcctagtcaaatgtgcagatgccaatagccgcacaagtcagctgtccatatcaacactgttggaactgtgcaaaggccaagcaggaaagttggcagttggcagagaaatactaaaagctggatccattggtattggtggtgttgattatgtcttaaattgtattcttggaaaccaaactgaatcaaacaattggcaagaacttcttggccgcctttgtcttatagatagactgttgttggaatttcctgctgaattttatcctcatattgtcagtactgatgtttcacaagctgagcctgttgaaatcaggtataagaagctgctgtccctcttaacctttgctttgcagtccattgataattcccactcaatggttggcaaactttccagaaggatctacttgagttctgcaagaatggttactacagtaccccatgtgttttcaaaactgttagaaatgctgagtgtttccagtgtttccactcacttcaccaggatgcgtcgccgtttgatggcttatgcagatgaggtggaaattgccgaagccatccagttgggcgtagaagacactttacaacgacaacaacacaacagcttttgcaggcatctgttcccaacaactatctggaaaccacagagaacagttccccttgagtgcacagtccatttagagaaaactggaaaaggattatgtgctacaaaattgagtgccagttcagaggacatttctgagagactggccaggatttcagtaggaccttctagttcaacaacaacaacaacaacaacaacagagcaaccaaagccaatggttcaaacaaaaggcagaccccacagtcagtgtttgaactcctctcctttatctcatcattcccaattaatgtttccagccttgtcaaccccttcttcttctaccccatctgtaccagctggcactgcaacagatgtctctaagcatagacttcagggattcattccctgcagaataccttctgcatctcctcaaacacagcgcaagttttctctacaattccacagaaactgtcctgaaaacaaagactcagataaactttccccagtctttactcagtcaagacccttgccctccagtaacatacacaggccaaagccatctcgacctaccccaggtaatacaagtaaacagggagatccctcaaaaaatagcatgacacttgatctgaacagtagttccaaatgtgatgacagctttggctgtagcagcaatagtagtaatgctgttatacccagtgacgagacagtgttcaccccagtagaggagaaatgcagattagatgtcaatacagagctcaactccagtattgaggaccttcttgaagcatctatgccttcaagtgatacaacagtaacttttaagtcagaagttgctgtcctgtctcctgaaaaggctgaaaatgatgatacctacaaagatgatgtgaatcataatcaaaagtgcaaagagaagatggaagctgaagaagaagaagctttagcaattgccatggcaatgtcagcgtctcaggatgccctccccatagttcctcagctgcaggttgaaaatggagaagatatcatcattattcaacaggatacaccagagactctaccaggacataccaaagcaaaacaaccgtatagagaagacactgaatggctgaaaggtcaacagataggccttggagcattttcttcttgttatcaggctcaagatgtgggaactggaactttaatggctgttaaacaggggacttatgtcagaaacacatcttctgagcaagaagaagtagtagaagcactaagagaagagataagaatgatgagccatctgaatcatccaaacatcattaggatgttgggagccacgtgtgagaagagcaattacaatctcttcattgaatggatggcagggggatcggtggctcatttgctgagtaaatatggagccttcaaagaatcagtagttattaactacactgaacagttactccgtggcctttcgtatctccatgaaaaccaaatcattcacagagatgtcaaaggtgccaatttgctaattgacagcactggtcagagactaagaattgcagattttggagctgcagccaggttggcatcaaaaggaactggtgcaggagagtttcagggacaattactggggacaattgcatttatggcacctgaggtactaagaggtcaacagtatggaaggagctgtgatgtatggagtgttggctgtgctattatagaaatggcttgtgcaaaaccaccatggaatgcagaaaaacactccaatcatcttgctttgatatttaagattgctagtgcaactactgctccatcgatcccttcacatttgtctcctggtttacgaagatgtggctcttcgttgtttaagaacttcaacctcaggacagacctccatcaagagagctactgaagcatccagtctttcgtactacatggtagccaattatgcagatcaactacagtagaaacaggatgctcaacaagagaaaaaaaacttgtggggaaccacattgatatctacggccatgatgccactgaacagctatgaacgaggccagtggggaacccttacctaagtatgtgattgacaaatcatgatctgtacctaagctcagtatgcaaaagcccaaactagtgcagaaact

SEQ ID NO: 87407 - DNA, 418 bp, Homo sapiens
  misc_feature (1)...(418): n = a,t,c or g
aaaaaaattgaaccctnntttgatcgctgtcgaccgcccgattccggtcgaccaccgccgatttccgttgatctatgaccctaggtcgctttgctgtcatcgattacacctgaggaggccaatacagttgtgcaaaggagaaagatctttggggcacaaaaggaatccctatctgggactatgatgcccgcaccatcgctaccccgatcccctcatcaaggtgaatgataccattcagattgattagagactggcagattactgatttataagttcgacactggtaacctggtatggtgactgagggctacctagaagaattgggtgatcaccaacagaagaggcaccctggatcttttgacgtggttcacgtgaaagatgccaatggaacagctttgccactcgactttcacatttt

SEQ ID NO: 87408 - DNA, 2309 bp, Homo sapiens
  misc_feature (1)...(2309): n = a,t,c or g
gaattggttacgggtcctaacggtcccctgccttgaaatcccttgttgagggcctgcaaccttgtgcttccgactggagacgcctttggtccctcggtgtctgcactggctgctggtcaaggcttcagtgtggagtaattgacactttcgagaatattaaaatcaaattagagaagaaaactgatccataataataaaaatgtctcgaaaaatttcaaaggagtcaaaaaaagtgaacatctctagttctctggaatctgaagatattagtttagaaacaacagttcctacggatgatatttcctcatcagaagagcgagagggcaaagtcagaatcaccaggcagctaattgaacgaaaagaactacttcataatattcagttactaaaaattgagctatcccagaaaactatgatgatcgacaatttgaaagtggattatcttacaaagattgaagaattggaggagaaacttaatgatgcacttcaccagaagcagctactaacattgagattagacaaccaattggcttttcaacagaaagatgccagcaaatatcaagaattaatgaaacaagaaatggaaaccattttgttgagacagaaacaactagaagagacaaatcttcagctaagagaaaaagctggagatgttcgtcgaagcctgcgtgactttgagttgacagaagagcaatatattaaattaaaagcttttcctgaagatcagctttctattcctgaatatgtatctgttcgcttctatgagctagtgaatccattaagaaaggaaatctgtgaactacaagtgaaaaagaatatcctagcagaagaattaagtacaaacaaaaaccaactgaagcagctgacagagacatatgaggaagatcgaaaaaactactctgaagttcaaattagatgtcaacgtttggccttagaattagcagacacaaaacagttaattcagcaaggtgactaccgtcaagagaactatgataaagtcaagagtgaacgtgatgcacttgaacaggaagtaattgagcttaggagaaaacatgaaatacttgaagcctctcacatgattcaaacaaaagaacgaagtgaattatcaaaagaggtagtcaccttagagcaaactgttactttactgcaaaaggataaagaatatcttaatcgccaaaacatggagcttagtgttcgctgtgctcatgaagaggatcgccttgaaagacttcaagctcaactggaagaaagcaaaaaggctagagaagagatgtatgaaaaatatgtagcatccagagaccattataaaacagaatatgaaaataaactacatgatgaactagaacaaatcagattgaaaaccaaccaagaaattgatcaacttcgaaatgcctctagggaaatgtatgaacgagaaaacagaaatctccgagaagcaagggataatgctgtggctgaaaaggaacgagcagtgatggctgaaaaggatgctttagaaaaacacgatcagctcttagacaggtacagagaacctacaaccttagtacagaaagcaaagtaacagaatttctccatcaaagtaaattaaaatcttttgaaagtgagcgtgttcaacttctgcaagaggaaacagcaagaaatctcacacagtgtcaattggaatgtgaaaaatatcagaaaaaattggaggttttaaccaaagaattttatagtctccaagcctcttctgaaaaacgcattactgaacttcaagcacagaactcagagcatcaagcaaggctagacatttatgagaaactggaaaaagagcttgatgaaataataatgcaaactgcagaaattgaaaatgaagatgaggctgaaagggttcttttttcctacggctatggtgctaatgttcccacaacagccaaaagacgactaaagcaaagtgttcacttggcaagaagagtgcttcaattagaaaaacaaaactcgctgattttaaaagatctggaacatcgaaaggaccaagtaacacagctttcaccaggagcttgacagaggccaattcgctattaaaccagactcaacagccttacaggtatctcattgaatcagtgcgtcagagagattctaagattgattcactgacggaatctattgcacaacttggagaaaggatgtcagcaacttaaataaagaaaagtcagctttactacagacgganggaatcaaaatggcattaggatttaggaccaacttctaaatcatccgtgaaggaaatttggcaagcaaatgaaaaccagattcctcggttaagatgcatt

SEQ ID NO: 87409 - DNA, 4459 bp, Homo sapiens
atgatgctgccgaattcagagttgttgctgatgccatgaaagtcattggcttcaaacctgaggagatccaaacagtgtataagattttggctgctattctgcacttgggaaatttaaaatttgtagtagatggtgacacgcctcttattgagaatggcaaagtagtatctatcatagcagaattgctctctactaagacagatatggttgagaaagcccttctttaccggactgtggccacaggccgtgacatcattgacaagcagcacacagaacaagaggccagctacggcagagacgcctttgccaaggcaatatatgagcgccttttttgttggatcgttactcgcatcaatgatattattgaggtcaagaactatgacaccacaatccatgggaaaaacactgttattggtgtcttggatatctatggctttgaaatctttgacaacaacagttttgaacaattctgtatcaattactgcaatgagaaactgcagcagctatttattcagctggttctgaagcaagaacaagaggaataccagcgggaagggatcccctggaaacatattgactacttcaacaatcagatcattgttgacctcgtggagcaacagcacaaagggatcattgcaatccttgatgatgcttgcatgaatgtcggcaaagtcaccgatgaaatgtttcttgaagcacttaacagtaaattgggcaaacacgcccatttttccagccgaaagctctgtgcctcagacaaaattctggagtttgatcgagattttcgaattcgacattatgcaggcgatgtagtctattctgtcattggttttattgacaaaaataaagatactttatttcaagatttcaagcgccttatgtataacagttcaaatcctgtgctcaagaatatgtggcctgaaggcaaactgagcattacagaggtgaccaagcgacctctgactgctgctaccttgtttaagaattctatgattgctctagtagacaaccttgcatcaaaggaaccatattacgttcgttgcatcaaacccaatgacaagaaatctccacagatatttgatgatgaacgctgccggcaccaagtagaatatcttggactactggaaaatgtgagagtgcgtcgggcaggatttgccttccgccagacatacgagaagtttcttcacaggtataagatgatctctgaattcacctggcccaaccatgaccttccttcagacaaagaggctgtcaagaaactaattgaacggtgtggttttcaggatgatgtagcttatgggaagaccaaaattttcattcgaacaccccgaacattgtttaccttggaagaactccgtgcccagatgctcataaggattgtcctctttctacaaaaggtgtggcggggcaccctggcccgcatgcggtacaaaagaaccaaggcagctctgacaataatcaggtactaccggcgctacaaagtgaagtcgtacatccacgaggtggccagacgcttccatggcgtcaagaccatgcgagactacgggaagcacgtgaagtggccaagccctcctaaagttcttcgccgttttgaggaggccctgcagacgattttcaatagatggagagcatcccagctcatcaagagcattccggcctcagacctgccccaggtcagggcaaaggttgcagccgtggaaatgttgaagggtcaaagggctgacctcgggctccagagggcctgggagggcaactatcttgcttcaaagccagatacacctcagacctcaggcacttttgtccctgttgctaatgaattgaaacggaaggacaaatacatgaatgtcctcttttcctgtcacgtccgtaaggtaaatcgatttagtaaggtggaagacagagcaatttttgtcactgaccgtcacctgtataaaatggatcccactaaacagtacaaggtgatgaagactatccctctatacaatttgactggtctgagtgtctccaatggaaaggaccaacttgtagtgttccatacgaaagacaacaaagacctcattgtctgcctcttcagcaaacagccaacccatgagagtcgaattggagaactctgttggagtgctggtgaatcatttcaagagtgagaagcgccaccttcaagtggaacgtcaccaacccagtacagtgcagcctgcacgggaagaagtgcaccgtctccgtggagacgcggctcaaccagccccagcccgacttcaccaagaatcgctcgggcttcatcctcagcgtgcccgggaactgacgccccgcggaggcctggcccggagcccggccacactccgagtcctgggtcccagtccagctgctgcctcccaacccatgcccgctagaaacctgctgcgagggcccctcccagaggagccccgcccctgtaagatttccttcctggttttctgcctttggtatcatcttcctctgtccttactgtccacggtccctgttcaataagccaaagaccctggtgccccgcccagacccctgggctgacgtccagaccaatctcaccccagaggcaactggatggtgcctttagttggtgcggatgccccgtggccaggtcaagtcagagcacctggacaggtgtcctccctgctgctgaccctgcagagggaaggggtggggatgcaggaccccactctgcgggagccccatagccacctctcttgcccaaggtgagccagccctggggacccagctcagggaggctctgctcagagttcggcggacccaccccaacccaactcccagccgccagccaaagccactgggtgagcagagtcacccacagggccagcccctcagccaggagccagtggcaggaggcggaacagcccatccagcagagtgagtccatccttcccaggttctcccctgggagactccctttgccaccaaggcccccaccagggcctctgaccaccgctctggagaggacagtgtggcatgctccaaggatcatcttacttaactcgcagcctgtggctgtggtcctcttatagatactttcaccgtttgcagggttgctaatcagatacctgctgtcaccacacttgggtcaggaaccctaatgagaacggggagctgccagggtgagggcagccctcagggtcggccgctttccctctggaccacctcccgctgcgtttcctactcagagaaacagcaagggcggggtcaagacacgggatgacgggaagcaggaagcggggcagcagcacagcgtggggtcctggcactgcaggccaggccaggatgcccaccccgccctctacacggccccttggggcctgcgcccgtgaaactggtgccagggagcactgccagcttgccagtttctgcccagcaaaagcacgtatgcttcaggggccttctgagaccaccttccccactgagccccagctgctgagaaggccttgagggaagtagaggctgggagcaaatgccccatgcggtgagaggatgaggggagcctacgcctcaggcatgtggtgagaggatgagggggagggagcccacgcctcaggtggagtgggcagaggtgcaagagagggatgtactgaagcttcttcccgtcctgccacagacacttctcctgccttcccaccctgacccggcagaacccaccaagtgcctgtgtgcagcctcctgtgcctcacccagggcctgaccccagagtggtcccaacaacccggtctcatgcccactccccatccctgcttcccaaaaattgcactgtgtgcagtttgcaacaaagaatcccgctggcatcctgtccttgggaaccctttctcattctccaagcctggtcagctgcctgcacaggcagaggtgccctcagcccaggttagcaacactcatagttttgccaattaccagtagacactagtggaaccatctaactggaacttcctctctccttccacttatttcctcaaacttgttgctttacactagacacatgcaaatgtatgttttaaacacaccaaaacagatcatgccaaatgagttgcctgtcaaaggctggagggcaggaggagggcctgggtttgggttctttcctcccagcctttggatggtgccttgggccccttagccccagcgccagggcctcccagctgaggccacaggacaagcacttttttatgatgtactaaaagccacagtatgtggcaactgcaaaaggatcaggaatttagggtatgatctcggtcacgtgtcccgggcgctgaggggaaaggaagcgggcatgattgtagacaatgagggggttctcttgatgtaatgaaatgcaattttatggtttggtgcaaaaactcctattttccagtaaattaactttatttctaaagcatattttgatttgccatcaagagcaataaagcattaaatcttaaaaaaaaaa

SEQ ID NO: 87410 - DNA, 1599 bp, Homo sapiens
aggattttgagtcagagagggttcctactgccgtcagccttggccatgtgacttcacctctctgaaccagtctcttcagctagagggtggggacacctgcctcgcctggctattgtcaggattcagtaaggagacggcgatgcgagagtcgctggtcatgctctccccaggctccgaggaggatgaggcccacgagggttgcagccgagagaacctgggccggatccagttcagtgtcggctacaacttccaggagtccacgctcaccgtgaagatcatgaaggcccaggagctgccggccaaggacttcagcggcaccagcgaccccttcgtcaagatctacctgctgcccgacaagaagcacaagctggagaccaaggtgaagcggaagaacctgaacccccactggaaacgagacccttcctctttgaaggttttccctatgaaaaaggtggtgccagaggatccctcctacctcccaagtccctggactatgaccgcttcagccgcaacgaaccccattgggaagggtgtccatcccccttaacaaggtggacctgacccagatgcagaccttctggaaggatctgaagccatgcagcgatgggagtgggagccgaggggagctgctcttgtctctctgctacaacccctctgccaactccatcatcgtgaacatcatcaaagcccggaacctcaaagccatgggacatcgggggcacatcagaccccttacgtgaaggtatggctgattgtacaaaggacaagcgggtgggagaagaagaagacggtgacgattgaagaggaacctgaaccccatgtttcaatgagtcccttcgccttcgatatcccccacggagaaagctgagggagacgaccatcatcatcactgtcatggacaaggacaagctcagccgcaatgacgtcatcggcaagatctacctgtcctggaagagcgggccaggggaggtgaagcactggaaggacatgattgcccgtccccggcagcccgtggcccagtggcaccagctgaaggcctgagtggggccaagggaggcccagggggccgagggcccaggtccccatcatgccctcaccactttatgcacaacgcccggcctgagccccctgccatagggaggggaggaccctgagggctcagccagggaggggtcccaggactcaactgggccccgtttctaggaagtaccagccccatcccccacagtccagctccggggaaggggctctgggaggcattttcctgctttgccccttttcttcctgacttactaatactaaagaagttgggggagctcgagagccagacggccagacaggcagacccctccagaggcccgcccaggtgggcatggtcccccattttctttaaggcagcaccctggagtggagagaggccactccctctccagcccccgatgtggacccggggaggggaggctgaggcgtttggccccggcctggccaggagaggcccatccccagggcagtttcaggtgccggctgggccctgaatgtcgaggataggcatatagcccgttgctgcggcatggaggtggtgccgttccacaatcggtc

SEQ ID NO: 87411 - DNA, 2611 bp, Homo sapiens; identical to SEQ ID NO: 65459
  misc_feature (1)...(2611): n = a,t,c or g

SEQ ID NO: 87412 - DNA, 398 bp, Homo sapiens
  misc_feature (1)...(398): n = a,t,c or g
caagacaagtggaccagccagcaggacccagatcatccaactcggctgatcctgagacgggaccaaactgctgccgaagacgaccgccctgttctggtcactccggaggctaaccagcctacgcatggctgaagtttgaggaaacaacaagccctgctctagtcacacactgaaagctgactagtctatgcacggccaaagcttgaggactcatcaagcaagtaaatgtagttagaaatcttagaactagtagttttccttgtaatattaactgttttactattgttctgtcactgtgctcaacctcctctcccaaataaggacctcttctgtccttactagatatgaatatactgtacattgttttactgttgttaccccacttaaccatgctagan

SEQ ID NO: 87413 - DNA, 2199 bp, Homo sapiens; identical to SEQ ID NO: 65307
  misc_feature (1)...(2199): n = a,t,c or g

SEQ ID NO: 87414 - DNA, 757 bp, Homo sapiens
aagttctcaattcctttttttttgagatggagttttactcttgtcaccgaggctggagggcaatgacatgatctccgttcactgcaatctcggcctcctgggtttaagccattctcctgcctcagcctcccaagtaggtgggattacaggcacccaacaccacaccgggctaatttttggatttttaatagagacggaatttcaccatgttggccaggctggtctcgaactcctgacctcaggtgatccacctgccttggccttccaaagtgctgggattacaggcgtgagccaccatgcctggctacaagttcttaattcttaagagacaccatgcctggctacaagttcttaattcttaagagacatggcgataattcatgctgaagaggaaatctggaaacctgaaagatgcgacattgcttttaccaacacctccacatttcctatacataaaaataaattatactagtgtaataccctagaaatgtataaaatgtgacaaagcctttatatgattgtcatacatgattgtaggtgatagaagtcatactgccaaaactcctgtaagtgtgaagaatgtggcaaaatattttattagtgcttataccttatttcacaggaaagctcttatccttgagaaaaattgtgcaaatacaaagaatatggaaaaaccattaatgcctactcacatcttactgaacagaagaaggttcatagttaataaagcattaaaagtgcaattactgtcaaaaaa

SEQ ID NO: 87415 - DNA, 2962 bp, Homo sapiens
atcatggccttacctctaaagacactgctccaaccatttcatgctacgggagcagaaagcgataaaacagaaaaatctgttctcaattgcatttataaggttttacatgggtgtgtttatggagctcagtgttttagcaatccaaggtattttcccatgagcctctctgatttggcatctgtaaattatgatccttttatgcatttggaaagtctgaaagagcctgagcctctgcactctcctgactcaaaacgatcttctaaactccagccagtaacagaagtgaaaactcaaatgcagcatggattaatctctatagcagcccgcactgttattacacatttggtaaatcacctgggccattatccaatgagcggtggtcctgctatgctaacaagtcaggtgtgtgaaaatcacgacaatcattacagtgaaagtactgaactttctcctgaactctttgagagtccaaatatccagttctttgtgttaaataatacaaccttagtgtcctgtatccagatcagatcagaagagaatatgcctggaggaggtttatctgctggccttgcatcagccaattcaaatgtcagaatcatagtacgtgatctctctggaaaatattcatgggattctgctatactgtatggcccacctcctgtaagtggcttgtcagaacctacatctttcatgctttcattgtctcaccaagagaagccagaagagcctccgacatctaatgaatgcttagaagatataaccgtaaaagatggactttctctccagtttaaaagatttagagaaactgtaccaacttgggatacaataagagatgaagaagatgttcttgatgagctcttgcagtatttgggtgttactagtcctgaatgcttacagagaactggaatctcacttaatattcctgctccacaacctgtgtgcatttctgaaaaacaagaaaatgatgttattaatgctatccttaagcaacatacagaagaaaaagaatttgttgagaagcactttaatgacttaaacatgaaagctgtggaacaagatgaaccaatacctcaaaaacctcagtcagcattttattattggcagattggcttcttagtatattgggaatgaattcctgggacaaacggaggagctttcatctcctgaagaaaaatgaaaagctacttagagaacttaggaacttggattcaaggcagtgccgagagacacacaagattgcagtattttatgttgctgaaggacaagaagacaaacactccattctcaccaatacaggaggaagtcaagcatatgaagattttgtagctggtcttggttgggaggtaaatcttacaaaccattgtggttttatgggaggactacaaaaaaacaaaagcactggattgaccactccatattttgctacctctacagtagaagtaatatttcacgtgtcaacaagaatgccttctgattctgatgattctttgaccaaaaaattgagacatttgggaaatgatgaagtgcacattgtttggtcagagcatactagagactacaggagaggaattattcccacagaatttggtgatgtccttattgtaatatatccaatgaaaaatcacatgttcagtattcagataatgaaaaaaccagaggttcccttctttggtcccctttttgatggtgctattgtgaatggaaaggttctacccattatggttagagcaacagctataaatgcaagccgtgctctgaaatctctgattccattgtatcaaaacttctatgaggagagagcacgatacctgcaaacaattgtccagcaccacttagaaccaacaacatttgaagattttgcagcacaggttttttctccagctccctaccaccatttaccatctgatgccgatcattaaatatcagttctgtttatctgaaggctcctacccagagattctacccagtgaaactcccacagcaacgcaggtagatggggctgacctggcctctccaatgtctcctcgaactagcaaaagccgcatgtccatgaagctgcgtcgttcctctgggctcagccaataaatcctaaggagacaaggcaggcccagcagtgattcagcagtaggccaccttaggcacggaacataggggtttaacccttttcagggcctttcatgtcttgcccttaacatgggcatggttttctttcctgttacatttatttgagaaaacactggatttaaataattttaaataatttgtagcttaatattaaagatttaagttatttattgtttcattttttttcccacaatccaagctgccatattttgagggcagggggagttttattctacaccctttaccttcctagataattatgtctaagtagttttatctttaatttcatggttaactgtgagccaaaatacaattggacaattagtctcattatttattgtgccccattgcaactttatggttcaataaatatataattttttacaaatgtaaaattttacatttaagcatttgtaaagttacagcaaaagatgtacctgttaatacacagaatgtgtacagattatttgttatgacaataaaacactcaaaataaatggtcttttgcatctcaaattccaactgaaatcattttagtattaactcttttttcccaaagcaatgtctcatttcttgggctgtgcaggtgatgccatgttatatccaataactaggaaaaatcactgtgctgaacttttatgtttagcttccaagtatttttctaatgttttgcatttcaagtggtatcactgttaaatgccatttgttttcagattgtgggcctttttattattggctggctagatcctggtgtttctatgttcttttttaagcaccaaaaaggaagatggggaagaaaagaaggaaaattttctgatataaatatggtgttcaaacc

SEQ ID NO: 87416 - DNA, 2070 bp, Homo sapiens
  misc_feature (1)...(2070): n = a,t,c or g
cagtctggtgcgactcaatctttctagtaatgaactgaagagtttgccagcagaaataaatagaatgaaaaggttgaagcatttggattgtaattcaaatctcttggaaactatacctcctgaattggctggcatggaatcactagaattgctttatttgcggaggaataaattacgttttctaccagaatttccttcttgtagtctattgaaggaattgcacgtaggtgaaaaccagattgaaatgttagaggcagaacatcttaaacatctgaattcaattcttgtgctagacctgagggataacaagttaaaatctgttccagatgaaattatactactacggtccttggaaaggcttgacctaagcaacaatgatattagtagtcttccctattcattggggaaccttcatttgaaatttttggcattagaaggaaatcctttgagaacaattcgaagagaaattataagtaaaggaacacaagaagtcctaaaatatctacgaagcaagatcaaagatgatggacctagccaagtgagtctgctactgagactgccatgacactaccaagtgaatccagagtcaatatacatgccatcattacattaaaaatattagactatagtgataaacaagcaactttgattcctgatgaggtgtttgatgcagtaaaaagcaacatcgtcacttctattaacttcagtaagaatcaactatgtgaaattccaaaaaggatggtagaactgaaggaaatggtttctgatgtcgatctcagttttaataaactttcctttatatccttggagttatgtgtgcttcagaaattgacttttttagatctcaggaacaattttttaaattctttgccagaagaaatggaatcactggtaagactgcaaacgatcaatctttcctttaataggtttaaaatgctacctgaagttctatatcgtatcttcacacttgaaacaattctgattagtaataatcaggttggatctgtggaccctcagaaaatgaagatgatggaaaatctgaccacgttggaccttcaaaataatgacctcttacaaattccaccagagctcggtaattgtgtaaacttaagaacattactactggatggaaatccattccgagttcctcgagcagccatattaatgaaaggaacagctgctatacttgaatatttgagagaccgaattcctacttaacatggagttgctttataacccttgtcatgtattattaaccctggttaattctaaggaggatgtaacatttgttttagtatcatcttaaaaggtgattattgtaattgatcttgtagtttcccagtatcacctacccgttggtataattagcctgggccatattcactgccagtaaatatttttacatttttatttaagatttttgtaaggtgttgtatacatttgtaatggtgataaccacaatgtgttcatacatttgttctaaatgttttgcttatgatttatcctgctaactttcattttcttatagcaagcagttttttcaaaaatgaatttttatttaatgtggttcagtattataataacaaagcatttttgtagaactggttttttttctcatttatttttgtattccatacaatgtgaccaattgacttgaatatgactagccagtttctatgtttttgttagatataaaattaaatcgaattttgttgaatactgttctttggcatttaaaaaataagaccttcttatcttgggccacatgtcaaaagaaaaaggaaacaaaaatatattaaaaataagacttttcattacccatgataggacttttgtgatatggctaatctcagtacacatttcaactttaaaacctttttatttacagcaccataattttaaaatttacttgcaatcttggcaagactaagcttgcagtgtttttctaaaagggaatttgataggtcaacttgatttaataaaaattaaatatcatttttgtttacaccacaattatcagaactaggttgattagncattataacacttaccatatgattctattatgaa

SEQ ID NO: 87417 - DNA, 6076 bp, Homo sapiens; identical to SEQ ID NO: 65364

SEQ ID NO: 87418 - DNA, 1193 bp, Homo sapiens
ttttttttttattttaaaaagtttaaatttatcaaaacttgcacaagcacagatgtacatgacaccattcacaattgggaaaaagtaaacacatgtaaagatgcagttttaaatcataaatgcataagattagctgtagtacatactgtagtactacaataatttcataaccacctcctgttgctattgcagtgagctcaagtgttgtgagtatccgcttaaaacaccgtgtgatgttaatctgcatgtgggcagttcatctctccagtaaattgtgtatcacagtaaacataatctctcatggttcttgtgtatttttcatgtttagtgcaataacataaaccttgaataacaccatgggacccatataaaatgccactagtgatgctggaagtattctcaagaagcaaagtcatgacactactagaaaaagttgaattgctttgatatataccatagtttggagtgtgcagcagcagtcatttcagtcagacgattcatcttgtaaacagaccatgtacacgtacagtacaaatacaatacagtgttataaatacatttcctcttccttatgatttcaataacattttctttagcttactttattaaagaatacagtatacaatatatatacagaatatgtgttaactgtttatgttattggtaaggcttctggtcaatagtaggctatttactagtaggtaggttttggggagtcaaaagttacacgtggatttttgactgcgcaggggatcagcacacctaacccctgcattgttcgagtcaactgtattataaaagtagccttaataactttatcgtttatgcggcatacatgtttccacttgtcattactatatagtatgaaacgctgttgagtctattttgaatcctaaatatgtctataatactcagtaagatacggaagtcagattacatatacactgaacaaaaatcaccatgtagaatactgtacatgtaagtctgtagcttgaagtatagaaccagagccattaatgtgcagggtttattgttctttcagtgcaaggcagttcttattttaattctttaagtccgtgcataaattgtaagtgatttcccttcataaatattgggagacccatttttaatgttgctttccagataagacttgaaccctgatctgtccacaatttattatttcttccaaaaaa

SEQ ID NO: 87419 - DNA, 6507 bp, Homo sapiens
cgcacaaggtggcagcccctgatgtcgtcgtgccaacgctggacacagtccgccacgaagccctcttgtacacttggctggccgaacacaagcccctggtcttgtgtggccctcctgggtctggcaagaccatgacactcttcagcgccctccgggccttgcctgacatggaggtggtgggtctcaacttctccagtgctactactccagagctgcttctgaagacttttgatcactactgcgagtacaggcgcacacctaatggggtggttttggctcctgttcaacttggaaagtggctggtgttgttctgtgatgaaatcaacttgccagatatggataaatatgggacccagagggtcatatccttcatcagacagatggtggagcacggaggcttttaccgtacctcagatcaaacatgggtgaagctggagagaatccagtttgttggggcttgtaatccccccacagaccctggaagaaagcccctctcacacaggttcctgcgccacgtgcctgtcgtgtatgtggattacccgggccccgcctccctcacacagatctacggcaccttcaaccgcgccatgctgaggctcattccatccctgcggacgtatgcagagccgctcactgctgccatggtggagttctacaccatgtctcaggagagattcacccaggatacacaacctcactatatctattcaccccgtgaaatgactaggtgggtgagaggcatctttgaagcgctgagacctctggagaccctgcctgttgaaggcctcattcggatttgggcacatgaagctctgcgtctcttccaagatagactcgtagaggatgaggagaggcgttggactgatgagaacatcgacacggttgctctgaagcacttccctaacatcgacagagagaaggcaatgagccgacccatcttgtacagcaactggctgtcaaaggattacatcccagtagaccaagaagagttaagagattatgtcaaagctaggctgaaggtcttttatgaagaagaacttgatgttccgctggtgctgtttaatgaagtcctagaccacgtgctgaggattgacagaatattccgtcaacctcaaggccacttgcttctgattggtgttagtggagcaggaaaaactaccctgtctcgtttcgtcgcctggatgaacggtttgagtgtgtaccagattaaggtccataggaagtacacaggggaagactttgatgaagatctacggacagtgttgagacgttctggctgtaaaaatgaaaagatagcatttataatggatgaatctaatgtgttagattctggattcctggagcgaatgaatacccttctggccaatggagaggtgcctggtctctttgaaggagacgagtatgccaccttgatgacgcagtgcaaagagggggcacagaaggaaggcctgatgctggactcgcacgaggagctctacaagtggttcactagccaggttatccgcaacctccacgtcgtgttcaccatgaacccgtcctcggagggactcaaggaccgggcagctacatcaccagcacttttcaacaggtgtgtgttgaattggtttggagactggtccaccgaagcactgtatcaggttggcaaagaattcacaagtaagatggatctggagaagccaaattacatcgtgcctgattacatgccagttgtgtatgataagctgccgcagccaccatcccatcgggaagccattgtgaacagctgtgtgtttgttcatcagactcttcaccaggcgaatgctcggctagcaaagcgaggcggcagaacgatggccatcacccctcgccactacctggacttcatcaatcactatgccaacctgttccacgagaagcggagcgagctggaggagcagcagatgcacttgaacgtggggctcaggaagatcaaagagacagtcgaccaggtagaagaactgcgtcgtgacttgaggataaagagccaagagctggaggtgaagaatgcagcagccaatgacaagctgaaaaagatggtgaaagaccagcaggaggctgaaaagaagaaggttatgagccaagaaatccaggaacagctgcataagcagcaggaggtaattgcagacaaacagatgagtgtcaaagaagatcttgataaggtggaacctgccgtcattgaggcccagaatgctgtgaagtcgatcaagaagcagcacctggtggaggtgaggtccatggccaaccctcctgctgctgtgaagctggcgctggagtccatctgcctgctgctgggggaaagcaccacagactggaagcagatccgctccatcatcatgcgggagaacttcatccccaccatcgtcaacttctctgcagaggagatcagtgacgccataagggagaagatgaagaaaaattacatgtccaatccaagttacaattatgaaattgtgaatcgggcttccctggcttgcggccctatggtgaaatgggcaattgcacagcttaactatgcagacatgttaaagagagtggagcccctacgcaatgagctgcagaagctggaagatgacgccaaggacaaccagcagaaggccaacgaggtggagcagatgatccgagacctggaagccagcatcgcccgctacaaggaggaatacgccgtcctgatctcagaggcccaggccatcaaggcagacctggcagctgtcgaggcaaaagtaaaccggagcactgctcttctgaagagcttgtctgctgaacgtgaacgatgggaaaaaacaagtgaaactttcaaaaaccagatgtccaccattgctggggactgtctcttgtcagctgcgttcattgcctacgcgggttactttgaccagcagatgcgtcagaacttgttcactacctggtcccatcacctacagcaagccaacatccagttccgtacagatattgccaggacggaatacctttccaatgctgatgagcgtcttcgctggcaggccagctccttgcctgctgatgacctttgcacagaaaatgccatcatgctgaaacgattcaataggtatccgctgatcattgacccctctggacaggccacagaattcattatgaatgaatataaggatcgtaagatcacacggaccagcttcctggatgacgccttcagaaagaacttagagagtgcactgagattcggtaacccccttctggtccaggatgtggaaagctacgatccagttttgaacccggtgctgaaccgtgaagtgcggcgaacaggggggagagtgctgatcactctcggggaccaggacatagacctgtcgccatcgtttgtcatcttcctgtccacccgggatccaactgtcgagttcccaccagatctctgttcccgggttacttttgtaaacttcacagttacccgtagcagtttacaaagccagtgtctaaatgaagtacttaaagcagaaagacctgatgtggacgagaaacgatctgatcttcttaaacttcaaggggaatttcagctccgtttgcgtcagctggaaaaatctctactacaagctctgaacgaggtgaaagggcgcattttggatgacgacacgatcataaccactctggagaacctgaagagagaggctgcagaggtcaccaggaaagttgaggagacggacattgtcatgcaggaggtggagaccgtgtcccagcagtacctcccgctctccaccgcctgcagcagcatctacttcaccatggagtccctcaagcagatacacttcttgtaccagtactccctccagtttttcctggacatttatcacaacgtcctatacgagaacccgaacctgaagggtgtcaccgaccacacacagcgcctgtccattataacaaaggacctcttccaggtggcgtttaaccgagtggctcgaggcatgctgcatcaggaccacattacctttgccatgctgctggcaagaatcaaactgaagggcaccgtgggggagcccacctacgatgcagaattccagcacttcttgagaggaaatgagattgtcctgagtgctggctccacccccaggatccagggcctgactgtggagcaggcggaggcggtggtgaggctgagctgccttcccgcgtttaaggacttgattgcaaaggttcaggcagacgagcaatttggcatctggctggacagcagctccccggagcagactgtgccctacctctggagtgaagaaacacctgcaacacccattggccaggccatccaccgcctgctcctgatccaggctttccggcccgatcgcctgttggccatggcccacatgtttgtttcaacaaaccttggggagtctttcatgtccatcatggagcagccgctcgacctgacccaaattgtgggcacagaggtgaagcccaacactcctgtcttaatgtgctctgtgcctggttatgatgccagtggacatgtcgaggaccttgcagccgagcagaacacgcagatcacttcaattgcaatcggctctgcagaaggctttaaccaagcagataaggcaataaacaccgctgtaaagtcgggcaggtgggtgatgctgaagaatgtgcatctggccccagggtggctgatgcagctggagaagaagttgcattccctgcagccgcatgcctgcttccgactcttcctcaccatggagatcaaccccaaggtgcctgtgaatctgctccgtgcgggccgcatctttgtgttcgagccaccgccaggggtgaaggccaacatgctgaggacgttcagcagcattcccgtctcacggatatgcaagtctcccaacgagcgtgcccgcttgtacttcctgctggcctggtttcatgcgatcatccaagaacgcttacgatacgcaccactggggtggtcaaagaagtatgaatttggagagtctgacctgcggtcagcttgcgatacggtggacacgtggctggatgacacggccaagggcaggcagaacatctcaccggataagatcccgtggtctgcactaaagaccttaatggcccagtccatttatggcgggcgcgtggacaacgagtttgaccagcgtctgctcaacaccttcctggagcgcctgttcacaaccaggagtttcgacagtgagtttaagctggcatgcaaggtcgacggacataaagacattcaaatgccagatggcatcaggcgagaggagtttgtgcagtgggtggagttgctccccgacacccagacgccctcctggctgggcctgcccaacaacgccgagagagtcctccttaccacacagggtgtggacatgatcagtaaaatgctgaagatgcagatgttggaggatgaggacgacctggcctacgcagagaccgagaagaagacgaggacagactccacgtccgacgggcgcccgtgcctggatgcggacactgcacaccaccgcgtccaactggctgcacctcatcccccagacgctgagccacctcaagcgcaccgtggagaatatcaaggatcctttgttcaggttctttgagaagagaagtgaagatgggcgcaaagctgcttcagggacgttcgccaggaccttgcagatgttcgtccaggtgtgcgaaggaaagaagaagcagaccaactacttgcgcacgttgattcaacgagctagttgaaagggatcttgccttcggagctggtcccactacacggtgcctgccggcattgaccgtcatccagtggggtgttccgatttcagcgaggaggattcaaacagctgcagaacatctcactgggcagctgcatctggtggcgccaaggagctaaagaacatccacgtgtgcctgggtggcctgttcgtgcctgaggcgtacatcactgccaccaggcagtatgtggcccaggccaacagctggtccctggaggagctctgcctggaagtcaacgtcaccacctcacagggcgccacccttgacgcttgcagcttcggagtcacgggtttgaaacttcaaggggccacgtgcaacaacaacaagctgtcactgtccaatgccatctcaaccgcccttcccctgacgcagctgcgctgggtcaagcagacaaacaccgagaagaaggccagtgtggtaaccttacctgtctacctgaacttcacccgtgcagacctcatcttcaccgtggacttcgaaattgctacaaaggaggatcctcgcagcttctacgagcggggtgtcgcagtcttgtgcacagagtaaacttttctagctgcccctttctgtaatagtgaaagttggtatttaacatttattcatttttaaaatatttggaaggtctgagcttgtgaaaagaaagtggttggtctgaggttggaggaagctgaatggaatctgacggttgggagtggtggaaattggaaggataccaggaggtatttgggaaggccagtggcgtggctcctttgaggaaataaaacactaagcatg

SEQ ID NO: 87420 - DNA, 2867 bp, Homo sapiens; identical to SEQ ID NO: 65374

SEQ ID NO: 87421 - DNA, 1906 bp, Homo sapiens
agaattattgaacaagatgctgtagtaccttcagaatggcttttttctgtgtataaacagcagtggtttgctatgctgcgggcagaacaggacagtgaggtggggcctcaagaaatcaataaagaagaactagagggaaacagcatgaggtgtggtagaaagcttgccaaagatggtgaatactgctggcgttggacaggttttaacttcggcttcgacctacttgtaacttacaccaatcgatacatcattttcaaacgcaatacactgaatcagccatgtagcggatctgtcagtttacagcctcgaaggagcatagcatttaaattacgtttggcttcttttgatagtagtggaaaactaatatgtagtagaacaactggctatcaaatacttacacttgaaaaggatcaggaacaagtggtgatgaacttggacagcaggcttctgatcttccctttatatatctgctgtaacttcttgtatatatcaccagaaaaaaagaattgaaaataatcgtcacccagaaaatccagaaaactgaagatttcatcagttggaaacagtagcactttgaaaactttttaggccagctttaatttaatggccctactgatattcacatcgaaggtgactaacaatgacaaaggccttatgaactgtacagacaatacagaagattattcttatcctcattgcatttctatgcatatgcgtaagaacattttaaagccaagaaaatatctgtcaaaccatttctgttagaacgatgtcaattcatgcttttaatttagcatcaatagaaaattgctgtaggtaaatctcacatttatctgcaacaaaatatagatttaatttttagcttaaactttgtttctaccttatgttagtggacctcagttatccatctgtaaatttctttttatttggctaaaataatctaaaagaataatttggttggccaattagaaatgcctttttcagttggtgtattgaaagctttcctttaacattttcacctgctcattgtgattcctccttttagtctaatatctttccaggtcatacttgtttttaatcattaaatattttcttcctggttttggagactaagctgataaactttttttaaaacttaagcattgtcattgctattttttttaatttgactttcctaggagtttaagaacagtgaaagttagcttcgcaccttcaaatgatcttgaatgagggaaaaatcagtttgattccaaggatatttcttgccttacatggtcttttctttgacagtctgtacacctttattattaggttttgaattatttatgtaccagatattatagttttaaacattttaatattctctgatctttagaattatttatgttcaaattttagttgggaactttgtttcctacttaagctcaggactttttaccctctgaattgagtgcctttgagtgacacatgctaatagaaatttcatagtaaatgtaaataaggtcagaggatgtaatatggagcctgatgatgaagcattaatgtaaaaatggaacttatttttgtcaaaaatgagatgtacacttgtcatgatttatgtatgttgaccttttgtgtttattactgttttgaaaatagccatgttcattttctttccagttagagtaagtacttctgtggttaatgtatatttttattatggtttttaaaatgggaatcatttttatgtatctgtgcaaataataaatgcccatttggaaaaagagtaagctcttacataaagtggaccaaaaaatcccccttaattgaaaccaaaattttttctttctaggtaggtttttttcccaactccttttaacttttggaatttattaataatttttttcttttttaatgatatgcccat

SEQ ID NO: 87422 - DNA, 981 bp, Homo sapiens
  misc_feature (1)...(981): n = a,t,c or g
tttcgtgcccagtgctctgacttcgccggaccggggagctctgcagagacaccctcactccttcccgagggtccgggacgcctagccgggcgtggggggaagctccgtttgcgggggacagggagggaggagcctggagccgaagccagcgccacccgtcgccggatcaacaggacaggacagagcctcagctcaaaggcatcgtcaccaaactgttctgccgccagggtttctacctccaggcgaatcccgacggaagcatccagggcaccccagaggataccagctccttcagtgagaggggaagctggctgcaggcccacttcaacctgatccctgtgggcctccgtgtggtcaccatccagagcgccaagctgggtcactacatggccatgaatgctgagggactgctctacagttcgccgcatttcacagctgagtgtcgctttaaggagtgtgtctttgagaattactacgtcctgtacgcctctgctctctaccgccagcgtcgttctggccgggcctgggacctcggcctggacaaggagggccaggtcatgaagggaaaccgagttaagaagaccaaggcagctgcccactttctgcccaagctcctgggaggtggccatgtaccaggagccttctctccacagtgtccccgaggcctccccttccagtccccctgccccctgaaatgtagtccctggactgggaggttccctgcactcccagtgagccagccaccaccacaacctgttttcccagttcctggttttcacccttgttgccacanacatggccttgagcagccagggtcccattagggtgctttaancttgaggggagcttaggggttgaattgtgattttcgaagttgttgagaacttagattttttggggnttaggaggganttagagaaggggatttttnaagaatggtcntgggttattaatttttttttttcaaatttaaaaaaaccc

SEQ ID NO: 87423 - DNA, 393 bp, Homo sapiens
cgttccctgaggcggccccgacccatgcccaggccgactcactcaccgtctacctgggggaggaattgtactcggtggggtcgctcttcctcttttcgatgctcctgttgaaggcggtgcacatgtgcaagaggagcagggcggcctatgtggaacgctggtcggtgcccgagggtccctttccagggcatgagccggacgtgagcgggaccgggaccctgtcccagagctaccaatacgaggcgtgtctgacaggaggtgccgggacaaatgaggtcaaagttgtgaagccgactatgcccaattgtgaagtacatagacactcgtcaggaatatgggggaaatcgagaactttccaaatagctctggacttaacattcgataaaacaattt

SEQ ID NO: 87424 - DNA, 4224 bp, Homo sapiens
cccacgcgtccgggccggggctcaagatggctttagccgggctctgcgccctgctcgcctgctgctgggggccggcggcggtgctggccacggccgccggcgacgtggatccatccaaggagctggagtgcaagctcaaaagcatcacggtgtcggcactgcccttcctgcgcgagaacgacctgagcatcatgcacagcccctcggcctcggagcccaagctcctcttctcggtgcgcaacgacttcccgggagaaatggtcgtggtggacgacctggagaacacggagctgccctacttcgtgctggagatctcagggaacacagaggatatccctttggtgcgctggaggcagcagtggctggagaatggcactttgctttttcacattcatcaccaagatggtgccccaagccttcctggacaagaccccactgaagaaccccaacatgagtcggcagaagaggagctgaggatcctccacatctcagtcatgggtggcatgatcgctctgctgctgtccatcttgtgcctggtgatgatcctgtatactcgccggcgctggtgcaaacgccgccgggtcccgcagccccagaagagtgccagtgctgaggcagccaatgagattcactacattccttctgtgctgatcggcgggcacggacgggagagcctgcgcaatgcccgcgtgcagggccacaactccagtggcaccctgagcatccgggagacacctatcctggacggctatgagtatgacatcactgatctgcgccaccatctgcagagggagtgcatgaacggaggggaggactttgccagccaggtcacgcgcaccctcgactccctgcagggctgcaatgaaaagtcggggatggacctcacaccaggaagtgacaatgccaagctgtcactgatgaacaagtataaagataatattatagccactagccctgtggactccaaccaccagcaagccacccttctctctcacacctccagcagccagagaaagcggatcaacaacaaagcaagagctggttccgccttcttgaaccctgaaggggattctggcacagaggcagaaaacgacccccagctgaccttttacacggatccttcaaggagcaggaggcgtagtagagtgggttctccccgaagtcctgtgaataagaccaccttgaccctgatcagcatcaccagctgtgtgattggcctcgtgtgctcctctcacgtcaactgccctctcgttgtcaagatcaccctgcatgtccctgagcacctgattgctgatgggagccgcttcatcttgctggaggggagccagctggatgccagtgactggctgaaccctgcccaagtggttctcttctctcagcagaactccagcggaccctgggccatggacctctgtgcccggcggctcctggacccctgtgaacaccaatgtgaccccgaaactggtaggcgggagcaccgggcagcgggggaatgcctctgctatgaaggctacatgaaggatccagtacataagcacctttgcattcggaacgaatgggggacaaaccaggggccatggccttacacaatatttcagcgaggctttgacctggttttgggagagcagccctctgataaaatatttagattcacccacactcttggggagggcatgtggttgcccctcagcaagagctttgtgattccaccagccgaactggccatcaatccatcagcaaagtgcaagacggacatgactgtgatggaggatgctgtggaggtcagagaggagctgatgacttcatcctccttcgacagcctggaggttctcttagattcctttgggccggtgcgcgactgcagcaaagataacgggggctgcagtaagaatttccgctgtatttcagatcgcaagctggactccactggttgcgtgtgcccatctgccctgcaagctagtgaaggacagctctggctgctatgaccgccacatcggggtggactgttccgacggcttcaacggcggctgtgagcagctgtgcctccagcagatggcgcccttcccggacgaccccaccttgtataacatcctcatgttctgtgggtgcatcgaggactacaagcttggtgtggatggacgctcttgccaactcatcacggagacctgtccagagggaagtgactgtggggaaagcagggagcttcccatgaaccagaccctctttggggagatgttctttggttacaacaaccattccaaggaagtggctgccggacaggtgctgaaaggaacattcaggcaaaacaactttgctcgtggtttagaccagcaactgccagatggtcttgtggtggccactgtgcccctggagaatcaatgcctagaggagatctcggagcccacccctgaccctgacttcctgactgggatggtgaacttcagtgaagtgtctgggtaccctgtgctgcagcactggaaggtccggtctgtgatgtaccacatcaaactcaaccaagtggccatctctcagggtgagcactgctgcaggctatccctggatggggctacatctcgtgcagattttgtggcgctgttggaccagttcggcaaccattacatccaggaagctatctacggctttgaggagtcctgttctatctggtacccaaacaagcaggtccagcggcgactctggctggagtatgaagacatcagtaaaggcaactccccatcagatgagtctgaggagcgggaaagagaccccaaggtgctgacattcccagaatacatcaccagcttgtcagactccggcaccaagcgcatggcggctggagtccgcatggagtgccagagcaagggacgatgcccctcgtcctgccccctgtgtcatgtgacatccagccctgacacccctgctgagccggttctgctggaggtgaccaaagcagcccccatctatgaactagtgaccaacaaccagacccagaggctcttgcaggaggctaccatgagctctctctggtgctcagggactggagatgtcatcgaggactggtgtcgatgtgactccactgcttttggagctgatggactccccacctgtgcgcctctcccacagcctgtgctgagactctccacggttcacgagcccagcagcactcttgtggtcctggagtgggaacactcagagccaccaatcggggtgcagattgtagattacctcctccgtcaagagaaagtcactgacaggatggaccactccaaagtggagacagaaacagtgctgagctttgtggacgacatcatctctggagcaaagtctccttgtgcaatgccatctcaggtgccggacaagcagctcaccaccatctctctgatcatacgatgcctggaacctgacaccatttacatgttcacgctgtggggagtggacaacacaggacggcgctccaggccaagcgacgtgatcgtgaagaccccatgccccgtggtggatgatgtcaaggctcaagaaatagcagacaagatctacaatctcttcaatggctacactagtgggaaggagcagcagaccgcctacaacaccctcctggatctgggttcccccaccttacaccgggtcctctaccactataaccagcactatgagagttttggggaattcacctggcgatgtgaggatgagttaggtcccaggaaagctggtctcatcctttcccagcttggggacctcagcagttggtgcaatggactccttcaggaacccaagataagcttgcggcgcagctcactcaagtacctggggtgccgctacagcgagatcaaaccctacggacttgactgggcggagctcagccgggacctcaggaagacgtgtgaggagcagaccctgagtatcccctacaacgactatggggacagcaaagagatctagcaccataaggccagggagctgctgccagaatgaagtaggaaagaggagggatccatctgggttggtctgtggatttttaatattttttaatggaacatgaaaacctccacagcaacatcgaaaccagggagaaagtgatccttgctccctgcagaacttcttcagtatgatgttctccatctgcatgattgggaaatctgccagccagtggcttcatgcagtgccatatttctttagaggattactttggggtttgctttgccattaatttgttccattcattttttt

SEQ ID NO: 87425 - DNA, 2633 bp, Homo sapiens
tactctctcactcttggaaagggttttgatgaaagatattgttaccccagtgccacaagaggaggtaaaaacagttatccgtaaatgtctggaacaggctgcgttagtcaactattctcggctctcagagtatgccaaaatcgaagggaaaaagagagaaatgtatgagcttcctgtcttctgcttggcctcccaagtgatggatttaaccattcagaatcaaaaggatgcagaaaatgtaggccggttaatcactcctgccaaaaagcttgaagatacaatacgtcttgctgaactagtcattgaagttcttcagcaaaatgaggagcaccacgcagaggcctttgcgtggtggtcagatttaatggtggagcatgcggagacgttcctgtcactctttgcagtagacatggatgcagccttagaggtgcaacctccagacacatgggacagttttccactatttcagctgctggaatgattttctccgtactggactattaatttgtggcaatgggaaaatttcacaaacacctgcaagacctgtttgccccacttgttgttaggatatgtgggatcttgatgggagttccccaattgcacaatccattcacagggggcttttgagccgggagtcatgggaaccagtcaataatgggtcaggcacctcagaagatctgttttggaaacttgacgcccttcagaccttcattcgggacctgcactggcctgaagaagagtttggaaagcacctggaacaacggctgaagttgatggcaagtgacatgatcgaatcttgtgtcaaaagaaccagggattgcatttgaagttaagctgcaaaaaaccagttcgattcaacagatttttcgagtcccacagttcaatatggcaccatgttttaatgttatggggttgatggccaaaggttcaattcaaccaaaacttttgcagcatggaaatgggccaagagtttgctaaaatgtggcatcaataccattcaaaaatagacgaactaattgaagaaactgttaaagaaatgataacactcttggttgcaaagttcgttactatcttggaaggagtgctggcaaaattatccagatatgacgaagggactttgttttcttcttttctgtcatttaccgtgaaggcagcttccaaatatgtggatgtacctaaacccgggatggacgtggccgacgcctacgtgactttcgtccgccattctcaggatgtcctgcgtgataaggtcaatgaggagatgtacatagaaaggttatttgatcaatggtacaacagctccatgaacgtgatctgcacctggttgacggaccggatggacttacagcttcatatttatcagttgaaaacactaattaggatggtaaagaaaacctacagagatttccgattgcaaggggtcctggactccaccttaaacagcaagacctatgaaacgatccggaaccgtctcactgtggaggaagccacagcatcagtgagtgaaggtgggggactgcagggcatcagcatgaaggacagcgatgaggaagacgaagaagacgattagaccatttggtcctagagtctgctgggacagagtcctgtaatcagtgcatgtccttagtctgttagttaaacccattaggaattttctgtcaactaccatgcccatgagatgtttatcaatacaactgccattttagctatgtggtaccaagattagcaaatgaccttcatatccactgatttcctgatgtccatgtctatatgtttacaagcaatatggagcaccattctttaaatactgttcatggagaatacatagtctaaccactaggcgtgtccctgttatcagcaaagatcaatgatgcttcattcatgtactatgtatgcattggtggtaaatggatgtgagggcaagtacatcaagtacattcactctgtttcacgtatgtggatgccagttaattaaatgagtacgtaaataaattaattaaaacacatagatctgctttgtgtttttatttttattttttgaaaaacaaaaggcaagtctccaacaattaacttttgatgctttctgttcccctaaaaccaaaaaatgaaccccttgtgtcgttgttaacccatcctttcatttactcatataattagccaaaaaaaaaaggatggctacatacccaatggattgattctcttaattgccacggcaagggggcgatcctatcatgacttaacatcaagcgcgcagttcaaaactactgtcttctgtcaaagttttctcctcttaaatgttattttgcttttacggtctcaactgtgtatgtaaaaaaaacgaatatttaaattacaaccctaaactaaaaatgtgtttataataagatgtggatatttccttcagtagattgtaaccataatttaaattattttggttccacactgbgybbttatatctgtcatgtacattgcattttgatctgtaactgcacaaccctggggtttgctgcagagctatttcttyccatgtaaagtagtggatccatcttgcttttgccttatataaagcctacagttatggaagtgtggaaaactgtggcttctcaataaatattcagatgtcctaagaatat

SEQ ID NO: 87426 - DNA, 506 bp, Homo sapiens
caagtagtcacaggaaatctggccccacatttccttgccctgtgtaagcccaattatacagcacttggatgtcagcagtatacacaattcatcagtggggaagaggcctgtactggcaacccagatctcatcatgagagcccgaaaaacctttccatccaaagaagcagctctcagtgtctatgcagctatgtatctgaccatgtacatcaccaacacaatcaaagccaagggaaccagacttgctaagccagttctatgcttgggcttaatgtgtttggcatttcttactggactcaacagagtagcagaatatcgaaatcattggtcagatgttatagcaggctctctgghtgsgcatatctatagcagtatttctggttgtgtgcgtggtgaataatttcaaagggagacaagcagaaaatgagcatatacccatggataatctggcacagatgacactgcatcagcattcctcgtagtagtagagttcctctgtaaaagtaa

SEQ ID NO: 87427 - DNA, 5049 bp, Homo sapiens
gagccggtggttgcagcggaggcggtgatgtcggtgcaggttgtgtcagccgcggctgccgccaaggtgcctgaggtggagctgaaggacctgagcccctccgaggcggagtcgcaactaggactgagcacggccgccgtgggcgccatggcccccccggcgggcggtggagaccctgaggctccagctcccgccgcggagcggcccccggtccccggcccgggctcggggcccgccgccgctctcagccccgccgccgggaaggtgcctcaggcgtcggccatgaagcggagcgacccacatcaccagcaccagcggcaccgcgacggcggcgaggccctggtcagccccgacggcaccgtcaccgaggcgccgcgcacagtcaagaagatccagtttgctgaccagaagcaagaattcaacaaacgtcccaccaaaattggacgtcgctctttgtctcgttccatttctcagtcatctactgacagctacagctcagcggcttcatatacagatagctctgatgatgagacatcgcccagggacaagcagcaaaagaactctaagggaagcagtgacttctgtgttaagaacatcaaacaggcagagtttggacgaagagaaattgaaattgctgaacaagaaatgcctgcattgatggctttgaggaagagagctcaaggagaaaagcctttggctggagccaaaatcgtgggttgcacacacatcactgctcagactgctgtgcttatggaaactctgggtgctctgggggcccagtgccgatgggctgcctgcaacatctattccactctcaatgaagtggctgctgctctagcagaaagtggatttcctgtttttgcctggaagggagagtcagaagatgacttttggtggtgtatcgatagatgtgtgaatgtggagggctggcagccaaacatgatcttggatgatggaggggatcttacccactggatttataaaaagtatcccaacatgtttaagaaaatcaagggcatagtagaggagagtgttactggagttcacaggctgtaccaactgtccaaagctgggaagctgtgtgttccagccatgaatgtcaatgactcagtcaccaaacagaaatttgacaacctctactgttgccgtgaatcaattcttgatggacttaaaaggacaacagacatgatgtttggtggaaagcaagtggtagtctgtggctatggagaggtggggaaagggtgctgtgctgccctgaaagccatgggctccattgtgtatgtaactgaaattgaccccatctgtgccctgcaagcctgtatggatggatttcgactggtgaaattaaatgaggtcatccgacaagtggacattgttattacctgtacaggtaacaagaatgtggtaaccagagagcacttggaccgtatgaagaatagctgcatcgtttgtaacatgggacattccaacacagagattgacgtggcgagtctgcggacaccagaactgacctgggagcgagtgagatctcaagttgaccatgtgatatggcctgatggcaagaggatagtactgctggcagagggccgcctgctgaaccttagctgctccacagtgcctacatttgtgctctcaatcactgctactactcaaggctcttgccttgatagagctttacaatgctcctgagggtcgctataagcaggatgtctacctgttgcccaagaagatggatgagtatgtggccagcttaccacctgcctacctttgatgcccacttgacagagctgacagatgaacaggccaagtatctgggactcaataagaatgggcccttcaagcctaattactacaggtattaagttcctgtaactcaaaccagaatttttaaggaatagaacctccaagccttttctccactactatacaagaaagaattcagcaagctgcttctccaatcaaagctgcctgccgtgctcaccctgtgtgttaggttatttatttattaaaatcaagaatcctgtgcctgtagtgttggcccagagtgtggttactgccctgagggccatgaaagccacagaggatgggctgaggaaggaaagaaatggggttactgctcccagtgcatcatttgcatcattccccattgactgaatcctcagcagtggccgtttttcctcttgtccaggctcacgagttagtccagggattccatactccctattccctggagttttctggaataaattttcagcacctgcttttctcagcttggcccttccccgggtgaggccgtttggaattaacatggccagtgtttcacacaagattgggttcccaatcttgaccatcactatcactgccttctttatataaaggctaataaggaaggagtgttatttatggctttgccaagctacatcaagaactcagctgtgctgtgcctaccaggggtctcctttcttacccaggactcctttcttctccttgaatatttatgtccattttaacacttcctggttgcaagagggatgtgcctccattatttcctccacagttttggtatttgtcagacatttgttctgctgtctttctaatccagccaacgtctgctcaggaagtggggccagctccactgggacccatagttttacttccttgtcatttgattggatagtttccaaggaagcccctccagattggcactatctcagaaaaggagagcttgttgtgaaacactgcttcctgaaacttcctgctattgcctaaagctacgtctgaaactgagtagggaaaggcatacttttccagggacttagggggataggctttggaaatgggacaggtctttcagactcacagcttgataccctaacaaagcagagtatatttatttgtttcccaggaaggccattgcagtttgactggctgagggatacagagatgaaattgtaaactgtatccagattatcaaagctaatttgactagtttgaacctcgtcagacattcattcctttgggccattgccatgggatgaaaccgagatctgcagtctgatctgtgggacttcttctgctgggcatatcttttatgatttaacctcttccatttgatgattctgtatttcagagtcagtttcttgagtaactccagtgctacaaaaagaattagtaatgtggtgtgggcagcgtgacattttatgtcccacccaaaaattggattccttttggagactgatctgttggtctcaggcatttcattaggaccagattggttctaagagttagtctggactggccctaggaaacttgaattaaataagcctcttccccttaccgatcctttttaacactctcaggtttgtttgtttcccacttttttcctatgctgggtctgcctcaaagtctcaagaccaaggtgacttcaaggataacaccagaccacggcatggatccaccaaaaccttcccatcctgattctcttcttctacctctaccctctccaacttctcctggtcttcacatatactctcaaagctagtctgaaagtgaccttactttcggaagtagggaagtggaactttggtaaatgactgtttgcctcatttaatagtatacaggctcagcccatagactacagttcttcagaggccatatgtctcagcaagtactggttatattctttttttgtaaggaagatcataaatgctaaaaattccactaagccattcagttcttccttttgcctacctagtcctgatttttgtattaattggttccctttagcaagggattcagatctttgtaccttatcttatatccagagcagattccatttggcagatagatggtctctagcctattgtattcttagaccaaaaatcataacctgctgtttctcagcaaagccttgctctctggagcttactatgtgctggtacttaaagagtacattctgccttgctgtagtgaagagacccactccaaataaaaaaggggccacacggggcttctaagttaggttgccagtgttgctgcccatgatgagttatttgcctctgagtttcagatgacctctctgtagggacactgtgttatcaaccattaagaagaaagaaccacaagcctcccaagtatttgggttctatcttagggttgaaatctggtcattattccctctacccttggaatcagagcaatgtgtcttctttcctccaacctcttaccttagatgcatcctggttatctggaagcatgggaaagaaggctacttatctctttgtatgtggctccagtctgtgaggatacataacattttctctacaatgaatctgtgctaatattttgccttctttctttcttttcttttcacccttagagacagggtttcactatgttgcccaggctggtctcaaactcctgggctcaagcaatcctcctgcctcagcttcctgagtagctggaaccacaggtgtgtgctaccgtgcctggcacttttttgccttcttaatggagatattcagttttctttttttcatttaaacaaagaaaaaaaatgtatctactctaccttccctctgctctcctccctccctatcctacttgcccatatgagcacggctccccatggccacatactcctgcaaagcttttatgctgcttcgcttttctctaaacagatctgatattgctgctcctgtggttttctcaaaattaactttgccgtggtttttaaaaaggaatcaaaatgcattgttgcattaagctttttcaataaaggaaaattacggaaggaaaataggcaacaccagcaaattatatgtggacaggttctaaactctatatatacatatatatatatatatctatatatctatatacgtaatcatctagttctgtcatcttactgaaaggaataacacttctaaagatcaccatttctgagaagttcttggaaatctttatgtctaagtgattgtattagatcagcaataatgactatgtaatctcaaaaaacaaataaaatattcttaacatggaaaaaaaaaa

SEQ ID NO: 87428 - DNA, 1021 bp, Homo sapiens
actgtttacaatgtggtttaatgagaattggaactagccctactattagcagacagcatcagggcggaggcccccagcccagaccccatggtcttccccatcccgaagtgggatggatttcctcatctgcatacacagcacttcgtcgatataaatggtgttctctttgacctggatctcctcctgcagggcaagctgtctgcgatgcagccctttcagctctgcctgagcttggggctaaagtttccttcaatcttgcgacattgtgggtgatctcttgaacctccttcattagcctatattgtgcgacatcacgacacagctccacgttcggccggtgtgtcctggtctccaagcgcgtatgagccaccttggctggcccttcttggtcaaggatggccttttcaagagctgtaatatttttctcctgggaagcaatctcttccatgacctttggccagatgatcagccagctggtccctggcatcctttgtatccttcagcccattcttgaatgccgtgtgcaccacatcacactgcttgcgcagataattggctgtctgggacaggattcgaatccaccagggctttcagcatcagggagttgttccgctgcttgtcagccttctccacattggtgctggagaagtccaaccagtcttccagactcacggagtttggctcaatcctcacggcgttctcagaatatctgatgtttggtgagttgttgttgagcgagaagcagatatcatctatggtcagggccacaaacttgtccttcaaatccttctcaagattgtacttggcagagcggttcatccgaatctgctcggaagcctcctccaaggtacgggtcagcagagccataatgccctggatgatctcagcctcctttatcagctcatgctccactgtgtcgtgcaccaggtcaatgccaatgcgcttctccctgtatgccaggcatgtctcagtgatgtgcaaggacgggaatccatccgcatggactagggtctacaattcc

SEQ ID NO: 87429 - DNA, 413 bp, Homo sapiens
aacattatatagtgatagaagggtcaattcatcaaaaggatataacaattgtaaatctatacatatccaacattggagcacctaaatatataaaacaaatattaaaggttgaagggagagatatgttgcaatgcagtaatatcagggaatttcaacatctcacttttaaaaatggatagattatccataaagaaaattaataagaaaacgttgaacttgaccaacactttagatcaaatagacctaatggatacatacagaacatttcatctcaagcacacaagaaacattctccaagatagatcatattttagcccacaaaacaagtcttagcaaatttaagaagactgaaatcgcttcatcgtatcaagtatcttttctgaccacaatactatgaaaactagaaatgagta

SEQ ID NO: 87430 - DNA, 444 bp, Homo sapiens
ggaattcgatggcaggacttggtctgccttggaggcagtcgtgcccaggagcagaaacccctgcagcagctgtggaacgccatcctgctggtggccatgctcctgtgcacaggcctcgtggtccaggcccagcggcaggcgtcgcggcagagccagcgggagctcggaggccaggtggacctgtttaagcgccgcgtggtgcggagactggcatccctcaagacacggcgctgccggctgagcagggcagcgcagggcctcccagatccgggtgctgagacctgtgcggtgtgcctggactacttctgcaacaaacagtggctccgggtgctgccctgtaagcacgagtttcaccgagactgtgtggacccctggctgatgctccagcagacctgcccactgtgcaaattcaacgtcctggggaaccgctactccgatgattag

SEQ ID NO: 87431 - DNA, 1287 bp, Homo sapiens
gcggccgcccgggagtccgagcgccagctgcgcctccgcctctgcgtcctcaacgagatcttgggcaccgagagggactacgtgggcaccttgcgcttcttgcagtcggcattcctgcatcgcatccggcagaacgtggccgactcagtggagaagggcctcacggaggagaatgtcaaggtcctgttctcgaacatcgaagacatcctggaagttcataaggatttcttggccgccttggagtattgtttacacccggagccgcagtctcagcatgaacttgggaatgttttcttaaaattcaaggacaagttctgcgtgtacgaggagtattgcagcaaccatgagaaagccctgaggctgctggtggagctgaacaagatccctaccgtgcgcgccttccttttgagctgcatgcttctgggaggccggaagaccacggacatccctttggaaggctacctggttgtctccgatccagaggatctgcaagtacccgctcctccttaaggagctggccaagaggactcccggcaagcacccagaccaccccgcggtccagacgtgccctgcaggccatgaagaccgtttgctccaacatcaatgagaccaagcggcagatggagaagctggaagccctggaagcagctgcaagtcccacatcgaaggctgggagggttccaacctcacagacatctgcactcagctcctcctgcaagggactttgttaaagatctctgcgggcaacatccaggaaagggccttcttcctcttcgacaaccttctcgtctactgcaagcggaaatccagggtcaccgggagcaagaagtccaccaagaggaccaaatccatcaacggctccctctacatcttcaggggtcgaatcaacactgaagtcatggaggtggagaatgtggaagatgggacaggtagcccctcccccagccttgcctgagccctgcctgagccctgcctgctccctggcactctctctgtttcatttaaatatatttttttcttttatcatgagatgtaatctacctacagaaaagtgcccagagcatagatgcatgaagcgaacatctgggtggttagcattcaagttaagaaataaaacactgcaccccaaatccttcctccttgcaatgccttcttccccctagaagtaaccactgtctgaattttgtgatgatcattttcttgctttttaaagacatttttacctcctaagcatttatgactaaacattttaattaaaatttctatttttgagccttaaaaaaaaaa

SEQ ID NO: 87432 - DNA, 372 bp, Homo sapiens
  misc_feature (1)...(372): n = a,t,c or g
ctgtggagcagcttctttatcccttcatctgtggataagcaggtcnnnnnnnnnnnnnnnnnnnnnnnnnnnnnnnnnnnnnnnnnnnnnngaatttctgcggccgaagaggattccactgcgtgctgcagtttctttatccctttatctgtgcatgaacagtgcaggccaaggccccctgcccatggaggtgtgctgcagacagcagcagcagcagcagcagcagcagcagcagcagcagaggcctggcttcctgaggaattgctggccggtttgaggaaggaaggaagtcccacctaccatgatcaccctccagcctggaggaagctccatgccagcagcatggaccagcatgggagccagagccctgcg

SEQ ID NO: 87433 - DNA, 596 bp, Homo sapiens
ttttttttttttggtgtttttgtttttgtgtgtgggtgtgtgtcaagttttaatacacgctagaacaagccacaagagggtgctgctaggccagaactacactcaccccaagcccaccccaggaaccccaaagcagaggtcaggaactgagtccacagctcctggggaggcccaggcacccctgaacgcttctgtcacctctgacctcccatcttgccctcagcctagactcgtcccttccctaccagtcccttccctagacaaaggcccctcccctccctgggtcccaggacttcctccctcaagggacagaggagcagccagagagcgacggttcagggccctgagggtccggctctccaggagaagctgggctctgaaccagggtgggtaaacgttgcagaagggctgtcaggacactcaggcgcccacacactccacgtagttggcagggtacaggccaatgcggccactctgcaactggccttggcaccagccctgctcgtcctcctcactcatcttcagcaagcttcctcccctggtcggaagctcagctcatcagcttcctggccagcgtagtcatagatgccctcacc

SEQ ID NO: 87434 - DNA, 1790 bp, Homo sapiens; identical to SEQ ID NO: 65624

SEQ ID NO: 87435 - DNA, 5909 bp, Homo sapiens
ggagcctaccataagcacctcatggaactcgctcttcagcaaacatatcaggacacctgtaattgcatcaagtcgcggatcaagttggaatttgaaaaacgtcaacaggagcggcttctgctctccctgctgccggcccacatcgccatggagatgaaagcggagatcatccagaggctgcagggccccaaggcgggccagatggagaacacaaataacttccacaacctgtatgtgaagcggcatacaaacgtgagcatcttatacgctgacatcgttggctttacccggctggcaagtgactgctccccgggagaactagtccacatgctgaatgagctctttggaaagtttgatcaaattgcaaaggagaatgaatgcatgagaattaaaattttaggagactgctactactgtgtatctggactccctatatctctccctaaccatgccaagaactgtgtgaaaatggggctggacatgtgtgaagccataaagaaagtgagggatgctactggagttgatatcaacatgcgcgtgggcgtgcattctgggaatgtcctgtgtggcgtgattggtctgcagaagtggcaatatgatgtgtggtcacatgatgtgaccttggccaaccacatggaagctggaggggtccctggacgtgttcacatttcttctgtcaccctggagcacttgaatggcgcttataaagtggaggagggagatggtgacattagggacccatatttaaaacagcacctggtgaaaacctactttgtgatcaaccccaagggagaacgacggagcccccagcatctcttcagacctcgccacacccttgatggagccaaaatgagggcctcggtccgcatgacccggtacttggagtcctggggggcagccaagccctttgcacacctacatcacagggacagcatgaccacagagaacggcaagatcagcaccacggatgtacccatgggtcagcataattttcaaaatcgcaccttaagaaccaagtcacaaaagaagagatttgaagaagaattgaatgaaaggatgattcaagcaattgatgggattaatgcacagaagcaatggctcaagtctgaagacattcagagaatctcactgcttttctataacaaagtactagaaaaagagtaccgggccacggcactgccagcgttcaagtattatgtgacttgtgcctgtctcatattcttctgcatcttcattgtgcagattctcgtgctgccaaaaacgtctgtcctgggcatctcctttggggctgcgtttctcttgctggccttcatcctcttcgtctgctttgctggacagcttctgcaatgcagcaaaaaagcctctcccctgctcatgtggcttttgaagtcctcgggcatcattgccaaccgcccctggccacggatctctctcacgatcatcaccacagccatcatattaatgatggccgtgttcaacatgtttttcctgagtgactcagaggaaacaatccctccaactgccaacacaacaaacacaagcttttcagcctcaaataatcaggtggcgattctgcgtgcgcagaatttatttttcctcccgtactttatctacagctgcattctgggactgatatcctgttccggtgttcctgcgggtaaactatgagctgaagatgttgatcatgatggtggccttggtgggctacaacaccatcctactccacacccacgcccacgtcctgggcgactacagccaggtcttatttgagagaccaggcatttggaaagacctgaagaccatgggctctgtgtctctctctatattcttcatcacactgcttgttctgggtagacagaatgaatattactgtaggttagacttcttatggaagaacaaattcaaaaaagagcgggaggagatagagaccatggagaacctgaaccgcgtgctgctggagaacgtgcttcccgcgcacgtggctgagcacttcctggccaggagcctgaagaatgaggagctataccaccagtcctatgactgcgtctgcgtcatgtttgcctccattccggatttcaaagaattttatacagaatccgacgtgaacaaggagggcttggaatgccttcggctcctgaacgagatcatcgctgacttttgatgatcttctttccaagccaaaattcagtggagttgaaaagattaagaccattggcagcacatacatggcagcaacaggtctgagcgctgtgcccagccaggagcactcccaggagcccgagcgacagtacatgcacattggcaccatggtggtagtttgcttttgccctgggtagggaagctggatgccatcaacaagcactccttcaacgacttcaaattgcgagtgggtattaaccatggacctgtgatagctggtgtgattggagctcagaagccacaatatgatatctggggcaacactgtcaatgtggccagtaggatggacagcaccggagtcctggacaaaatacaggttaccgaggagacgagcctcgtcctgcagaccctcggatacacgtgcacctgtcgaggaataatcaacgtgaaaggaaagggggacctgaagacgtactttgtaaacacagaaatgtcaaggtccctttcccagagcaacgtggcatcctgaagagtcaccttcattttggcaagaagactgtattttcaggaaggtatcacacactttctgactgcaacttctgtcccttgtttttgatgtgcgtgctgtctgtcctatggagcctctgcagactcgttctcgtgacccagtggcataccgtttggtgtctgatgtgtgcccagatcgttctgccacttgcactgtgcttgctcctaagcaaaagggaaaaggagcgcgcgtgatagaagaaaagcactgggagaactaacagaggagaaaggtgaaacacacacacattcttaaggcaataaaactagggggtgtatattatcttctggggcatgttcttttctggaaaatatggtagcctcgccaaccgcatctgctcatctgatattcaaacacacagtattcgtgaataagttgattctgtcccccacgtggactctgtgctcacccattgtctcattgccagtggtgtccaagggcccccgttgggacccacggctctcgtccctctgctccgtgtgtctcatgccagcagcacgtcgccatccgtcaccagaattagtcctcacagcctaggaccagttttgtatcaaactcgtctgatgttttgatgccatttgtcttttgtaaagttaattcattaaaagttttatgtactttgatttacagtgcctgtatcttttattttcctgtcttctttctcctgtggtttgctccagaattaaggtttgttttccatccattctcccttttgacacagttgtttcagaaagagctctccagaagccaatattgagatgtaattcagattaggacacagtgtgtgacgcagataactggttactcagctccctggaaagcaggcaagcatgttgaatgtatctagtggtctgattttaatttgggcatctctagagaacgctttcagggaaaaatactttaatagtaaaaagattctctgcgagcaacagtgccccctccgtccactacgctcctgtctccaagaatgttttgctagagctaacagacatagactgcaaaagaataatttggaatcagctatgcaaatcagtctcacaatagcgtgagctaactgagagaagtactaagacccacaaactgcctgttaagtctgagaaggctaaagaagacacacagccaacgttcatgcatttttaaagacagaaggccttgaagaatttgttcttgtaaatccaacacaagttgtttggtacttttaacataaagaaatcatactttgccaaatagtgaaaagtagagcaatcgtgtataagctaatgtttaaaagcaaaactgcaaattgtagcccagttggtcaaacttgttttctttttataactcatggcaggcatctgtaagaagtagagaacccagatgatctcttaggaagccttttattcgtgggaactcgaacttgaagcacaagttcctggtttgaatcctggctctgattttttactggctgtgtgactttgaacacatctcttagtccctcttaggagtactttccttattggcaacttatggactcgctagtgattaaacgaggcaatgactgtgagcgagcctggcaggtgccccgtggtacattcacagcacgggcacagctgctgtgccaggactgtgactcattcccagtaaaaggcacttatcgaagctgataaccgtccttcatcaccgaagtgtgagtagagcatgacttatttagtattctgcctcaatggggaattttttgatcctgtaatcacaactcagcattggccttaatatacctaaatctccaaaaacagtgattaaagcaagagaattattacaagggcttttctctttcctctaactcattcttcacggatgccgtagcgtttccgtgagctcaaactggccttggtgtaaaatgtgtaaggatgagcagcaggcgtgcctcgtgggttcttcctctgttacatcctgctacactcatctgcaggtcaccttagttcacctaccctgagtgaacacccccagctgggtggtccaccaagttctcataaacagagtccctcccattcccccacggggtgcaccgaacttgggtttgcgctaaaaagaactcaaaaggagaactgtgctctcccaaagccatatcaccagtcttaccaaacaataggcttttaaaagcactgagtcattgtcagaatccactatgggaagctctgtgtgtacctggtcccttctaggtgtggtcccataggagcagccttagcatcccctgtgaacttatcaaaaatgcaaattctcaggccccaacctgaaggaggaccctgaatttgagatccccggggctggggcccagcacaactgctgtttagtgaacaggttctccaggtgattctgatccctgatcaagcttcagacctccctccctccccagtgtttttgcaggtgaggaaacaggggcagagtaattcaggcacatgtgttcagagttccacagttgattagcagttgaggccaggctagaatggaaaactgcctgttccttgaatctgaaagagcattattcctggtcaaagctccttaaagttctgggcagctaaaagcatccctgtgagcaaaaatgccaggcagaaaactggcagtgcacctctcatcagcccaggtcccagtgccattggcttcaagaaaaaaaaaaatctctccccaatgctctccttaacctttaagtcttacaggaagcctctcatagaaattgcctccagtccagtttcccaaaaaccccagtgttttacatatctgtttaggagtgtctaagttttgtcatcaatccacgatgttattccttcccttccccaactcactgtgctccctaaaggcagcaacccattcatctttccctttgcctctggatacacccgaatgaccccaggtaacatcatcaggcccgggtgcagtggctccctataatccccaatattttgggaggccgaggagagaggatcacttaagcccaggagtctgagaccagcctgggcaacatagcaagacccccatctctgcaaaaaaataagaaaattagcttggcatggtggcacgtgcctgtagtcccagctacatgggaggctgaggtgggaggatcacttgagcccaggaagtccagaacgtagtgagccttgattataccactgcactccagcctgggtgacagagcgagactctgtctcagaaaaaaaaagaaaaaaaa

SEQ ID NO: 87436 - DNA, 1299 bp, Homo sapiens
ttttttttttttgcttcaaaaatacagtatttattgtaataactacagtagcaagaagaaaaaaacgaatggatactacgtgtttagcagcagagctgaataattatgadatataaacaattactattgggagaaaatacattacactcattgcttggaaccatgaataatacttatatatgtacgaaatatagaaaaataaaataggttaacataataaggatataggcaattattttttttaattttataaaaacttttatttttccttacaaactggggtagttaggagacctgataatagcttttttattttcttggcaccaaagcaacttacttatgtgttccttcttgcattatctgttccagatcatagtcaagttttccaattcgttttactaagctagcaaaattttttataccaaaaagagtaaaatcaaaacaaatgctcctttgtttatagatgaaaatctggagcaaaataacacaacattaaaaaaacaaaactttgcaaacacatcctaaagctacacacattgaagcgtttacagcaatatgctccctgggttcgttctcccttcccccaatcctctaaactgtgcctttgggtctcagacccttgtcccgggggtccctctgaatccacctttcaagaggatggagctgggccactaggctgaggtctggccctgttctcctcatctgccaaagcctcacagtactgcgctggccagtccttggggtcttgattatggaccttggccacaaacttaagaactttcatcttgctggtttccaggttggttcgcgggccccactggaattcgtagtcgacggggtcggtgtggggtatccgccggtattccaggtaacgctgtcgcacaaagtcctcagtaatgagtttctttggatctccgaaaattaaatgcttcttggtggggtagacccctaagcgccagcagaaagtcccaggcttcagtttccttgatggtgttgcccttcataaagatgagccctaaaacgatcatcaggaggcccgtagtgggcgtgccttggtcacccctcatctcggcatcctcctccacaggctccagggtgttgatgaggatgtaagtgttgctcttgggttcaagttccaccagcttatacccgaagacgtactggaggcgctcggcggcccgtttgaagaggtcggggaagatgtccttgtagtccccgatgacgtgcttcagtatgtcggcccgcttgatcggaatcttcttctggtctttaatcagcaagaactgcaccagctcggac

SEQ ID NO: 87437 - DNA, 884 bp, Homo sapiens; identical to SEQ ID NO: 65377

SEQ ID NO: 87438 - DNA, 5906 bp, Homo sapiens; identical to SEQ ID NO: 65452

SEQ ID NO: 87439 - DNA, 2262 bp, Homo sapiens; identical to SEQ ID NO: 75223

SEQ ID NO: 87440 - DNA, 1393 bp, Homo sapiens
atgattctggaaggaggtggtgtaatgaatctcaaccccggcaacaacctccttcaccagccgccagcctggacagacagctactccacatgcaatgtttccagcggtttttttggaagccagtggcatgaaatccaccctcagtactggaccaagtaccaggtgtgggagtggctccagcacctcctggacaccaaccagctggatgccaattgtatccctttccaagagttcgacatcaacggcgagcacctttgcagcatgagtttgcaggagttcacccgggcggcagggacggcggggcagctcctctacagcaacttgcagcatctgaagtggaacggccagtgcacgtatcgacctgtttccagtcaacactcaatgtcattgtcaagactgaacaaactgagccttccatcatgaacacctggaaagacgagaactatttatatgacaccaactatggtagcacagtagatttgttggacggcaaaactttctgccgggttcagatctccatgacaaccaccagtcaccttcctgttgcagagtcacctgatatgaaaaaagagcaagacccccctgccaagtgccacaccaaaaagcacaacccgagagggactcacttatgggaattcatccgcgacatcctcttgaacccagacaagaacccaggattaataaaatgggaagaccgatctgagggcgtcttcaggttcttgaaatcagaggcagtggctcagctatggggtaaaaagaagaacaacagcagcatgacctatgaaaagctcagccgagctatgagatattactacaaaagagaaattctggagcgtgtggatggacgaagactggtatataaatttgggaagaatgcccgaggatggagagaaaatgaaaactgaagctgccaatactttggacacaaaccaaaacacacaccaaataatcagaaacaaagaactcctggacgtaaatatttcaaagactacttttctctgatatttatgtaccatgaggggaacaagaaactacttctaacgggaagaagaaacactaacagtcgattaaaaaaattattttgttaacttcgaaagtatgtcctatatggggaaaaaacgtacacagttttctgtgaaatatgatgctgtatgtggttgtgattttttttcacctctattgtgaattctttttcactgcaagagtaacaggatttgtagccttgtgcttcttgcctaagagaaaggaaaaacaaaatcagagggcattaaatggttttgtatgttacatgatttagaaaaaaggtgatgcatccctcctcacataagcatccatatggcttcgtcaagggaggtgaacattgttgctgagttaaattccagggtctcagatg

SEQ ID NO: 87441 - DNA, 2343 bp, Homo sapiens
gcgaccgctgcactccgcgcaggctgtggacgtggcctcggctcacaacttccgggcctttgagctgctgcacttgcacctggacctgcgggctgagttcgggcctccagggcccggcgcagggagccgggggctgagcggcaccgcggtcctggacctgcgctgcctggagcccgagggcgccgccgagctgcggctggactcgcacccgtgcctggaggtgacggcggcggcgctgcggcgggagcggcccggctcggaggagccgcctgcggagcccgtgagcttctacacgcagcccttctcgcactatggccaggccctggtgcgtgtccttcccgcagccctgccgcgccgccgagcgcctccaggtgctgctcacctaccgcgtcggggagggacccggggtttgctggttggctcccgagcagacagcaggaaagaagaagcccttcgtgtacacccagggccaggctgtcctaaaccgggccttcttcccttgcttcgacacgcctgctgttaaatacaagtattcagctcttattgaggtcccagatggcttcacagctgtgatgagtgctagcacctgggagaagagaggtccaaataagttcttcttccagatgtgtcagcccatcccctcctatctgatagctttggccatcggagatctggtttcggctgaagttggacccaggagccgggtgtgggctgagccctgcctgattgatgctgccaaggagggagtacaacggggtgatagaagaatttttggcaacaggaggagaagcttttgggaccttatgtttggggaaggtatgacttgctcttcatgccaccgtcctttccatttggaggaatggagaacccttgtctgacctttgtcaccccctgcctgctagctggggaccgctccttggcagatgtcatcatccatgagatctcccacagttggtttgggaacctggtcaccaacgccaactggggtgaattctggctcaatgaaggtttcaccatgtacgcccagaggaggatctccaccatcctctttggcgctgcgtacacctgcttggaggctgcaacggggcgggctctgctgcgtcaacacatggacatcactggagaggaaaacccactcaacaagctccgcgtgaagattgaaccaggcgttgacccggacgacacctataatgagaccccctacgagaaaggtttctgctttgtctcatacctggcccacttggtgggtgatcaggatcagtttgacagttttctcaaggcctatgtgcatgaattcaaattccgaagcatcttagccgatgactttctggacttctacttggaatatttccctgagcttaagaaaaagagagtggatatcattccaggttttgagtttgatcgatggctgaatacccccggctggcccccgtacctccctgatctctcccctggggactcactcatgaagcctgctgaagagctagcccaactgtgggcagccgaggagctggacatgaaggccattgaagccgtggccatctctccctggaagacctaccagctggtctacttcctggataagatcctccagaaatcccctctccctcctgggaatgtgaaaaaacttggagacacatacccaagtatctcaaatgcccggaatgcagagctccggctgcgatggggccaaatcgtccttaagaacgaccaccaggaagatttctggaaagtgaaggagttcctgcataaccaggggaagcagaagtatacacttccgctgtaccacgcaatgatgggtggcagtgaggtggcccagaccctcgccaaggagacttttgcatccaccgcctcccagctccacagcaatgttgtcaactatgtccagcagatcgtggcacccaagggcagttagaggctcgtgtgcatggcccctgcctcttcaggctctccaggctttcagaataattgtttgttcccaaattcctgttccctgatcaacttcctggagtttatatcccctcaggataatctattctctagcttaggtatctgtgactcttgggcctctgctctggtgggaacttacttctctatagcccactgagccccgagacagagaacctgcccacagctctccccgctacaggctgcaggcactgcagggcagcgggtattctcctccccacctaagtctctgggaagaagtggagaggactgatgctcttcttttttctctttctgtcctttttcttgctgattttatgcaaagggctggcattctgattgttcttttttcaggtttaatccttattttaataaagttttcaagcaaaaaaaaaa

SEQ ID NO: 87442 - DNA, 1633 bp, Homo sapiens
  misc_feature (1)...(1633): n = a,t,c or g
agctgcagcggcagaggcagcatccagcggcggcgccagcagttccagtccgttgctttactttttgcttcaccgacatagtcattatgccgaagagaaagtctccagagaatacagagggcaaagatggatccaaagtaactaaacaggagcccacaagacggtctgccagattgtcagcgaaacctgctccaccaaaacctgaacccaaaccaagaaaaacatctgctaagaaagaacctggagcaaagattagcagaggtgctaaagggaagaaggaggaaaagcaggaagctggaaaggaaggtactgcaccatctgaaaatggtgaaactaaagctgaagagatccacatctctcgctcaactgttaatgtctcaacctccagaggcaccccacccagcacactgtcagtaaaggggcagattgaaacagtgagagttaagggcacagaaaactgaatctgtagataacgagggagaatgaattgtcatgaaaaattggggttgattttatgtatctcttgggacaacttttaaaagctatttttaccaagtattttgtaaatgctaattttttaggactctactagttggcatacgaaaatatataaggatggacattttatcgtctcatagtcatgctttttggaaatttacatcatcctcaagtaaaataaatatcagttaaatattggaagctgtgtgtaagattgattcagcattccatgcacttgctttaaaatttagtcctgtgcatactgtggtgtttttactgtgcatatttgaatttttctgcagacaagtaaaccttttattttaaaccacaaatagtcagcaggtggccacaactatccatgtttcattaaaatcacataaaacctaggtacaaaagcaccactgattattgctctagaaaaactgcatgaaaaattcaaatatgcacagtaaaaacaccacagtatgcacaggactaaattttaaagcaagtgcatggaatgctgaatcaatcttacacacagcttccaatatttaactgatatttattttacttgaggatgatgtaaatttccaaaaagcatgactatgagacgataaaatgtccatccttatatattttcgtatgccaactagtagagtcctaaaaaattagcatttacaaaatacttggtaaaaatagcttttaaaagttgtcccaagagatacataaaatcaaccccaatttttcatgacaattcattctccctcgttatctacagattcagttttctgtgccttcctttccagcttcctgcttttcctccttcttccctttagcacctctgctaatctttgctccaggttctttcttagcagatgtttttcttggtttgggttcaggttttggtggagcaggtttcgctgacaatctggcagaccgtcttgtgggctcctgtttagttactttggatccatctttgccctctgtattctctggagactttctcttcggcataatgactatgtcggtgaagcaaaaagtaaagcaacggactggaactgctggcgccgccgctggatgctgcctctgccgctgcagctgctcacgcgcagggcgagttcctccncatagacttcgatctccattggngccg

SEQ ID NO: 87443 - DNA, 5224 bp, Homo sapiens
  misc_feature (1)...(5224): n = a,t,c or g
ctccagcctcctggagaagatgacgtccagcgacaaggacttcaggttcatggccaccagcgacctgatgtcggagttgcagaaggactccatccagctggacgaggacagcgagcgcaaggtggtgaagatgctgctccggctcctggaggacaagaacggtgaggtgcagaacctggctgtcaagtggctgggtgtcccgctgggcgccttccacgccagcctcctgcactgtctgctgccacagctgagcagcccgcgcctggcggtgcgcaagcgggcggtcggagcgcttggccacctggcgaccgcctgcagcaccgacctcttcgtcgagctcgctgaccacctactggaccggctgcccggcccgcgggtgcccaccagcccgactgccatccgcaccctgatccaatgtttgggcagcgtcggccgccaggccggccaccgcctcggggctcacctggaccgcctggtgcccctggtggaggatttctgcaacctggatgatgatgagctccgggagtcctgcctccaggcttttgaggccttcttgaggaagtgccccaaggaaatgggtcctcacgtgcccaacgtgaccagcctctgcctccaatacataaaacacgaccccaactacaactacgacagtgatgaggatgaggagcagatggagacagaggatagtgaattcagtgagcaagagagtgaagacgagtacagcgatgacgatgacatgagctggaaggtgcgccgggcagctgccaagtgcatcgcagccttgatcagctcgcggcctgacctgctgcccgatttccactgcaccctggcacctgtgctcatccgccgcttcaaagaacgcgaggagaacgtcaaggctgacgtcttcactgcttacatcgtgctgctgcggcaaacacggcccccgaagggatggctggaggccatggaggaacccacccagaccggcagcaacctccatatgctacgtggacaggtgccccttgtggtcaaggccctgcagcggcagcttaaagatcggagcgtcagagcccgccagggatgcttcagcctcctcaccgagctggcgggtgtcctcccaggcagcctggccgagcatatgcctgtgctggtatcaggcatcatcttctcgctggccgaccgctccagctcctccaccatccggatggatgccctggccttcttgcaggggctgctgggcaccgaaccagctgaggccttccacccacacttgcctatcctcctgccacctgtgatggcctgtgtggctgactctttctacaagattgcagccgaggccctggtggtgctgcaggagctggtgcgggccctgtggccgctgcacaggcctcggatgctggatcctgagccatatgttggagagatgtctgctgtcaccctggcgcgacttcgtgccactgacctggaccaggaggtgaaggagcgggccatttcctgcatgggccaccttgtaggccacctgggtgaccggcttggggatgacctggagcccacgttactgctcctcctggaccgcctgcggaatgagatcacccggctgcccgccatcaaggcgcttacgctggtggccgtatccccactacagcttgacctacagcccatcctggccgaggcactgcacattctggcctcattcctgcggaagaaccagcgggctttgcgactggccacactggcagccctggacgccctggcccagagccagggcctcagcctcccaccgtctgccgtgcaggccgtgctggctgagctgcctgccctggtcaacgagagcgacatgcatgtggcccagctggctgtggacttccttgccacagtgacccaggcccagccagcctctttggtggaggtcagtggccctgtgctctcagagctgctgcggctgctgcgttcgcccctgttgccagccggagttctggcagctgctgaaggcttcctgcaggccctggtagggacccgtcccccgtgtgtggactatgccaaactcatcagcctgctcactgcgcctgtttatgagcaggctgtggatggtgggcctggcctgcacaagcaggtgttccactcattggcccggtgtgtggcagccctctcagctgcctgtccccaaagaggcggaaagcacagccagtcgcctggtctgcgatgccaggtcgccccactccagcacgggggtcaaggtcctggcattcttgtcgctggctgaggtgggtcaggtggctgggccaggccacgagcgggagctgaaggcggtgctcctggaagctttggggtcacccagtgaggatgtgagggctgcagcctcgtatgcactgggccgtgtgggtgctggcagcctgcccgacttcctgcccttcctgctggagcaaatcgaggctgaaccccgacgacagtacctgctgctgcactcactcaaggaggccctgggggccgcccagcctgacagcctgaagccctacgccgaggacatctgggccttgctgttccagcgctgcgagggagctgaggagggcacccggggggtggtggccgagtgcattgggaagctggtccttgtgaacccttcgttccttctgccccgcttgcggaagcagcttgctgcaggtcggccacacacccggagcaccgtcatcacagcggtcaagttccttatctcggaccagccccatcccattgaccccctcctgaagagcttcatcgctgtgcacaacaagccctcgctagtccgggacctgctggatgacatcctgcccctcctctaccaggagacaaagatccggcgggacctcatccgagaggtggagatggggccctttaaacatacagtggacgatgggctggacgtgcggaaggcggcctttgaatgcatgtattcactgcttgagagctgcctgggccagctggatatctgtgagttcctgaaccatgtggaggacgggctgaaggaccactacgacatccggatgctgaccttcatcatggttgcccggctggccaccctgtgtcctgcacctgtcctgcagagggtggaccgactcattgagccactaagggccacctgcactgccaaggtcaaagctggttctgtgaagcaggagtttgaaaagcaagatgaactgaagcgctctgcaatgagggcagtggctgccctgctgaccatccccgaggtggggaaaagccccatcatggccgacttctcttcccaaatcagatccaaccctgaacttgctgccctctttgaaagcatccagaaggattccacttcagcccccagcacagactcaatggagctcagctagtcccctcagcaccaaggtgggccctcgcttaagagaaaggagcccacccaagtccgaggcctccccatcccaccatcgcaggactctacttttgcccttccaccatctcactgggggccctgtcgctcctggtcagggcttacagtgccttctccagggacccaactcaaaggcccccagcccaagctgtgaggctgccaacagttgggccccttccttaactcaggacagtcatccaaagaaatagggtgaggaagttttccagtgacttcacactgtacccctccatagtctgtctggttccttcagagggtgtctctgcctcacaaactagtagtatttagaaataggctgtgctgtcagctgtaaaagatcaggaggcagcagacaccactctggtttcttcactgcattcagcaatgcctgaagttagtgctcaggccgggcatctcaaaagaaaagatacttgagttattcacattttaaaattcaaaacggttcatttttaagtggcagtgatgaatcagaaatttggaagatgatacgggtttcttttttccagggaggaggaatgggttgggtagggaactggacaggcttggacctcatgtttcatttctaatttcaaaatacttattagcaaattgggcaacaatgggcatcttccatgccaccacccaggcataaccagttggtttgtttccttctgaggaaggtttcaaatgtgtctagtgttcagtattgaggacaaagaaatacaagtggcaggcccaagtattttctgtgatatcccaggttaataaagattagattctaagttacttctttcctctgcacgactcgtctccaattgttnnnnnnnnnnnnnnnnnnnnnnnnnnnnnnnnnnnnnnnnnnnnnnnnnnnnnnnnnnnnnnnnnnnnnnnnnnnnnnnnnnnnnnnnnnnnnnnnnntcccaaaaatgaccagtttgcattataaatatttatgactaggttttgaacaggagacaatctgtaagcttcctgtctagactagaagtagaaaagctttattatacccagcgcagcatttctgctaagttgaccaggatggttacagaaaaacatcctgtaagcatttctgtctcataagtaccacatcccatatccctcatgacctatatactacagaagatgcctgtaatcccagtactttggggagggctgaagcagggattgcttgagctcagggagttccgggagccctagggcaacatgggctaggaccacctctacaaaaaaacttcaaaaactacccaggtttggaggtgtggcatctgtagtcccagctacttgggagggctgagggttgggaggatcacctgaagcctggggaggtcaaagggctgtagtcagtgtgccattgcactccccagcctgggtgagagcaagaccccgtctccaaaaaaaatcaggaccacgtgtcactaaattctgagtaccagtcaagaggctcaattgtcaccagttaggtccccgccttggcaaactgctgtaacattatacctgaagcagcagctggtgggagggttataggagactgaaagtgcttttccagttaaccgtggtggattacctggaagagcaatttgtacatcatcctgttctttttggacagaagttacaggatgcaatttaggcatcccgtaagaatctgtgtaagaaattcatctggatatttccatgcatattttctcaattctcacaagcatcacatggaataacttgtcacctaactttacaaaagcaaggctaagaatgactacttgtggcttgggagccacaagcttcttcaagtgtctcagaacctacctggtgtgagggccaagtctgtacgaattccgc

SEQ ID NO: 87444 - DNA, 623 bp, Homo sapiens
ttttttttttttgatcacaagtaatttgcctttttattcatatagaacaaaatttacaaagtcattcatacagtttttgtgtttttttactgacttcgaaaattgggaatattcaaaatacacttttaccccactccattctgtcattatttacacatatgtacaagaaaaatgaaagagtctctgtgtatgtgtgtgtgtgcgagtgtgtgtggtttgtgttgttgttttcttgtattaaaaagctctgctgtgtcgggtgggtgggagggtggggcaggagggcaggcggcgcagtcagaatggaggtcccgtggggagggtttccagagcctctgggaagggacgcctccaggcacgggctggaaggacatggggatgggggggtcttcaccgggctctgccggaacagccccccgttgggtgacctgtgtttgcactgcatggagggcatggtcgccgagctgctcagcggcagcggcaggttgttgctgggccctgatgagagtgtccgcctggtgccatgggtgttctgctctggcagaaggtagctgaccgagagctgggtgttctggtactcccgctgtcggctccaaggtctgggtgggagccaggccccccat

SEQ ID NO: 87445 - DNA, 1874 bp, Homo sapiens
  misc_feature (1)...(1874): n = a,t,c or g
gtctaagccccagctcctggcggagcgagctagcctgcgaatttcagcatgagtgtactgctgaggtcaggtttggggccgttgtgtgccgtggcgcgcgcagccattccttttatttggagagggaaatacttcagctccgggaatgagcctgcagaaaacccggtgacgccgatgctgcggcatcttatgtacaaaataaagtctactggtcccatcactgtggccgagtacatgaaggaggtgttgactaatccagccaagggttattatgtgtaccgtgacatgctaggcgaaaaaggagatttcattacttcacctgaaataagtcaaatctttggggagctactaggtatatggttcattagtgaatggatggccactggaaaaagcacagctttccagctggtggaactgggcccaggtaggggaaccctcgtgggagatattttgagggtgttcactcaacttggatctgtgctgaaaaattgtgacatttcagtacatctggtagaggtaagccaaaaattaagtgagattcaagcattgacactgactaaagagaaggtcccgttagagcgaaatgctggatccccagtgtatatgaaaggtgtcactaagtctgggattccaatttcctggtaccgagatctgcacgatgttccaaaagggtacagcttttatcttgcacatgaattttttgatgttcttcctgtgcataaatttcagaaaacaccacagggatggcgagaagtatttgttgacattgatccacaggtttctgataaactgaggtttgttttggcaccttctgccaccccagcagaagccttcatacaacatgacgaaacaagggatcatgttgaagtgtgtcctgatgctggtgttatcatcgaggaactttctcaacgcattgcattaactggaggtgctgcactggttgctgattatggtcatgatggaacaaagacagataccttcagagggttttgcgaccacaagcttcatgatgtcttaattgccccaggaacagcagatctaacagctgatgtggacttcagttatttgcgaagaatggcacagggaaaagtagcctctctgggcccaataaaacaacacacatttttaaaaaatatgggtattgatgtccggctgaaggttcttttagataaatcaaatgagccatcagtgaggcagcagttacttcaaggatatgatatgttaatgaatccaaagaagatgggagagagatttaacttttttgccttgctacctcatcagagacttcaaggtggaagatatcagaggaatgcacgtcagtcaaaaccctttgcatccgttgtagctgggtttagtgaacttgcttggcagtgatatttcagcttggacattttacccttcagtcggcccaagaaatcaaaataaaggaaacacatttcatatactgcaggtaacaaaagtcaaagtattttatcttttcacagcaagaacagtccatgttgtatataatacaaccaacattatagaacttttagggttgtgactggctttggtgcaaatgtgtgctcaagctaataagttattgtgaaactgagtttcctttaacttacaaagctagttgccatatttctattttattttaaaaagtaaacatgcggctgggcgtggtggctcatgcctgtaatcccagcactttgggaggctgaggtgggcatatcacctggaggtcagcagttaaagaccagcctgaccaaaatgggagaaaccccatctctactaaaaatncaaaactagccgggtatggtggtcatgcctgtaatcccagctctcaggaggctgagcaggagaatcacttgaacctgggaggtggaggt

SEQ ID NO: 87446 - DNA, 4254 bp, Homo sapiens; identical to SEQ ID NO: 65561

SEQ ID NO: 87447 - DNA, 326 bp, Homo sapiens
tggttatttagaagtaatttaattttgacatatttgtgaatttctcaaattttttctgttattgatttctactttcaatccactgtggtcagagaacatactttgtattattttaaccactttatatttattgagaattgttttactgtctaacatacagacctaccttggcaaatgttccatgggcactagaataatgtgttttctgctgttgttgagtgttctacatacatatctgttagatctagtctgtttataggggtcttcaagtcttcaatttccttatgatactgtctcattgttctaccttctatcattattgagta

SEQ ID NO: 87448 - DNA, 338 bp, Homo sapiens
ccaagttttatattgtgatgatatctgaacttatcactgctttatggtaaagtctgaagtgtccgcaccttaaatattgctactgtgaattctcacatatacacataaacttaatttcggattaaattcttttcatttttactgcatctgcggaaacatattttagtatgaattctcttatgtgtattaaggtgtgaggaatagttaaatgctttgccacattcttcacatttgtagggttgctctccagtatgaattttcttatgttcaataaggtttgaggatcggttaaaagctttgccacattcttcacatttgtagggcttctctccagtatg

SEQ ID NO: 87449 - DNA, 563 bp, Homo sapiens
  misc_feature (1)...(563): n = a,t,c or g
ggattttgaaaagaaaactttcctccctcaatagtgaagtgtcaaccatccagaacacaaggatgctggctttcaaagcaacagctcagctcttcatcctgggctgcacatggtgtctgggcttgctacaggtgggtccagctgcccaggtcatggcctacctcttcaccatcatcaacagcctccaaggcttcttcatcttcttggtctactgcctcctcagcccagcaggtccagaaacaatatcaaaagtggtttagagagatcgtaaaatcaaaatctgagtctgagacatacacactttccagcaagatgggtcctgactcaaaacccagtgagggggatgtttttcccaggacaagtgaagnggaaatattaaaactagaatattcaactccatatggnaaatcatatccatggntctctttggcattatgaagaatgaagctaaggnaaagggaattcattaaacatatcatccttggagaggaagtaatcaacctttacttcccaagctgtttgttctccacaataggctctcaacaaatgtgtggtaaattgat

SEQ ID NO: 87450 - DNA, 334 bp, Homo sapiens
  misc_feature (1)...(334): n = a,t,c or g
ctggcggcccaagacattgcgactccggaggcagtgcaagtatcttaagagcacccccaggagaaacaagcttgaccactatgcatcatcaagtttcctctgaccactgagtctcccatgaagaagacagaagacaacaacgcacttgtgttcactgtgaatgttaaagccaacaagcaccagaagaagctctatgacactgatgtggccaaggtcaacaccctgattcggcctgatggagagaaggaacatgttcgactggctcctgattacaatgctttggatgttgccaacaaaatagggatcatctcaactgagtcccagtggctaattn

SEQ ID NO: 87451 - DNA, 1832 bp, Homo sapiens; identical to SEQ ID NO: 65608

SEQ ID NO: 87452 - DNA, 1330 bp, Homo sapiens
ggcctcgtgccaagcttggcacgagggcgcgaaacatggcggggcaggacgctggctgcggccgtggcggcgacgactactcagaggacgaaggcgacagcagcgtgtccagggcggctgtggaggtgttcgggaagctgaaggacctaaactgccccttcctcgagggtctgtatatcacagagccaaagacaattcaggaactgctgtgcagcccctcagagtaccgcttggagatcctagagtggatgtgtacccgggtctggccctcactgcaggacaggttcagctcactgaaaggggtcccaacagaggtgaagatccaagaaatgacgaagctgggccacgagctgatgctgtgtgcgccagatgaccaggagctcctcaagggctgtgcctgcgcccagaagcagctacacttcatggaccagttgctcgataccatccggagcctgaccattgggtgctccagttgctcgagcctgatggagcacttcgaggacaccagggagaagaacgaggccttgctgggggagctcttctctagcccccacctgcagatgctcctgaatccagagtgcgacccgtggcccctggacatgcagcccctcctcaacaagcagagtgatgactggcagtgggccagtgcctctgccaagtccgaggaggaggagaagctggcggagcttgccaggcagctgcaggagagtgctgccaagttgcacgcgcttagaacggagtactttgcacagcatgagcaaggggctgctgcgggcgcagccgacatcagcaccctagaccagaagctgcgtctggtcacttccgacttccaccagctaatcttggcttttctccaagtctacgacgacgagctgggcgagtgctgccagcgcccaggccctgacctccacccgtgcggccccatcatccaggccacgcaccagaatctgacttcctacagccaactgctgcaagtggtcatggcagttgctgacacctctgcgaaggccgtggagaccgtgaagaagcagcaaggcgagcagatctgctggggtggcagcagctccgtcatgagtctagctaccaagatgaatgaactaatggagaaatagaaagtcttcagtgatggcctacgccaaagcacaggatggggcgggcaggaagccctctcccaagatcgagttggccgaggatggatgattgtggcagcagaagccgttgcagccccacgttgtgctctaggcagggacctttggcccctttggggagggagagacagacgggcggtttgacttggacacaaaaaaagccttggtttctaaaaaaaaaa

SEQ ID NO: 87453 - DNA, 905 bp, Homo sapiens
actgacagccttgagatgcttacgccaagcttggcacgaggattaaatgtttacattttctaatgtggtcagtattccttaaatacaaaagaatacagtaattcattggccttatgccagagaataagaaaacaggaatgatgcctatgcctaaaagacgacttggggcaagtcttttatgtggggactataatttatacaaagcagtagcactgcaagggaatgggtaaagaattctatgctctgctggaatccttctgttttatgaagatataaacctgtgacctggactagtgcctacctctgccatggtgttctgaattggggtcccggttagcaaaagccgattccgacactggaactgtaagaggatcttccaacgaacactggaactactcttgagcgcctgagcctcatccagtaccatgtattgccacttgacccgctggaaatactttacatcctgcaccaccagctgatagctggtaataaccacatggaagggggcatcctgagtgtagagggtcttctgactccagaaccttctgatgacttttctatcatgaggatttccccaatatggtagcaccttaaatttaggaacaaatctagtaaactcctggtgccaattgttaagtgtagacgcaggtgaaattattaagaaaggtccccaaatgttctctctctcagccagatgggccagaagggcaatgctctgtactgttttaccaaggcccatttcatcagcaagaatgccattaataccctgttcatatagattggccaaccaattcatgcctttcagttgataacctttcaatttgccatttaaaaattgtgggctgtggaatatcctcacccagccccggattagatgggttaacccaggctataactctccccaa

SEQ ID NO: 87454 - DNA, 673 bp, Homo sapiens
gatcagaggaagatgttattgaagggaagactgcagtcattgagaaacgtaggaagaaaaggtcttctgcaggagtggttgaagatatgggggtgaagtgcagaatatgctggaaggagttggagttgacattaacaaggctcttcttgccaagagaaagagactagaaatgtataccaaggcttctctcagaactagtaaccagaaaattgaacatgtttggaaaacacaacaagatcaaaggcagaagcttaaccaagaatattctcagcagtttctgactttgtttcagcagtgggatttagatatgcagaaagctgaggaacaagaagaaaaaatacttgttggtatcatgattaggtttataatcaaccaagtctcaagtaggaatggacaacctagccttttattgtgaccagtggaactgagccaggtttcattaaccattgctggccatgtgttttaaacctactgaactgtaaaccacagacgtataggcacataccatactcataaaaggcatttatattgtttggggttcctgcatttccaagtgacagaaatttgtcaaagtacaaaagaaggatcattggtttatgtaaaagaagtcggggcagtttagcttcaggcatagccagatgggaacagggagggggttgctcatgtagtgtca

SEQ ID NO: 87455 - DNA, 402 bp, Homo sapiens
aggacgcgtgggcgcgccgctcctgctggggcctgcccacgccaaggacctgcctctggcgcctcctcttctattgcccagtttccccagccagaacatcccctgaagatggcagaggagagcagctgtaccagggattgcatgtccttcagcgtgctcaactgggatcaggttagccggctgcatgaggtcctcactgaagttgtacctatccacggacgaggcaactttccaaccttggagataactctgaaggacatcgtccagaccgtccgcagtcggctggaggaggcaggcatcaaagtgcacgacgtccggctgaatggctccgcagctggccacgttttggtcaaagacaatggcttgggctgcaaagacctggacctaatcttccatgtggct

SEQ ID NO: 87456 - DNA, 407 bp, Homo sapiens
gaatgcagatttccagctatgaaggcgcctgtggtcatctgaatgcagagtttcttggacatcatgatgtggtactgcagtgggttgcagatggccacatagcggtcataggccactgctgccagaagaaagcagtctgcagtttccacagtgcaaagaaaataaaactgtactgcacattcatagagggaaatccttttgccctcagaaaagaagttctctaacattttgggggtaatagcacaggcccgcgagaatccacaagagccagatttcccagaaagatgtacattggtgtgtgaagccgacagtgtgtaaatatcagtgccaccaaactaatattccccaccacggtcatcagatagatggcaaagaacaccacaaacagcagagtcttcagttcaggg

SEQ ID NO: 87457 - DNA, 410 bp, Homo sapiens
tttcgtgttacctgaagctcagcatccatgatagtccagggggcttccaaggcgatgggcagcatcagtcttcagctgctaagccaaggagatctgggaaggagtcagtcaaggaatgttgggtttgggcttcaggggttttaggagcagcagtgatgtgagtcggacagtccgacctccagcgggggcccacacagacagggcacggcttaggaggaatcccaggctgacgacattctgaggcccagtggccaggcttttggcatttgaagcaaggtccatggagatgttttgaaggagcccctgcgagctgtggcgttgatgttctaaagttcttgcatgctagagatgtgggtgggggttctcctacagcggaggcacgaagctgtaactcagaaatacgttgctgg

SEQ ID NO: 87458 - DNA, 3807 bp, Homo sapiens; identical to SEQ ID NO: 80186

SEQ ID NO: 87459 - DNA, 437 bp, Homo sapiens
aatacacgtctcttagccaggtcaattatgtttactccattgtagtaaaggttttcgatgcatccatggaagtttttctttaaaaaggtcccaggttttcctggtactggaattcctccaaaactaagctcatagtcaatgtctaaggcatccgtctcgcccttggtgcggaagtgctgtgtgtgcttgtccaccgtgaagttcacctgcttgcccacccgctcaatgaggaccgagtgccagtgctggtcatccaggaggctgcccagggtggcagagggcaagctgctgctgagccgcgctttgctgtcacccaaattgaggtgtagggcgagcctccccttctggagttccaaggtgatgtggtctccacgctgaccttctccatggaacaggaccccatctccttgcatgctcttgaacttcagggagatcac

SEQ ID NO: 87460 - DNA, 446 bp, Homo sapiens
  misc_feature (1)...(446): n = a,t,c or g
tgaggcactcgggccggagttcccgaatcgacggctgcgagaagacgacagaaggggaccacgagaactacgtggcgtgctcacgcagccaccggcgccgagccaaggccctgctggactttgagcggcacgacgacaacnagctgggcttccgcaagaacgacatcatcacagtgcgtgggggcgctggactaccaggtcctcaggctgtggcgggttccccagactccctccaccaagccccaccccaacccctttccctgccaagagcttctcttgtgaagatgtaggggtcttggcctggcctagttgctgaggagtcatatcgggggtgcaggaggcgctggcccagggcacccagctttggttcctgctgtttttcctcctgtgcagatcgtgtctcaaaaggacgagcactgctgggtgggggagctcaacggcctgcg

SEQ ID NO: 87461 - DNA, 444 bp, Homo sapiens
ccgggtcgacgatttcgtgcaagcggacctgtctcaagggccagtgtcgggacatttgtcagcagggctccaacatgacgctcatcggagagaacggccacagcacagacacgctcacgggctccggcttccgcgtggtggtgagccctctcccctgcatgaatggcggccagtgctcctcgcgaaaccagtgcctgtgtcccccggacttcactgggcgcttctgccaagtgcccgcaggaggagccggtgggggtaccggcggctcatgccccggcctgagcaggacaggggccctgtccacaggggcgctgccgcccctggctccggagggcgactctgtggccagcaagcacgccatctacgccgtccaggtgatcgctgaccctcctgggcccggggaggggcctcctgcccagcacgcagccttcctggtgcccctag

SEQ ID NO: 87462 - DNA, 788 bp, Homo sapiens
gcggccgcgggctctcgcggggcggcgacgccgcggggaggatgctgcttgccgcgcccgcgtcctcaccgtcctcccgggccgcctgctggggctttgttgtggcccggacgccgcgggccaccccctgaagtcgcctgccgccgccgccgccgcacctagcggacgggcgggcgggcgcgcgtgtgcccaggagtgcgcgcctgtcgcggtggtgggtgcaggactggacccacgggcccattgtgcgcccgcccgcggcagccaggaccatgtgggtgaacccggaggaggtgttgctggccaacgcgctgtggatcaccgagagggccaacccatacttcatcctgcagcggaggaagggccacgccggcgatggaggcggcggcggcggactggcgggcctgctggtgggtacccttgatgttgtgttggactccagcgcccgggtcgctccttaccgaatcttgtaccagactccagactccctggtctactggaccatcgcctgtgggtggttccaggaaagaaatcactgaacactgggaatggcttgagcaaaatctcttgcagacactttccatctttgaaaatgagaatgatatcaccacatttgtgagaggaaaaatacagggcatcattgcagaatacaacaaaatcaatgatgtaaaggaagatgatgacacggagaagtttaaagaagccattgtgaaatttcataggctgtttgggatgccagaggaagagaaactcgtcaactattactcttgcagctattggaaggggag

SEQ ID NO: 87463 - DNA, 413 bp, Homo sapiens
tttcgtcaaatggcgtatttgttcaccaatcgccccatacaggctgggatcaccggagtgcacccgcgccacgtcctggccttgggcatgggccgtcttgatcagctcgatgatctgctccaggtgcagttcggcgctgttgaccacctggagcgcctgatgaccttccagcacggcggcgggcaccagcgagccggcgtagatgatcaccgggcaactgcggatcagccgctggcccttgacggtgatcaattccgggtcaccggggccggcgccgataaagtagacggtcatggagaaatcctgttgaaaaacgggcgagcatgaacacggctcatgctcaagagcggaaattatcgggtttttaacccgcgcaggctaacgcaaaggtggcctgcgcgcttttttgacgg

SEQ ID NO: 87464 - DNA, 403 bp, Homo sapiens
gaatcgcggcgactatcgattgcagcgggatctcgccctccgggcacgccatgcccagtgctttggccaccgtgctggcgacgccctcggcgttgtccaccgaggccagcgtgataaagcagacttccatgtccgacacggccgcaattgccctcgcgaccgcaatgccgagctgcgtcttgccgatgccgcccgggccgagcaaggtgacgatcggcgttcccttcagtgcgcaggtgatttcagcgatcgcctcatcgcgtccgatcaacggcgtatggcaaaccggcaagcgcgcgaggcgcggcgtgccgccttgcatggcagcagcgctagtgggcgcgctgaccggatcaggcgtctcggttggcatggtcagccggtagtcgcgaccggagatcgt

SEQ ID NO: 87465 - DNA, 2307 bp, Homo sapiens
ttttttttttttcaagctgggaattaggcaaacctgcctcccgttttaattcctaaataccatatttccaatgataagaagctacaggcctccctcataattagcgtccagggaaattccttgtggacaaaggacagacggaactggaagtcatccctctggggctcccctgagacaaacgcttatatgattgcccccgttcccctaactgtttacataaaaaatgcggatccactgggccagactcaatccgtgtattcagtgggaaggctgactgaaccaatgtacgccatacacatacttgatcttggtggctcccctaaggtgtattaaagggcaaactggtatccccaggccacctcagggcacctgttgtcaggggcctcctggggggttgttcacaggtgcatccttaaccttggcaaaataaactggagactggtctcagatatttggggttcacaaaggcgtgagacggcagggtcctgaggtctgaggcgccgtgggcgaggaggagggtcctgaaatctgaggcgccgtgggcgaggaggagggccaagcacacgccagggtcaggtcctgggcaggtggaattgtgcagtccccctgcgtctgcaggtgctgtctgtctggcttgggcagggttgggggaggaccgaggccagagccatccttcctccaggcacttgcagggccaactggagattctaggcctggcctgagtctgcgcaggtgctagtgggaccagaggcacttcttgggaatggattctggaggtgtcagacacttccctaacttttcacagcccggaggtgcccagttcatgaccgcccagttgcacacgttgagctggggctgcgcggggaccaaggcttcctggtgctgctggacgaccgaggtgatcctgctgagggcctcctggtactcggcgctggcaaagctgagggggaacctctcccctgggtcccgtcccaggtggaagatcaggggcagcttcgtgtggtcttccagattgtgagttgtgacccctgaaacgttctgcccagggcagaaatcaatgccctgtctgaagttctcccaggagttggtccaggtcccagaagtgagccttgtgctgcccgaagggtggccgccatacagcgtgtcgccacggtaatagaagataggcctgtccatcagccggccctgcaggagggtggggaggaggttgaggccatcaatggccctgtcgctgggcggcgtcaggcccgcaagggccaggctggtggtgaagaggtccatgatgctgcccagctggtggctcacctggcctgcagtgacgtgccctggccaccatgcgagggcaggctccctcatccctccttcaaacgtggtctgcttcccacacagaaaggggccgttgctgccaccttgttcgggggcggaaatgagggcagcgccgttgtccgacgtgaagaagacgaaggtgttgtccgcgacgtgcaggtcttggaggagctccagtatcttcccaatgctgtcatcaatctcccggacggcgtctccataccgccctcgctgactggtgcccaagaagggtttggaggcatagacgggtgcatgcgtggcgtcgacagcccagtagaggaaaaaggggtggtgccgtgcctgtctcttaatgaagtccagggcttcctgcaggtagatctgggtgaggttggcttcccccgtcttcagattaataggaaattcttcataatatctgccaaccatctcccagtccctgtacacagggatgttgggcctggccttgttgtcataaggtccaaagtggcagttgggggatccaaaccactcatcaaatccgtgcttcagggggtggaactggggcctgtgacccagatgccacttgccgacaatcttgctgacgtagccggccttcttcagaagctccggcaggagctgctccgagtctgggatgccgcccacaatctcctgcggtgtgtaggcgtttctggcatgggcgttggtggtgtagaagccattgcggatgggtagccgtcctgtgagcagtgccgccctcgatggcgagcacagagggttggcagaatagaagtttgggaaaagcagcccttctgcagccatccggtccaaattcggggtctctctggagggctctccatacaccccgaggtcaccccatcccatgtcgtccatgagcaggagcaggatgttggggggctgcggggcgcccgaggcccccatccccgcggcgctgagcaccagcaacagctgccaccacctcgtcgccgcgacaaccgccgccat

SEQ ID NO: 87466 - DNA, 478 bp, Homo sapiens
  misc_feature (1)...(478): n = a,t,c or g
nttttatagccctgcggcaccagtgaggaccntccgggctggcgacaaggccaggtcgtacccgcagtgcgtccctgtgggacctgccctccacctgctccatggggacaagtccaggtcgtacccgcagtgcgtccctgtgggaactgccctccacctgctccctggggacacgtccaggtcgtacccgcaccgcgttcctgtgggaactgccctccacctgctccctggggacaagcccaggttgtacccgaagtgggtccctgtgggaactgccctccacctgccccttaaggggtgcttgtgcagtggtttcatcctctcacttggatctgtccgttggaccctcactagggttgggagttcctcatgggatgaggtactctagatcccctcttgacagattttctttttattatttcagatacacctcttcttcacccttcctctctgggtgctttttcagccctaagtatgn

SEQ ID NO: 87467 - DNA, 558 bp, Homo sapiens
atggacgagaagcagaaccgaggccctttagggctcagcggaggcctgcctgtctctctaaggtccctcttggagcaactgaagaaactccaggccattgtggtgcagtccaccagcaagtcagcccagacaggcacctgtgtcgcagtcctgttgctgtcctttgccctcatcatcctcccctccatcagcccttttggccccaacaaaaccgagagccctggggactttgcgcctgtacgagtgttctccagaactttgcacaacgatgctgcctcccgcgtggctgctgatgctgtgccaggctccgaggccccaggaccccgacccgaggctgacacaacccgagaagagtctccaggaagccccggggcagactggggcttccaggacaccgcgaacctgaccaattcgacggaggagctggacaacgccaccctggtcctgaggaatgcaacagaggggctgggccaggtcgccctgctggactgggtggcgcctgggccgagcactggctcaggacgtgcagggctggaggcggcgggagacgagctgtga

SEQ ID NO: 87468 - DNA, 426 bp, Homo sapiens
atggaagaagagatcaccatactcgtcattgacaatggctccagcatgtgcaaagctggttttgctggggacgacgcccctggaaccatgtttccctccactgtcaggtgcccccaacaccagggcatgatggtggggatgggccagaaggtcttctacctgggcgacaaggcccagagcaagcacggcatcctgacgatgaagtaccccatcgagcacaggattttcaccagctgggaaggcatggagaagatctggcaccacaccctacaacaagctgcatgtgttcctggaggagcacctggtgctgctgactgagggccccctgaaccccaaggccaacagaaagaagatggctcacatcatgtttgagaccttcaatactctggacatgtacgtggcagtccaagccatacttctatgctg

SEQ ID NO: 87469 - DNA, 1092 bp, Homo sapiens
  misc_feature (1)...(1092): n = a,t,c or g
ctgcaaaagctgtactctttttcctcaaaatccaaatcttccacctccttccacaagagaacgacctcctgggtgtaagaccgtgtttgtcggaggattaccagaaaatgctactgaggaaattattcaagaagtctttgaacagtgcggtgatattacagcaattcggaaaagcaagaagaatttttgtcacattcgctttgcagaggaattcatggttgataaagccatttacctttctggttataggatgcgattagggtctagcaccgacaaaaaggattcaggccgccttcatgtggactttgcccaggccagggatgacttctatgagtgggaatgcaagcagaggatgcgtgcccgggaggagcggcaccggcgcaagctggaggaggaccggctcaggcccccatccccgcctgccataatgcactactcggagcacgaagccgctctgctggctgaaaagctgaaagatgatagcaagttttcagaggctatgcacagtgctgctttcctggattgaacgaggggaagtgaatcggcgctgctgcaaaccagttctattccatggtgcagtcggccaacagccacgtccgccggctaatgaatgaaaaagccacccatgagcaagagatggaggaagccaaggagaattttaaaaatgccttaactgggattctcactcaatttgagcagattgtggccgttttcaacgcttctaccagacaaaaagcttgggaccatttctcgaaagcccagcgcaagaacatagacatttgggcgaaagcattctgaggagctccggaatgctcaaagtgagcagctcatgggcatccgccgcgaagaagaaatggaaatgtctgatgatgagaactgtgacagccctacaaagaaaatgagagtcgatgaatcagccctgggtgccccaggnctacgctctgaaagaggagaatgacagtctncgcttgcagcttgatnctacaggaatnaggttgagcttctgaaacaaggaaaaggacagcttttccgncagaagaaaccttaccaagggccagcacttcagtttttcagcaaccattcaagnattca

SEQ ID NO: 87470 - DNA, 732 bp, Homo sapiens
agcggccgcgtgcaccatgcactgggcggcctcggcgtggttgcccagctccgcgtgcttcccggccatgttctgcaaccaggtcagccgaaggtccaggtgagccctggtagccccgggcaattctgtacatgaggtcgatgagcatctcagggtcctcctggtgttccttcatcttcaccgtgtccgtcaggatcatgtgcaggttgaacatcaggtcctggacctgctctgcgaaggtgctgtcccgcagccccatgtcctcctcagcataggtgaggatggttttgagtgaacgtcgcaggtgctcttcactgaagttctgcgtcgtccccaccagggacgagagagacatggtgacctgcatcttcacacgggcaaagttgtggccgatctcgaagttctgtcgcatgagcaggtacagcgaggcgctggcgtgcgtgcggatggtgctgatgcggctgccacagtgtcgtaggagcctcaggcacaggtcggcacacagctccgtgtcctcctcgaacagcagctccgggaacttggacacaagggccctctgggtggccaggccatgctgcaagaagagggcactctgggcactgcccaggctgtacagcacaaccttcagcactgcccccaagacgctctcccgggcttctgaaagcatcaccgtctggagggaagggggtcagaaatccaggtgttagagcctgcacgatgatctccagtgtg

SEQ ID NO: 87471 - DNA, 2535 bp, Homo sapiens
gcagcccaggcggagcgggaggagctggcagcggggcgcatgccaggcgggggtcctcagggcgccccagccgccgccggcggcggcggcgtgagccaccgcgcaggcagccgggattgcttaccacctgcagcgtgctttcggaggcggcggctggcacggaggccgggctacatgagaagctcgacagggcctgggatcgggttcctttccccagcagtgggcacactgttccggttcccaggaggggtgtctggcgaggagtcccaccactcggagtccagggccagacagtgtggccttgactcgagaggcctcttggtccggagccctgtttccaagagtgcagcagcccctactgtgacctctgtgagaggaacctcggcgcactttgggattcagctcagaggtggcaccagattgcctgacaggcttagctggccgtgtggccctgggagtgctgggtggcagcaagagtttgcagccatggatagttctgagaccctggacgccagctgggaggcagcctgcagcgatggagcaaggcgtgtccgggcagcaggctctctgccatcagcagagttgagtagcaacagctgcagccctggctgtggccctgaggtccccccaacccctcctggctctcacagtgcctttacctcaagctttagctttattcggctctcgcttggctctgccggggaacgtggagaagcagaaggctgcccaccatccagagaggctgagtcccattgccagagcccccaggagatgggagccaaagctgccagcttggacgggcctcacgaggacccgcgatgtctctctcagcccttcagtctcttggctacacgggtctctgcagacttggcccaggccgcaaggaacagctccaggccagagcgtgacatgcattctttaccagacatggaccctggctcctccagttctctggatccctcactggctggctgtggtggtgatgggagcagcggctcaggggatgcccactcttgggacaccctgctcaggaaatgggagccagtgctgcgggactgcctgctgagaaaccggaggcagatggaggtaatatccttaagattaaaacttcagaaacttcaggaagatgcagttgagaatgatgattatgataaagctgagacgttacaacaaagattagaagacctggaacaagagaaaatcagcctgcactttcaacttccttcaaggcagccagctcttagcagtttcctgggtcacctggcagcacaagtccaggctgccttgcgccgtggggccactcagcaggccagcggagatgacacccacaccccactgagaatggagccgaggctgttggaacccactgctcaggacagcttgcacgtgtccatcacgagacgagactggcttcttcaggaaaagcagcagctacagaaagaaatcgaagctctccaagcaaggatgtttgtgctggaagccaaagatcaacagctgagaagggaaatagaggagcaagagcagcaactccagtggcagggctgcgacctgaccccactggtgggccagctgtccctgggtcagctgcaggaggtcagcaaggccttgcaggacaccctggcctcagccggtcagattcccttccatgcagagccaccggaaaccataaggagcctccaggaaagaataaaatccctcaacttgtcacttaaagaaatcactactaaggtgtgtatgagtgagaaattctgcagcaccctgaggaagaaagttaacgatattgaaacccaactaccagccttgcttgaagccaaaatgcatgccatatcaggaaaccatttctggacggctaaagacctcaccgaggagattagatcattaacatcagacagagaagggctggagggactcctcagcaagctgttggtgttgagttccaggaatgtcaaaaagctgggaagtgttaaagaagattacaacagactgagaagagaagtggagcaccaggagactgcctatgaaacaagtgtgaaggaaaatactatgaagtacatggaaacacttaagaataaactgtgcagctgcaagtgtccactgcttgggaaagtgtgggaagctgacttggaagcttgtcgattgcttatccagtgcctacagctccaggaagccaggggaagcctgtctgtagaagatgagaggcagatggatgacttagagggagctgctcctcctattccccccaggctccactccgaggataaaaggaagacccctttgaaggaatcttacatcctttctgcagaacttggagaaaagtgtgaagacataggcaagaagctattgtacttggaagatcaacttcacacagcaatccacagtcatgatgaagatctcattcagtctctcaggagggagctccagatggtgaaggaaactctgcaggccatgatcctgcagctccagccagcaaaggaggcgggagaaagagaagctgcagcttcctgcatgacagctggtgtccacgaagcacaagcc

SEQ ID NO: 87472 - DNA, 1255 bp, Homo sapiens
ccaataggaacgtcaagttttgcaaatcatcctccagctgcaagactttttccagctaacaaggaacgtgaagaaattcagactttaaaacagcaattggcagttttacgggaagatttgaaaagtatggaatccaaatggtcaagtacacacagccgtctcagaagccagatacaaatgttagtcagagagaacacagacttccgggaagaaataaaagtgatggaaagattccgactggatgcctggaagagagcagaagccatagagagcagcctcgaggtggagaagaaggacaagcttgcgaacacatctgttcgatttcaaaacagtcagatttcttcaggaacccaggtagaaaaatacaagaaaaattatcttccaatgcaaggcaatccacctcgaagatccaagtctgcacctcctcgtgatttaggcaatttggataagggacaagctgcctctcccagggagccacttgaaccactgaacttcccagatcctgaatataaagaggaggaggaagaccaagacatacagggagaaatcagtcatcctgatggaaaggtggaaaaggtttataagaatgggtgccgtgttatactgtttcccaatggaactcgaaaggaagtgagtgcagatgggaagaccatcactgtcactttctttaatggtgacgtgaagcaggtcatgccagaccaaagagtgatctactactatgcagctgcccagaccactcacacgacatacccggagggactggaagtcttacatttctcaagtggacaaatagaaaaacattacccagatggaagaaaagaaatcacgtttcctgaccagactgttaaaaacttatttcctgatggacaagaagaaagcattttcccagatggtacaattgtcagagtacaaccgtgatggcaacaaactcatagagtttaataatggccaaagagaactacatactgcccagttcaagagacgggaatacccagatggcactgttaaaaccgtatatgcaaacggtcatcaagaaacgaagtacagatccggtcggataagagttaaggacaaggagggtaatgtgctaatggacacggagctgtgacgatcctcatgtgatcatgaagtaacagtaactgactttttatgttaaaaaatgtacatttactgtggattctgtttaatttattgtgtatgtgtggggaaaagattggattctaaaataaaagtttaccctgtggcaaaaaaaaaa

SEQ ID NO: 87473 - DNA, 918 bp, Homo sapiens; identical to SEQ ID NO: 62125

SEQ ID NO: 87474 - DNA, 1004 bp, Homo sapiens
cttagacaatagtagacattagcccagagcggtggaattcgcagaagctgagggtcctggaccgctgccagcaaagtacatatcacagtgctggcagtggtgcagaagctgagggtcctggaccggcagggctgtgatatgtactttgcagacaacatcctttacactattcatatgggatgtcatgggtatgaaaatccttttcagtgtaatatatgtggatgcaaatgtaaaaacaagtatgattttgcctgtcattttgcaagagggcaacataaccaacattgattgaaaatagtcatattttacttagttttgctgtttttgtggtttggttttttttgttttttgttttggtcatccctaataaagtgtctgctaattcaaggcttatacattatatttatagaatataaatttgtcagtggaataaaatttcccctttttttcataaaaatctggtcagggtcatttatatattagaacagttagacacattggtgtctcttttttcctttcctttcgacattggagaattggagtgcagtcataatcttacaagatgttcatttgaatttctcacatttatggtccataaaaacttcaaggcttatccatacttttgatgtttcaatatgcattgaactggatgttatttctgccatatttcaaaatggtagaataaattacagaatttattactactcatttcagtgtttagtacagaaattgccttaaaaattgctattaattgaaatatcatttagttcacattccttaagttgaatcggtagtttcatttcaactgataatagtaaagctatttcagtttagtaaaaattttcttttttccacaagaggaaatgtaaaacagttaagacttgaaattgaaaattcttttaatatttaaaataacttgtttattcaatgtctaaacacatgtcagttttccactggatttttattttcacaggtaaatacactagagtgctagatgccttttt

SEQ ID NO: 87475 - DNA, 1465 bp, Homo sapiens; identical to SEQ ID NO: 60857
  misc_feature (1)...(1465): n = a,t,c or g

SEQ ID NO: 87476 - DNA, 793 bp, Homo sapiens; identical to SEQ ID NO: 62604
  misc_feature (1)...(793): n = a,t,c or g

SEQ ID NO: 87477 - DNA, 1039 bp, Homo sapiens
ttttttttttttccatgtgtaacatgtttattctcagcatatgcttgtgaatgaactaggagagggggctttgtgaggctttgccacagtgacctctgcggggaccgactgtgtcagcagagccactgggtgaaggttgggatggtggcagcagccacaaggcctggaacaaggtatggggaggcatttgaggacctccaggggacccgattggttggctgcttggtcacctccagatgagtagcctgggtgtccattctgaggcaccaaggtggaagtggcaggatgtgctcagttgcccatatggaaactcagcctccacggggctctgcgccctgctctcctctctcaccttttccacttgtctgaagacccgcagcaggtttccacgaaggacaccttgaagctcttcctcgctccagctacgactcagcaactcctctatcaggactgggtatgtggacacatcctcacagcccctgagggaaccggccagtcccgtcataatttccaccaatcccgatgaactcagatccaatgactgccctgatgtggtcaaagtgatctgccacagtggacacgttagcaagcaggttgcactgcagcacccccatggacagtgtcaccatcacgatgccaccgttcttcttcagaagctgcaggatatcatcgggaacattcaacaaattgtcacacacagctctggcagctgagtgggagaagatcacaggagcctgagacacttccaggacccttcttatcaaggtgtccgatgcataggacaaatctatcatcatgcccaggcggttcaactcctctactactttctcaccaaagcttgtcaatccgctgacgttggtgtacatgtggtgtctgaacttggtggaactctctgcccatggtgtactgcaggtgaaggtaagtgtcaggtagcgcacccccagcacatagaaactgcgcagcacagagaggctgctgtccagtgagtgaccaccctccacgccaatgaggcaggccagcttttgagagctgttcagac

SEQ ID NO: 87478 - DNA, 5651 bp, Homo sapiens
ggagcgacgccgctcgggtcagtcggcggccggactgggaagatggacgcagctactctgacctacgacactctccggtttgctgagtttgaagattttcctgagacctcagagcccgtttggatactgggtagaaaatacagcattttcacagaaaaggacgagatcttgtctgatgtggcatctagactttggtttacatacaggaaaaactttccagccattggggggacaggccccacctcggacacaggctggggctgcatgctgcggtgtggacagatgatctttgcccaagccctggtgtgccggcacctaggccgagattggaggtggacacaaaggaagaggcagccagacagctacttcagcgtcctcaacgcattcatcgacaggaaggacagttactactccattcaccagatagcgcaaatgggagttggcgaaggcaagtccataggccagtggtacgggcccaacactgtcgcccaggtcctgaagaagcttgctgtcttcgatacgtggagctccttggcggtccacattgcaatggacaacactgttgtgatggaggaaatcagaaggttgtgcaggaccagcgttccctgtgcaggcgccactgcgtttcctgcagattccgaccggcactgcaacggattccctgccggagctgaggtcaccaacaggccgtcgccatggagacccctggtacttctcattcccctgcgcctggggctcacggacatcaacgaggcctacgtggagacgctgaagcactgcttcatgatgccccagtccctgggcgtcatcggagggaagcccaacagcgcccactacttcatcggctacgttggtgaggagctcatctacctggacccccacaccacgcagccagccgtggagcccactgatggctgcttcatcccggacgagagcttccactgccagcacccgccgtgccgcatgagcatcgcggagcttgacccgtccatcgctgtggtacgtggcggccacctgagcacacaggcatttggtgctgaatgctgtttgggaatgacgaggaaaactttcggatttttgcgtttttttttcagcatgttgggataagtactgtgttcacgtggttgggaatctgaagggtataagagccggaactgtgtccttgcaccctcacgtccctcccccaggcaccacctcctgtgcagccttcatggccttcgagtggcccagagagcgtgtgtctggatgtgagcgtgtgtgggcgcgtgctgagtgtgcatggatgagtgtgagccatggtgagtgtgtccccctcacacctacatttaaacacacgggcggcccctccacccacccctgcaccaccttcgtcacacccacatttaaacacgggcggcccctccacccacccactcctgcaccaccttttgttttccggaggctctgacttgacctctctgggggatttcctaagaaggagcttccctgtttttccattttgattacctagttgtgatttttggtgtgtgatttatgcagacctgcctgccctcaaatatatttgatggggaaagaggccaaaaaacccccctagaaatcatgaatgacggtgacatgctcagggaagcagttaaccgaatcgggggctctgttgtggatgctccgccccatttaggaggaagaaggcagatctgggcctgaaatgggacggtctctgagctgtggcgcagccccagagtgcacaccacgctccatgcacctcctgggcagggtggcagtagtggggaacatgggctggagctctgtggctcacactttttgtttgtttgtttgtttttgagacggagtctcactctgtcgcccaggctggagtgcagtggcgcgatctcggctcactgcaagctccgcctcccaggttcacgccattctcctgcctcagcctctggattagctgggactacaggcacccgccaccacgcctggctaattttctgtatttttaatagagacgggttttcactgtgttagccaggatggtcttgatctcctgacctcatgatccacccacctcggcctcccaaagtgctgggattacaggcgtgagccactgcgcgcagcctggcgcacacttcttaccagaacctagtcacgaattcctcgtcgaactagaattaggtatgtttgttactgtaaacgcagcttggtggcttacagtgattggcactctaacagtcaggtcaggctagagagccagccaccgcagacagaggagtggacgcgtgaacgttgagttgagaccaaaggggccacctggtgggataactgtcctcacccgtgaggaggaggaatgtcccctgtccccgggggagagtgctcctacaccagcgccgaggcggcagaatggtgtcttcaggggaagagagtgcccagtttgagcttctccccccatttcgtttctttttgtgttaacatctgcgcatctggcagcgttgagaattcctagtgactgtcattacaggcggcagctttaaggatgtgattgccggtgacccttggccggtcccctgtctcctggctcctcagcaggaggctccctgtgtcacggtgtccttgggcagttctcggtggcctttgccgccaagcttccagggagctgctgggcgaaggctgagacccagcggccctgtctcacagtcacagagagaagagctccccacttggccctaactcataacctgccccaatcccggaacactcggtgaggtttgagagatgcacaccacgtaacatctcgtgggcgaatcaaggcacagcaacgcagtggagcctgaggggagccgggcactggtgcaggggaccatgcacagggcaccctcggagctccattcccggccacaggagccaaggcaggctggaatgtccagcacctgcatgctgggggcctctgctgcgccactggcagtgggaatggaagcccccacctcttatccgactgcagatgggggtgtcgtgttctgctcatcgtcatttcgttttaggggtttttctgtaagactgaagatgacttcagtgattggtgccagcaagtcaaaaagctgtctctgcttggaggtgccctgcccatgtttgagctggtggagcagcagccttcacatctggcctgccccgacgtcctgaacctgtccctaggtgagagctgccaagtccaggtggggtccctcggaggtacgatctgtgcccttgcttccccagtcctggcccccttggttttgaccattaaggtgtgtgtgagcctgagccgtgagcacttggcagtggttcgcctgtgagaccaggtatggagtggagcgtcccctcctccaagcttgcgcccagcagcccaggacccacctcgtcttccccaccagcgctgcctgccggggcgctgtggagctgggcgtgctaccatggagtcctcaggggtctggagcagacagaacatgcaggctctgtggtgacgcagtcctgggtgggggactggttcacttgggcaccactggccatgggtggcgtagacccctcggaccatggccagcgtgccgcaggagccggcctgggctcgtgcagtgaagtgagtggccgtgagcgcgtcctcctcatctctgtctccctgtgggaaactctacaaacaaggcaatggcaatggaaccactcctgatgaccacgagggtcagacgcgggacagaggcccctcaggcctgagattgtgccggccgccccctgccctcctcaccctgccctgctcctcttctctgctccctccccccatattcgcaggtctgcacaacccccggacctgttcacacccgcatggggacagctgtctgtgggctgcagagcaggcactgctcagtctgccccacgccaagggcccttgactcacacccaggtggcccacccaagatgcctgatgcgctatgtcctgttccttctagattcttctgatgtagagcgactggaaagattcttcgactcagaagatgaagactttgaaatcctgtccctttgaaaatcctggggtcgggggtggcacctgtgagagcctggggctcctggtgccgctgcgtttcatccatcccgcccgctcgcctgccgagggctgcgccccgtgctgcctccccccagagggccacccgctgtgctcgtggactgaggctgcgctgcccgggaggccttactgcttggtgtcagactgcccagctcagagtgcccgtcagggcctgtgcatccgcacgcggagccgtctgttaggagcttccagagcgttctctcgacactgccagccccgtgttagcacctgggcctcagtcccacttgctcccaggcgccggttctgtggttggtttggaattaaagtcctgtttgaagttgtcagacacagacatgaatttctggggcgctccctgagtcagtctcagaagacctgtgcaggctggcgtgagaggagcggcagccacactgcggccccacgcccaaggactgggctgctctcgaggggggcgcgcccaccgctgtgtcctctctgcccagcctggcttaccaagggctacctcagtgggagatgaggttggaggaacgaaggcgaggttcctccttgctttggggagaaaagtattcaggaagtgggtgtgtgggaaacctgaagatggcgtgcacaggacacagcgtggtcggcctgggcagaagggcggctggctgtcctggagctgctgctggagcctgccctcagagtgtccctttccagtgctgtggcattctgtggcagcttccccaggtgtggtgacggggggggggcggggcctccacctgtgacagccaggcttgagggtggacggcgtgcctctcccaggagccttccccatgtccttgccttgctgagaattgccctcccatgccgctgaggtgttaggtggtttagggccaaaaggggaaaaccacttgagtcttgtggtgtgtggtgggcagacaccacagggtggcatcacctggtggcatttccagaacctcagccccgattccagcacccaccaccgcctgaccctgtgtaacctgctgtcccgggtcccagagtgcactctgccccactgctctgctgcctgtcctgggaaagtagctttgccccactaggaaatgtaaacaggagggcttggggagcgtgggcacttttctcatgagcagctactgcggcgttggcaggactcgctgctgctgctgctgctgcttgtgtaggtcggggagccggagatccccgaggacgcgcgccggacagtcggcactgaccggcccacctggtagcagaggacacccccagccccccaagcattgaagacatagtgtatttcctcgtatcctttctcccttgggtgtagttggggtggggaagcagggaaggctggtgcgatctccattccttgggctccgcgtccgagttcatggtgcgccgctgtgctgggagctgcagtgggaatgtgtgggacaccttgaccaaaggggagctttgtctcgtgtgttttgaaaaaggcttaatgaagagaatgttgttcattcttagtagtatagtttgcaattcttaatggcaaataataagtttcagtagaaacccaaaaaaaaaa

SEQ ID NO: 87479 - DNA, 2012 bp, Homo sapiens
gccatgaggtttcctcccaaatcgtacaacaaggacttggagtctgcagaggtcaccccagcctctggggccaaggcgcaagacctgtcggagaacagccaggcaaaagcacagagaattttgctctctgactaccgctgccgccgccagttccctcacagcccccttgggggatttccctgctgaagccagcagaaagcccagcagtcccagcgcccctcctgccaccgtcagagctgcactgatgccccaccagcacctcagcgggagccgctgcccacacccctgccccctcccctcagccttccaggaagcgaaggccagacacagggaaacagaaacatgttgcccttttatttgcgtttctcagaatactgtacaaagggagtaaaaatcctattcacactttgcttagaaagattttaaggtgaaagttccctatgatacacggggtgggagatgcagggtcaggagggagaaaacaggcccagtgacctctcctgttcccttggacccctggaagaggacacagggacccacaccttttcaaaattaacactgcccctagtccaactggggaggggagaaggctccagcccaggctcaggctcccggcctcactttcttctctgcaggctgagacagtgcctacaggccacgtcttgccccttcctctgtgctgcttgagcagggatcctacaggactctcaccacagaccccacatggggtggcctcacaacgccacatgtggctgccacatgagaggccctgcccagtgccagtctgtatgaggaagttaaggggtgagggcctgcagaggaccacagcacccatcgtttctgtcacagcttccccatacccccgcaggagtcagggccaagttggacctgtgcttacaatgactcacgggccttttccccacctgtctacccaacagccaacccaggagttaaacccacagcagcctccctcccctattactatcacattctgtgggtaaattaaccctccaagcctgcttccctccctgcccacatcccaaaggagattgggtctagcttctgtccctacccctccctcccttacaccagtcctctgctgctatgtggccccattcttctaagtctcgactcactagctctcctacagctccccaacctccaccaggccaggatggcagcagccctggccccctcacctctggaaccaagccatctacactctaccccatctttccccaacctgaccctccccactcccaaccaggacccacggtgggttgcagagaagctgccaaaagcctgggacttggattagacagctccctacccagaaaggcaaagacccatcccacacttgcttccatacacaaaagcacacactgcgtggcatcgaaaaaacctaggaatcacagtgaaacaatccagaagccgtaccgccctctgctccctatgcaggggttaaagtgctttggctgcctgagggcaaacaagtgagcaggggtttttcccctggcctcctgtcgcaactgcgtggtccatgttcagcccaggagcccagcccattccatgaccaactccatggagtctctattcaaaaagcaaaaggaaaagatcaaaaaattcagaaaaggtcagagcccagggggcctaccccaaccccactacaagctactccaagttggctactgggggaagcgaggggggaaattaggccagaggctcaacccccatctctggcagtgtccagaggcttcttctttctgtcttcagtgttgcagcacatgccttttaccctacccctcccctgccaccctggggcagggagaggggctgcactctcagtacttattgattccaaaaatccggactccgtggagctggggcagcttggggataagcacgctcatcagggacacggtgttgagcacaaaatggatctggtcgtacttagtgtagaagctggtgaggaagtacagcacgatgggtgtgatggtcaagaacttccgaga

SEQ ID NO: 87480 - DNA, 466 bp, Homo sapiens
  misc_feature (1)...(466): n = a,t,c or g
attgagnccaatcgaganccataggcagngngcnggaattcctgagaagatggtccggctggagagacgggtgggcggaggacagggaccaaaatgcagagaggatggtccggctggagagacgggtgggcggaggacagggaccaaaatgcagagaggatggtccggctggagagacgggtgggcggaggacagggaccaaaatgcagagaggatggtccggctggagagacgggtgggcggagggctgcaacagtggggtgtgaagaccctgagagcagcacctcccgcccgcatgggggtgccaggaggcaaagagcctttacccagagggttttcaactgaatgacactgtcaaagaaaagccaggatccactaaggcaagaagtattaaaagtattttagggaaagtcatttaaagctctataacattgtattttcatggaatcttctagattcttccccn

SEQ ID NO: 87481 - DNA, 531 bp, Homo sapiens
gcacccagcccagaggtggcttttaaactgggcattaaaagatgaataagagctcatcaagtgtggagggcttggggaggagatgatgttccaggctaaggggactacatgagcaagagcctggaagttgagagcctgtagtatgtccaggaacatgtggcttagggtcatgactttctggctgatggaccttctgcctattcctaggtgggtgcctgagtctgcacgctggcttctgacccaaggccatgtgaaagaggcccacaggtacttgctccactgtgccaggctcaatgggcggccagtgtgtgaggacagcttcagccaggaggtgagggtgaacgtgtgtgtgagcatgcatatctgtgtgtggtggggagtgggctgtgtcaagtgcctccctcccagagcccaccatatatggcaggaaaagcccctgggccctcacagaacagtgacagaatcaaagttagaggcagaaggaaagacaaaagaaaaagccagagagaaagaaagaaagaaaaaaagcta

SEQ ID NO: 87482 - DNA, 1852 bp, Homo sapiens
ggggaagaggcagtgggagggggggcggagggcgggggcttcggggtgggcgcccagggtagggcaggtggccgcggcgtggaggcagggagaatgcgactctccaaaaccctcgtcgacatggacatggccgactacagtgctgcactggacccagcctacaccaccctggaatttgagaatgtgcaggtgttgacgatgggcaatgacacgtccccatcagaaggcaccaacctcaacgcgcccaacagcctgggtgtcagcgccctgtgtgccatctgcggggaccgggccacgggcaaacactacggtgcctcgagctgtgacggctgcaagggcttcttccggaggagcgtgcggaagaaccacatgtactcctgcagatttagccggcagtgcgtggtggacaaagacaagaggaaccagtgccgctactgcaggctcaagaaatgcttccgggctggcatgaagaaggaagccgtccagaatgagcgggaccggatcagcactcgaaggtcaagctatgaggacagcagcctgccctccatcaatgcgctcctgcaggcggaggtcctgtcccgacagatcacctcccccgtctccgggatcaacggcgacattcgggcgaagaagattgccagcatcgcagatgtgtgtgagtccatgaaggagcagctgctggttctcgttgagtgggccaagtacatcccaggtttctgcgagctccccctggacgaccagggggccctgctcagagcccatgctggcgagcacctgctgctcggagccaccaagagatccatggtgttcaaggacgtgctgctcctaggcaatgactacattgtccctcggcactgcccggagctggcggagatgagccgggtgtccatacgcatccttgacgagctggtgctgcccttccaggagctgcagatcgatgacaatgagtatgcctacctcaaagccatcatcttctttgacccagatgccaaggggctgagcgatccagggaagatcaagcggctgcgttcccaggtgcaggtgagcttggaggactacatcaacgaccgccagtatgactcgcgtggccgctttggagagctgctgctgctgctgcccaccttgcagagcatcacctggcagatgatcgagcagatccagttcatcaagctcttcggcatggccaagattgacaacctgttgcaggagatgctgctgggagggtcccccagcgatgcaccccatgcccaccaccccctgcaccctcacctgatgcaggaacatatgggaaccaacgtcatcgttgccaacacaatgcccactcacctcagcaacggacagatgtgtgagtggccccgacccaggggacaggcagccacccctgagaccccacagccctcaccgccaggtgcgtcagggtctgagccctataagctcctgccgggagccgtcgccacaatcgtcaagcccctctctgccatcccccagccgaccatcaccaagcaggaagttatctagcaagccgctggggcttgggggctccactggctccccccagtccccctaagagagcacctggtgataccgtggtcacggcaaaggaagacgtgatgccaggaccagtcccagagcaggaatgggaaggatgaagggcccgagaacatggcctaaggcacatcccactgcaccctgacgccctgctctgataacaagactttgacttggggagaccctctactgccttggacaactttctcatgttgaagccactgccttcaccttcaccttcatccatgtccaacccccgacttcatcccaaaggacagccgcctggagatgacttgagccttac

SEQ ID NO: 87483 - DNA, 1399 bp, Homo sapiens
tttcgtcttccccaccttcctccactccctcccttcccctccccttctacctcctcctcggccagctcaggttgcagcttctctggggaactgctcacctttccggagcaggggaagctgccccgtgcccgggagggagcgggcgcaccgcggcccccaggacacgcgctgacccggctgcccagtccctcatgatcatgaacaagatgaagaactttaagcgccgtttctccctgtcagtgccccgcactgagaccattgaagaatccttggctgaattcacggagcaattcaaccagctccacaaccggcggaatgagaacttgcagctcggtcctcttggcagagaccccccgcaggagtgcagcaccttctccccaacagacagcggggaggagccggggcagctctcccctggcgtgcagttccagcggcggcagaaccagcgccgcttctccatggaggacgtcagcaagaggctctctctgcccatggatatccgcctgccccaggaattcctacagaagctacagatggagagcccagatctgcccaagccgctcagccgcatgtcccgccgggcctccctgtcagacattggctttgggaaactggaaacatacgtgaaactggacaaactgggagagggcacctatgccacagtcttcaaagggcgcagcaaactgacggagaaccttgtggccctgaaagagatccggctggagcacgaggagggagcgccctgcactgccatccgagaggtgtctctgctgaagaacctgaagcacgccaatattgtgaccctgcatgacctcatccacacagatcggtccctcaccctggtgtttgagtacctggacagtgacctgaagcagtatctggaccactgtgggaacctcatgagcatgcacaacgtcaaggtgaggcctcgggggcagggtccccccatcttggcagccacctgtccagaagcccagtgtggggacccactctcaccaccagggatccggctgctgaggtggctcaaaccttcccacgtaggaaagagggagagggcaatgccatcaacgagtccaggaactgggttgagcgctttaccccaagaacagacacacactgtctgccactgtctagctgttggtataaaacccactctcaactctgaacatcagtttcccagtctgtcaaatgggagtgtgagctacctgccaaaatgcagggaggcttctggggaagctcggggttatgaatgacctctcctggtgtttgttaaagaatcaagactgggcatggtggcccacgcctgtaatcccagcactgggaggccaaggcaggaagatggcttgagcccaggagtttgagaccagcctgggcaacatggcaagacctcatctctact

SEQ ID NO: 87484 - DNA, 1116 bp, Homo sapiens; identical to SEQ ID NO: 65449

SEQ ID NO: 87485 - DNA, 2976 bp, Homo sapiens
tttcgtgtccccgacagctgcccggtggtgctgcacagcttcacgcagctagaccccgacctgccgcgcccggagagctccacgcaggagatcggtgaggagctgatcaacggagtcatctactccatctccctgcgcaaggtgcagctgcaccacggaggcaacaaggggcagcgctggctcgggtatgagaatgagtcggccctgaacctttatgagacttgcaaggtgcggaccgtgaaggctggcacgctggagaagctggtggagcacctggtgccagccttccagggcagcgacctctcctacgtcaccatcttcctgtgtacctatagagccttcaccaccacccaacaggtcctggacctgctgttcaaaaggtacggtagatgtgacgccctcacggcctcctctagatacggctgcatcctcccctattccgacgaggatggtggaccccaggaccaacttaaaaatgccatctcctccatcctgggcacctggctggaccagtactcggaggatttctgtcaacctccggactttccctgcctcaagcagctggtggcctacgtgcagctcaacatgccaggctcagacctggagcgccgtgcccaccttctcctggcccagctggagcactcggaacccattgaggcagagcctgagggtgaggaggactgggctctgtcaccagtgccagctctaaaaccaactccagagctcgagctagctctaacaccagctcgagcacccagcccagtgccggctccagccccggagccagagccagctccaacaccagctccaggttcagagctagaagtagctccagcaccagctccggagctccagcaggctccagagccagctgtgggactagaatcggctccagcgccagctctggaactagagccagctccagaacaggatccagctccctcacaaactctagagctggagccagctccagcaccagttccatcattacagccttcctggccttcacctgtggttgcagagaacgggctgagtgaggagaagcctcacctcttggtgttccctccagatctggtggcagagcagtttacactgatggatgcggaactgttcaagaaggtggtgccctaccactgcctgggctccatctggtcccagcgggacaagaagggcaaggagcacctggcgcccaccatccgcgccactgtcacccagttcaacagtgtggccaactgtgtcatcaccacctgcctcgggaaccgaagcacgaaagccccagacagggccagggtggtggagcactggatcgaggtggccagggagtgccggatcctcaagaacttctcgtcactgtatgccatcctctctgccctgcagagcaactccatccaccgtctgaagaagacgtgggaagacgtttccagggacagtttccggatctttcagaagctgtcagagatcttctcagatgagaacaactactcattgagccgggagctgctcatcaaggagggcacctccaagtttgccaccctggagatgaaccccaagagagcccagaaacggccgaaggagacgggcatcatccagggcaccgttccctacctgggcacgttcctcaccgacctggtgatgctggacactgccatgaaggactatctgtatggcagactcatcaactttgagaagaggaggaaggagttcgaggtgatcgcccagatcaagctgctgcagtcggcctgcaacaactacagcatcgcgccagatgagcaatttggggcctggttccgggccgtggagcggctcagcgagactgagagctacaacctgtcgtgcgagctggagcccccatccgagtcagccagcaacaccctcaggaccaagaagaacacagccattgtcaagcgctggagcgaccgccaggcccccagcactgagctcagtaccagtggcagctcccactccaagtcctgtgaccagctcaggtgtggcccctacctcagcagcggggacatcgctgacgcgctcagcgtgcactcggccggctcctctagctccgacgtggaggagatcaacatcagcttcgtcccggagtctcctgatggccaggaaaagaagttctgggaatcagcctcacagtcatccccggagacctccggcatcagctcagcctccagcagcacctcgtcctcctcagcctccaccacgcccgtggctgccacacgcacccacaagcgctctgtctcagggctctgcaactccagctccgcgctgccgctctacaaccagcaggtgggcgactgctgtatcatccgcgtcagcctggacgtggacaatggcaacatgtacaagagcatcctggtgaccagccaagataaggctccggctgtaatccgcaaggccatggacaaacacaacctggaggaggaggagccggaggactatgagctgctgcagattctctcagatgaccggaagctgaagatccctgaaaacgccaacgtcttctatgccatgaactctaccgccaactatgactttgtcctcaagaagcggaccttcaccaagggagtgaaggtcaagcacggagccagctccaccctccctcgcatgaagcagaaaggactcaagattgccaagggcatcttctgagggcatcctcccagggtctggctggctggtagccaagcacttatggaccagagtggcccaggccagctgggcgccttcctcccacctgccagcccagggtaccccagactccagtttcatcctgaacctctcccgctgcttgggatttgacgcctgccatttggtcaggctgaacttgggcctcccgtggaaccaactcgcttgccttaaggtggccttctggctctctggaaccagaggactagctgactttttggcaaaggaagcagtgccaacgggaatggcatgggtgccctgcctgcccccgggcgccaactctgtaca

SEQ ID NO: 87486 - DNA, 1380 bp, Homo sapiens
atgtggaagttcttttttcagaattcacaacttgtaagtcaccagataattcatactggagagacaccttacaaatgtaatgaatgtggcaatgtcttctttcaacgttcacgtcttgcagggcaccggagaattcatactggagagaaaccctacaaatgtaatgaatgtggcaaggtcttcagtcaacattcacatcttgcagtgcatcagagagttcatactggagagaaaccttacaaatgtaatgaatgtggaaaagcttttaattggggctcattactaactgtacatcagagaattcataccggagagaagccttacaaatgtaatgtgtgtggcaaggtctttaattacggtggatgcctttcggttcatatgagatgtcatactggagagaaacctctccattgtaataaatgtggcatggtcttcacttactattcatgcctagcacgtcatcaaagaatgcataccggagagaaaccttacaaatgtaatgtgtgtggcaaggtcttcattgacagtggaaacctttcaattcataggcgaagtcataccggagagaaacctttccagtgtaacgaatgcggaaaggtcttcagttactactcatgcctagcacgtcatcggatattcataccgtcctgcagcaggcaagcttgcagcaaatttggggcaaccgcaactaccaggagggttataattccaaagggtcacgctttcccgatttcacgaagctctctgctattccggacctgcaggatgcctgcaggtcttattcacatgtacgcctcctggtatatgcgcggtgaatgtggctactctcgcgatagtcgcttacaccaacctgttcatcgccagcatggtggttctggtgcttgccgacaacctgctgctgatgtacctcggctgggaaggcgtgggcctgtgctcctatctgctgatcgggttctattacaccgatccgaagaatggcgcagcggcaatgaaagcgttcgtcgtgacccgtgtgggtgacgtgttcctcgctttcgcactgttcattctttacaacgaactgggcaccctgaacttccgcgaaatggtggaactggcaccagcgcactttgctgacggcaataacatgctgatgtgggcgacgctgatgctgctgggcggtgcggtcggtaaatctgcgcagttgccgttgcagacatggcttgccgacgcgatggcgggcccgacgcctgtctccgcgctgatccacgccgcaaccatggtaaccgcgggtgtctacctgatcgcccgtacccacggcctgttcctgatgacgacggaggtctgcatctggggggtattgtcgggcaggtcccctgcttcctggcgggttttgccggc

SEQ ID NO: 87487 - DNA, 1131 bp, Homo sapiens
accgaagtgggcagggcaaggtgtatggactcattgggcggcgacgcttccagcagatggatgtgctggaggggctcaacctgctcatcaccatctcagggaaaaggaacaaactgcgggtgtattacctgtcctggctccggaacaagattctgcacaatgacccagaagtggagaagaagcagggctggaccaccgtgggggacatggagggctgcgggcactaccgtgttgtgaaatacgagcggattaagttcctggtcatcgccctcaagagctccgtggaggtgtatgcctgggcccccaaaccctaccacaaattcatggccttcaagtcctttgccgacctcccccaccgccctctgctggtcgacctgacagtagaggaggggcagcggctcaaggtcatctatggctccagtgctggcttccatgctgtggatgtcgactcggggaacagctatgacatctacatccctgtgcacatccagagccagatcacgccccatgccatcatcttcctccccaacaccgacggcatggagatgctgctgtgctacgaggacgagggtgtctacgtcaacacgtacgggcgcatcattaaggatgtggtgctgcagtggggggagatgcctacttctgtggcctacatctgctccaaccagataatgggctggggtgagaaagccattgagatccgctctgtggagacgggccacctcgacggggtcttcatgcacaaacgagctcagaggctcaagttcctgtgtgagcggaatgacaaggtgttttttgcctcagtccgctctgggggcagcagccaagtttacttcatgactctgaaccgtaactgcatcatgaactggtgacggggccctgggctggggctgtcccacactggacccagctctccccctgcagccaggcttcccgggccgcccctctttcccctccctgggcttttgcttttactggtttgatttcactggagcctgctgggaacgtgacctctgacccctgatgctttcgtgatcacgtgaccatcctcttccccaacatgtcctcttcccaaaactgtgcctgtccccagcttctggggagggacacagcttcccttcccaggaattgagt

SEQ ID NO: 87488 - DNA, 960 bp, Homo sapiens
  misc_feature (1)...(960): n = a,t,c or g
ggaattcggcttctcgggaaatggatgtcacaaaggtgtgtggagaaatgcgctatcagctgaataaaaccaacatggagaaggatgaggcagaaaaggagcacagagagttcagagcaaaaactaacagggatcttgaaattaaagatcaggaaatagagaaattgagaatagaactggatgaaagcaaacaacacttggaacaggagcagcagaaggcagccctggccagagaggagtgcctgagactaacagaactgctgggcgaatctgagcaccaactgcacctcaccagacaggaaaaagatagcattcagcagagctttagcaaggaagcaaaggcccaagcccttcaggcccagcaaagagagcaggagctgacacagaagatacagcaaatggaggcccagcatgacaaaactgaaaatgaacagtatttgttgctgacctcccagaatacatttttgacaaagttaaaggaagaatgctgtacattagccaagaaactggaacaaatctctcaaaaaaccagatctgaaatagctcaactcagtcaagaaaaaaggtatacatatgataaattgggaaagttacagagaagaaatgaagaattggaggaacagtgtgtccagcatgggaggagtacatgagacgatgaagcaaaggctaaggcaggtggataagcacaggcaggccacagcccaggaggtggtgcaggtccccagaagcaggaccngcttcttccnggagagggagggnctgtcggaagaggtgggnccgncttggggnccnngttacccagnatncncaatcttttttggttgacccggttggacagggtggacttnantgttttncaaaggngntttttcattccancttgttttngcttaatttngcncaacgnacccacggcctncccggnntgaaaccccccnccctgagggggggttntccccc

SEQ ID NO: 87489 - DNA, 1548 bp, Homo sapiens
  misc_feature (1)...(1548): n = a,t,c or g
atggtgaagatcgtgacagttaagacccaggcgtaccaggaccagaagccgggcacgagcgggctgcggaagcgggtgaaggtgttccagagcagcgccaactacgcggagaacttcatccagagtatcatctccaccgtggagccggcgcagcggcaggaggccacgctggtggtgggcggggacggccggttctacatgaaggaggccatccagctcatcgctcgcatcgctgccgccaacgggcaagctgaactcactgccttaactcgagacctcgctctcgcaaaaggactacgcgtcaatatttatactgactgtaaatatgccttccatatcttgcaccaccatgctgttatatgggcagaaagaaatttcctcactatgcaagggtcctcctccatcattaatgcctctttaataaaaactcttctcaaggccactttacttccaaaggaagctggagtcatacactacaagggccatcaaaaggcatcagctcccatcgctcaagacaatgcttatgctgataaggtggctagacaagcagctagctttccaacttctgtctctcacatctatgcttatgctgataagggcaaacttaacggtggacaggtttcactgccgggcacgctggacgcgacatcaataaatccgcggataaacttccagccacggctggaaaacgttgagattggtaccattctgaaagcgtttaactatccgatttcgttgaccggaaaaatgtcactggctggtgatttctccggtgctgacatagatgccgacgcattccgccacaactggccaaggacaggcacatgtcgaaatgaccgacacgcgcatggaagggatgaacttccagcagatgattcagcaagcggtagagcgtaatggcggtgatgtgaaggccgctgaaaactttgataacgtgacgcggcttgaccgctttaccaccgatttgacgttgaaggatggcgtcgtgacgttaaacgacatgcaaggtcaatcgcctgtgctggcgctgacaggggaaggcatgttgaatctggcagatcaaacctgccacacccagtttgatattcgggtcgtgggtggctggaacggggaaagcaaactgattgatttcctgaaagaaacgccagtaccgctgcgggtttatggcaactggcagcaactcaattacagcctgcaagtggatcagttactgcgcaaacatctacaggacgaagcgaaacgtcgcctgaatgactgggccgagcggaataaagattcccgtaatggcaaagatgtgaagaagttgctggagaagatgtaggttaccaggtgaccagtcctgtaggcctgataagacgcgtaaagcgtcgcatcaggcgttcgtggcggcatcattatattctgaatatgtaagatcgaaggctgttccgttcacttgatgttcctcgctactatggaacgctcaagccggtgaacgtgccagggtggctcaatctccncgncnctgcntanggtnatcaattaggggnatcggcttggccactctct

SEQ ID NO: 87490 - DNA, 2469 bp, Homo sapiens
acgcgccctgaattcccgggtcgacgggaggcaggagactgtaatggacggggatgggggtccccaggacggcctaagaagaagcacacaggcatggccagcattgacagcagtgcccctgaaacaacatcggatagttcccccaccttaagccggagaccacttcgagggggctgggcccccacctcctggggtcgaggtcaggacagtgacagcattagcagctcttcttcggactccctgggctcctcatcctccagtggaagtcgccgggccagtgccagtggaggagcccgggcgaagactgttgaagttggcaggtacaagggccgccgccccgagagtcatgcccctcatgtacccaatcagccatcagaggcagctgcacacttctacttcgagctggcgaagacagtgctgatcaaggcagggggcaacagcagcacttccattttcacacatccatcttcctcagggggccaccagggtcctcaccgcaacctgcacctttgcgccttcgagattgggctttatgcccttggcctgcacaactttgtttctcccaactggctctcacgtacttattcttcccacgtttcctggattacaggccaggccatggagataggcagcgcagccctgactatactggtagaatgctgggatgggcacctgacaccccctgaggttgcatccctggctgacagggcatcacgggcaagagactccaatatggtgagggcggcagcagagctggccctgagctgcctgcctcacgcccatgcattgaaccctaatgagatccagcgggccctggtgcagtgcaaggaacaggacaacctgatgttggagaaggcctgcatggcagtggaagaggcagctaagggtgggggcgtgtaccctgaagtgttgtttgaggttgctcaccagtggttctggctatatgagcaaactgcaggtggctcatccacagcccgtgaaggggctacaagctgtagtgccagtgggatcagggcaggtggggaagctgggcggggtatgcctgagggtagagggggcccagggactgagccggttacagtggcagcggcagcagtgacagcagcagccacagtggtgcccgtcatatcggtggggtctagtttatacccaggtccaggactggggcatggccactcccctggcctgcacccctacactgctctacagccccacctgccctgtagccctcagtatctcactcacccagctcaccctgcccaccccatgcctcacatgccccggcctgccgtcttccctgtgcccagctctgcatacccacagggtgtgcatcctgcattcctaggggctcagtacccttattcagtgactcctccctcacttgctgccactgctgtgtctttccccgttccttccatggcacccatcacagtacatccctaccacacagagccagggcttccactgcccaccagtgtggcctgtgagttgtggggccagggaacagtgagcagtgtccatccagcatccacgtttccagccatccaaggtgcctcactgcctgccctgaccacacagcccagccctctggtgagcggaggttttccaccgcccgaggaggagacacacagtcagccagtcaatccccacagcctgcaccacctgcatgctgcctaccgtgtcggaatgctggcactggagatgctgggtcgccgggcacacaacgatcaccccaacaacttctcccgctcccccccctacactgatgatgtcaaatggttgctggggctggcagcaaagctgggagtgaactacgtgcaccagttctgtgtgggggcagccaagggggtgctgagcccgtttgtgctgcaggagatcgtcatggagacgctgcagcggctgagtcccgctcatgcccacaaccacctgcgtgccccggccttccaccaactggtgcagcgctgccagcaggcatacatgcagtacatccaccaccgcttgattcacctgactcctgcggactacgacgactttgtgaatgcgatccggagtgcccgcagcgccttctgcctgacgcccatgggcatgatgcagttcaacgacatcctacagaacctcaagcgcagcaaacagaccaaggagctgtggcagcgggtctcactcgagatggccaccttctccccctgagtctttcacccttagggtcctatacagggacccaggcctgtggctatgggggcccctcacacagggggagtgaaacttggctggacagatcatcctcactcagttccctggtagcacagactgacagctgctcttgggctatagcttggggccaagatgtctcacaccctagaagcctagggctgggggagacagccctgtctgggagggggcgttgggtggcctctggtatttatttggcatttataaatatataaactccttttttactctaaaaaaaaa

SEQ ID NO: 87491 - DNA, 453 bp, Homo sapiens
  misc_feature (1)...(453): n = a,t,c or g
ggccgaccntttgagccctttttacgtcctctagaccagcgaggtggaattcctcgcgggtcgaccgggagaggaaggtgagtatgaggctgctcaggggtgcgtttcgccaacgtctcctcctcagacctcactgggcggcaagaggtctcccggatcccagcctcacaggtgagctgcccccctgccagtccctctgggcctcagaactgagttagagaccccccagtgggaggtcaggccgtggctctgttcttccctttccatcgacgctgcttgccttggagtgaaccccttctgtagagccaggacttggcctcatttaatcctctgaggtctgatgagccctcttgagcaaagtcattcaccaaggctcagggcagtaacattccctggcaagtggcacagctgggctccagtcctcgctgccaggggcccagccagggtgggcag

SEQ ID NO: 87492 - DNA, 459 bp, Homo sapiens
  misc_feature (1)...(459): n = a,t,c or g
gagcggcnnnnnnnncctgagctgcataacntggacangacnncctcagtcctttagaggccccagtatgttgggatctcagcatcaatccgactggcccagtcttttcctccagccctaccttgctggggacctggggctggggtccaactgtgagggaggagggaggtaaccagtcctcttgtgcgtttcagtctgtcccaagttcctcgtggactccagcaccaaggacttgctgacagtcaaggtcggggacacagttcgtgtgcccgtctcctttgaagccatgcccatgcctgaggtgacctggctgaaggatggcttgcccttgcccaaaagaagtgtgactgtcactaaggatggcctcacccagcttctgatccctgtggctggactctcagacagtggtctctacactgtggtgctgaggaccctgcaggggaaggaggttgcccacag

SEQ ID NO: 87493 - DNA, 1501 bp, Homo sapiens
  misc_feature (1)...(1501): n = a,t,c or g
gcggccgccggcgggccgggcccgcgcacagcgcccgcatgtacaacatgatggagacggagctgaagccgccgggcccgcagcaaacttcggggggcggcggcggcaactccaccgcggcggcggccggcggcaaccagaaaaacagcccggaccgcgtcaagcggcccatgaatgccttcatggtgtggtcccgcgggcagcggcgcaagatggcccaggagaaccccaagatgcacaactcggagatcagcaagcgcctgggcgccgagtggaaacttttgtcggagacggagaagcggccgttcatcgacgaggctaagcggctgcgagcgctgcacatgaaggagcacccggattataaataccggccccggcggaaaaccaagacgctcatgaagaaggataagtacacgctgcccggcgggctgctggcccccggcggcaatagcatggcgagcggggtcggggtgggcgccggcctgggcgcgggcgtgaaccagcgcatggacagttacgcgcacatgaacggctggagcaacggcagctacagcatgatgcaggaccagctgggctacccgcagcacccgggcctcaatgcgcacggcgcagcgcagatgcagcccatgcaccgctacgacgtgagcgccctgcagtacaactccatgaccagctcgcagacctacatgaacggcttcgccccacctacagcatgtcctactcgcagcagggcacccctggcatggctcctggctccaatgggttcggtggtcaagtccgaggccagctccagcccccctgtggttacctcttcctcccactccagggcgccctgccaggccggggacctccgggacatgatcagcatgtatctccccggcgccgaggtgccggaacccgccgcccccagcagacttcacatgtcccagcactaccagagcggcccggtgcccggcacggccattaacggcacactgcccctctcacacatgtgagggccggacagcgaactggaggggggagaaattttcaaagaaaaacgagggaaatgggaggggtgcaaaagaggagagtaagaaacagcatggagaaaacccggtacgctcaaaaagaaaaaggnnnnnnnnnnnntcccatcacccacagcaaaggacagctgcaaaagaaaacaccaatcccatccacactcacgcaaaaaccgggatgccgacaagaaaacttttatgaaaaagatcctggacttttttttgggggactatttttgtacagagaaaacctgggaagggtggggaggccggggaaatggaccttgtatagatctggaggaaagaaagctacgaaaaactttttaaaagttctaagggtacggtaggagctttgcaggaagtttgcaaaagtctttaccaataatatttaaaggtaggctccaaacgaacaaaaaaattggttaaaatttggaacgaattttgtgacagttttttggaaaaacacgggcaaccaa

SEQ ID NO: 87494 - DNA, 463 bp, Homo sapiens
  misc_feature (1)...(463): n = a,t,c or g
aaaaaattagatgatcactagtccagctcggtggacttcatgagaagatctggntcaacaagttaaaatgtgacaatgcagaaaggagattcttcttgcagatgaacaaggctgtggccagcacctcccgccaggagaacggcgccagcatgatcctccatgacattgcgagagccagagagcatttccagaaatccctggccagaagctcaggccccggggcctccagcagccccagcggagacaaggctgagctcatctttcagatcaccagtctggaagtggagaaccagagcctgcgcagggttgtgcaggagctgcagcaggccatctccaagctggaggccccactgaacgtgctggagaagagcttgcctggccaccacagccctgcagacccagcatgagtctcctatgtgccaagtggagcccctggccaagaagccagccaaaccagcagagg

SEQ ID NO: 87495 - DNA, 6488 bp, Homo sapiens
gtggatttggtcgtctccctgattccgagctgcgggcagggagaggggcctcgcgccgccctcagcagccggcggcggccgaggtagaccgagcggggacggaaggacagaccgacgtcgccgagctggaatcatgtgagggccaaccggggaaggtggagcagatgagcacacacaggagccgtctcctcaccgccgcccctctcagcatggaacagaggcagccctggccccgggccctggaggtggacagccgctctgtggtcctgctctcagtggtctgggtgctgctggcccccccagcagccggcatgcctcagttcagcaccttccactctgagaatcgtgactggaccttcaaccacttgaccgtccaccaagggacgggggccgtctatgtgggggccatcaaccgggtctataagctgacaggcaacctgaccatccaggtggctcataagacagggccagaagaggacaacaagtcttgttacccgcccctcatcgtgcagccctgcagcgaagtgctcaccctcaccaacaatgtcaacaagctgctcatcattgactactctgagaaccgcctgctggcctgtgggagcctctaccagggggtctgcaagctgctgcggctggatgacctcttcatcctggtggagccatcccacaagaaggagcactacctgtccagtgtcaacaagacgggcaccatgtacggggtgattgtgcgctctgagggtgaggatggcaagctcttcatcggcacggctgtggatgggaagcaggattacttcccgaccctgtccagacggaagcctgccccgagaccctgagtcctcagccatgctcgactatgagctacacagcgattttggctcctctctcattaagatcccttcagacaccctggccctggtctcccactttgacatcttctacatctacggctttgctagtgggggctttgtctactttctcactggccagcccgagacccctgagggtgtggccatcaactccgctggagacctcttctacacctcacgcatcgtgcggctctgcaaggatgaccccaagttccactcatacgtgtccctgcccttcggctgcacccgggccggggtggaataccgcctcctgcaggctgcttacctggccaagcctggggactcactggcccaggccttcaatatcaccagccaggacgatgtactctttgccatcttctccaaagggcagaagcagtatcaccacccgcccgatgactctgccctgtgtgccttccctatccgggccatcaacttgcagatcaaggggcgcctacagtcctgctaccagggcgagggcaacctggagctcaactggctgctggggaaggacgtccagtgcaccaaggcgcctgtccccatcgatgataacttctgtggactggacatcaaccagcccctgggaggctcaactccagtggagggcctgaccctgtacaccaccagcagggaccgcatgacctctgtggcctcctacgtttacaacggctacagcgtggtttttgtggggactaagagtggcaagctgaaaaagattcgggccgacggtcccccccatggtggggtccagtacgagatggtctctgtgctcaaggacggaagccccatcctccgggacatggccttctccattgatcagcgctacctgtacgtcatgtctgagagacaggtcaccagggtccccgtggagtcatgtgagcagtatacgacttgtggggagtgcctgagctctggggaccctcactgtggctggtgtgccctgcacaacatgtgctcccgcagggacaaatgccaacaggcctgggaacctaatcgatttgctgccagcatcagccagtgtgtgagccttgcagtgcatcccagcagcatctcagtatctgagcacagccggttgcttagcctggtagtgagtgatgctcctgatctatctgcgggtatcgcctgtgcctttgggaacctgacagaggtggaggggcaggtgtccgggagccaggtcatctgcatctcacctgggcccaaggatgtccctgtcatcccgctggatcaagactggtttgggctggagctacagctgaggtccaaggagacagggaagatatttgtcagcaccgagttcaagttttacaactgcagtgcccaccaactgtgcctgtcctgtgtcaacagcgccttccgctgccattggtgcaagtaccgcaacctctgcactcatgaccccaccacctgctccttccaggagggccggatcaatatttcagaggactgtccccagctggtgcccacagaggagatcttgattccagtcggggaggtaaagccaatcacccttaaggcgcgaaatctgccccagccgcagtccggccagcgaggctatgagtgtgtcctcaacatacaaggagccatccaccgggtccccgctctgcgcttcaacagctccagcgttcagtgtcagaacagctcgtaccagtatgatggcatggacatcagcaatctggccgtggatttcgctgtggtgtggaacggcaatttcatcattgacaaccctcaggacctgaaagtccatctctacaagtgtgcagcccagcgggagagctgcggcctctgcctcaaggccgaccggaagtttgagtgtggctggtgcagcggcgagcgcaggtgcaccctccaccagcactgtaccagcccttccagcccctggctcgactggtccagccacaatgtcaagtgctccaaccctcaaatcaccgagattttgacggtgtctggaccgccggaaggagggacgcgagtgaccatccatggcgtgaacctgggtctggacttctccgagatcgcccaccatgtgcaggtggctggggtgccctgcacgcccctcccaggggaatacatcatcgctgagcagattgtctgtgagatgggccatgccctcgtgggaaccacctccgggccagtacgcctgtgtattggcgagtgtaagccagagttcatgacgaagtcccatcagcagtacaccttcgtgaacccttctgtgctgtcactcaacccaatccgaggtcccgagtcaggaggcactatggtgaccattaccggccattaccttggggctgggagcagcgtggcagtctacctgggcaaccagacctgcgagttctacgggaggtcaatgagtgagatcgtgtgtgtctcacccccatcatccaatggccttggcccggtccctgtttctgtgagtgtcgaccgagcccatgtggatagcaacctgcagtttgagtacatagatgaccctcgggtccagcgcatcgagccagagtggagcattgccagtggccacacacccctgaccatcacaggcttcaacctggatgtcattcaggagccaaggatccgagtcaaattcaatggcaaagaatctgtcaatgtgtgtaaagttgtgaacacaaccaccctcacctgcctggcaccctctctgaccacggactaccgccctggcctggacactgtggaacgcccagatgagtttggatttgtctttaacaatgtccaatccttgctaatttacaacgacaccaagtttatctactaccccaacccgacctttgaactgcttagccctactggagtcttggatcaaaagccaggatcgcccatcattctgaagggcaaaaacctctgccctcctgcctctggaggggccaaactcaactacactgtgctcatcggagagaccccttgtgctgtcaccgtatctgagacccagcttctctgcgagcctcccaacctcaccgggcagcacaaggtcttggttcacgtgggcgggatggtgttctcgcctggctcggtgagtgtcatctcagacagcttgctgaccctgccagccatcgtcagcatcgcggccggcggcagcctcctcctcatcatcgtcatcatcgtcctcattgcctacaagcgcaagtctcgagaaaatgacctcactctcaagcggctgcaaatgcagatggacaatctggagtcccgtgtggccttggagtgcaaggaagcttttgctgagctccagacggatatcaatgagttgaccagtgacctggaccgctcaggaatcccttacctggactatcgtacctacgctatgcgagtcctgttcccgggcatcgaggaccaccccgtcctgcgggagctggaggtacaaggaaacgggcagcagcacgtggagaaggccctgaagctctttgcccagctcatcaacaacaaggtgttcctgctgaccttcatccgcaccctggagctgcagcgcagtttctccatgcgcgaccggggcaacgtggcttcgctcatcatgaccggcctgcagggccgcctggaatatgccactgatgtcctcaagcagctgctctctgacctcatcgataagaacctggagaacaagaaccaccccaagctgctactccggaggacagagtctgtggctgaaaagatgctgaccaattggttcgccttcctcctgcacaagttcctaaaggagtgcgcaggggagccactcttcatgctatactgtgccatcaagcagcagatggagaagggccccattgatgccatcacgggcgaggcccgctactccctgagcgaggacaagctcatccggcagcagatcgagtacaagaccctgatcctgaactgcgtcaaccctgacaacgagaacagtccagagatcccagtgaaggtgttaaactgtgacaccatcacacaggtcaaggagaagattcttgatgccgtgtataagaatgtgccctattcccagcggccgagggcagtggacatggacttggagtggcgccaaggccggatcgcccgggtcgtgctgcaagatgaggacatcaccaccaagattgagggtgactggaagcggctcaacacactgatgcattatcaggtgtcagacaggtcggtggtggctctggtccccaaacagacctcctcctacaacatccctgcctctgccagcatctcccggacgtccatcagcagatatgactcctccttcaggtatacgggcagccccgacagcctgcggtcccgggccccgatgatcaccccagacctggaaagtggggtcaaggtgtggcatctggtgaagaaccatgaccacggtgaccagaaggagggtgaccggggcagcaagatggtgtccgagatctacctgacccggctactggccaccaagggcaccctgcagaagtttgtggacgacttgtttgagaccttgttcagcactgtgcaccggggcagcgctctccccctggccatcaagtacatgtttgatttcctagatgagcaggcagacaggcacagcatccatgacacagatgtgcggcacacctggaaaagcaactgcctccctctgcgcttctgggtgaacgtgattaagaacccccagttcgtgtttgacatccacaagggcagcatcacggacgcctgcctctctgtggtggcccagaccttcatggactcttgttcaacgtcagagcaccggctgggcaaggactccccctccaacaagctgcttctatgccaaggacatccccagcttacaagagctgggtggagagatactacgcagacatcgccaagcttccagcccatcagttgaccagggacatgaatgcttacctcgccgagcagtcccgcctgcacgccgtgggagttcaacatgctgagtgccctcaatgagatctactcctatggtcagcaagtatagtgaggagctcatcgggcccctagagcaggatgagcaggcacggcggcagcggctggctataaaggtggagcagctcattaatgcccatgtcccattgagagctgagaggaggagcctcgcattccctgggaagagggaccctgtcccaagctgtcacactgggagtcctcagatggaaggacaagtgatggggatcaggcccccagagcttgctgtcccctgaagaccccatccctggggagaggggaggactcctctccctacgccagccaagtttcgtcatagccagttccagctgggagagacagtgggcgtcgtccatcctcagtgagaacaccagagaacccggggcccgggagaagggggtccttcaaagccgagagggcacgagctgggggaaagtctgccctctgtgactgctgctttgcatgaaaactcatttgatgtatattggggaaataatgagaactttatttaatttttttaagaaaaagggaaaaaaacagaaataaaacaaaaagccgccctgttaatcccgtccaacttttgtttaattctgatttctgtctcccttccttcttttctcccattcctccttctttatataatgcctatttccaaatgccagagaaagcagagatgctgagagacattggagagaaaatgactgtctccttttccttgaaatt

SEQ ID NO: 87496 - DNA, 11791 bp, Homo sapiens
tccaaactgttcaaaatgatgaacgaagatgcagctcagaaaagcgacagtggagagaagttcaacggcagtagtcagaggagaaaaagacccaagaagtctgacagcaatgcaagcttcctccgtgctgccagagcaggcaacctggacaaagttgtggaatatctgaaggggggcatagacatcaatacctgcaatcagaatggactcaacgctctccatctggctgccaaggaaggccacgtggggctggtgcaggagctgctgggaagagggtcctctgtggattctgccactaagaagggaaataccgctcttcacattgcatctttggctggacaagcagaagttgtcaaagttcttgttaaggaaggagccaatattaatgcacagtctcagaatggctttactcctttatacatggctgcccaagagaatcacattgatgttgtaaaatatttgctggaaaatggagctaatcagagcactgctacagaggatggctttactcctctagctgtggcactccagcaaggacacaaccaggcggtggccatcctcttggagaatgacaccaaagggaaagtgaggctgccagctctgcatattgccgctaggaaagacgacaccaaatctgccgcacttctgcttcagaatgaccacaatgctgacgtacaatccaagatgatggtgaataggacaactgagagtggttttacccctttgcacatagctgcacattacggaaatgtcaacgtggcaactcttcttctaaaccggggagctgctgtggacttcacagccaggaatggaatcactcctctgcatgtggcttccaaaagaggaaatacaaacatggtgaagctcttactggatcgaggcggtcagatcgatgccaaaactagggatgggttgacaccacttcactgtgctgcacgaagtgggcatgaccaagtggtggaacttctgttggaacggggtgcccccttgctggcaaggactaagaatgggctgtctccactacacatggctgcccagggagaccacgtggaatgtgtgaagcacctgttacagcacaaggcacctgttgatgatgtcaccctagactacctgacagccctccacgttgctgcgcactgtggccactaccgtgtaaccaaactccttttagacaagagagccaatccgaacgccagagccctgaatggttttactccactgcacattgcctgcaagaaaaaccgcatcaaagtcatggaactgctggtgaaatatggggcttcaatccaagctataacagagtctggcctcacaccaatacatgtggctgccttcatgggccacttgaacattgtcctccttctgctgcagaacggagcctctccagatgtcactaacattcgtggtgagacggcactacacatggcagcccgagccgggcaggtggaagtggtccgatgcctcctgagaaatggtgcccttgttgatgccagagccagggaggaacagacacctttacatattgcctcccgcctgggtaagacagaaattgtccagctgcttctacaacatatggctcatccagatgcggccactacaaatgggtacacaccactgcacatctctgcccgggagggccaggtggatgtggcatcagtcctattggaagcaggagcagcccactccttagctaccaagaagggttttactcccctgcatgtagcagccaagtatggaagcctggatgtggcaaaacttctcttgcaacgccgtgctgccgcagattctgcagggaagaacggccttaccccgctccatgttgctgctcattatgacaaccagaaggtggcgctgctgttactggagaagggtgcttcccctcatgccactgccaagaatggctatactccgttacatattgctgccaagaagaatcaaatgcagatagcttccacactcctgaactatggagcagagacaaacattgtgacaaagcaaggagtaactccactccatctggcctcgcaggaggggcacacagatatggttaccttgcttctggataagggagccaatatccacatgtcaactaagagtggactcacatccttacaccttgcagcccaggaagataaagtgaatgttgctgatattctcaccaagcatggagctgatcaggatgctcatacaaagcttggttacacacctttaattgtggcctgtcactatggaaatgtgaaaatggtcaactttcttctgaagcagggagcaaatgttaacgcaaaaaccaagaacggctacacgcctttgcaccaggccgctcagcagggtcacacgcacatcatcaacgtcctgctccagcatggggccaagcccaacgccaccactgcgaatggcaacactgccttggcgattgctaagcgtctgggctacatctccgtggtcgacaccctgaaggttgtgactgaggaggtcaccaccaccaccacaactattacagaaaaacacaaactaaatgtacctgagacgatgactgaggttcttgatgtttctgatgaagagggtgatgacacaatgactggtgatgggggagaataccttaggcctgaggacctaaaagaactgggtgatgactcactacccagcagtcagttcctggatggtatgaattacctgcgatacagcttggagggaggacgatctgacagccttcgatccttcagttccgacaggtctcacactctgagccatgcctcctacctgagggacagtgccgtgatggatgactcagttgtgattcccagtcaccaggtgtcaactctagccaaggaggcagaaaggaattcttatcgcctaagctggggcactgagaacttagacaacgtggctctttcttctagtcctattcattcaggtttcctggttagttttatggtggatgcccgaggtggtgctatgcgaggatgcagacacaatgggctccgaatcattattccacctcggaaatgtactgctccaacgcgagtcacctgccgactggtcaagcgccacagactggcaacaatgcctccaatggtggaaggagaaggcctggccagtcgcctgatcgaagttggaccttctggtgctcagttccttggtaaacttcacctgccaacggctcctcccccacttaatgagggagaaagtttggtcagccgcattcttcagctggggcctcctggaaccaaattccttgggcctgtgatcgtggagatccctcactttgcggcccttcgaggaaaggaaagggaacctggtggtcctgcgcagtgagaatggggacagctggaaagagcatttctgtgactacactgaagatgaattgaatgaaattcttaacggcatggatgaagtactggatagcccagaagacctagaaaagaaacgaatctgccgcatcatcacccgagacttcccacagtactttgcagtggtgtctcgtatcaaacaggacagcaatctgattggcccagaaggaggtgtactgagcagcacagtggtgccccaggtgcaggccgtcttcccagagggggcactcaccaagcggatccgcgtaggcctgcaggctcaacctatgcacagtgagctggttaagaagatcctaggcaacaaagctaccttcagccctatagtcactttggaacctagaagaagaaaattccacaaaccaattaccatgaccattcctgtccccaaagcttcaagtgatgtcatgttgaatggttttgggggagatgcaccaaccttaagattactatgcagcataacaggtggaaccacccctgcccagtgggaagatattacaggaactacgccattaacatttgtcaatgaatgtgtttcctttacaacaaacgtgtctgccaggttctggctgatagattgtcgacagatccaggaatccgttacttttgcatcacaagtatacagagaaattatctgcgtaccttatatggccaaatttgtagtgtttgccaaatcacatgaccccattgaagccaggttgaggtgtttctgcatgactgatgataaagtggataagacccttgaacaacaagaaaattttgctgaggtggccagaagcagggatgtggaggtgttagaaggaaaacccatctacgttgattgtttcggcaacttggtaccattaactaaaagtggccagcatcatatattcagtttttttgccttcaaagaaaatagacttcctctatttgtcaaggtacgcgatacgactcaggaaccttgcggacgactatcatttatgaaggagccaaaatccacgagaggcctggtgcatcaagctatttgcaacttaaacatcactttgccgatttatacaaaggaatcagagtcagatcaagaacaggaggaagagatcgatatgacatcagaaaaaaatgatgagacagaatctacagaaacatctgtcctgaaaagtcacctggttaatgaagttcctgtcctagcaagtccggacttgctctctgaagtttctgagatgaaacaagatttgatcaaaatgaccgccatcttgaccacagatgtgtctgataaggcaggttctattaaagtgaaggagctggtgaaggctgctgaggaagagccaggagagccttttgaaatcgttgaaagagttaaagaggacttagagaaagtgaatgaaatcctgagaagtggaacctgcacaagagatgaaagcagtgtgcagagctctcggtctgagagaggattagttgaagaggaatgggttattgtcagtgatgaggaaatagaagaggctaggcaaaaagcacctttagaaatcactgaatatccatgtgtagaagttagaatagataaagagatcaaaggaaaagtagagaaagactcaactgggctagtgaactaccttactgatgatctgaatacctgtgtgcctcttcccaaagagcagctgcagacagttcaagataaggcagggaagaaatgtgaggctctggctgttggcaggagctctgaaaaggaagggaaagacatacccccagatgagacacagagtacacagaaacagcacaaaccaagcttgggaataaagaagccagtaagaaggaaattaaaagaaaagcagaaacaaaaagaggaaggtttacaagctagtgcagagaaagctgaacttaaaaaaggtagttcagaagagtcattaggtgaagacccaggtttagcccctgaaccccttcccactgtcaaggccacatctcctttgatagaagaaactcccattggttccataaaggacaaagtaaaggcccttcagaagcgagtggaagatgaacagaaaggtcgaagcaagttgcccatcagagtcaaaggcaaggaggacgtgccaaaaaagaccacccacaggccacatccagctgcgtcaccctctctgaagtcagagagacatgcgccagggtctccctcccctaaaacagaaagacactctactctttcctcttccgcaaaaactgaaaggcaccctccagtatcaccatcaagtaaaactgagaaacactcacctgtgtcaccctctgcaaaaacggaaagacattcacctgcgtcatcatcgagtaaaactgagaaacactcacctgtatcaccctcgacaaaaactgaaaggcactctcctgtgtcatctacaaaaacagaaagacacccacctgtttcgccttcaggcaaaacagacaaacgtccacctgtatcgccctccgggaggacagaaaaacacccgccagtatcgcctgggagaacagaaaaacgcttgcctgtttcaccctccggaagaacggacaagcaccaacctgtatcaacagctgggaaaactgagaagcacctgcctgtgtcaccttctggcaaaacagaaaagcaaccacctgtatcccccacttcaaaaacagagaggattgaggaaaccatgtctgttcgggagctgatgaaggctttccagtcaggtcaggacccttctaaacataaaactggactctttgagcacaaatcagcaaaacaaaagcagccacaagagaaaggtaaagttcgggtagaaaaagaaaaggggccgatactaacccagagagaagctcagaaaacagagaatcagacaatcaaacgaggccagagactcccggtaacgggcacagcagaatccaaaagaggagttcgtgtttcctccataggagttaagaaagaagatgcagctggaggaaaggagaaagttctcagccacaaaatacctgaacctgttcagtcagtgcctgaagaagaaagccacagagagagcgaagtgcccaaagaaaagatggctgatgagcagggagacatggatctacagatcagcccagataggaaaacctccactgacttctctgaggtcattaagcaagagttggaagacaatgacaaataccaacaattccgcctgagtgaggagacagaaaaggcacagcttcacttagaccaagtactcactagtcctttcaacacaacatttccactcgactacatgaaagatgagttccttccagctctgtctttacaaagcggtgctttagatggcagttctgaaagcctaaagaatgagggggtagccggctctccgtgtggcagcctgatggaggggacccctcagattagttcagaagaaagctataagcatgaaggcctagcagagacccctgagacgagcccagaaagcctttctttctcaccaaagaaaagtgaggagcaaactggggaaacaaaggaaagcaccaagacagaaaccaccacagaaattcgttcagaaaaagagcatcccacgaccaaagacattactggtggctctgaagagcgaggtgccacagtcactgaggactcagagacctctactgagagttttcagaaagaggccactctaggctctcccaaagacacaagccctaaaagacaagatgattgcacaggcagctgtagtgtagcattagctaaagagacacctacaggactgactgaggaggcagcctgtgatgaaggtcaacgtacctttggtagttcagcccacaagacacaaactgatagtgaggctcaggaatccacagccacctcagacgagacaaaggccttgccgctgcctgaggcttctgtaaagacagatacaggaactgaatcaaaacctcagggagtcattagaagtccccaagggttagaacttgcactccctagccgagatagcgaagtcctcagcgctgtggctgatgactcattagcagtgagccacaaagactctctggaagccagccctgtgctagaagataactcttcacacaaaacccctgattctctggagccaagtcctctgaaagaatccccttgccgtgactctctggaaagcagccctgttgaaccaaagatgaaggctggaatttttccaagtcactttcctcttcctgcagctgttgccaaaacagaactcttgacggaagtggcctctgtgcggtcccggctactccgagaccctgatggcagtgctgaggatgacagtcttgagcagacatcgctcatggagagctcagggaagagccccctttctcctgacacccccagctctgaagaagtcagctatgaggttacacccaaaaccacagatgtaagtacaccaaaaccagctgtgattcatgaatgtgcagaggaggatgattcagaaaacggggagaaaaagaggttcacacctgaagaggagatgtttaaaatggtaaccaaaatcaaaatgtttgatgaacttgaacaagaagcaaagcagaaaagggactacaaaaaagaacccaaacaagaagaatcttcttcatcttctgacccagatgctgactgttcagtagatgtggatgaaccaaaacatacaggcagtggggaggatgaaagtggtgtccctgtgttagtaacttcggagagcaggaaggtgtcttcctcctcagaaagtgaacctgagttggcacagcttaaaaaaggtgctgactcaggccttttaccagaaccagtgattcgagtacaacctccttctccacttccatcaagcatggactccaattccagtccagaagaagtacaattccagcctgtcgtttccaaacaatatactttcaagatgaatgaagatactcaggaagagccaggcaaatcagaagaagaaaaagattctgaatcccatttagctgaagaccgtcatgctgtttccactgaggctgaagacaggtcttatgataagctaaacagagacactgatcagccaaaaatctgtgatggccatggatgtgaggccatgagtcctagcagctcagctcgtcctgtctcttcaggtctacagagtccgactggtgatgatgttgatgaacagccagtcatctataaagaatcattagctctccaaggcactcatgaaaaagacacagagggagaagagcttgatgtttctagagcagaatctccacaagcagattgccccagtgaaagcttttcatcttcatcctctttgcctcattgtttggtatctgaaggaaaagaattagatgaagacatatctgccacatcttctattcaaaaaacagaggtcacaaaaactgatgaaacatttgagaacttaccaaaggactgcccctctcaagactcatccattactactcaaacagatagattttccatggatgttcccgtgtctgacctagctgagaatgatgaaatctatgatccacaaatcactagcccttatgaaaatgtcccttcccaatcttttttctctagtgaagaaagcaaaacccaaacagatgcaaatcacaccacaagttttcactcttctgaagtgtattctgttaccatcacatcccctgttgaagacgttgtagtggcaagctcctctagtggaactgttttaagcaaagaatctaattttgagggccaggacataaaaatggaatcccaactggaaagtaccttgtgggaaatgcaatcagacagtgtctcttcatctttcgagcctactatgtccgctacaacaacagttgttggtgaacaaataagcaaagtcatcatcacaaaaactgatgtggattctgattcttggagtgaaattcgggaagacgatgaagcctttgaggctcgtgtgaaagaggaagaacaaaagatatttggtttgatggtagacagacaatcacagggtaccacccctgacaccactcctgctaggaccccaactgaagaggggaccccaacaagtgagcaaaacccatttctgtttcaggaaggaaaattgtttgaaatgacccgaagtggtgccattgatatgaccaaaaggtcctatgcagatgaaagttttcactttttccaaattggtcaagaatccagggaagagactctctctgaagatgtgaaagaaggggctactggggctgatcccctaccgctggagacatcagctgaatcactagcactttcagaatcaaaagaaacagtggatgatgaggcagacttacttccagatagcgtgagtgaggaagtagaggaaatacctgcttcggatgctcaacttaactcccaaatggggatttcagcctccactgaaacacctacaaaagaggctgttagtgtagggaccaaggacctccccaccgtgcaaacgggtgatatacctcctctctctggtgtaaagcagatatcctgccccgactcttctgaaccagctgtacaagtccagttagatttttccacactcaccaggtctgtttattcagataggggtgatgattctcccgattcttccccagaagaacagaaatcagtaatcgagattcctactgcacccatggagaatgtgccttttactgaaagcaaatccaaaattcctgtaaggactatgcccacttccaccccagcacctccatctgcagagtatgagagttcagtttctgaagattttctatccagtgtagatgaggaaaataaggcggatgaagcaaaaccaaagtccaaactccctgtcaaagtacccctccaaagagttgaacagcagctctcagatctagacacctctgtccagaagacagtggctcctcagggacaggacatggcaagcatcgcaccagataatagaagcaaatctgaatctgatgctagttctttggattcaaagaccaaatgcccagtaaaaacccgaagttacactgagacagaaacagagagcagagagagggccgaggaacttgagttagaatcagaagaaggggccacaagaccaaagatacttacatcccgattgccagttaagagcagaagcactacatcttcctgcagggggggcacgagccccacaaaagaaagtaaggagcatttctttgacctttacagaaattccatagaattctttgaggagattagtgatgaggcttccaaattagtggataggctgacacagtcagagagggagcaggaaatagtttcagacgatgaaagtagtagtgccctggaagtatcagtaattgaaaatctgccacctgttgagaccgagcactcagttcctgaggacatctttgacacaaggcccatttgggatgagtctattgagactctgattgaacgcatccctgatgaaaatggccatgaccatgctgaagacccacaggatgagcaggaacggatcgaggaaaggctggcttatattgctgatcaccttggcttcagctggacagaattagcaagagaactggatttcactgaggagcaaattcatcaaattcgaattgaaaatcccaactctcttcaagaccagagtcatgcactgttgaagtactggctagagagggatgggaaacatgctacagataccaacctcgttgaatgtctcaccaagatcaaccgaatggatattgttcatctcatggagaccaacacagaacctctccaggagcgcatcagtcatagttatgcagaaattgaacagaccattacactggatcatagtgaagggttctcggtacttcaagaggagttatgcactgcacagcacaagcagaaagaggagcaagctgtttctaaagaaagtgagacctgcgatcaccctcctatcgtctcagaggaagacatttctgttggttattccacttttcaggatggcgtccccaaaactgagggggacagctcatcaacagcactctttccccaaactcacaaggagcaagttcaacaggatttctcagggaaaatgcaagacctgcctgaagagtcatctctggaatatcagcaggaatattttgtgacaactccaggaacagaaacatcagagactcagaaggctatgatagtacccagctctcccagcaagacacctgaggaagttagcacccctgcagaggaggagaagctgtacctccagaccccaacatccagcgagcggggaggctctcccatcatacaagaacccgaagagccctcagagcacagagaggagagctctccgcggaaaaccagcctcgtaatagtggagtctgccgataaccagcctgagacctgtgaaagactcgatgaagatgcagcttttgaaaagggagacgatatgcctgaaatacccccagaaacagtcacagaagaagaatacattgatgagcatggacacaccgtggtaaagaaggttactaggaaaatcattaggcggtatgtatcctctgaaggcacagagaaagaagagattatggtgcagggaatgccacag

SEQ ID NO: 87497 - DNA, 5665 bp, Homo sapiens
ggagcgacgccgctcgggtcagtcggcggccggactgggaagatggacgcagctactctgacctacgacactctccggtttgctgagtttgaagattttcctgagacctcagagcccgtttggatactgggtagaaaatacagcattttcacagaaaaggacgagatcttgtctgatgtggcatctagactttggtttacatacaggaaaaactttccagccattggggggacaggccccacctcggacacaggctggggctgcatgctgcggtgtggacagatgatctttgcccaagccctggtgtgccggcacctaggccgagattggaggtggacacaaaggaagaggcagccagacagctacttcagcgtcctcaacgcattcatcgacaggaaggacagttactactccattcaccagatagcgcaaatgggagttggcgaaggcaagtccataggccagtggtacgggcccaacactgtcgcccaggtcctgaagaagcttgctgtcttcgatacgtggagctccttggcggtccacattgcaatggacaacactgttgtgatggaggaaatcagaaggttgtgcaggaccagcgttccctgtgcaggcgccactgcgtttcctgcagattccgaccggcactgcaacggattccctgccggagctgaggtcaccaacaggccgtcgccatggagacccctggtacttctcattcccctgcgcctggggcttcacggacatcaacgaggcctacgtgggagacgcttgaagcactgctttcatggatggccccagttccctggggcgttcatcgggaggggaagcccaacagcgcccactacttcatcggctacgttggtgaggagctcatctacctggacccccacaccacgcagccagccgtggagcccactgatggctgcttcatcccggacgagagcttccactgccagcacccgccgtgccgcatgagcatcgcggagcttgacccgtccatcgctgtggtacgtggcggccacctgagcacacaggcatttggtgctgaatgctgtttgggaatgacgaggaaaactttcggatttttgcgtttttttttcagcatgttgggataagtactgtgttcacgtggttgggaatctgaagggtataagagccggaactgtgtccttgcaccctcacgtccctcccccaggcaccacctcctgtgcagccttcatggccttcgagtggcccagagagcgtgtgtctggatgtgagcgtgtgtgggcgcgtgctgagtgtgcatggatgagtgtgagccatggtgagtgtgtccccctcacacctacatttaaacacacgggcggcccctccacccacccctgcaccaccttcgtcacacccacatttaaacacgggcggcccctccacccacccactcctgcaccaccttttgttttccggaggctctgacttgacctctctgggggatttcctaagaaggagcttccctgtttttccattttgattacctagttgtgatttttggtgtgtgatttatgcagacctgcctgccctcaaatatatttgatggggaaagaggccaaaaaacccccctagaaatcatgaatgacggtgacatgctcagggaagcagttaaccgaatcgggggctctgttgtggatgctccgccccatttaggaggaagaaggcagatctgggcctgaaatgggacggtctctgagctgtggcgcagccccagagtgcacaccacgctccatgcacctcctgggcagggtggcagtagtggggaacatgggctggagctctgtggctcacactttttgtttgtttgtttgtttttgagacggagtctcactctgtcgcccaggctggagtgcagtggcgcgatctcggctcactgcaagctccgcctcccaggttcacgccattctcctgcctcagcctctggattagctgggactacaggcacccgccaccacgcctggctaattttctgtatttttaatagagacgggttttcactgtgttagccaggatggtcttgatctcctgacctcatgatccacccacctcggcctcccaaagtgctgggattacaggcgtgagccactgcgcgcagcctggcgcacacttcttaccagaacctagtcacgaattcctcgtcgaactagaattaggtatgtttgttactgtaaacgcagcttggtggcttacagtgattggcactctaacagtcaggtcaggctagagagccagccaccgcagacagaggagtggacgcgtgaacgttgagttgagaccaaaggggccacctggtgggataactgtcctcacccgtgaggaggaggaatgtcccctgtccccgggggagagtgctcctacaccagcgccgaggcggcagaatggtgtcttcaggggaagagagtgcccagtttgagcttctccccccatttcgtttctttttgtgttaacatctgcgcatctggcagcgttgagaattcctagtgactgtcattacaggcggcagctttaaggatgtgattgccggtgacccttggccggtcccctgtctcctggctcctcagcaggaggctccctgtgtcacggtgtccttgggcagttctcggtggcctttgccgccaagcttccagggagctgctgggcgaaggctgagacccagcggccctgtctcacagtcacagagagaagagctccccacttggccctaactcataacctgccccaatcccggaacactcggtgaggtttgagagatgcacaccacgtaacatctcgtgggcgaatcaaggcacagcaacgcagtggagcctgaggggagccgggcactggtgcaggggaccatgcacagggcaccctcggagctccattcccggccacaggagccaaggcaggctggaatgtccagcacctgcatgctgggggcctctgctgcgccactggcagtgggaatggaagcccccacctcttatccgactgcagatgggggtgtcgtgttctgctcatcgtcatttcgttttaggggtttttctgtaagactgaagatgacttcagtgattggtgccagcaagtcaaaaagctgtctctgcttggaggtgccctgcccatgtttgagctggtggagcagcagccttcacatctggcctgccccgacgtcctgaacctgtccctaggtgagagctgccaagtccaggtggggtccctcggaggtacgatctgtgcccttgcttccccagtcctggcccccttggttttgaccattaaggtgtgtgtgagcctgagccgtgagcacttggcagtggttcgcctgtgagaccaggtatggagtggagcgtcccctcctccaagcttgcgcccagcagcccaggacccacctcgtcttccccaccagcgctgcctgccggggcgctgtggagctgggcgtgctaccatggagtcctcaggggtctggagcagacagaacatgcaggctctgtggtgacgcagtcctgggtgggggactggttcacttgggcaccactggccatgggtggcgtagacccctcggaccatggccagcgtgccgcaggagccggcctgggctcgtgcagtgaagtgagtggccgtgagcgcgtcctcctcatctctgtctccctgtgggaaactctacaaacaaggcaatggcaatggaaccactcctgatgaccacgagggtcagacgcgggacagaggcccctcaggcctgagattgtgccggccgccccctgccctcctcaccctgccctgctcctcttctctgctccctccccccatattcgcaggtctgcacaacccccggacctgttcacacccgcatggggacagctgtctgtgggctgcagagcaggcactgctcagtctgccccacgccaagggcccttgactcacacccaggtggcccacccaagatgcctgatgcgctatgtcctgttccttctagattcttctgatgtagagcgactggaaagattcttcgactcagaagatgaagactttgaaatcctgtccctttgaaaatcctggggtcgggggtggcacctgtgagagcctggggctcctggtgccgctgcgtttcatccatcccgcccgctcgcctgccgagggctgcgccccgtgctgcctccccccagagggccacccgctgtgctcgtggactgaggctgcgctgcccgggaggccttactgcttggtgtcagactgcccagctcagagtgcccgtcagggcctgtgcatccgcacgcggagccgtctgttaggagcttccagagcgttctctcgacactgccagccccgtgttagcacctgggcctcagtcccacttgctcccaggcgccggttctgtggttggtttggaattaaagtcctgtttgaagttgtcagacacagacatgaatttctggggcgctccctgagtcagtctcagaagacctgtgcaggctggcgtgagaggagcggcagccacactgcggccccacgcccaaggactgggctgctctcgaggggggcgcgcccaccgctgtgtcctctctgcccagcctggcttaccaagggctacctcagtgggagatgaggttggaggaacgaaggcgaggttcctccttgctttggggagaaaagtattcaggaagtgggtgtgtgggaaacctgaagatggcgtgcacaggacacagcgtggtcggcctgggcagaagggcggctggctgtcctggagctgctgctggagcctgccctcagagtgtccctttccagtgctgtggcattctgtggcagcttccccaggtgtggtgacggggggggggcggggcctccacctgtgacagccaggcttgagggtggacggcgtgcctctcccaggagccttccccatgtccttgccttgctgagaattgccctcccatgccgctgaggtgttaggtggtttagggccaaaaggggaaaaccacttgagtcttgtggtgtgtggtgggcagacaccacagggtggcatcacctggtggcatttccagaacctcagccccgattccagcacccaccaccgcctgaccctgtgtaacctgctgtcccgggtcccagagtgcactctgccccactgctctgctgcctgtcctgggaaagtagctttgccccactaggaaatgtaaacaggagggcttggggagcgtgggcacttttctcatgagcagctactgcggcgttggcaggactcgctgctgctgctgctgctgctgcttgtgtaggtcggggagccggagatccccgaggacgcgcgccggacagtcggcactgaccggcccacctggtagcagaggacacccccagccccccaagcattgaagacatagtgtatttcctcgtatcctttctcccttgggtgtagttggggtggggaagcagggaaggctggtgcgatctccattccttgggctccgcgtccgagttcatggtgcgccgctgtgctgggagctgcagtgggaatgtgtgggacaccttgaccaaaggggagctttgtctcgtgtgttttgaaaaaggcttaatgaagagaatgttgttcattcttagtagtatagtttgcaattcttaatggcaaataataagtttcagtagaaacccaaaaaaaaaa

SEQ ID NO: 87498 - DNA, 1034 bp, Homo sapiens
atttgtcggctgcggaattcagcaccagctcctgtttgttatgtttgccgtggtttttatcaccacacgactgggtatatttcctctctgggtgttaaataccacattatttgaaagctgggagatcgttggaccttacccttcctggtgggtttttaacctactgctattgctagtacaagggttgaactgcttctggtcttacttgattgtgaaaatagcttgcaaagctgtttcaagaggcaaggctgggaagtggaaccctttacatgtgtccaaggatgatcgaagtgatattgagtctagctcagatgaggaggactcagaacctccgggaaagaatccccacactgcgacaaccaccaatgggaccagtggtaccaacgggtatctcctgactggctcctgctccatggatgattaattactcaaaactacaagtcccaagcaaagtgaactatttgttcctggaagtatttaataagttgcaaatgcagttcctttcataatatctcagcaccagaaacaaaaattaagattatcaaagcattttgaatagtgcactgccatgtgtcctgtctgtgaatgaagaagaattaccattctctctttgtaggcatgctgtatgtaatttgacacaagggaacagtatttgcatttgtactgtcttagaatattatttatttttttgtatttgtaaatctgtggacaaaagagggtttcctcactccttttactcactgggctcatgacagtgaaggagatgctccatctggcttctccccctttctcttgctgtagtccaatgtgctatgagcatcagcttactttgtcacttagagcaagcaaaacccagtgcaagagtctcgttcagctcttaaatagggtttgctttcttttagttacagtgcccattttgaaattgcctatacagtcttagtgaccatttaaaccggacgaactaggtgtttaattttcactcttcatgttcaattagcagttcaaattaaagaagatggttattggaaaaaaaa

SEQ ID NO: 87499 - DNA, 469 bp, Homo sapiens
  misc_feature (1)...(469): n = a,t,c or g
natggagaactgaagaccattccgccagagcggaggaattcaagacatccacaaaaaaaggtgatggaactaataaatgagttcagcgaggatacaggatataagatcaatatgtaaaaaatcaattttatttctgttgattaccaatgaacaattaaaatacggatatatttaacagaagtgcaagacgtatacactgaagacattaaaacatggctgagagaaactgaagaacatctaaatagatggaaatgggttccatggtcatggattggccgtttttcccaaattgatctgtagatttgttgcaatcctgatcagaattccagcagattttgataattccttttttgtggaaactggtaaaacagtcttaaaatttatatggaagtgcaaaggagtgagaatagccaaaacaattttgagaacgatgagaagagtagagggttactcttttcagtttcataan

SEQ ID NO: 87500 - DNA, 6527 bp, Homo sapiens; identical to SEQ ID NO: 65378

SEQ ID NO: 87501 - DNA, 1226 bp, Homo sapiens
tttttttttttcagaataaacttgctttataatcaatataatctctgggcctttgaatctaacaggacacctgggtcccagacgcctgggaattgggtctctcaattccctttggttttggagggaggagtttaaaactgtgcatgggaccaggagggactcaagggtggcagtggtgagtgggagggaaatacacttttgggatgacttcgtcacccctgagagaggggtgtgagttacccagggaatgggtagggaaggtttaaagcaacacccaaggaaagaagggaaactcatctcttgtagtgattcaaccctgagaacagatggggagtggggttggctgtcccccatggatggatgaaaggtcacctaatcagtagtcaccaggacatagtggtggaggcacaagtggccaaggagtgctcatttggtggagactgggaaagcggctgttatttagtgtctgtgtagtagagggagcgcagctggtcccagaagaagagggagaggatggtgtgggggccgaggcggaagtaggaggcacctatacccttgtacatgccaaaaatgccctcggtccgagctgtctgcagcagagcgtccagtatcccccggtacatgaggcccttgccctgtgcatctgtgcggctggttgtagagccttgtgcaggccacatcaaagggtgccatggccaagacaactgctatgccactcatcatggcagccaccagcgccaacttccagctctggggaggaaagatctcccactggctcaggaggtccttggtggatgagaaggtgcacagctgggtggaggaaccgacgataactcggggcaggccgcccagagccccacgccataaccccaccagaccatgtttctggccaatctcggttagcgcctgaaacatgccctgatgcttatactggtgccctacagcaatttctgaggctgcctgtgcctgcaggtgtgtcttcaccatgtagatggggctccccaagtaggctcccatgaccccagccatggccccagctgctgcgctgcgggcaggactgtgggtgccttcggctgtgtgcaggtagcccccagcctcagccagcccataggtgcccagtcggatgccattcatcaggaactggtacaagagggaaagggacaggcctttctgcaggccagcaaggccatccacctgccgaggtgataatcaaccgctttgcgatc

SEQ ID NO: 87502 - DNA, 1367 bp, Homo sapiens
  misc_feature (1)...(1367): n = a,t,c or g
tttttttattttgaattgtaaaaaactttatgaactgagaggtcctaactccaaaaagaacattaaagacgaagtgtaagagcattacaaatgatcgccaatacacacaaaggcagagttgcagtgaaaatcaacagccagctgaactgtgggtgaaattccctttatataaacatggccttataatcagatgacctcagatgggtctctggtgtgtacaaagaaagcaaaaccaattttcccatgagtgcctctggacactcatgtaagagttacagatgttgactacatttaaacatttatcatgcttccaaaaacatatttgtaagagaaaaaaatataaaaataaaaatgtacaaagttctttattaaaataatagcttaaataaatcctctgtcaacaccagacagagtcagtgactggatctagactctagagcttagagctttttacatagttacatgaaaacatttgaatccgtcttcacagacagtgccacgatgacaatctggttaaaaccaataagccatcttccagatgcagcttaagagttcaggcgagaaaaggaactgaggaaaatgactgtacataatatggttctcattctatttgccttttttcgtcttggctgtcttctcctttctttttttcacatgtttaggaattttgttttttcttttctctctctgggcttccttgaccatctttttttctttcttttttatcaatgtcagggtccgtggtgtgtttcttggggcgggcatggtctccctgctcttcagagtctgtgtcagagcactcagagcttccaatatcttctgaatcagaacaagtcctttcctccacttgattttctaggagtgcagggaccttctgaactcctgacaaatctttcttcaatcctgtaacagtctggtatagaatattatcttgttgggcattcatggccatgtcctcttccttcaatttcataattatgtccatatccctctcataatttttcacttcattcaaggttctaggaatatatgctcgcttaaacacctcttcatccacatgatcttggctagaccgttcttccttggtcctttgagatgctatttccatggcctttgagagaaaacaataatgactgttttttatattcaaactgcaggaggcacatccatgtcccagttttggtataaaattgttccagtctttttaagtatcacctcctcacacttaggaaagcatttagtgaggtctaatggtaaaagttagcattccagcacagccctcaccaaaaaggctgccatcaacactaaagtagcaatcctcggcnttccagacgctctctaggtctcaaaccccnttcccctagcaa

SEQ ID NO: 87503 - DNA, 1560 bp, Homo sapiens
ttttttttttttcctaattgggggtttctctttctgtccggtgtccggactttcctaattggagtttgaggcccctaagctggcatcaaccccaggccacgctcgctctttccttccctcccctccccctctgccttttgtacgccagttctcagaaataaagatcttttgtccgtttttttaacctcggattctgtaattggttcttatagtaacaaataaaaagctgttttcttcagcttctcctggctcagctgttctttgccatgggtgtgtgttgtgtgtgtgttgggggtgtctttgagagggaaaataaaggacaaaggacaacaaaggaggtacagatggttcttgccctgggaacagctttatgagataggcagcctggacccaggcggcttgctccagctaggcttcttgtgggacccaaactgctccccagctcccagtggtgctggagctcaagaaccatcttggcccagattcattcaaaggagttgagatgagctttctggatgactggtggcctccataggaaaggggaatgggggtgtttcttcctctgtttcccacctcttactcccctctcccttttgtttaaggaattctggaagttgctagcagccagggtaacatgtatacccccttgggggtggtggtggggttataggaggatcccctcacctagctgtgtggtgtatttggcagacgagaattctaccactgaaccaccctagcacctctgggtgtatgtgtacagcctgctgcttcaggatcctcaaggccagtctcgatgatatcccgatccactgtagcactgtttcctgccttaaaggtttgggacactgagattagatgcctgagctgggcccattagaaggaacaccttaggatagagaacaagaagttcagcctgctgtgtgctccttgggcacttcctttagagatgggaaacagcctcaacagttgtgacttgttcaaggtcaaagaccttggtgtctgccttaggtccactgctctttgcgccattcaaagctgtgggctgataaccacagcacaagctgctgagcccatctgatagttctctccacctcgttatggtccctgtccctagggcatccccagctccccgtagtccctccctgtcctgagcctacacctcggcggcgttgggatgaactgacaattataccaggagggggttgacagcattcgccccctccagtgtctaaactcagttactggcactcggttttgtcttgtcgcactgctctgaggtgcgccagtagctctggcgcctccggcgtacaccacgcagcccactactgcggaaggaatgggcctggctccaggacctcgtggagtccggaaggtgcccggtggtggcagagctccccaaccagggctagaagccgtcgcagaacacccgttttgcgggaggacagggggcggagggagggagtaacagccctgaaaaggttggaagtccagggacagccctgggctccgtggggcaaagaattggaagccgccgatcctccgcctttattcgtcgggtaa

SEQ ID NO: 87504 - DNA, 1341 bp, Homo sapiens
acaataattaagatgtgtatgttctgcatcacacactctcatctgactctatatgacggacctgtggggattggtattccaattagaatcgtaaacatcttttcaaaacacttccttagtgacactaatatatatatgtgtgtgtaatatacatagacacacacaatacaacacatatcacccctccctctcgaaaaagcaacaaccaccaatcctgccatagggggagctacacatttcttactagagtgggtgcatacgattgttaagcatatgattggcattgtgtgtcatgtaaggaacacatagaaacctttatgcggttcattggttttccagccttttaacagtggtgattcaggtttcattccatttataagccaggtgagtctgcagtcttttttctgccgtttacaaaccaagtctgctttactggtgtctgttctattgttagtccccaacgaggcactctcctggtattcctgtgcttgccctgtgactgtcttgagcctgcagaatgcagcagagatggtgatgtgccagttccaggctttaagccctaagaagttggcagcttctgcttttgtgttcttgggagcctcaagtgatgtgcagtagatgttaggaggagacacagagaaagggagaatgccccgccttcccagctgtgtagcaccaccagcccaccagataaaggccccccaaagagtaaactaaaagtgagcccagcgttgactgtagaaccatgagcacatgaaatgggtggtgtcagtcactcagctgtgggtaaatgaaacagtaattttctgctttaggggtatatgtatgtttgttattttgcttgtgttattttgaggctttagttgaaatagttactgtatgtcatctttcaggttaatttattagatataattccgaaaatactttttttatcctaagcggattatttctgcctaagagcagttactaatagtattactaatattaataataatgagatttgctgagcacttgctacatgccagatgtttggtatacattttcatttaatcctcacaaagcacgttataggataggtaccattatgatgtccatttacagataaggaaaaggactcaggaaaactgcccaaagtcacatagctaataaccaccatctcatactgtttagtaaaaagtagtaaatgggctgggcatggtgacacacacctgtaatcccagtgctttgagagaccaaggtgagaggatcatttgagaccagcagtttgaatacagtgagctatgatcctgccattgtactccagcctgggcaacagatagagaccctgtctcaaaaaaaaaa

SEQ ID NO: 87505 - DNA, 443 bp, Homo sapiens
  misc_feature (1)...(443): n = a,t,c or g
ctaaataaactccatnaggagccgcgcaannnnnggnggaggnggcgcgggcggttgttgcggcagcaccagcggcggcgggagctcgtgttttacgaagagctgcacacgcagcgggccgggggcaacgtgcgggagcgcgggcgcacccagccgctgaacgaggcggtcgccgcgctgcggaagatcatccccacgctgccctcggacaagctgagcaagattcagaccctcaagctggcggccagatgtcattgtttccagagaaggagaaaatggacaggctagagactctggagctggataactaaaaataaaaatatatgccatagattttcttggaaattagaagagcaaaatccaaattcaaagaaacagggcgtggggcgcacttttaaaagagaaagcgagacaggcccgtggacagtgattcccagacggct

SEQ ID NO: 87506 - DNA, 2392 bp, Homo sapiens; identical to SEQ ID NO: 65737

SEQ ID NO: 87507 - DNA, 394 bp, Homo sapiens
agccgctggacttgctggacgacatgaaccactggtacttccgcctgctggaactgctacccgaactcccgagaggcactcagcttagccacgcggaaatgctacagggcgtgatcactatattctcgactctgcacgcagtgctggccgagccagcccctgcaccccctgatggtccccaccttgccatccagacaggcctgctcgctccggaacttgacatctgcatcgacaaaaggagcttttggcaatgactcggccgcgccctgacacctgcagaacgcaggtgctgacgcccgttctggctgggaccccggaatcctatcctgccggaagacggacgggagggatgggaccacaacttgacctgcccagttgtactaaccaaatacat

SEQ ID NO: 87508 - DNA, 5255 bp, Homo sapiens; identical to SEQ ID NO: 72467

SEQ ID NO: 87509 - DNA, 280 bp, Homo sapiens
tttttttagcccagagggcctttattatttttttaagcacgtataatgccacgaagtcgtaggaaataagttgcaaaaggctaagttccttcccattggttcctacaaagggtgcttccttgggtaggaggaggacggcgctttatttgaacccaagaacctgcgacttgggcttgtttttttttctgatcattttccttcacacgtttcaggaagctatctcggctcttaaagggcttaatgggctcaatacgcacattaattctcgtcgacgcggccg

SEQ ID NO: 87510 - DNA, 736 bp, Homo sapiens
  misc_feature (1)...(736): n = a,t,c or g
tcatatactctatttggttctgttgtaacagattagctccagggtttataatcccaacctatagactgtttatacaggtttttaatcccacctatcctgttgtttgttctgtagcacataacacctcctaacatcatctctaatgttgtgctttattatgtatgttatatatagatttgtctcagattagaatgtgaattccccaagggcagagagttctttgtattttgctcacggatacatccaaaagcctaaaatggtgtcttggcatgtaatagaagtttaaagtgttccataaatgataaatgaatgaaggaatagttgccatccaggtgaatctaaaataaaggctgttaccttgctaccttctcacctaatactattttccctcttctcttgagggagaaacaaactgttgctacaaatctcactcttcaggagatatatcccccccatttactctttgtcaaagcttaacagtgtcaacaccatttgcataatatagtaattattgtctaaacaagaacaaatatatacattagtaggtgaattttcagttgcacaatcttttagtttgcataactaaggaatatgaaaatatctttagtctagggcgtagtgtctccgtgcctataatctcagaactgtgggaggccgaagcagatggatcacttgtagcctagggagttttggagactgtcttgnggcagttgcagaccctgttttctattgttaa

SEQ ID NO: 87511 - DNA, 351 bp, Homo sapiens
cttattcataaaagaatgagtttggacccaccccctgactccatctcaaaaattatatgaaaattaatttttcacagtttttatggttttatttcaacacaaaacatgcacatgagctgtctattccctttctttgctgtgctgcctggcattgcgactggtgactctgatggccagctgggctgccctttccatgatggctttgcagttccagaggacacattgtgagctatctcaggacagtaagattttctgcatgtcagcagcccttccaagtccttgacaatgcgtaccagaaacttccagaagccgctgggcagcatgtgctttgtgttttcattgctcctctat

SEQ ID NO: 87512 - DNA, 1096 bp, Homo sapiens
cggacgcgtgggaaaaaaaataaggttattcagaaatataacacaaaaagtttatttgaagttaaggaataataaatctgtagattaaaaggggaaataacatacttggaaaaattaacccaagactgtcaacattgcaaaaatttatgttaaggttttgagcttagttaagtttttgagatggagaataattcagaaatccaagtagaaatgtaagaatgagtactattatgaatagactcagtggttgtaactagttgcaatgttagtttgtgattagaaggtttaaatgcaatataaaccttgtgaaaaacaggaaacaagaaaccacctttacctttgcttttctcttggattattagggaggtgttcctgtgggcttagcatctaaaccttttcagattctttatggacacaccaacgaggtactgagtgtcggcatcagcactgagctagacatggcagtgtcaggatcaagggatggaacggtgattatacataccattcagaaaggtcagtacatgaggactttacgaccaccttgtgagagttctctgttcctgaccattcctaatttggctatatcttgggaaggacatattgttgtctactccagcactgaagaaaagaccaccctcaaggataagaatgcattacatctgtttttctataaatggcaagtatctagggtctcaaatcctgaaggaacaagtatcagatatatgtataatcggagaacacattgtcacaggcagcatacaaggattcctgtctataagagatctccacagcttgaatctcagcatcaacccattagccatgcgactgcctatccattgtgtttgtgtcaccaaagaatacagccatattcttgtaggtttagaagatggcaaattgattgtagtgggtgttggcaagcctgctgaggtaaaacctagcatcagtaatttcatttctcatgctgttggggattactttggttctccttcattccaactgattgagaagtcaccattagggataaacaaattaaaagccaaatttgatttttcaaaaggcagtaaataaaaacaggataaagctgttaaaaaaaaaa

SEQ ID NO: 87513 - DNA, 825 bp, Homo sapiens
  misc_feature (1)...(825): n = a,t,c or g
cggatcgaatcttccgtgatttaacaattcctggacttagcccagcagaacgttcagccatatatgtggccacggtagaaacattggctcagttacattccttgaatatacagtcactgcagctggaaggatatggtataggtgctgggtactgcaaaagacaggtatcaacctggacaaagcaatatcaagctgcagctcatcaggacatccctgccatgcaacagctatcggagtggctaatgaagaacttgcccgataatgacaatgaagagaatttgattcatggagatttcagactagataacatagttttccaccctaaagagtgtcgagttatagcagtgctggattgggagctgtcaaccattggtcatcctttgtcagacttagctcatttttccctgttctacttttggccaaggacagttccaatgataaatcaaggttcttatagtgaaaactcagggataccatcaatggaagaactgatttcaatatattgccgctgcaggggaattaattctattcttcctaactggaatttctttcttgccctttcatattttaagatggctggaatagcacagggagtatatagcagatatcttctgggaaataattcatctgaggatagctttttatttgccaatattgtgcaacctctggcagaaactggactacaactctccaaacgaactttcagtactgtactcccacagattgatactactggacagttgtttgaacagactcggaaaggtcaggaagttcttataaggcgaagcggccgctctacacnaacnngngtggntctgctgcctg

SEQ ID NO: 87514 - DNA, 489 bp, Homo sapiens
  misc_feature (1)...(489): n = a,t,c or g
agaagcgnnnnnnnncactgagacctgaggactntgcgacgccaagcttggcacgaggaggatctggtgccaaggggtcggcaggtgccctgtgacctgcctccccctggagctgcttctagagccaaagggaaagaagcagacacaggcttgtgaagtgcttgcaggagacagaacgctgaggaggcaccagcttctcactttccctccttcctggagaatcacaccttctgcagggaggctccccacacagatccctccctgcaccatggcctttgcagcctctctggctgagctccaagcagaggccagctgccccatctgcctggattacatgaaggaccactcattgtgggcacaacttctgtcgctcctgcatccacaagggctgggaagacctacaagatggcctcccctggcctgtctgcctcccgcactgccctgaagagaacctcaggagcaacacccagatgtgccacatgactgatn

SEQ ID NO: 87515 - DNA, 1236 bp, Homo sapiens
ggaggaaggcgcagggggccaggtggaaatcttttccttgaaccggccctcgccccgcaccgtcaagtccttcccactggcagcccctgtgctctgcatggagtatatcccggagctggaggaggaggcggagagcagagacgagagcccgacagttgctgacccctcggccacggggcatccaaccatctgcctcgggctccaggatggcagcatcctcctctacagcagtgtggacactggcacccagtgcctggctgagctgcaggagcccaggtctgcagcctgtgctctgcctgcgacacagccccttccacctgctcgctggcctgcaggatgggacccttgctgcttaccctcggaccagcggaggtgtcctgtgggacctggagagccctcccgtgtgcctgactgtggggcccgggcctgtccgcaccctgttgagcctggaggatgccgtgtgggccagctgtgggccccgggtcactgtcctggaagccaccaccctgcagcctcagcaaagcttcgaggcgcaccaggacgaggcagtgagcgtgacacacatggtgaaggcgggcagcggcgtctggatggccttctcctccggcacctccatccgcctcttccacactgagaccctggagcatctgcaagagatcaacatcgccaccaggaccaccttcctcctgccaggccagaagcacttgtgtgtcaccagcctcctgatctgccagggtctgctctgggtgggcactgaccagggtgtcatcgtcctgctgcccgtgcctcggctggaaggcatccccaagatcacagggaaaggcatggtctcactcaatgggcactgtgggcctgtggccttcctggctgtggctaccagcatcctggcccctgacatcctgcggagtgaccaggaggaggctgaggggccccgggctgaggaggacaagccagacgggcaggcacacgagcccatgcccgacagccacgtgggccgagagctgacccgcaagaagggcatcctcttgcagtaccgcctgcgctccaccgcacacctcccgggcccgctgctctccatgcgggagccggcgcctgctgatggcgcagctttggagcacagcgaggaggacggctccatttacgagatggccgacgaccccgacgtctgggtgcgcagccggccctgcgcccgcgacgcccaccgcaaggagatttgctctgtggccatcatctccg

SEQ ID NO: 87516 - DNA, 672 bp, Homo sapiens; identical to SEQ ID NO: 65744

SEQ ID NO: 87517 - DNA, 2526 bp, Homo sapiens
tttcgtgcttctaggaagtagaacgccggctcgcatgcctgcccgcccgccagcctgccgggtacggccttttccgccggggcttccaggtcaaagaattcgcctttgccgctaccgctttcttaccctccgcacccgttaagttctccggtcgggcggcagtctctgaacacttagccgcgccatccggggtcacaccgcctggaaggaggtgacgggggcggcgcggggcgcggacactccccgctgagagtccgcctgccatggactcggaatattacagcggcgaccagtcagatgatggtggtgctaccccagtacaggatgaacgggattcagggtcagacggtgaggatgatgtaaatgagcaacactccggatcagacactggaagtgtagaacgtcattcagagaatgaaactagtgatcgagaagatggcctccccaaagggacatcatgtgacagactctgagaacgatgagcccttaaatcttaatgctagtgactctgaaagtgaggagcttcacaggcaaaaggacagcgactctgaatctgaggaacgtgcagagcctcctgcaagcgattctgaaaatgaggatgtcaatcagcatgggagcgactctgagagtgaagagaccaggaaattacctggtagtgactctgaaaatgaggaacttcttaatgggcatgcaagtgactcagaaaacgaagatgttgggaagcatcccgccagtgattctgagattgaggagctccagaagagtcctgctagtgactctgaaacagaagatgctctaaaacctcaaatcagtgactctgagagtgaggaacccccaaggcaccaagccagtgactccgaaaatgaggagcctcccaaacctcgaatgagtgattctgaaagtgaggagcttcctaaacctcaggtcagtgattcagaaagtgaggaacccccaaggcaccaggccagtgactctgaaaatgaggagcttcccaaacctcgtatcagtgactcaaaaagtgaggaccctccgaggcaccaggccagtgactcagaaaatgaagagcttcccaaaccccgaatcagtgattcggaaagtgaggatcccccaaggaaccaggccagtgattcggaaaatgaggagctacccaaaccccgagtcagtgactctgagagtgaggggcctcagaaggggcctgccagtgactcagaaactgaggatgcgtccagacacaaacagaagccagagtcagatgatgacagcgacagggagaataagggagaggatacagaaatgcagaatgactccttccattcagacagccatatggacagaaaaaagtttcacagttctgatagtgaggaggaagaacacaaaaagcaaaaaatggacagtgatgaagatgaaaaagagggtgaggaggagaaagtagcgaagagaaaagctgctgtgctttctgatagtgaagatgaagagaaagcatcagcaaagaagagtcgtgttgtctctgatgcagatgactctgacagtgatgctgtatcagacaagtcaggcaaaagagagaagaccatagcatctgacagtgaggaagaagctgggaaagaattgtctgataagaaaaatgaagagaaggatctgtttgggagtgacagtgagtcaggcaatgaagaagaaaatcttattgcagacatatttggagaatctggtgatgaagaggaagaagaatttacaggttttaaccaagaagatctggaagaagaaaaaggtgaaacacaggtaaaagaagcagaagattcagattctgatgataacataaagagaggaaaacatatggactttctgtcagattttgagatgatgttgcagcgaaaaaagagcatgagtggcaagcgcagacggaaccgcgatggtggcacctttattagtgatgcagacgacgtcgtgagtgccatgatcgtcaagatgaatgaagctgctgaggaagacagacagttgaacaatcaaaaaaagccagcactgaaaaaattaactttactgcctgctgtagttatgcaccttaagaagcaggaccttaaagaaacattcattgacagtggtgtgatgtctgccatcaaagaatggctctcacctctaccagataggagtttgcctgcactcaagatccgggaggagctgctgaagatcctgcaagagctgcctagtgtgagccaggagaccctgaagcatagtgggattggacgagcagtgatgtatctctataaacaccccaaggagtcaaggtctaacaaggacatggcagggaaattaatcaatgagtggtctaggcctatatttggtcttacctcaaactacaaaggaatgacaagagaagaaagggagcagagagatctagaacagatgcctcaacgacgaaaaatgaacagcactggtggtcagacacccagaagagacctggaaaaggtgctgacaggagaggagaaggctcttagacctggagatcctggattctgtgccccgtgcaagggg

SEQ ID NO: 87518 - DNA, 2685 bp, Homo sapiens
gacaagataataaagtacaaaatggttcgttacatcagaaggatacagttcatgacaatgactttgagccctaccttactggacaggcaaatcagagtaacagttacccctcaatgagcgacccctacctgtccagctattacccgccgtccattggatttccttactccctcaatgaggctccgtggtctactgcaggggaccctccgattccatacctcaccacctacggacagctcagtaacggagaccatcattttatgcacgatgctgtttttgggcagcctgggggcctggggaacaacatctatcagcacaggttcaattttttccctgaaaaccctgcgttctcagcatgggggacaagtgggtctcaaggtcagcagacccagagctccgcgtatgggagcagctacacctaccccccgagctccctgggtggcacggtggttgatgggcagccaggctttcacagcgacaccctcagcaaggcccccgggatgaacagcctggagcagggcatggttggcctgaagattggggacgttagctcctccgccgtcaagacggtgggctctgtcgtcagcagcgtggcactgactggtgtcctttctggcaacggtgggacaaatgtgaacatgccagtttcaaagccgacctcgtgggctgccattgccagcaagcctgcaaaaccacagcctaaaatgaaaacaaagagtgggcctgtcatggggggtgggctgccccctccacccataaagcataacatggacattggcacctgggataacaaggggcctgtgccgaaggccccagtcccccagcaggcaccctctccacaggctgccccacagccccagcaggtggctcagcctctcccagcacagcccccagctttggctcaaccgcagtatcagagccctcagcagccaccccagacccgctgggttgccccacgcaacagaaacgcggcgtttgggcagaccggaggggctggcagcgatagcaactctcctggaaacgtccagcctaattctgcccccaagcgtcgaatcccaccccgtccttgaaaaactgaaggctgctcacagctacaacccgaaagagtttgagtggaatctgaaaagcgggcgtgtgttcatcatcaagagctactctgaggacgacatccaccgctccattaagtactccatctggtgtagcacagagcacggcaacaagcgcctggacagcgccttccgctgcatgagcagcaaggggcccgtctacctgctcttcagcgtcaatgggagtgggcatttttgtggggtggccgagatgaagtcccccgtggactacggcaccagtgccggggtctggtctcaggacaagtggaaggggaagtttgatgtccagtggatttttgttaaggatgtacccaataaccagctccggcacatcaggctggagaataacgacaacaaaccggtcacaaactcccgggacacccaggaggtgcccttagaaaaagccaagcaagtgctgaaaattatcagttcctacaagcacacaacctccatcttcgacgactttgctcactacgagaagcgccaggaggaggaggaggtggtgcgcaaggaacggcagagtcgaaacaaacaatgagggcgaaccagtttcttacatgttctaacgtttgactttgaaaacagtttaaaacacgtgtgcttggtcagctccagtgtgtcgtcccgtgcgggggttgagtgttgcatctttgcctttcttgtcgttgatttttgcccagatggatctgcatttatttgtactttttctatgtattataatcctgtagaagtcactaataaaggagtattttttttgtcagcttatcaatcagactgatctaatgtgaaatgtaagtatccttaaaaacaaagcatctattttggcagaaattgtgttcttaaattcagtcatttgatattctgtgagacttcatatttctcatccctttattgctttttagcaaacataagaaaccatgagtcattttgtcatttagagtattctgataaaatctcttgaaaatactgaaatcaaaaggttaatgattttttgttcattctgatttgtcattttattatctgttatcggtctaaagtgctaatttacccatttgatttttctgctagacagataacttttaatttttcaaatttggcagacacttttttttttttttgaaaatttttcccttccagatctgtttgcccactgaacagccaccccgtccctcactgtcctggtgtccgattgggctggatggtgttggggcatgatgtgtggaggaactggaaggtgctttaggtctggttcagggtcgggcattctttgttgtttgcacatctttttaaattttacaccttttcttaagaatttctaaatgccgtcttaagtttttataccaataatgctgagctttaagtgtaaggatctggtagtacagacagtgtgattggatgatgctgctgggtttgtaaatttcatcgtgtgtgtctaattttttttcccgttgaaatggggtaaaaacaaaacaaaactttttttaggaaggatggaatttgctgtcatgttttgtgggatgaggggaccctttgagctcactaccaccgggagttttgagttgaagcatgaaaatggtgc

SEQ ID NO: 87519 - DNA, 431 bp, Homo sapiens
ggaattcccgcttgcggggtgcgccctgggaccggctgtgcgtggcgttttgcccttatcgcttgctcccgcgtaacggtgtgcgttcgtgaaatcggccacgaccaagaccccagtggggagggcctgcgcgccgctcagagagaccctttcatggtctgacctacgagaaacatggcaaccagcgccgtccccagtgacaacctccccacatacaagctggtggtggtgggggatgggggtgtgttcataattgctcttaacatcctatctttccaaaccatcttagcgcctggctactatccctacatgtgtaacatctacctgttgcatacggccatggacaatcacatgccctttcttgacgtatctggacaaacccgggccggtagagggcacgaccatccggtaccaatatctgcggccggggg

SEQ ID NO: 87520 - DNA, 1993 bp, Homo sapiens
tattatttttttttactaaggcacatgacgtagaaatattgaggtacaaaatgcaaatttctgcataagatttttaagatattcattttggaaaatgaaggtgaacatcatctcccagaatattcagcttttagcttgttttttcttttggaccagttcaaccagcaacttgtacctagcgatacagtcttccttgctcttggacgggacacatctggctattttgtcccagcggtcagaggatccccttgggtactgctgcaacgccagttccagaagtttctgttgattttgagtccacggctcctctgcagaccgagctctctcttttctcaggctctcctcgtcgctggactcgttttgttctgctatgtcaaagtccttctgccgcttggctctggacttctcctctggctccggctttgctgtagcctccagcagcctggctggcttccgcctccgaggccgggcatcagtggccccggtctcctgctcaccggagtctccctcctgctcctcctccgctgccaccccctttgcgtcctctcgctgggtgatcatgtcatcgggcaaggtggtggccgttctgatgggcctggaattctgaactgtcgatttgagttcggagagtctaaccattcctggggagcaggtcactgaatccttcagttgcttggctttggttgtcacatctgtcacagatcgacccaattcgtgggcaatcttttcccatcgacctggagtccctcctgggaacttaaccatacttcttgtcagttggctgaggtcctcttctgtccattcaggtgcctgttttttctgtgttcggttcctgttttccaaccaatcatccatttgttcctcaatttcttctatggaagttccatgatcataagactgaatatatgtagtttctaaaggtgtgtatacaggaaattcaggttttggttttttaactttcttctgtttttgaagtgtttcaagttcagttctagtcagtgcatcttccttttccttcaatcttgtttctttatatttagcataaaactgcccagcatcctggatgaggtgaggtaatgcttttagtgtaaggcaaaaccaaatccccagtttgcatggaagcaaatcatgccactgtggtttcatcagcaatctttcatttttttctgaagcaccgagttttgatacatccacactcttgctgccagtcttttttttcttttctctcttttttctacttagtagttcatccagttgtttttccaggtagattgaccaaaccacagcataatgacccactgtgagaataatgaacaagagtaatgccagctcagcattgctcatttttctcacccgcctgtagtagaatacaggctgtcgccaatctggaagtccattgatcagaatatcatcatacctctgccttcgttcatcatcctttaaaacttcataaatggccaccaattgtctaaactgagtttctgcattttcatctttattcttgtctggatgtaaagttagtgaaagcttacgatatgcttttctgatgtctgcagatgatgcatcctgctgcaccccgaggaactggtagaagttgagctgcacctcctccactaagtcaaacaactccaggttctccgctctcccagccgcgcgccggcgccacgggggggcaaccacacaacagcaacccacaacaccggcgtccgcggcggcggcggcgggaacggcaccagcccgagctggcggcgtccaggaagctgcgccggctgggagcaaggagccgtcatcgcgctgggctcggaaaggtcacccgccgcgcagctccgttggccgagagctgggacgtggcgggcggcgctggctgtggggaacagcgcctgtcagtgaaaagcgcgggcaggcgcaccggagcggcccgccaggtggctggccccagacagagcgcggaggcggcgggagccggctaccattctgatgttggagcggccgc

SEQ ID NO: 87521 - DNA, 474 bp, Homo sapiens
tttgagttcagtacactaggccgtgcggtggaattctgtctggctagtcctgtctagcgcgcccatttcgagcccaagtttccagctcgggtttccgggctcagaattttccaggagtgggttcttgggcagtggctgtgggagcaggaatggcgcagctagagggttactgtttctcggccgccttgagctgtacctttttagtatcctgcctcctcttctccgccttcagccgggcgctgcgagagcccctacatggacgagatcttccacctgcctcaggcgcagcgctactgtgagggccatttctccctttcccagtgggatcccatgattactacattacctggcttgtacctggtgtcagttggagtggtcaaacctgccatttggatctttggatggtctgaacatgttgtctgctccattgggatgctcagatttgttaatcttctcttcagtgttggcaacttc

SEQ ID NO: 87522 - DNA, 427 bp, Homo sapiens
tcccagcgaacccgcgtgcaacctgtcccgattttagctttctcttcagctcgccatggaccccaactgctcctgtgccgctgcaggtgtctcctgcacctgcgccagctcctgcaagaagcaaagagtgcaaatgcacctcctgcaagaagagctgctgctcctgctgccctgtgggctgtgccaagcgtgcccagggctgcatctgcaaaggggcatcggagaagtgcagctgctgcgcctgatgacgggacagccctgctcccaagtacaaatagagtgacccgcataatccaggattttttgttatttgctacaatcttgacccctttgctacattcctttttttgtgtgaaatatgtgaataataattaaacacttagacttgaaacactaatgcttcagaaaatgaattgaacaagggggg

SEQ ID NO: 87523 - DNA, 1015 bp, Homo sapiens
atcatcaacgttactaaatcagacgctgggagttatacctgtatagccactaaccattttggaactgctagcagtactggaaacttggtagtgaaagatccaacaagggtaatggtacccccttccagtatggatgtcactgttggagagagtattgttttaccgtgccaggtaacgcatgatcactcgctagacatcgtgtttacttggtcatttaatggacacctgatagactttgacagagatggggaccactttgaaagagttggagggcaggattcagctggtgatttgatgatccgaaacatccaactgaagcatgctgggaaatatgtctgcatggtccaaacaagtgtggacaggctatctgctgctgcagacctgattgtaagaggtcccccagaggctgtgacaatagacgaaatcacagataccactgctcagctctcctggagacccgggcctgacaaccacagcccccatcaccatgtttgtccattcaagcccaggactccgttctcgtggggctggcaagcagtcagtacagtcccagaactcattgatgggagacatttcacagcgaccgtggtgggtttgaacccttgggttgaatatgaattccgcacagttgcagccaacgtgattgggattggggagcccagccgcccctcagagaaacggagaacagaagaagctctccccgaagtcacaccagcgaatgtcagtggtggcggaggcagcaaatctgaactggttataacctgggagacggtccctgaggaattacagaatggtcgaggctttggttatgtggtggccttccggccctacggtaaaatgatctggatgctgacagtgctggcctcagctgacgcctctagatacgtgttcaggaatgagagcgtgcaccccttctctccctttgaggttaaagtaggtgtcttcaacaacaaaggagaaggccctttcagtcccaccacggtggtgtattctgcagaagaagaacccaccaaac

SEQ ID NO: 87524 - DNA, 1569 bp, Homo sapiens; identical to SEQ ID NO: 58960

SEQ ID NO: 87525 - DNA, 1938 bp, Homo sapiens; identical to SEQ ID NO: 62955

SEQ ID NO: 87526 - DNA, 413 bp, Homo sapiens
cggacgcgtggggcagtctatttcatttgcctcttttgggatcctgatactacagactatgttgcctacgtagctaaagatccagttaatcaacgagcctgtcacatattggaatgccacaatggaatggcccaagacgtcataagtaccatagggcaggcttttgaactccggattaaacagtacttgaaaaatccttctttgaatacttcttgcgaaagcgaggaggtgcatattgatagccatgccgaggagagagaagatcatgaatattacaatgaaattccagggaagcagtcaccagtaggtggcgtttcagatatgcggatcaaagttcaagccacggaacatatggcttactgccccatacagtgcgaacagctgtgctatttgcctggaaactacaagtgcag

SEQ ID NO: 87527 - DNA, 1132 bp, Homo sapiens
aattccagtttgaaagggcaaaagcagcagtggagtcagatacagagttttgggataagatgcaagcagaatgggaagaaatggctcggaggaactggatatctgagaaccaagaagcccagaaccaagtaaccatctcggctagtgagaagggatattactttcacactgaaaaccccttcaaggactggcctggagcatttgaagaaggcttaaaaaggctgaaggaaggggatctgccagtcaccatcctgttcatggaagcagcaattttttcaggaccctggggatgcagaggcatggcagttcctcgggataacccaggcggagaatgaaaatgaacaagcagctattgtcgccctccagagggtgcttagaattacagcccaacaacttaaaaagcttggatggcttgggctgtgagttatactacactggcccatcagcaggatgcttgtgacgctgtgaagaaatggattaagcaaaatccaaagtacaaataccttgtgaaaagcaagaagggatctccaggcctcacccggcggatgtctaagtccccagttgatagctctgttctggaaggggtgaaggaattatatctggaagctgcccaccaaaatggagatatgatcgacccagacctgcagacaggtctaggggttctgttccacctgagtggagaatttaatagagcaatagatgcatttaacgctgccttaactgttcggccagaggactattcactatggaaccgcctcggggcgaccttggcgaacggagaccgcagcgaggaagccgtggaggcctatacgcgagcactggagattcagccaggattcatccggtccagatacaacctaggaataagctgcatcaacctgggcgcctacagagaagcggtcagcaattttctcactgccctcagtttgcaaagaaagagcaggaatcagcagcaagttcctcatcctgcaatctctgggaatatctggggctgccctcagaattgcgctctctctgatgggaccaaccagaactcttccaggcggctaatcttggtgacctggatgtcctcttaagagctttcaacttggatccttgaagaaagaataataccagtactaataatcccaaa

SEQ ID NO: 87528 - DNA, 401 bp, Homo sapiens
ctctccacagtcaaccagtacaaaataagggacactttctgctcctattcagtgatggagctctgcaccaaaggtcttgggaaccaagtggaagtgctaaagaccagagggatcaacctctcctgcgtccggacctgtgtggtggtggcggaggagaggccccgcggttgcactccagcagtccttctctaagctcttcaaagacatcgggctgtccccgcgggctgtcagcaccacttttggatcaagagtcaatgtagcaatatgtttacagggaacctcagggcctgatccgactactgtgtatgtggatctgaaatcactaagacatgacagggttcgtctcgtggaacgtggcgcccctcaaagtttgcttctctcagagtctggaaagattttac

SEQ ID NO: 87529 - DNA, 465 bp, Homo sapiens
tggcccaccaccccctccggatccatggtgttaaggtatacactgaaaaatgtagacaaaaggcaaattattttggaccttcagattaagttttgtaggaaattgtgagattgatttggagatcaaacgatatttttgtagagctggtgtgaaaagtatccagattcatggtaccatgcgggtgatcctggaaccgttgattggagatatgcccttagttggagctttgtctatcttcttccttaggaaaccacttttagaaattaactggacaggactgacgaatcttctggatgtccctggattgaatggtttatcagatactatcattttggatataatatcaaactatctggtgcttcccaatcgaatcaccgttccacttgtcagtgaagttcaaatagctcagttgcggtttcctgtaccaaagggtgttctaaggatacattttattgaagctcaaga

SEQ ID NO: 87530 - DNA, 816 bp, Homo sapiens
ggcaggccggcggggagccccccggggcgcacggagcccgcgcgccctccgggaccctcccccgtccctgggccggacctgtgggcgccgggagtccgggcagcgttcggcgcgccgggccggggtggcgggcggccccgggacccgggcagctggagaaggagccggagcccggccaggatgagaaggtgacgccgccgggggcgccactcgctttgtggggggaagatgctcgcctactgcgtgcaggatgccaccgtggtggacgtggagaagcggaggaacccctccaagcactacgtatacataatcaatgtgacctggtctgactccacctcccagactatctaccggaggtaccagcaagttctttgacctgcagatgcagcttttggattaagtttcccatttgaaagtggccagaaggaccccaagcaaaggatcatccccttcctcccaggcaagatcctcttccgcagaagccacatccgggacgtagctgtgaagagactgaagcccatcgatgaatactgccgggcacttgtccggctgcccccccacatctcacagtgtgacgaagtcttccggttcttcgaggctcgacccgaggatgtcaaccctccaaaagagcaaggcccctcacccccagatgcagtcctcccatatggtgtcaacaagggcaaacaggagctaaaggcaggcccaaactggcccggcaggactcaccacgtggtcaactgcgtgacccagaaatgcctctttgtgttccattttaaattctcatccagtggaaataaggaatctaaaagtctttga

SEQ ID NO: 87531 - DNA, 1892 bp, Homo sapiens
atgcagaggaggaagacatgtgctaaagaaactggagccaaatgtctagacactgacttaggaagctgctgcgtaccacaaaagggctaccacaataaagagctgggcgctgccgaggctcggggcgcgcgcagttggcgtctgccagtgccaagactgtgccgcccccacagccgaggcgcgaaagggggacgcccggcctctgggccgctgccttcgctttctcttcgttgttgcgaacgccgtccgctcaggaggcgccccgcgaccggcgcgatgagtgccaacgaggaccaggagatggaactagaagcattacgctctatttatgaaggagatgaaagtttccgggaattaagtccagtttcttttcaatataggataggtgaaaatggtgatcccaaagccttcttaatagagatttcctggacagaaacatatccccaaacacctccaattctatctatgaacgctttttttaacaacaccatatcatcagctgtaaagcagagtatattagccaagctacaggaagcagtagaagctaatcttggaaccgctatgacctatacattgtttgaatatgccaaagacaataaagagcagttcatggagaatcacaatcccatcaattccgcaacatcgataagcaatatcatctcaattgaaactcctaatacagccccatcaagtaagaaaaaagacaaaaaagaacaactttcaaaagcccagaagcgtaagctggcagacaaaacagatcacaaaggagaacttcctcgaggctggaactgggttgatgttgtgaagcatttaagcaaaactggctctaaggatgatgagtagcacttggaatttgagacaaggaaagagcattctttaaagagtaaaactgggttcaaaatctttcattactattttctggtattgaggcgactttttataaaacacaattttttgtatgtttcttacattaaaaaggttgtaagttgaaagttcatgaagagatcttgttgtattaaattattttcacaaacttgccttaataaaaggtgaaaatgttactgtttagtatactttatgaagccccttgagctttataaatggacaggcatggggaataagaatcagtgttaatttaaatgatcttatcctggtggatgtgctattttcttaaaggagtatgaagcccttttcaaactatcatcccagtggagcggagtactcagtgaacagttactccatagtgcaatccatattaataggcttcttctcttaagtcttcatctcttcttttgcttaattactgaaccgtaaattacttcagagaaatttaaatgctggtatttgaactttatacatgatactttttgtagtttcttttaatttttgaaagatgaactgcttccttttaataaattaatatctatttatacttttctcttgatttgggtcaagatgtttgatcatgagtgctttgagtggtatgtggaataggagaatataaaaacaaatctgccaaatacactagaaagcattttagtaagaaatgctggccctttcttaaaacatttctcttgcatataccaggatgggagtaaaagatgccttaatatttagtttttgtattgttggagacattgattttaataaaatcctatttatctgctgttgtgtgcttttagttgttggataactgaggtctcctaaatggttcaacataaaaccacatttcaagtcttgtttctttttggagtgtcttttcaagtattcaaatgtatttctcaacctgagcatctttttaatcatatacatgggaagtttttaaacgctgaagggttacccctgcttgatttacagattttcattcttcccgaaactatttggctattctt

SEQ ID NO: 87532 - DNA, 399 bp, Homo sapiens
aacaattgaagattattacaggccaatattcttcatgaacacgtatgtaaaagttattaacagacttttagccaataaaattcaacaatatgtaaaaaagataatatcatcgccaagtggggtttcttccaagaattcagggatggcataaccttaaaaaagatcaatcaatgttttccatatcagccgactaaaaaggaaaaacaatatgtttatcttaattggtgtagaaaagcattttactatgcgcaacatcaattcttgatgataactctgaacaaactgggcgtagatggaaacttcttcatcctgatatcgggcatctacaaaaaatgtaaagctaacgacttacttgatggtgaaagacagaaggttttaccctgagatgatgaacagggt

SEQ ID NO: 87533 - DNA, 443 bp, Homo sapiens
tttcgtccaacggttaccgtggtcatcgctgacgacagcgacaagccagagcgcgttagtggcccctacgtggaacactatctcatgcccttcggcaagggctggttcgcaagccggaacctggccgtgtctcaagtaaccaccaagtacgtgctgtgggtggacgacgacttcttcttcacggcgcggacgcggctggagaggcttgtggacgtgctggagcggacgccgctggacctggtagggcaggggctgcaggatgtgggggtggagaagggccttgaacaggctaaggccacagcgggggcgctgcggccaggaacggccagccctaggacaaagagagaaccacgaagtggggcctgggaactgtctgggtcctgcaggggtgaagcggaagaggatggggcaggggtaccctcgaaggcaccggagcgcagact

SEQ ID NO: 87534 - DNA, 679 bp, Homo sapiens
  misc_feature (1)...(679): n = a,t,c or g
tttcgtcttgccctcggattacattacgttactagaggatatgtctgcaattttaattaaagaaatgagaccccagctgcctgcaaacccaggccaaccccatttggtacaagcacaatacggagctctccagcgccggaggaggcccggaggcccgaggttcgcagccccaggccccgagtccgctcaggacgcctctctctgaggatcccgggcccaaaccaaagagcaagtatgatttttagaactgtggaacttcatcctttcattttagcttctcctgcctttgcttgccggaatcgggtgaaagcagaatatttaaacttctgccaaactcccaagaagctgactttgcaatgtgcagcgtcattcctcaggttgttttccgcccatcaaatgccagtggcctggattgaccgttgccactgtgcctggagagcccaggaaatacactatggtgatgaaaacgactgtggcaatccagcagtctgctctaactggatgattgtaagagggtaaagaagatagtgctgaactttgtgatggttatatattccagtaaacacccagtaaagaacaaaactatntgggaagggtcaagtcaaggggcccccaataatgggggtaattggngaagaaagncaaacggggaccaaaagttcaaggacccccaatcgaa

SEQ ID NO: 87535 - DNA, 3785 bp, Homo sapiens
ttttttttttttcttcccacctctataaacccgcccagtttcatactttggagcgaaagatttcgaaactttttcccatgcagccggaaataactggggtcagcatgaaacagtacattttcttcctagaggcagttacatggaaaaccaggttattatcaggttatttagcaagtatggaatccaaacaagaggagactaatcttaagacctataactcgtccatgaaggcttggggcacacttttctaccaccagaatgccttagcttccagaaagctgtggactcttccctctccgtcttggtctggctgagtaccgctactgctcagtcacttcctgcagccataccgtcaggccagcttggcctaaaagctgttatctctggtcactggtttgtgttgttacagccactgctactaacagttaaggttctgaagggggcatgtcaattgctcccaggtaccaactaggagacacaataatcctattagtttgttctcccaaacccactccagtttatcaggtaatatgctctgtaaggttctttccaaccccattagcacatacatagattacctataatttcacctaatgtaatctaccttcctactgaggattgaggttttaacgtttgttttttttccccccactttcttgatcagtgattctcaaccatgtaggaattaatgaaaccaattctgtatcaccactgcaaccaagacagcaataccaagtgatatgtatttttcaaactaatgtcattttgttctctatactgtaaaaaacgagaagatgcagtcctcaacttagaactcaatactaggaagggtcaagttgtcaaaaaatgtctttcaacagtagaaaagtttgctttcaaattaaaaaacaaagcacgtattgcaaacatcgtgtaatgataaaattacagaaaaaaatatattcagaatgacccatggcattcacgccataccagaattttgcctgtaacaaaacagagaattttatcccaaaaagtaggttaggtccatgctggctaaaaacttcagtcccagacccaataaatgaggatgaaatacatagtgcatgcttaacagacattgcatatacatcaacaattctttaatgcccctctctagggttttgagggaaggagggatgaaatgtggacatgtgcactcacaaaggcagaattttcttcctattataaaaagtcacacgtgaccctttactatgttttgggcaatagccaagattttatctgtgggaatccacctttgaaaatcacaacaaaaatcaatagtaagtgatttaatataaaatatacaaatttctcagtatgaggactttcacagaaaaggaaggagacaacaatgaaaatgaattttcttaaaaaataacattcccttattttgtccctgctactcaacactcaaaaacaagtctgtacaaaactaggaacacagaaaaggaccagagaggatgttacactgtaaagtcttaggacctactctaaacttctgtcctcatcaagaccctcacctagagacctgagggttcccaggtccactggagaaagtaagtagtctccgatcatcacccttgcttcaccgaagatggcctcaggtcactcgctgtcaaacttaatagaattgacctggacagagattgagcctccccggtagctgccccgcttcttcttggttttctcatgccgaaaggacttgcctttggtgaacttcaaaacctgattggctcgctctccccagtctccggctgcacctcgcttggcatcaaaggagttgtccgcaactcgtgaatccacctcaatttcctcctccctgacccttcggaatggggatgatgcccttttttctcctttcttcctttttggaaatgtgttaggggtctgaagctttatcttcttggcctgaggagtctctgcctccttggcagcctcattctgcttccgcttctttaatgaacctgatttggaaactaccactgccgcctttttcttttcttcttcctcctcctcactgttcttagctgcttttccattctgggcagtcagtgcagaggtgccattggccttgggggcttgtggtcttggagagcccttgcccttgagcttctcttcctcttcctcactggagtcatcagaagaagaactgttgctgctctcagcctttcctttctttgcagaggctggcttggaaggggctgcacctcctgctaccttctgtggcttcttcttaactgcagacttagatgtcttctcttcctcctcctcactgctggagctgtctgaatcagagctgctgtccctactaccctgaggagcctgcttggcaggcagagatagagctgctttggcagtcgccttgggcttagtggtggccaccatcttctttgtcttctcctcctcactggagctgctctcttcctcactggagctgctgtcagcctttctcgtcagaagcttctggccaccgcccacaggttgcttgggggctgcagctggcttcactgcaggtgacttggtggtgacagctggcttatttgaagaattcttggtggtaccagctggcttagaaggagcttcatcatcctcagagctgtcagagtctgagctgtctgaagagctctctgctgctttctttgctggaggtggtttagtggttgctttagagactactgccttagttgggggtttcttctcttcttcagaacttgaatcagactcatcactgctgtcttcactgctttccacaggctgctgcttctccacagccttcttgggaggctgggttcccagagacttctttggtgggggagcagaaggcggggggactgaactgtagggacctggtttatttttcatgggttttttttgctcctcttcctcgtcactggaggaatcctcactgctagaactcttccgggtaggggtggtagctgctttcactggggccttggccacaacttgctttttaggtacagtcttcttgggggtggctgctgccttctcctcctctgagtcatcactgctactgctgctgctgctgctactgctgctactggctgctttaccattggctattttaggtgctggctcgagctggtttgggaggggctttagtctgagctttaactgtcacagggtgttatctttggcttctggttctttggtggctcatcctcggagcttgagtcagaatcagaatcagagctcttggccttcttaggaggagcttggcctgccttggcttggggcttaactcccttctggacaggctgtttcttttggtcctcctcatcatcatcatcactggactcttcactgctgctactctctgatgctttggctgcagccttcccaggaggcagaccgactcgcttggcaggtacagcagccttctttgctggaggcccttgaacttcctcctcctcctcgctgctgtcctcactgtcactggatgaggccttcttcttagctttcttagccactggtccatttgcctgtaactttcgctctgggaccttggcagacctgttgagccagaagctatagatgtctaagagggaagaggcattggcatcctgctgtgtagctcctgtcgctttggcgaacttattggccacctctgagagttggttatcgcgcaggaagccgagcacgaggggatacaggtcgctgggaaccacgcggcgaatgccggcgtccgccatcctccaggcaatacgcgtcactaccgttgtcgacgcagcacgacccacgaattc

SEQ ID NO: 87536 - DNA, 417 bp, Homo sapiens
tttcgtgccgcctgcgcctctgggaccatgttgcgctggctgggggacttcgtgctgcccaccgcggcctgccaggacgcggagcagccgacgcgctacgagaccctcttccaggcactggaccgcaatggggacggagtggtggacatcggcgagctgcaggaggggctcaagaacctgggcatccctctgggccaggacgccgaggaggtgggtcgccgccggggcgcccgctgagcgtatggagggctgcgggcgctggggacactgcgaggaccgaggagggcggcggcttgaggcgttgccaagagaggaaggaggaactgtggcgcccaacgctccggtggcttcaaaaactcgggcgtggggccgcgaccggcgaccccggtaacagaagtgggtcataatacgaaagtc

SEQ ID NO: 87537 - DNA, 1014 bp, Homo sapiens
cttcagtggaaaccttataggccaggagagagtggcatgacatatttaaagtgctgaaggaaaatatattcaagcataaaggagaaatgaagaccttcccagacaaacaaaagctgagggatttcatcaacactagacctgtcctacaggaaatgctaaacagagtacattaatcagaaagtaaacgatgttagtgagcaataagaaatcacctgaaggcacaaaactcactggtaacagttaagtatacagaaaaacccagaatagtataccactgtgtctgtgacatgtaaactactcttcagtaaaatgactaaaagattaactgataaaaaatagtgactagaacaacttttcaagacatagtacaataagatataaatagaaacaataaaaagttaaaaagcagagggaggaagttaaagtgtagagtttattagttttcttttagcttaaaataatgagttattagacagtacttacaagcctcatggtaacctcaaatcaaaaaacatacaatggatatatacaaaataaaaagcaggaaattaaagcacaccacaagagaaaaccaccttcactaaaaggcagaagggaagggaggaaagaaggaagagaagaccacaaagccaccggaaaacataacaaaatggcaagagtaagtccttacttatcaatataacatcgaatgtaaatgggctaaactgtcaatcaaaagatatagagtggctgaatagatttaaaaaaaaaaaaaacccagggatttgttgcctacaacaaacactccccctggactgaaaatgaagggattgaaaaaaattttccttgccaatggaaagcaaaaaagaacaggatccctatttttatttcaaacaaaatagatttcaggacaaacctttaagaagagacaaagtccctatttaatgataaagaggtcagttcaccaagaggatataatagttttaaatatttatccacctacactggagcacccagatttttaaagcaaatttt

SEQ ID NO: 87538 - DNA, 393 bp, Homo sapiens
  misc_feature (1)...(393): n = a,t,c or g
tgccagctgcatatgctagcctcagagattacaccatgcatgtctaactacgcacgaccggtacagtgaaactgcgaacggttcattatatgagcaatgggttcttggggcgcttgctcctcttctacttggacaactgtggtgattctatagctaatacatgcgggcgggcgctcacccccttggtgggggggatgcttccatttataagataaaaatcgagcgggtcataccctctccggcctggggcggagggcgggcgccggcggctttggagactctagatgatcttgggccgatcgcacgctgcccgtggcggtgaccacccattccaacgtctgtcctatcaactgtggatggnggtcggcgtgcctaccatggcgaccacgggtg

SEQ ID NO: 87539 - DNA, 2222 bp, Homo sapiens
aatggagggcagtagaaagaccacagctcgcctcaacctggggtttatggggctcaattattatcccccgccagcttccaaattgtttttgtttactttttttttgtttcattttctagttattttattttgtttttttttttttaaaaatatgtttatctttaatgatccaagattctgcaagtcacgctgatatacccagaattgggtggaaatacagcatctcagcagtgctactgccagcctgggggtggggagctggatgctggctgaaggacccccatggtgaagtcgattccaacctcacgggagcctcagtgccctatctccatggaaaccagcctggcactgggatggggccctagggagcctgcatgaacatctctgagaggtatttcccattaaaaacaaccacaggtgcccacccccaccccaagctactgcccagctccccctcctctctgtgttgtcggccaagataaaggaaatgggagtgaccacttaacgacaaacaaaagcagattgtacctcctattagggaagaaaaaggaagggaaagggtagtaagggagctgcacttcaagctcagaattctgccaagaccctagagcggctatggcagacagcggtgcatgactgccagagggcagcgctacccaaacccctggaggtaccctttgttactgctggggcccctgctgctgtgggggaaagacgggtcttcaaggctgcttcctgccatctagcgctgcccaatgtttggaccaaaaggggatggcacctaggatggctctacaactccatactcagtacgaaaagagggctcccaggatctcaatgtggtatcagggatgagagtttgcccaaactccctccttcccaccctgctggactgtcagagctctgggctaggaagaactccagggaaggccaggatgagtgggggaaggagacaagaaaatggtctccaatttggcatcaaaacagagtaagttcaaagaaacaaaaccttgatttttttatagcaggttctcctggccagctcatgacagcaggtctccacccactcagggatggcccaataaaaagttgggcaaagcaagggcatggctaccctcagggcagtgcatggaactcagaaaagtgagtctacaggatgcaggagagaacagcagagcccacagctctgccactctgatatgtcctccatcagtcccacgtgccctaggcactgacctcatacctgcctcaggagcagcttccttcaggctgagtcctggcaggggaaagttcccaggcaggtgtcccagaaggaacatgagtgttctctgcagggccctgcctgagctcttcaggggatggagaggaggccacccactcctcatgccaggtgcaatgctccccagtcccttttcaagagggggaagaagccagcactgtgggccccaggtggccccatctcaggaatgacagggcattctgcaggggtggcacattctgaggctcttaggccctgtgcatctggatgaaggagaggacgtcctccttggacagcttgtcctggtcctggggcttctgggagtcatgcacacgaatgccatccccccactcccagaagagccggccatagtagcaaatgtgaaatggggcaatggagtctgcagggaggtcaaaagtagagtccttggttttcttgttgtagaagaacttcttcttgaagcttttgctgaatcccatagtccagggctcattcactgtcctgacgatgtagaggcccatgggtacaaagtgccggtcatcacgccctgtgtagctgagctttggggtgccactggagcccttgatgatcttcatctccaacctgacaaaaatcttctccatctcttccagtctgtacacctccttcaccctgatgggattcatgtcgggccgactaggcttggaaacggctttcacaaatttctcggcaagctgaattctacaatccaaacagtctctctgagaggcaagccaaggatgcctccaccagcacccctacccccagggcattttcacagctccagtaggagaaccttctgaatctgcggcaagactgctctaagaggcagcacccatgtcccccaggaagcccgccctgcccttctccaccgacgtctttattcctgcgcctcgtgccaagctgggcgtaatcgtgttctactgtatcaatcgcaccccccccg

SEQ ID NO: 87540 - DNA, 539 bp, Homo sapiens
gcggccgctgccacccacgcccagcaggagtgcattgcccagcgcctggcgtagggtgcggctgatgcgacagatgtggctcatggcgtccatgaagaggaccagcttcagcttggccgtgttgatctggttgtagtcctctatgtactcctctatcacctgcatcatcttactctcactggtgatgagctcgtaggacttgacatcggagcctggtgacatgaagtccccgtaaagaatgggctggaaggggcagaccttgttgaaggtcccctcccactgctccatgcagcgcttgaggagctggtcgaaccagctgcggtcctcctcattcaccagtcggtcccggaacacggcggcagttctcgtgataccacagtcgcagcagctgcacttgggtccttcgaccttgggccgggtcagccatgagcatgccttgggaagaccttgggagaggtcccttcaggtttgaaggtgtagtgggacttggctggagtgggcagcagctgggaggtgatggttgcatacaccatgatggt

SEQ ID NO: 87541 - DNA, 385 bp, Homo sapiens
tcagtactacccaaagtaatctacagattcggcacaatccctagcaaaattccaacagcactccccttttttttgcagttctagaaaagctattcctcaaattcacgtacagttgcaagggccctgagtaaccaaagcagtctttaaatgggacaaaattagaggactcacactccccaatttcagaacctactacagagttgtggtaatcaaaccaccatggtacttgcataggaatagacatatagatcaatggaatgggactgaatccagaagtaaacccatacaactgtagccaattgatttttgaccagggaaccacatttattcaggggggaaagatagttcaccaaatggtgctagatttctgcatacaaaagaacaa

SEQ ID NO: 87542 - DNA, 551 bp, Homo sapiens; identical to SEQ ID NO: 76166

SEQ ID NO: 87543 - DNA, 1877 bp, Homo sapiens
attactctttctatgaaataattatttctttgaggctgacagtccagggaggagatagcccagtggaaggactgtcctacttgttacttatgcaaggccagaagcacctggttcatctgaaggtgaagagaaaccattttgtgaataactttccagtctacagataccacaatggcctcctggggcaagaatcgcctttcatctcacatgactgccactatgaaggctacatagaaggaggggcaggttcttttgtttctgtcaacatctgtgcaggtctcaggggcacatcctcctgattaaggaggaaaaatcttacagcattgagcccatggactcttcaagacggtttgaacatgtgttatacaccatggcacatcaagcctggcaacaagggagcaggaagcctcatgatctacaggcactgtcctacttgtggtcacacaaaaagtacgtggagatgtttgtcgtggtcaacaaccagcggttccagatgtggggcagtaacgtcaatgagacggtccagacagtagtggatgtcattgctctggccaacagcttcactaggggaataaacacagaggtggtgctggctggaatggagatttggaccgagggggacctaatagatgtcacagtggacttgcaaatcacactcaggaatttcaatcactggagacaagagatgctcttccatcgtgcaaaacacgatgttgcccacatgatcgttgggcatcaccctggacagaatatgggccaggcctttctcagtggtgcctgctcaagcggttttgcggcagctgttgaatccttccatcatgaagatgtgctgttgtttgcagccctgatggcccatgagctcgggcacaacctgggtattcagcacgaccactcggcctgcttttgtaaagataagcacttttgcctcatgcatgaaaatatcacaaaagaaagtggcttcagcagctgcagctctgactacttctaccagttccttcgagaacacaaaggggcctgcctatttaacaagccacggcccaggggccgcaagcgtagggattctgcctgtggaaatggtgtggtggaggacacggagcagtgtgactgtggttctctatgtcagcatcatgcatgctgtgatgaaaactgtatactgaaggcgaaagcagagtgcagtgatggtccatgttgtcataagtgtaaatttcaccgtaagggatatccttgctgtccttctagtcgttcctgtgatctcccagaattttgcaatggtacatctgcattatgccccaacaacaggcataagcaagatggctcaaaatgtcatacaatttacgagtgccttaaagttcattgtatggaccctaataatcagtgcttacaattatatggatatggtgcaaaatcagcctcacaagagtgttacaattcaatgaacagcaaaggggaccaatttggaaactgtggcatttctaccagtcctgggtcacaatatgttcggtgttcagatggtaatatattttgtgggaaacttatatgttcaggtattacaggcttaccaaaaatcaatctccaacatacaatgattcaggtccctcagggagatggctcatgttggagcatggatgcctatatgagtactgacattcctgatgaaggagatgtgcacaatggcacttactgtgcaccaaacaaagtctgcctgaattccgcctgcacagataaaaccccagtgatttctgcctgcaacccagaaaaaacgtgtaatgggaagggagtttgtaatgatttagggcactgccactgtaatgaagggcatgccccccctgactgtgttactgcaggaagtggaggtagtgtggacagtggccctcctg

SEQ ID NO: 87544 - DNA, 500 bp, Homo sapiens
  misc_feature (1)...(500): n = a,t,c or g
gagagccnnnaatgatncccttgccgcnnnaatggaagccgtacgcctgcagaaccgcgccggaatagcaggttgagggccgacagggacgggaagtgaagaggacagcgtggcgaatctcccctgtgtggcggccagccagatgccgacggcggagcacgccacagcctcggagctggggcacagcaacaggagagacacagacagggtgaggccccaatgcaagctctggaccccagggcagagcccggcccacaagcccaaagccatgccgcctgccagcctgagccagaaccacccagagtcctgctagatcccacggcagcccgggggggtgtccagggcaggccagtctttcccgacaccctgggctggcaccccatccccaaacccacactccatggccacagtcggggaggctcccttgtgcctctgaaccactccctctaggagggatccgcccaacccctggcctggagccaaagggacgggatcttatg

SEQ ID NO: 87545 - DNA, 844 bp, Homo sapiens
  misc_feature (1)...(844): n = a,t,c or g
cacaggtaacacccggggcctctcgctggaaataatggggcaggtgcttggccatggatttgctcaggagggaaggtcttgcggaaattccggacactattctttttaatgttagtatctgtcggtattttctatacagatgtaaaacacacgtaaacatgaccctgcttttttttctcaccaagtaagcatttcagaataacttaaacttgtgatcatgtggaccagggcttcccttattcattcctgagaccaaaccattcgtcaggacaccaatgatttctgccgtagctcctccttaatgggagccttgcccgtgactatgtcgagatcttgaaattatgtccttgccacacccgattcagcccctttgttagggttgctgcaaatgaccccatgcaagttattcagtcttaatgtgccctccttagggtctctctaaagatgtaacgcatgggtgtgtggattgtaaaagacactcctgaccgggcgtggtggctcacatctgtaatcccagcagtttgggaggctgaggcgggcagatcacgagggtcagagttcgagaccagcctggccaacattgtgaaaccccatctctattaaaaatacaaaaattatccgggcatgggggcgtgcgcctgtaatcccagctactttgggagttgaagcacgagaattgcttgaagcccagagggtaggggtggagtgaacccaaatcgcgccactggacttcaacctgggggacaagaacaagaccccgtttttcttttttgggggggcgcttnnggggggggggcccgtttagaagaccacgttttttctcccgcggtatgtgaaagttttc

SEQ ID NO: 87546 - DNA, 235 bp, Homo sapiens
ttttttttttttctgaaaaagtctcgctgtgtcacccaggctggagtgcaggggcgcaatctcactgcatcctccgcctcccgggttcaagcgattctcccgcctcagcctcctgagtagctgggattacaggcacccgccgctgctaatttttgtatttttagtagagatgggggtttcaccatattggtcaggctggtctcgaactcctgacctcaggtgatcaacccacctt

SEQ ID NO: 87547 - DNA, 389 bp, Homo sapiens
atttatttgtttagcaatgtatgagcatttgttgagcacctgtcatctaagtactcatcacctctcaccttcttttgggaaataagaattgctttactttgttgggttttttgtttgtttgctttgctttttaagagaagcagtaaaaaatagcagtaaggagtggttttcatccttgttctgatcttggctttatggcccaggatgtagtcttttttggtcagcggaccacatgcacttgaaaagaatgtgtattctgcagtagttggttgtatagtgttttagaaatatcagttagatcaaggtgtttgatggtattattcagatcttctatgtgcgtttttttacttacctaataccagtgtcagagtaaacagatctgtattttt

SEQ ID NO: 87548 - DNA, 401 bp, Homo sapiens
tttcgtcaggcggggagggcctgggcggtggcggcgcccccttgggggggccgcagagcggaggagcagcagctgccaccggccggaagcctgctggctcggccgagaacaatggccgcctgtcactgtggacagctgtctcccaggctaaggcaaggctgcgctcccagggaatgcgggcagggagccagggcggagggcagaggacgagagcgaggaggagagcgcgggcacccactgatgctggcggcctcgggtattcgctttctctctcttctcccaccttgttccttttccccggatgcacgcatgcactagtaatgccgaatttaaaacaacagggaaaggaaaggaaatggcaaaggaagggaaaggaaatggcagacaggaaatggcaagga

SEQ ID NO: 87549 - DNA, 416 bp, Homo sapiens
  misc_feature (1)...(416): n = a,t,c or g
cttgaagagcgcgcattacatcgagctgggcagctaccagtactggccggtcctggtgccccgtggcatccgcctgtacacctacgagcagatccccgggtccctcaaggacaacccgtacatcaccgacggctaccgggcctacctgccgtccaggctgtgtatcaaaagtttgtttattttatctaatgagacagtaaacatctggagtcatttgctgggtttctttctcttcttcaccctgggaatatatgacatgacatctgtgttaccttcagcaagtgcgtccagagaagattttgtaatttgttctatttgtcttttctgcttccaggtctgtatgctttgctctgtgggctatcatcttttttcctgccatcggncagaaaaaacatgtcgaagatggatggcattat

SEQ ID NO: 87550 - DNA, 9426 bp, Homo sapiens
atgcgcgggggcgtgctcctggtcttgctgctgtgtgtcgccgcgcagtgccggcagagaggcctgtttcctgccattctcaatcttgccagcaatgctcacatcaacaccaatgccacctgtggcgagaaggggccggagatgttctgcaaacttgtggagcatgtgccaggtcggcccgtccgaaacccacagtgccggatctgtgatggcaacagcgcaaaccccagagaacgccatccaatatcacatgccatagatggcaccaataactggtggcaaagtcccagcattcagaatgggagagaatatcactgggtcacaatcactctggacttaagacaggtctttcaagttgcatatgtcatcattaaagctgccaatgcccctcgacctggaaactggattttggagcgttctctggatggcaccacgttcagcccctggcagtattatgcagtcagcgactcagagtgtttgtctcgttacaatataactccaagacgagggccacccacctacagggctgatgatgaagtgatctgcacctcctattattccagattggtgccacttgagcatggagagattcatacatcactcatcaatggcagaccaagcgctgacgatctttcacccaagttgttggaattcacttctgcacgatatattcgccttcgcttcgaacgcattagaacgctcaatgcagatctcatgacccttagccaccgggaacctaaagaactggatcctatgttaccaagacgctattattattcaataaaggacatttctgttggaggcatgtgtatctgctatggccatgctagtagctgcccatgggatgaaactacaaagaaactgcagtgtcaatgtgagcataatacttgcggggagagctgtaacaggtgctgtcctgggtaccatcagcagccctggaggccgggaaccgtgtcctccggcaatacatgtgaagcatgtaattgtcacaataaagccaaagactgttactatgatgaaagtgttgcaaagcagaagaaaagtttgaatactgctggacagttcagaggaggaggggtttgcataaattgcttgcagaacaccatgggaatcaactgtgaaacctgtattgatggatattatagaccacacaaagtgtctccttatgaggatgagccttgccgcccctgtaattgtgaccctgtggggtccctcagttctgtctgtattaaggatgacctccattctgacttagagaatgggaagcagccaggtcagtgcccatgtaaggaaggttatacaggagaaaaatgtgatcgctgcccaacttggctataaggattacccgacctgtgtctcctgtgggtgcaacccagtgggcagtgccagtgatgagccctgcacagggccctgtgtttgtaaggaaaacgttgaggggaaggcctgtgatcgctgcaagccaggattctataacttgaaggaaaaaaacccccggggctgctccgagtgcttctgctttggcgtttctgatgtctgcagcagcctctcttggcctcttggtcaggtaaacagtatgtccgggtggctggtcaccgacttgatcagtcccaggaagatcccgtctcagcaagatgcactaggcgggcgccatcaggtcagcatcaacaacaccgcggtcatgcagagactggctcccaagtactactgggcagcccccgaggcctaccttggaaataagctgactgcgtttggcggattcctgaaatacacggtgtcctacgatattccggtagagacggtagacagtaacctcatgtcgcatgctgacgtcatcattaagggaaacggactcactttaagcacacaggctgagggtctgtcattgcagccttatgaagagtacctaaacgtggttagacttgtgcctgaaaacttccaagattttcacagcaaaaggcagattgatcgtgaccagctgatgactgtccttgccaatgtgacacatcttttgatcagagccacctacaattctgcaaaaatggctctttacaggttggagtccgtctctctggacatagccagctctaatgccatcgacctggtggtggctgctgatgtggagcactgtgaatgtccgcaaggctacacagggacctcctgtgagtcgtgcctctctggctattaccgcgtggatggaatactctttggaggaatttgtcaaccctgtgaatgccacggccatgcagctgagtgtaatgttcacggcgtttgcattgcgtgtgcgcacaacaccaccggcgtccactgtgagcagtgcttgcccggcttctacggggagccttcccgagggacacctggggactgccagccctgcgcctgccctctcaccatagcctccaacaatttcagccccacctgccacctcaatgatggagatgaagtggtctgtgactggtgtgccccgggctactcaggagcttggtgtgagagatgcgcagatggttactatggaaacccaacagtgcctggcgaatcttgtgttccctgtgactgcagcggcaacgtggacccctcggaggctggtcactgtgactcagtcaccggggagtgcctgaagtgcctggggaacacagatggcgcccactgtgaaaggtgcgctgacgggttctatggggacgctgtgacagccaagaactgccgcgcctgtgaatgccatgtgaaaggctcccattctgccgtgtgccatcttgagaccgggctctgtgactgcaaaccaaacgtgactggacagcagtgtgaccagtgcttgcatggctattatgggctggactcaggccatggctgccggccctgcaactgcagcgtggcaggctccgtgtcagatggctgcacggatgaaggccagtgtcactgtgtcccaggtgtggcagggaaaaggtgtgacaggtgtgcccatggcttctacgcctaccaggatggtagctgtacaccctgtgactgcccacacactcagaatacctgcgacccagaaactggagagtgtgtctgcccccctcacacacagggtgtgaagtgtgaagaatgtgaggatgggcactggggctacgatgcggaggtggggtgccaggcctgcaattgcagtctcgtggggtcgactcatcatcggtgcgatgtggtcaccggccattgccagtgcaagtcaaaatttggtggccgggcctgcgtacagtgttccttgggttacagagactttcccgactgtgttccctgtgactgtgacctgagggggacgtcgggggacgcctgcaacctggagcagggtctctgcggctgtgtggaggaaaccggggcctgcccttgcaaggaaaatgtctttggtcctcagtgcaacgaatgtcgagagggcaccttcgctctccgcgcagacaaccccctgggctgcagcccgtgcttctgctccgggctgtcccacctctgctcagagctggaggactacgtgaggaccccagtaacgctgggctccgatcagcctcttctgcgtgtggtttctcagagtaacttgaggggcacgactgagggggtttactaccaggcccccgacttcctgctggatgccgccaccgtccggcagcacatccgtgcagagccgttttactggcggctgccgcagcagttccaaggagaccagctcatggcctatggtggcaaactgaagtacagcgtggccttctattctttggatggcgtcggcacctccaattttgagcctcaagttctcatcaaaggtggtcggatcagaaagcaagtcatttacatggatgcaccagccccagagaatggagtgagacaggaacaagaagtagcaatgagagagaatttttggaaatattttaactctgtttctgaaaaacctgtcacgcgagaggattttatgtctgtcctcagcgatattgagtacatcctcatcaaggcatcgtatggtcaaggattacagcagagcagaatctcagacatttcaatggaggttggcagaaaggctgaaaagctgcacccagaagaagaggttgcatctcttttagagaattgtgtctgtcctcctggcactgtgggattctcatgtcaggactgcgcccctgggtaccacagagggaagctcccagcagggagtgacaggggaccacgccctctggttgctccttgtgttccctgcagttgcaacaaccacagtgacacctgtgaccccaacaccgggaagtgtctgaactgtggcgataacacagcaggtgaccattgtgatgtgtgtacttctggctactacgggaaggtgactggctcagcaagtgactgtgctctgtgtgcctgtcctcacagccctcctgccagttttagtcccacttgtgtcttggaaggggaccacgatttccgttgtgacgcctgtctcctgggctatgaaggaaaacactgtgaaaggtgctcctcaagctattatgggaaccctcaaacaccaggtggcagttgccagaagtgtgactgcaacccgcacggctctgtccacggtgactgtgaccgcacatctgggcagtgcgtttgcaggctgggggcctcggggctccggtgcgatgagtgtgaaccgaggcacattctgatggaaacagattgtgtttcctgtgatgatgagtgtgtaggtgtgctgctgaatgacttggatgagattggtgatgccgttctttctctgaacctcactggcattatccctgtcccatatggaattttgtcaaacctggaaaatacaactaaatatctccaggaatctttattaaaagaaaatatgcaaaaggacctgggaaaaattaagcttgaaggtgttgcagaagaaacgggacaacctgcaaaaagaagctccactaggatgttagcgagtacccaaaaggtgaatagggcaactgagagaatcttcaaggagagtcaagacctggccatagccattgagaggctgcagatgagcatcacagaaattatggaaaagacaactttaaatcagactttggatgaagatttcctactacccaattctactcttcagaacatgcaacagaatggtacatctttgctagaaatcatgcagataagagacttcacacagttgcaccaaaatgccacccttgaactcaaggctgctgaagatttattgtcacaaattcaggaaaattaccagaagccgctggaagaattggaggtattgaaagaagcagcaagccatgtcctttcaaagcacaacaatgaactaaaggcggctgaggcgctcgtgagggaagctgaggcaaagatgcaggaaagcaaccacctgctgctcatggtcaatgctaatctgagagaattcagtgataaaaagctgcatgttcaagaagaacaaaatctgacctcagagctcattgtccaaggaagaggattgatagatgctgctgctgcacaaacagatgctgtacaagatgctctagagcacttagaggatcaccaggataagctacttttatggtctgccaaaatcaggcaccacatagatgacctggtcatgcacatgtcccaaaggaacgcagtcgacctggtctacagagctgaggaccatgccactgagttccagagactagcagatgttctgtacagtggccttgaaaacatcagaaatgtgtccctgaatgccaccagtgcagcctatgtccattacaacatccagagcctgattgaagaatcggaggaactggccagagatgctcacaggactgtgactgagacgagcctgctctcagaatcccttgtttctaacgggaaagcggccgtgcagcgcagctccagatttctaaaagaaggcaacaacctcagcaggaagcttccaggtattgcattggaactgagtgaattgagaaataagacaaacagatttcaagagaatgctgttgaaattaccaggcaaaccaatgaatcactcttgatacttagagcaattcctgaaggtataagagacaagggagccaaaaccaaagagctggccacgtctgcaagccagagcgcggtgagcacgctgagggacgtggcggggctgagccaggagctgctgaacacatctgccagcctgtccagggtcaacaccacattacgagagacacaccagcttctgcaggactccaccatggccactctgttggctggaagaaaagtcaaagacgtggaaattcaagccaaggttttgtttgatcggttgaagcctttgaagatgttagaggagaatctgagcagaaacctatcagaaattaaactgttgatcagccaggcccgcaaacaagcagcttctattaaagtcgccgtgtctgcagacagagattgcatccgggcctaccagcctcagatttcctctaccaactacaataccttaacactaaatgttaagacacaggaacccgataatcttctcttctacctcggtagcagcaccgcttctgatttccttgcagtggagatgcggcgagggagagtggccttcctgtgggacctgggctccgggtccacacgcttggagtttccagactttcccattgatgacaacagatggcacagtatccatgtagccagatttggaaacattggttcactgagtgtaaaggaaatgagctcaaatcaaaagtcaccaacaaaaacaagtaaatcccctgggacagctaatgttctggatgtaaacaattcaacactcatgtttgttggaggtcttggaggacaaatcaagaaatctcctgctgtgaaggttactcattttaaaggctgcttgggggaggccttcctgaatggaaaatccataggcctatggaactatattgaaagggaaggcaagtgccgtgggtgcttcggaagctcccagaatgaagacccttccttccattttgacgggagtgggtactctgtcgtggagaagtcacttccggctaccgtgacccagataatcatgctttttaataccttttcacctaatggacttctttctctacctgggttcatacggcacaaaagactttttatccatcgagctgtttcgtggcagagtgaaggttatgactgacctgggttcaggacccattacccttttgacagacagacgttataacaatggaacctggtacaaaattgccttccagcgaaaccggaagcaaggagtgctagcagttatcgatgcctataacaccagtaataaagaaaccaagcagggcgagactccgggagcatcttctgacctcaaccgcctagacaaggacccgatttatgtgggtggattaccaaggtcaagagttgtaaggagaggtgtcaccaccaaaagctttgtgggctgcatcaagaacctggaaatatccagatcaacctttgacttactcagaaattcctatggagtgagaaaaggctgtttactggagcccatccggagtgttagcttcctgaaaggcggctacattgaattgccacccaaatctttgtcaccagaatcagaatggctggtaacatttgccaccacgaacagcagtggcatcatcctggctgccctcggcggggatgtggagaagcggggtgatcgtgaggaagcacacgtgcccttcttttccgtcatgctgatcggaggcaacattgaggtacatgtcaatcctggggatgggacaggcctgagaaaagctctcctgcacgctcccacgggtacctgcagtgatggacaagcgcattccatctccttggtcaggaatcggagaattatcactgtccaattggatgagaacaatcctgtggaaatgaagttgggcacattagtagaaagcaggacgataaatgtgtccaatctgtacgtcgggggaattccagagggagaggggacgtcactgctcacaatgagaagatcgttccatggctgtatcaaaaacctgatcttcaatttggaacttttggatttcaacagtgcagttggccatgagcaagtcgacctggacacctgctggctgtcagaaaggcctaagctggctcccgatgcagaggacagcaagctcttgccagagccccgggcttttccagaacagtgtgtggtggatgcagctctggagtacgttcccggcgctcaccagtttggtctcacacaaaacagccatttcatcttgccttttaatcagtcggctgtcagaaagaagctctcggttgagctaagcatccgcacgttcgcctccagcggcctgatttactacatggctcatcagaaccaagcagactacgctgtgctccagctgcacgggggccgcctccacttcatgtttgaccttggcaaaggcagaacaaaggtctctcaccctgcactgctcagtgatggcaagtggcacacggtcaagacagactatgttaaaagaaaaggcttcataactgtcgacggccgagagtctcccatggtgactgtggtgggagatggaaccatgctggatgtggagggtttgttctacctaggaggcctgccctcccagtaccaggccaggaaaattggaaatatcacccacagcatccctgcctgcattggggatgtgacggttaacagcaaacagctggacaaggacagcccggtgtctgccttcacggtgaacaggtgctacgcagtggcccaggaaggaacatactttgacggaagcggatatgcagctcttgtcaaagagggctacaaagtccagtcagatgtgaacatcacactggagtttcgaacctcctcgcagaatggcgtcctcctggggatcagcactgccaaagtggatgccattggactagagcttgtggacggcaaggtcttgttccatgtcaacaatggtgctggcaggataacagctgcatatgagcccaaaaccgccactgtgctctgtgatggaaaatggcacactcttcaagctaacaaaagcaaacaccgtatcactctgattgttgatgggaacgcagttggcgctgaaagtccacacacccagtctacctcagtggacaccaacaatcccatttatgttggtggctatcctgctggtgtgaagcaaaaatgcctgcgcagccagacctcgttccgcgggtgtttgaggaagctagctctgattaagagcccgcaggtgcagtcctttgacttcagcagagcgttcgaactgcacggagttttccttcattcctgtcctgggaccgagtcctgaacttcaagcagaatcctcagttggaatcattgctaatattttgaggagaagtgtatgtgtgaattaagaatctcttcagttcatatttcatttccaactcaggttaagtgtttctggggagagatgttgtgtttacgttacactaaaaccacatgtgcaacaaatacctccattaaatggtctaaaatgtaaa

SEQ ID NO: 87551 - DNA, 1391 bp, Homo sapiens
tttttttttttaaggttttaaattttgtttttaaagaggaaaaaaaatataacatcatggttacacagaggctctggagattccctgggttcacaatcctacttctgccatttactagctgtgcgatcttgaacaaatttctgagcttctctgagcctgtttcctcatctctaaaacagagataatgacaatgttctacttacagggttgttttgggcatgcatgcaaacaaaacagattttatgatcgagtcatagttctggaaaggaagaaaaacccagatttgcgcacacaagtgttaagtaaatgtgagccctcactattgttcatacaacatggcagtgacacacatacattagacaagagattattacacactgagcctccacccagtctccctattatcctcccatgggctcctaattgatgactaaacagtgcattgctgggtggcttccagtagtttctttcttcactttgctgcaactttgaactgaaggtgatccacatggtacatgacattcttcctgttttcttcacaagacaaggatgatgtttaaatgggcatttgtttgcggaatgacttggagagttcctctctttcagccatcttttctcaaagactaaggctgggagatccttgttcatttgtaacatcaggaactgcttcttttcctccttctctcttctagaagactgtcaaggagcccgagtgagggaagcagaccaaccatggtcttggagaaaagaaaatagggtttccatcccttctgtcatcactccccagccagtccgcggacaccgcagccaggaactgtcagaggtgacaagggaatcccgtcataatgccaaggaccaaggagcagtggccaggttcccttttcgccctccccggcttgactcccttggaccgctcccgccaatcctggtctctcctactcctccccgccacatcgggtcgccccgcccccgggtgcctttggtgttttccgccgtcggccgcaggcgcctcgtctcagataaagtggatccagcctgcggctccggagtccgccactgcccgggtgctcgggcccacgtagagcatagtcacggccgccgttgttgtcccagaactcgtgacctgtcacacggtagcgcaaggcgaagagcagggcgcccccaatcggcggcgcgggcaggcggaaggcgaagcggtcggcgcgcggcgggggcggggccggaccggcgtaggcggctggcgcgcgcttctcgtaggccaggtccaccacgcgcgcgctcccggccacgcccagcgggcccgcctcggcgcgttccaggcagatgcgctgcgtcagcaagcgggcggcgaagccgggctcgctggccggctccagggcggcgcgcgcctc

SEQ ID NO: 87552 - DNA, 718 bp, Homo sapiens; identical to SEQ ID NO: 65672

SEQ ID NO: 87553 - DNA, 1829 bp, Homo sapiens
gaagctatcctcatcctcttcccgacctcggtcctgtgaagtccctggaattaacatctttccatctcctgaccagcctgccaatgtgcctgtcctcccacctgccatgaacacggggggctccctacctgacctcaccaacctgcactttcccccaccactgcccacccccctgggaccctgaagagacagcctaccctagcctgagtgggggcaacagtacctccaatttgacccacaccatgactcacctggggcatcagcaggggcatgggcctgggcccaggctatgatgcaccaggacttcattcacctctcagccacccatccctgcagtcctccctaagcaatcccaacctccaggcttccctgagcagtcctcagccccagcttcagggctcccacagccacccctctctgcctgcctcctcattggccccacatgtactgcccaccacctccctgggccacccctcactcagtgctccggctctctcctcctcctattcctcgtcatccacatcatctcctgttctgggcgccccctcttaccctgcttataagcctggggcctccccccaccaccgccgtgtgcccctcagccccctgagtttgctcgcgggcccagccgacgccagaaggtcccaacagcagctgcccaaacagttttcgccaacaatgtcacccaccttgtcttccatcactcagggcgtccccctggataccagtaaactgtccactgaccagcggttacccccatacccatacagctccccaagtctggttctgcctacccagccccacaccccaaagtctctacagcagccagggctgccctctcagtcttgttcagtgcagtcctcaggtgggcagcccccaggcaggcagtctcattatgggacaccgtacccacctgggcccagtgggcatgggcaacagtcttaccaccggccaatgagtgacttcaacctggggaatctggagcagttcagcatggagagcccatcagccagcctggtgctggatccccctggcttttctgaagggcctggatttttagggggtgaggggccaatgggtggcccccaggatccccacaccttcaaccaccagaacttgacccactgttcccgccatggctcagggcctaacatcatcctcacaggggactcctctccaggtttctctaaggagattgcagcagccctggccggagtgcctggctttgaggtgtcagcagctggattggagctagggcttgggctagaagatgagctgcgcatggagccactgggcctggaagggctaaacatgctgagtgacccctgtgccctgctgcctgatcctgctgtggaggagtcattccgcagtgaccggctccaatgagggcacctcatcaccatccctcttcttggccccatcccccaccaccattcctttcctcccttccccctggcaggtagagactctactctctgtccccagatcctctttctagcatgaatgaaggatgccaagaatgagaaaaagcaaggggtttgtccaggtggcccctgaattctgcgcaagggatgggcctgggggaactcaagggagggcctaaagcacttgtaactttgaaccgtctgtctggaggtcagagcctgttggaaagcaggggtagaggggagccctggaagcagggcttttccggatgcctaggggtgggcagtgccagcccctcctcaccactcttccccttgcagtggaggagagagccagagtggatactattttttattaaatatattattatatgttaataaaaaaatcatatcacaaaaaaaaaa

SEQ ID NO: 87554 - DNA, 3029 bp, Homo sapiens; identical to SEQ ID NO: 65456

SEQ ID NO: 87555 - DNA, 6023 bp, Homo sapiens
cggcagcctcagctcctgctccccgtgccgccggccccagcgctgtctcccgggccccctagggcccccgggccctcaagcccggtgcgcgccctcgcgtcccgccggccccctcccccggctgggcccgggggagggtggcgccgtgagagagcggggacagggctctcctgcccgttcccctgcccctgggccgccaggatggaggcggggtcggggcccccgggcggcccgggatccgagagcccaaatcgggccgtggagtacctgctggagctgaacaacatcatcgagagccagcagcagctgctggaaacccagcggcggcgcatcgaggagctggagggccagctggaccagctcacccaggagaaccgcgacctgcgagaggagagccagctgcaccgcggggagctgcaccgggacccccacggcgcgcgggatagcccgggccgcgagagccagtaccagaacctgcgcgagacccagttccaccaccgcgagctgcgggagagccagttccaccaggcggcccgggacgtgggctacccgaaccgggaaggcgcctaccagaatcgggaggctgtgtatcgggacaaggagcgggacgcctcctacccgctccaggacactaccggttacacagcccgcgagcgtgacgtggcccagtgccacctgcaccacgagaacccagccctgggtcgcgagcgtggcgggcgggaggccgggccggcgcacccgggccgcgagaaggaagcgggctattcggcggcggtgggcgtggggccgcggccaccgcgggagcggggccagctgagccgtggcgcatccaggagctccagtcccggcgccggcggaggccacagcaccagtaccagcaccagcccggccacgaccctccagagaaaatctgatggtgagaattccagaacagtcagtgtggagggtgatgccccaggcagtgacctgagcacagcggttgatagtcctgggagccaacccccctaccggctgagccagctgcccccctccagcagccacatggggggcccccctgctggagtgggccttccctgggctcagcgggcacgcctccagccagccagtgtcgccctgaggaagcaggaggaggaggagataaagcgctccaaggccctatcggacagctatgaactctccacagacctgcaggacaagaaggtggaaatgctggagaggaagtatgggggctccttcctgagccgcagggctgccaggaccatccagacagccttccgccagtaccgcatgaacaagaactttgagcggctacgcagctcagcctcagagagccgcatgtcccgccgcatcatcctttccaacatgcggatgcagttctcctttgaggagtatgagaaggcacagaaccccgcgtacttcgagggcaagcctgcctcgctggacgagggtgccatggctggtgcccggagccaccggcttgaacgggggctcccatatggaggctcctgtggtgggggcatcgatggtggtggaagctccgtcaccacatctggagagttttctaatgacatcacagaacttgaggactccttctccaaacaggtaaagtctctggctgaatccatcgacgaagccctgaactgccacccgtcagggcccatgtctgaggagccagggtcagcccagctggagaagcgggagtcaaaggaacagcaagaggacagctcagccacatccttcagtgatcttcccctctacctggatgacacagttccccaacaatcccctgagcgactgcccagcacagaacccccaccccagggccggcccgagttctgggcgccagcccctctcccgccagttcctccaccagtgccatcaggaacccgggaagacggtagccgtgaggaaggcactcgcaggggtcccgggtgcttggagtgccgggatttccggctgcgggctgcccaccttcccctgcttaccattgagcctcctagtgacagctccgtggacctgagtgaccgctcagatcgcggctctgtccaccgccagctggtgtatgaggctgatggctgcagcccccatgggaccctgaagcacaaggggccaccaggcagggccccgatcccacaccgccactacccagcccctgaaggcccagccccagccccaccagggcccctgccaccagcccccaacagtggcactgggcccagtggtgtggctgggggtcggaggttggggaagtgcgaggcagcaggcgagaactctgatggtggagataacgagagccttgagagctccagcaattccaatgagaccatcaactgcagctccggctcctcttctcgggacagtctaagggagcctccggctaccggcctgtgcaagcagacttaccagcgggagacaaggcatagctgggactcgccagctttcaacaatgatgtggtccagaggcggcactaccgaatcggcctcaacctcttcaacaagaagccagagaagggtatccagtatctgatcgagcggggcttcctgtcagacacaccggtgggagtggctcacttcatcctggagcggaaaggcctcagccggcagatgataggggaattcctagggaaccggcagaagcagttcaacagagacgtgttggactgtgtggtggatgagatggacttctcctccatggatctggatgatgcgctccggaagttccagtcccatatccgggttcagggtgaggcccagaaagtggagcgactcatcgaagccttcagccagcggtactgtgtctgtaacccagccctcgtgcgccagttccggaacccagacaccatcttcatccttgcttttgccatcatcctcctcaataccgacatgtacagtcccagcgtcaaagctgaacgaaagatgaaactagatgacttcatcaagaacctgagaggggttgacaatggtgaagacatcccccgagacctcctggtgggcatctaccagcgcatccaggggcgtgaactgcggaccaacgatgaccatgtgtcccaggtgcaggctgtggagcgcatgattgttggaaagaaaccagtcctgtctctccctcaccgtcgactggtttgctgctgccagctctacgaggtgccagatccaaaccgcccccagaggctagggttgcatcagcgggaggtcttcctcttcaatgatctccttgtggtcaccaaaattttccagaagaagaagatcttggtgacgtacagtttccgtcagtctttccccctcgtggaaatgcacatggcagctcttccagaattcatattaccagtttgggatcaagttgctgtctgcagtacctggtggggagcgaaaagtcctcatcatcttcaatgcccccagcctccaggaccggctgcgctttacatccgacctgcgcgagtccattgcggaggtgcaggagatggagaaataccgtgtggagtcggagctggagaagcagaaaggtatgatgcggcctaacgcctcacagcctggaggggccaaggactcagtgaatgggacgatggcccgcagtagcctggaggacacttacggggcaggcgatgggctcaaacggggcgcactcagcagttccctgcgagacctctctgatgcagggaagcgggggcggcgtaacagcgtgggatcgctggacagcaccatcgaagggtctgttattagcagtccacgccctcaccagaggatgccacctccgcccccacccccgccgccagaggagtacaagagccagaggcccgtctccaactcctcatccttcctgggctccctatttggaagcaagcggggcaaggggcccttccagatgccaccaccgccaacaggccaggcctctgcctcctcttcatctgcttcttccacgcaccaccaccaccaccaccaccatcatggccatagccacggtggcctgggggtgctgcctgatgggcagtccaagctccaggccctgcatgcccagtattgccaaggaccgggccctgccccgccaccctacctcccaccccagcagccctctcttcccccacctccccagcagcccccacccttgccccagctgggctccattccaccgcctcccgcctcagccccacctgtggggccacatcgccacttccacgcccatggcccagtcccagggccccaacactataccttgggccggccaggcagggcacccagacggggggctggaggacaccctcagtttgctccacatggccgccaccccctgcaccagcccacatccccactgcccctgtacagtcctgccccccagcaccctccagcccacaaacagggccctaagcacttcatcttcagccaccacccacagatgatgccagcagcaggcgcggctgggggccctggatcccggccaccagggggctcctactcccacccccaccacccccagtcaccattgtcaccacactcacccatcccaccccacccctcctatccacccctccccccaccctcccctcacaccccgcactcaccccttccacccacctccccccatggcccgctgcacgcctctgggccccctggcacagccaacccccccagtgcaaaccccaaggccaagccaagccggatcagcaccgtggtctgatgaatggagagagtgagctggggaacaggaaagtctggggagccacaggagagggaccttgcaccctctttgcttcctcggttttttcaaaaatatatatacacatagcaatgtcctcctccccatgtcctccctgccttgggacccgtcctctcacccccagcagttgccatggggtttccttccagattcgaggatccttgccacttgaagcctggactcagggtgctccagcgctggggagtggtgagggccttccagagatcctcgtactctttctcccgtcttcttcttccccacttttccctggaggtctagctctgtggcctcagacctctgggcctgtgtgagctctctgtgagctctggctggcggagaagggcaggtgtccggagctgtcggggtgaaggcttccctggggctcctctggccgtgtggggctaggagagcgctctgtagagttgtggccaaacttcagctggcttggccctctctctgacctcagggcctggccacacacttccatgtgtctttttgcctgctggaggacacggaccattgatgcacttggtgggtgggaccctgcttgtgttggccccacgtggggcagtgcttcctctctcgagccagtctatgccctttctccagtaggccccagcccagacctcttcggcttcaggaacttgcctcgccctgcaacgttcttatcctgatcaaagtccagacaggttttggggggggctcaggtctgggatgagaagggcactgccctccctcacccatattgcatgcccccccgccattcccttacacctaccccacctacaactgaagacaatgcactttacagatatcacccacacacacctcgctggggcaggggcacccagcatcagccctggggagagaggctcccaaagggccaccatgagcccaagatatccttcctgaggcagagattgaagccatcagagctggggttgggagccagaatgcctgagtccttctgtccgtcagaatctccgctgcctctccagcccttttgcagccctgtttatttattataaatatattttttacaagccccagctcctcttcttgccccgcatatccagctcctcactcagctcctgcctccctctcccctctccaccatgggctgcagtatagacagacagatggaccctggctgtacgaagggccagggccactggggcttgggggcgggggagggtggcagtgggaggggctgtatggagaggagctggggttcaggcattgtcttttttcctccttgtatataagaatgtatatttgatgcctcataaaagaccttgtgctcaaaaaaaaaaac

SEQ ID NO: 87556 - DNA, 507 bp, Homo sapiens
tttcgtgaggggcaggcggcgcccgggagggaggcaccgggccgcgggccaagcctaccgggggtcacaatttgggtctgcagcagaaatgctttcagaacagacagcagcgctggggacaggatgggaatcaatgaatgtacagctggatggagcagagccccaggtggaaaggggaagccaggaagagcggccatggagaacagtaccaggacctctggagcacctgtgctgtgaccttgaagaggagccacagtcccttcaggagaaggctcagtctgctccctgggttcctgcaattccccaggaggggaacactggagactgggagatggcagctgcacttcttgcggctggatcacaggtgagctctgcttcccttggcgtctcctgtggtcccatcactgctgcctttgtattgctttcgcatcagcccattgatgagttggctcacatgatcatcaatggatttccaattcccaaactggacatgctttctcaactaag

SEQ ID NO: 87557 - DNA, 509 bp, Homo sapiens
ctgattgcaggctgtctgtccccagaccccagagcacgtccggcaccaccatgactgggctgttgaagaggaaatttgaccagctggatgaggacaactcctcggtctcctcctcctcctcttcctctgggtgccagtctcgctcctgctccccaagctcttctgtctcccgtgcctgggactcagaggaggaaggcccctgggatcagatgcccctgcctgaccgtgacttctgcggccccagaagtttcacccccctgtctatcctgaagcgggctcgccgggagcgcccaggccgtgtagcctttgatgggatcaccgtcttctacttcccccgctgccagggcttcaccagtgtgcccagccgtggtggctgtactctgggtatggcccttcgccacagtgcttgccgtcgcttctctttggctgagtttgcgcaggagcaagcccgtgcacggcacgagaagctccgccagcgcttgaaagaggagaagttggagatgctgcac

SEQ ID NO: 87558 - DNA, 1655 bp, Homo sapiens
  misc_feature (1)...(1655): n = a,t,c or g
atgcctgcccaggacaccatgaacagagataactactggcccaaggtcccagggccagttagtgccagagccacaagcagtgcccagtctgtctttgaagagcctgaggaccccagtaaccgctcattcttctcggaaatcatctcctccgtgtccgacgtgaagttcagccacagcggccgctacatgctcacccgggaactaccttacagtcaaggtctgggacctgaaacatggaggcaagacccatagagacctaccaggtccatgactaccttcggagcaagctctgttccctgtacgagaacgactgcattttcgacaagtttgaatgtgcctggaacgggagcgacagcgtcatcatgaccggggccatacaacaacttcttccgcatgttcgatcggaacaccaagcgggacgtgaccctgggaggcctcgagggaaagcagcaagccccgggctgtgctcaagccacggcgcgtgtgcgtggggggcaagcgccggcgtgatgacatcagtgtggacagcttggacttcaccaagaagatcctgcacacggcctggcacccggctgagaacatcattgccattgccgccaccaacaacctgtacatcttccaggacaaggtaaactctgacatgcactaggtatgtgcagatcccggcccctgccacccagcctcatgcaagtcatccccgacatgaccttcacgaccgcaatgcaaggaggggaagaaagtcacagcactgatgaggacagctgcagaggtggcagtgtgtggacacaggaagtttgggccccctccctgccccagctttcctaggccagaattgtgtttggcagtaattgtctgtttaaaaaaataaaaaggaaaggaagcgttcaccgccacaaatcataaaatggacatgactgtggagtcttacagttcagggttctttcattcacgtcccttcctgtctcggtctgcggtctttaccacatcaataggactttttatgcgtccgggttaatttttcactccagtgcgtcctgttgcagggaccggagctgatgggagctgcttctcccccatgcctcactggtcccagatcagggctccagggacagatgatgagtctcaaacgagccagccaggggttcttttggttataaatggggcaattcgccctgtctcagagctgatgacctcaccgttgttttttggatggtgaattcatgctgagaatttgcagatgcaagctcctctcctaggtcttctgaatgtcttgaaacatcccaggtcccaggtctggtgcggtttcccgagaggagcggagtggggtttgtcttctgtgtgcctgtgtcctcatctgattcacctgccatttgctgagcctctgctgtgtaccaggcgtggtgctcagccctagaggcagttgacttaccccctgcagccctccctgccgcctcacccttcagcattcactgggcaccttcccggagcggacactgactcccatgcacgattttttggaatcttcctcctgactgtgaggtgggtgttcattcatttcctccataaacaccaacttctcgaagcgtgcctcgtgccaagctggcgtaatgtggttacgatgtcttcattnntcaggcnncgggcctctgacaccc

SEQ ID NO: 87559 - DNA, 5180 bp, Homo sapiens
gcctcgcgggcctcggcccggtgcgagcggctccgcgatgtggctgagcccggaggaggtgctggtggccaatgcgctgtgggtgacggagcgggccaaccccttcttcgtgctgcggcgacgccggggccacggcaggggcggcggccttacgggtcttctcgtgggcaccctggacgtggtgctggactccagtgcccgcgtggccccttaccgcatcctgcaccagacccaggactcccaggtctactggacagtggcgtgtggttcttcccgcaaagagatcacaaaacactgggaatggctggaaaataacttgctccagacactgtccatcttcgacagtgaggaagatatcaccaccttcgtcaagggcaagatacacggaatcatcgcagaagagaacaagaacctgcagccccagggagacgaggaccccgggaagttcaaggaggctgagctgaagatgcggaagcagtttgggatgcctgagggcgagaagctggtgaattactactcctgcagctactggaagggccgcgtgccccggcagggctggctgtacctgacggtcaaccacctgtgcttctactccttcctgctggggaaggaagtgagcctcgtggtgcagtgggtggacataacgcgtctggagaagaacgccaccctgctcttccccgagagcatccgtgtggacacccgcgaccaggagctcttcttctccatgttcctcaacatcggcgagaccttcaagctcatggagcagttggccaacctggccatgcggcagctgctggacagcgagggcttcctggaggacaaggccctgcctaggcccatccggccacacaggaacatctcagccctgaagcgagacctggacgcccgagccaagaatgagtgctaccgagccacgttccggctgcccagggatgagcggctagacggccacacaagctgcaccctgtggacgccgttcaacaagctgcacatccctggccagatgttcatctccaacaactacatctgcttcgccagcaaggaggaggacgcttgccacctcatcatacccctgagggaggtgaccattgtcgaaaaagctgacagctccagcgtgctgcccagccccctgtccatcagcaccaaaagcaaaatgacattcctgtttgccaacctgaaagaccgtgatttcttggtgcagaggatctctgacttcctccagaaaacaccatccaagcagccaggcagtatcgggagcaggaaagccagtgttgtggaccctagcacagagtcttccccagctcctcaggaggggtcggagcagcccgccagcccagcctctcccctcagcagccgccagagcttctgtgcgcaggaggcgccaaccgcatcccagggcctgctgaagctcttccagaaaaactcgcccatggaggaccttggagccaagggggccaaggagaagatgaaagaggagtcatggcacatccacttcttcgagtacgggcgtggcgtgtgcatgtaccgcacagccaagacgcgggcactggtcctgaagggtatccctgagagcctccggggagagctgtggctcctcttctccggggcctggaatgagatggtgactcaccccgggtactatgctgagctggtggagaagtccaccgggaagtacagcctggccacagaggagatcgagcgagacctgcaccgctccatgcccgagcaccctgccttccagaacgagctggggattgctgccctccggcgggtgctgactgcctatgccttccgaaaccccaccatcggctactgccaggcaatgaacatcgtgacctcggtgctcctgctctatggcagtgaggaggaggccttctggctcctggtggccctgtgcgagcgcatgctgcccgactactacaacaccagggtggtgggagccctggtggaccaaggcatcttcgaagagctcacgagagacttcctgccgcagctctcggagaagatgcaggacctgggggtgatctccagcatctcgctgtcctggttcctgaccctcttcctcagcgtcatgcccttcgagagcgccgtggtcatcgtcgactgctttttctatgagggcatcaaggtgatcctgcaggtggccctggccgtcctggacgccaacatggagcacctgctgggctgcagcgacgagggcgaggccatgaccatgctgggcagatacctggataatgtggtcaacaagcagagtgtctctcctcctatcccgcacctccgtgccttgctgagcagcagcgatgacccccctgcagaggtggacatctttgagctcctgaaagtgtcctatgagaaattcagcagcctgagggccgaagacattgagcagatgcggtttaaacagaggctgaaagtgatccagtccttggaggacacggccaagaggagtgtggtccgagctatacctgtggacattggtttctccattgaagagctggaggacctttacatggtgtttaaggccaagcacctggctagccagtactgggggtgcagccgcacaatggccggccgtcgggaccccagcctgccctacctggagcagtaccggattgatgccagccagttccgggaactctttgccagcctgacaccctgggcctgtggctcccacacacctctgctggcagggcgcatgttcaggctcctggacgaaaacaaggactcgctgatcaacttcaaggagttcgtgacagggatgagcgggatgtaccacggggacctgacagagaagctcaaggtgctctacaagctacaccttcccccagctctgagcccagagggaagccgagtcagccctggaggcgacccatttattttcacagagggacagctcctcagaagcatctcctctggcctcagatctggatcttttcctgccctgggaggctcaagaagcactaccacaggaagagcaagaaggaagtggaagtgaggagagaggagaggagaaggggaccagctctccggactatcggcactaccttcgaatgtgggccaaggagaaagaggctcagaaggagacgattaaggatcttcccaagatgaaccaggagcagttcattgagctgtgcaagacgctttacaacatgttcagtgaagaccccatggagcaggacctgtaccacgccatcgccaccgtggccagcctcctgctccgcatcggagaggtggggaagaagttctcagcccgcacaggcaggaagcccagggactgtgccactgaggaggacgagccaccagcacccgaactgcatcaggacgcagccagggagcttcagcccccagctgcaggagacccccaagccaaagcaggcggagacacacacctcggaaaagccccacaggagagccaggtggtggtggaggggggcagcggcgagggacagggctcaccctcccagctgctgtctgacgatgaaaccaaagacgacatgtccatgtcctcctactcggtggtcagcacgggctccctgcaatgtgaagaccttgcagacgacacggtgctggtgggcggggaggcctgcagccccacagcgcgcatcggcggcaccgtcgacaccgactggtgcatctcctttgagcagatcctggcctccatcctgacggagtccgtgctggtgaacttctttgagaagagagtggacattggactcaagatcaaggaccaaaagaaagtggagagacagttcagcaccgccagtgaccatgagcagcctggagtttccggctgatgcctgcagctgtgaggcctggcccaaggtgtcatcagtggggctggcctcatctcctcctgcctttcctcccttatcagtttctctttaaaggtgtgcccctcctgctctcccaggagcagtgagttgtgagtggaaagaaggctggtgcagacccagctgccttagacagattccctgggcctgcatctcctggcgccggctgcttctgggcccaggaagaggctgtggctcccaccttccttacacctggtgggagcccgcctcgcaccagctgcacctgcctagcattagaggctctcagatctgcccttgcttgcctcatacctctgtgctccacactgcggccaggccagctgagtccctccatccgtggatgctttcctgcagctatgtggtatgggggtcattcctgcctcttggcaccaggttggggggcatgtgcttgttgggcaccaaagtgatggaaccctcaggtgctctccgggagcctgaacctcctgactgaggaacatgggcagaacatgtttattgcacagagtgggcgctgcgcacaggcgtggctgtacacgtgctctcagctcatcatcctttccagtaactttaaaaaaacatccctcaggtcctgatatatttccttggattcatttcacttggctagaaattacactgtgctcaatgccttaataaatccctgaaagaaataaaaaccactgtgtgcaatgccttgctgtggcccccaaccactgcttaggcctcccaacttctccccaggccaagtatggggccctggctgtgttctggaagttcaagacacttagtcctccacagtgggtggaagagtgcaaggtctgccaggtcagatggagacgcaaaacctgctggtgcaagctgggcaggtcctgaccaacctgcatcaggggatgccctgagctccacaggtcttcatgggcaggggttgtgggtcctggtgaaggaagtgcatcctcaggcctgggctgtagcaagctgtctgcccttgggttcaagaacccagactgtggagccaaaggtgaccgcagggggccccagggctggagccacaaggataccctcactttgcatgaggagctgaaactgaccagtgtccagtgttagcccccacatggggctgctcttgcttctactaaaagatacagcagttacccccttatccacaggggatacagtggatatctaaaaccagacccccagtggatgtctaaaaccacagataataacaaaccttatacatactgttttttcctatgcatacatacctgtgattaagtttatgaattaggcaccttaagagattgacaacaataactaataataaaatgtaacggttatactgtaaaaaaaaaa

SEQ ID NO: 87560 - DNA, 3238 bp, Homo sapiens
atgctgctcgggtgggcgtccctgctgctgtgcgcgttccgcctgcccctggccgcggtcggccccgccgcgacacctgcccaggataaagccgggcagcctccgactgctgcagcagccgcccagccccgccggcggcagggggaggaggtgcaggagcgagccgagcctcccggccacccgcaccccctggcgcagcggcgcaggagcaaggggctggtgcagaacatcgaccaactctactccggcggcggcaaggtgggctacctcgtctacgcgggcggccggaggttcctcttggacctggagcgagatggttcggtgggcattgctggcttcgtgcccgcaggaggcgggacgagtgcgccctggcgccaccggagccactgcttctatcggggcacagtggacgctagtccccgctctctggctgtctttgacctctgtgggggtctcgacggcttcttcgcggtcaagcacgcgcgctacaccctaaagccactgctgcgcggaccctgggcggaggaagaaaaggggcgcgtgtacggggatgggtccgcacggatcctgcacgtctacacccgcgagggcttcagcttcgaggccctgccgccgcgcgccagctgcgaaacccccgcgtccacaccggaggcccacgagcatgctccggcgcacagcaacccgagcggacgcgcagcactggcctcgcagctcttggaccagtccgctctctcgcccgctgggggctcaggaccgcagacgtggtggcggcggcggcgccgctccatctcccgggcccgccaggtggagctgcttctggtggctgacgcgtccatggcgcggttgtatggccggggcctgcagcattacctgctgaccctggcctccatcgccaataggctgtacagccatgctagcatcgagaaccacatccgcctggccgtggtgaaggtggtggtgctaggcgacaaggacaagagcctggaagtgagcaagaacgctgccaccacactcaagaacttttgcaagtggcagcaccaacacaaccagctgggagatgaccatgaggagcactacgatgcagctatcctgtttactcgggaggatttatgtgggcatcattcatgtgacaccctgggaatggcagacgttgggaccatatgttctccagagcgcagctgtgctgtgattgaagacgatggcctccacgcagccttcactgtggctcacgaaatcggacatttacttggcctctcccatgacgattccaaattctgtgaagagacctttggttccacagaagataagcgcttaatgtcttccatccttaccagcattgatgcatctaagccctggtccaaatgcacttcagccaccatcacagaattcctggatgatggccatggtaactgtttgctggacctaccacgaaagcagatcctgggccccgaagaactcccaggacagacctacgatgccacccagcagtgcaacctgacattcgggcctgagtactccgtgtgtcccggcatggatgtctgtgctcgcctgtggtgtgctgtggtacgccagggccagatggtctgtctgaccaagaagctgcctgcggtggaagggacgccttgtggaaaggggagaatctgcctgcagggcaaatgtgtggacaaaaccaagaaaaaatattattcaacgtcaagccatggcaactggggatcttggggatcctggggccagtgttctcgctcatgtggaggaggagtgcagtttgcctatcgtcactgtaataaccctgctcccagaaacaacggacgctactgcacagggaagagggccatctaccgctcctgcagtctcatgccctgcccacccaatggtaaatcatttcgtcatgaacagtgtgaggccaaaaatggctatcagtctgatgcaaaaggagtcaaaacttttgtggaatgggttcccaaatatgcaggtgtcctgcccagcggatgtgtgcaagctgacctgcagagccaagggcactggctactatgtggtattttctccaaaggtgaccgatggcactgaatgtaggccgtacagtaattccgtctgcgtccgggggaagtgtgtgagaactggctgtgacggcatcattggctcaaagctgcagtatgacaagtgcggagtatgtggaggagacaactccagctgtacaaagattgttggaacctttaataagaaaagtaagggttacactgacgtggtgaggattcctgaaggggcaacccacataaaagttcgacagttcaaagccaaagaccagactagattcactgcctatttagccctgaaaaagaaaaacggtgagtaccttatcaatggaaagtacatgatctccacttcagagactatcattgacatcaatggaacagtcatgaactatagcggttggagccacagggatgacttcctgcatggcatgggctactctgccacgaaggaaattctaatagtgcagattcttgcaacagaccccactaaaccattagatgtccgttatagcttttttgttcccaagaagtccactccaaaagtaaactctgtcactagtcatggcagcaataaagtgggatcacacacttcgcagccgcagtgggtcacgggcccatggctcgcctgctctaggacctgtgacacaggttggcacaccagaacggtgcagtgccaggatggaaaccggaagttagcaaaaggatgttctctctcccaaaggccttctgcgtttaagcaatgcttgttgaagaaatgttagcctgtggttatgatcttatgcacaaagataactggaggattcagcaccgatgcagtcgtggtgaacaggaggtctacctaacgcacagaaagtcatgcttcagtgacattgtcaacaggaagtccaattatgggcagaatctgctctctgtgaccaaaagaggatgtgcactgcttcacgtgacagtggtgaccttgcaatatagaaaaacttgggagttattgaacatcccctgggcttacaagaaacactgatgaatgtaaaatcaggggacatttgaagatggcagaactgtctcccccttgtcacctacctctgatagaatgtctttaatggtatcataatcattttcacccataatacacagtagcttcttcttactgtttgtaaatacattctcccttgtctggtctccccacttcttgaataaaataatttaaagag

SEQ ID NO: 87561 - DNA, 3848 bp, Homo sapiens; identical to SEQ ID NO: 65550

SEQ ID NO: 87562 - DNA, 906 bp, Homo sapiens
tttgagacagagtctcactctgtcacccaggctggaatgcagtggcacaatctcggctcactgcagcctatgcctccgggctcaagcgattctcctgcctcaggctccagagcagctgggatcacaggcatgcgccaccacacctggctcatttttgtatttttagtagagatggggtttcaccatgttggccaggctggtcttcaactcctgacctcaagtgatccgaccacctcggccttacccaaagtgctgggattacaggcatgagccaccacactcagacttaagtgttagtaggtaatattaatagaaatggaagttccgaggtaattcttagatacactgggttatggaaaggcaaacaaactttctacaccacagtgcacgtcaatcttgtgagaggttaatcatgtggtttttgtttgttccaagagcaggagattgcttcattggcttgtctaagaacataaaccatttttcaattatcaagtacagtggtcatctaacctatagcaaaatcattctgcattgtgttttatttcattatcaaaacttaaaattgcataggggaaatgatgttaatatttaaaggcgaattatttcctttgtggacaaaagggatatgagcatgtagatcacaacgaatgatcacactgacactacagacacaatgaatgatcacgctgacactaaagacacaacaaatgatcacgctgacactacagacacaatgatgacgctgacactacagacacaatgaatgatcacgctgacactacagacacaacgaatgatcacgctgacactacagacacaacgaatgatcacgctgacactaaagacacaacaaatgatcacgctgacactacagacacaatgttcacgctgacactacagacacaa

SEQ ID NO: 87563 - DNA, 359 bp, Homo sapiens
gccttccctttcctcccgctccaccacccccacagtcagttggtgcatcgtcttttagtgttggccttcaggctttcctcctcccgctccgccacccccagtcgtcagttgttgcatcgtcttctattgttggccttcaggctttccagatgctccacttctgcttggttggttcattcgttttgaacgacacgctgtgatttccagccgttcacaggaggcagccaacaggctggtgctcgctcccactggtcttcccccttgctccatgtctgtgtgtgcacgcataaatgtatatgtgtgcatgcctgtaaacatgtgtgcttgtgtctgtgcatgtacctgtggacctgcgtctc

SEQ ID NO: 87564 - DNA, 371 bp, Homo sapiens
  misc_feature (1)...(371): n = a,t,c or g
ttcangnnnnngttgtacacttttttttctggagctgagctttcgctcaccgggcacgggtgctgttcgccgctgttgcagacccgccgttgacttccacccctctggatccggcagggtgtcccctgcgtttctgatccagcgaggtgcccattgccgctcctgtttgggctagaggctcgccattgttcctgtgcggctaagtgcccgggttggtcctaatcaagctgaacactagtcgctgggttccacggttctcttccgtgacccacgacttctaaaagagctataacactcactgcatggcccaaggtccaattccttgaaatccgtgaggccaagaaccccaggtcagaaaacgaaaggcttgc

SEQ ID NO: 87565 - DNA, 570 bp, Homo sapiens
atctcctggccatggtgctggtctacttccagcgcgcccacctgaagctcagcgagtatacccacagcagcctgttcttggccctgtaccttgcaaacgacatggaggaggacctggagggccccaaatgtgagatttttccatgggccctgggaaaagattggtgtttacgagtggggaaattcctgcaccagagggataagctttgggcacggatgggtttccgggctgttgtgagccgccagtgctgtgaggaggtcatggcaaaggagccattccactgggcttggactcgggaccggcgcccccaccatggtggggttcagagggtctgtccacaggtccctgttcgccttccccggggccctggcctctcgccgccccactgttccccctgtggtttgccccagcactgcagcagccacttgcttaagcctgtgtcatccaagtgcccttctctgacctctgaatgtcatcgccctccctcccaaaattatctctcaagggtcaaaaacgcctggggtggggactttctcatcgtcttgcctccccagatgcaactggaaccag

SEQ ID NO: 87566 - DNA, 485 bp, Homo sapiens
  misc_feature (1)...(485): n = a,t,c or g
cggcattacggaggcggggattgagacccctatagcgntctggaangncgcggaagagacatgccaacttcctccaggtcaagaaaggggtatatagctctcaacttttctcttactttgcggaggacggcttcgcctttactcactatagtgacctgtgtattactacaactgtctctttctagagaagcctcaatgatcaggattgacaggccacactctcccccaccatttttttctcctccttcaagcctcttgtctgtttcaccctcttccaccttggaggctgaggtcttatttgactcttcacctgaattgaccttcttccttgccacccttccaggttcggactaaagatcaccgctttgaaagtgtcagtcaccttattagctaccacatggtcaatcactttgcccatcttctctgcgggcagcgaactgttgtctacagcaacccgtggagcggaatccgagacctgccctaac

SEQ ID NO: 87567 - DNA, 1103 bp, Homo sapiens
gcggtggaattcgtcttcctggtgaagaggaggagcctgggggtctcggtccgcagctgggatgagctcccggatgagaaaagggcagacacctacatcccagttcaccacaggcacgtgcagcgactcggtggttcacagctgtgacctgtgtggcaagggcttccgtctgcagcgcatgctgaaccgtcacctcaagtgccacaaccaggtgaaaagacacctgtgcaccttctgcggcaagggcttcaacgacaccttcgacctgaagaggcacgtccgcacacacacaggcattcgtccctacaaatgcaacgtctgcaataaagccttcacccagcgctgctctctggagtcccacctgaagaaaatccatggggtgcagcagcagtatgcctataagcagcggcgggacaagctctacgtctgcgaggattgcggctacacgggccccacccaggaggacctgtacctgcacgtgaacagtgcccatccgggcagctcgtttctcaaaaagacatctaaaaaactggcagcccttctgcagggcaagctgacatccgcacaccaggagaataccagcctgagtgaggaggaggagaggaagtgaggagaaggaaggggaggacagacgttcacactgcccacgtatgtctacgtggatttttggttttcagcttcccccaccccactggcttcttcttaattagaagtgaccagttcacctctgtggtccttttgaaacatcaagcagtagggtccattccaagattgtcagttaccgttagtgacgtcaggccctgtaacctgtgtcctgtctggcgcagttgctcacattcaccaaagtttgttttcatgatcctgatggccaagaacaccgtgtgggatttttttttcccccaaggattttcacacacggaaggagaggtatttcttagagagatcatcattttatggtgccttgaaataaaaatacttctacttgaaatgctgtttaagcaaggcaagtgaattttgttattctgaaagagtttacagaaactattttaataaatgaaatgttcttgtgaagcttttaaaagcaaaatggaacattgacctac

SEQ ID NO: 87568 - DNA, 4851 bp, Homo sapiens
ctgggcaccccagcaaaccatattatgctccaggggcgcccactccaagacccctccatgggaagctggaatccctgcatggctgtgtgcaggcattgctccgggagccagcccagccagggctttgggaacagcttgggcaactgtacgagtcagagcacgatagtgaggaggccacacgctgctaccacagcgcccttcgatacggaggaagcttcgctgagctggggccccgcattggccgactgcagcaggcccagctctggaactttcatactggctcctgccagcaccgagccaaggtcctgcccccactggagcaagtgtggaacttgctacaccttgagcacaaacggaactatggagccaagcggggaggtcccccggtgaagcgagctgctgaacccccagtggtgcagcctgtgcctcctgcagcactctcaggcccctcaggggaggagggcctcagccctggaggcaagcgaaggagaggctgcaactctgaacagactggccttcccccagggctgccactgcctccaccaccattaccaccaccaccaccaccaccaccaccaccaccaccaccaccacccctgcctggcctggctaccagccccccatttcagctaaccaagccagggctgtggagtaccctgcatggagatgcctggggcccagagcgcaagggttcagcacccccagagcgccaggagcagcggcactcgctgcctcacccatatccatacccagctccagcgtacaccgcgcacccccctggccaccggctggtcccggctgctcccccaggcccaggcccccgccccccaggagcagagagccatggctgcctgcctgccacccgtccccccggaagtgaccttagagagagcagagttcagaggtcgcggatggactccagcgtttcaccagcagcaaccaccgcctgcgtgccttacgccccttcccggccccctggcctccccggcaccaccaccagcagcagcagtagcagcagcagcaacactggtctccggggcgtggagccgaacccaggcattcccggcgctgaccattaccaaactcccgcgctggaggtctctcaccatggccgcctggggccctcggcacacagcagtcggaaaccgttcttgggggctcccgctgccactccccacctatccctgccacctggaccttcctcaccccctccacccccctgtccccgcctcttacgccccccaccaccccctgcctggttgaagggtccggcctgccgggcagcccgagaggatggagagatcttagaagagctcttctttgggactgagggacccccccgccctgccccaccacccctcccccatcgcgagggcttcttggggcctccggcctcccgcttttctgtgggcactcaggattctcacacccctcccactcccccaaccccaaccaccagcagtagcaacagcaacagtggcagccacagcagcagctctgctgggcctgtgtcctttcccccaccaccctatctggccagaagtatagacccccttccccggcctcccagcccagcacagaacccccaggacccacctcttgtacccctgactcttgccctgcctccagcccctccttcctcctgccaccaaaatacctcaggaagcttcaggcgcccggagagcccccggcccagggtctccttcccaaagacccccgaggtggggccggggccacccccaggccccctgagtaaagccccccagcctgtgccgcccggggttggggagctgcctgcccgaggccctcgactctttgattttccccccactccgctggaggaccagtttgaggagccagccgaattcaagatcctacctgatgggctggccaacatcatgaagatgctggacgaatccattcgcaaggaagaggaacagcaacaacacgaagcaggcgtggccccccaacccccgctgaaggagccctttgcatctctgcagtctcctttccccaccgacacagcccccaccactactgctcctgctgtcgccgtcaccaccaccaccaccaccaccaccaccaccacggccacccaggaagaggagaagaagccaccaccagccctaccaccaccaccgcctctagccaagttccctccaccctctcagccacagccaccaccacccccaccccccagcccggccagcctgctcaaatccttggcctccgtgctggagggacaaaagtactgttatcgggggactggagcagctgtttccacccggcctgggcccttgcccaccactcagtattcccctggccccccatcaggtgctaccgccctgccgcccacctcagcggcccctagcgcccagggctccccacagccctctgcttcctcgtcatctcagttctctacctcaggcgggccctgggcccgggagcgcagggcgggcgaagagccagtcccgggccccatgacccccacccaaccgcccccacccctatctctgccccctgctcgctctgagtctgaggtgctagaagagatcagccgggcttgcgagacccttgtggagcgggtgggccggagtgccactgacccagccgacccagtggacacagcagagccagcggacagtgggactgagcgactgctgccccccgcacaggccaaggaggaggctggcggggtggcggcagtgtcaggcagctgtaagcggcgacagaaggagcatcagaaggagcatcggcggcacaggcgggcctgtaaggacagtgtgggtcgtcggccccgtgagggcagggcaaaggccaaggccaaggtccccaaagaaaagagccgccgggtgctggggaacctggacctgcagagcgaggagatccagggtcgtgagaagtcccggcccgatcttggcggggcctccaaggccaagccacccacagctccagcccctccatcagctcctgcaccttctgcccagcccacacccccgtcagcctctgtccctggaaagaaggctcgggaggaagccccagggccaccgggtgtcagccgggccgacatgctgaagctgcgctcacttagtgaggggccccccaaggagctgaagatccggctcatcaaggtagagagtggtgacaaggagacctttatcgcctctgaggtggaagagcggcggctgcgcatggcagacctcaccatcagccactgtgctgctgacgtcgtgcgcgccagcaggaatgccaaggtgaaagggaagtttcgagagtcctacctttcccctgcccagtctgtgaaaccgaagatcaacactgaggagaagctgccccgggaaaaactcaacccccctacacccagcatctatctggagagcaaacgggatgccttctcacctgtcctgctgcagttctgtacagaccctcgaaatcccatcacagtgatccggggcctggcgggctccctgcggctcaacttgggcctcttctccaccaagaccctggtggaagcgagtggcgaacacaccgtggaagttcgcacccaggtgcagcagccctcagatgagaactgggatctgacaggcactcggcagatctggccttgtgagagctcccgttcccacaccaccattgccaagtacgcacagtaccaggcctcatccttccaggagtctctgcaggaggagaaggagagtgaggatgaggagtcagaggagccagacagcaccactggaacccctcctagcagcgcaccagacccgaagaaccatcacatcatcaagtttggcaccaacatcgacttgtctgatgctaagcggtggaagccccagctgcaggagctgctaaagctgcccgccttcatgcgggtaacatccacgggcaacatgctgagccacgtgggccacaccatcctgggcatgaacacggtgcagctgtacatgaaggtgcccggcagccgaacgccaggccaccaggagaataacaacttctgctccgtcaacatcaacattggcccaggcgactgcgagtggttcgcggtgcacgagcactactgggagaccatcaagcgctttctgtgatcggcacggcgtggactacttgacgggttcctggtggccaatcctggatgatctctatgcatccaatattcctgtgtaccgcttcgtgcagcgacccggagaactcgtgtggattaatgcggggactgtgcactgggtgcaggccaccggctggtgcaacaacattgcctggaacgtggggcccctcaccgcctatcagtaccagctggccctggaacgatacgagtggaatgaggtgaagaacgtcaaatccatcgtgcccatgattcacgtgtcatggaacgtggctcgcacggtcaaaatcagcgaccccgacttgttcaagatgatcaagttctgcctgctgcagtccatgaagcactgccaggtgcaacgcgagagcctggtgcgggcagggaagaaaatcgcttaccagggccgtgtcaaggacgagccagcctactactgcaacgagtgcgatgtggaggtgtttaacatcctgttcgtgacaagtgagaatggcagccgcaacacgtacctggtacactgcgagggctgtgcccggcgccgcagcgcaggcctgcagggcgtggtggtgctggagcagtaccgcactgaggagctggctcaggcctacgacgccttcacgctggtgagggcccggcgggcgcgcgggcagcggaggagggcactggggcaggctgcagggacgggcttcgggagcccggccgcgcctttccctgagcccccgccggctttctccccccaggccccagccagcacgtcgcga

SEQ ID NO: 87569 - DNA, 428 bp, Homo sapiens
ggaattcctgggagagtgctggggaggacggtgagagcagtcttctcgttagaggggacagaacttgtactgaaagcacagagtagcagatcctggtgtgttcagggaagagcacacctggagagtgaggtgtacaggtgagggggcaggaggggaggctgacaagttaggttgggttgtcaagggctttgggcatgatgcaaggtggatttggggttgatcctcttggcgagaggctggagttatatgacccaagtagaggacctcttggaagggggatgaagtggaggcagggaggctagagagagaagtgggaggtggggctgcctctcctggcgtcctgaggctctgcaaagcttcaagaagccaactgggcagctggaatatctgtagaaaggagctggctccaatagcatttcacagtctgg

SEQ ID NO: 87570 - DNA, 1681 bp, Homo sapiens
ttttgtggtgatggctttgggcttgttgcgctgaatctttttattataaaaacaagatgaaacatagatcacattgcagtctcgattgtaatgaacctcagctgaatgtgccgacagcggagtatctgatctaatgtggactttgaagcattttgaaatgaaaaaatcttgggatgtttttgtttttaaaattcctgtggttgttcgctaaatggcaaaatagggggccaccagccggacaagctccagaccacctacagaaaggaaagtctcaggccattatgaaggccgaaacgctaacagccatcttcttctgggtgcacagccctgcggccatccccaccgtgagatggtagaaagggcgcgtgcaaggatcagcacccagtgtagaaactgacttgtaccccgaaggtaatgcaatgcgattcccaacaggctcattccagatataaaaaatatgtcatcactttcattaggtaatattaaaccaacactaagaacttctgcaagatcttttatattacacagtagagttaaaaactgtagtaaatgttcagatatttaaatgagccccaaaccctacaaagtgcaaccaacatggttttattaaaaactctctttgactatggcattcaaggacagcaatacaattttttttttttttaacaaagcaactaatataaaaatctgcaaatgccatatattcatatctaggctattcttctcatataggcatgtcattagatagactttctttctattctttcctgaggtatttttttgtggtttacttttattgtactgctggatgcattatttttgatcatcctttcctaaaatgatttaaagacctgcaaataattttattgcataggacactattgatgacacatagaatgggagctgcaagtatgtggcattggaacaagccttacaaatattgcattttaagaatacacacattttttacagtttgtctcttttaaaaaatttgaagttatagctacgacttaactacgtacagtgaagcattttaggaatgttaagtgattaaagaagaagatgaatgatacaaagaaaagaagccaccattcttgccagctatatattgtattccttcaaaagcaactatacatgctgccttcagttcatagttaaatatttctagtaatctgttttgggagaacaaatgtctttcaaggtttcaaagttccctcctaataagcttccttgttcctggacttcccagcactgcaactcggctctccagacattttacatattctttctttcgacgtcgacattctttggcagcttccctgtttttcattagcctcagctctcgtttgcgtgttgcttcttctgccagctgctggggactgtgcaaacttccgggcgatgcagccatcaccactccctgtggcaaagcagcagtaggagctcggatctggtaagttggcatgtcaccagtggcagcactaagctggccagacaactcctgagttctgttcatgcattacagtttcatgacgtgtttccctcttcaagcagacaaccacttcaaaagaaatgttaaagtagggctaacaagaaaagctattcagtctaaaaggcagcttggaggcagaggcagtggtgagctagttaactctaaatctgtcagcagcattttacaaagcgg

SEQ ID NO: 87571 - DNA, 399 bp, Homo sapiens
caacatgtggctttgagctctgggtcctcaggtggctgctccagctcctgccatcattatgtctgcatcctggccggcaccacgccctctcccctccttggctctgtgcatggcctgccattgaggaacctaagaaactacaacctgctgacactcttgtggggagcgcccttatagaatctccagcattggttgtcgtatctgtaaaagacaggcagccgtggagactaggagaccagctaggcttccagatcgaagtcattgcactccccgttgtatgatggcatgtgttgcttgatcttggatgagccgacccaggtgacaaagtcctccatgcggcatgtgacaaagaaaggtggagtcggtaaccacatccagggcctacaagcacatggcttt

SEQ ID NO: 87572 - DNA, 775 bp, Homo sapiens
atgaggctccaaagaccccgacaggccccggcgggtgggaggcgcgcgccccggggcgggcggggctccccctaccggccagacccggggagaggcgcgcggaggctgcgaaggttccagaagggcggggagggggcgccgcgcgctgaccctccctgggcaccgctggggacgatggcgctgctcgccttgctgctggtcgtggccctaccgcgggtgtggacagacgccaacctgactgcgagacaacgagatccagaggactcccagcgaacggacgagggtgacaatagagtgtggtgtcatgtttgtgagagagaaaacactttcgagtgccagaacccaaggaggtgcaaatggacagagccatactgcgttatagcggccgtgaaaatatttccacgttttttcatggttgcgaagcagtgctccgctggttgtgcagcgatggagagacccaagccagaggagaagcggtttctcctggaagagcccatgcccttcttttacctcaagtgttgtaaaattcgctactgcaatttagaggggccacctatcaactcatcagtggttcaaagaatatgctgggagcatgggtgagagctgtggtgggctgtggctggccatcctcctgctgctggcctccattgcagccggcctcagcctgtcttgagccacgggactgccacagactgagccttccggagcatggactcgctccagaccgttgtcacctgttgcattaaacttgttttactgttgattaaaaaaaaaa

SEQ ID NO: 87573 - DNA, 870 bp, Homo sapiens
atatatataattttcttgcagatagataccaaagaattttactcttattttgaaaataacctaagtgtgtataagttctttccactcttggtatttatcatagtaccttgtttattttcttaaaagcacttaatatgacttttaatagttttatattttttgtctgttcttctggaggaatcttctctatgatgtttctttctttctctatttgggaagagggtaacattcctggtctttctctattcccttcttcactcctcccttgagaggtaaaatgacttatgtgattggtgagctggaaggagaacctgggcatgggttcctttctccttgtgaggtagccatccccaaatgatagcagacgtctctcatgcaactctctagctaagtacagaaccaggccctgcatgcacaggtgcatataccctaaggttgtacttgctgtttgcagctgaggagcatttagtaggtgccattttatatgaagggttaaatatcttgtgtattactccagtacaggacaatacctgcctcacttatgctctacttgagacaatggaggagaatatatttcatttcaggattttttttaaattagggagaaattctgcctgctgattaaagtcatatccttcaccctaaccttttattttggcctgccatctgtacaatctttttggcttaaatttataatactccagggcccagtctagatgattactattaaagggccccctcacctccccactacttcgtgcgtggaactttatctacacaagtcaccccccgatggcaactggggacccccacgacctccaccctctctccggcacccacagcgctgtaacacacgtgccccacacaccg

SEQ ID NO: 87574 - DNA, 741 bp, Homo sapiens
  misc_feature (1)...(741): n = a,t,c or g
ttttttttttttcacagagctggctcaacatatcccaagagccaagcagactttatttctgcagcaatctctgctggtcagggtgcctgcactcctctacccactgcccttcatggctgctgcagtggccgcagctgtggcccatggccagccacactgtcaaggttcagcgatgctgcagtcatagcagaagttgaagttggtggggggtgggggcacaagggggtggccgtctggggatggccacgttctccagctccagcagacgcagcttggtctccatggtcagcagctgctccaggtccagccgtgtctgctcgctgcccatgggactgcccagcaaggcactgagcccatctgtccacaggtagaactcccgcttggagggggcaatgaagttgaggtacgcttcctcctccccacggtcatagctgattgagaaggccaactcatagaggtccttgttctgcttcccggagcccttctcccggacatgggggcagtccttgcctgtcaggagtgccctcatgtcggccacagggagttgctcgggcagactctccagggtaggcgggctggcgccctcctccatgtctccgtactgcagcagcttgtggttgggggacaggcagcagaaccacagcttatcctggcgccgccgnctgctgatcttgcggaagancgtcccctnanagaggcggagcaagcgctgctggcggatcaggcccatnagctctggct

SEQ ID NO: 87575 - DNA, 380 bp, Homo sapiens
aagttcagcagaccttcagttaacatgctgaggattgtgaaaccatgtattacaaggggaacccaaatctgaaatcagtaaataaactcatctacaagcatggccgtggcaaaatcaataagaagcgaattgctttgacagataacactttgattgatcagtctcatggtcaatatggcatcatctgcatcgaggatctgattcatgagctctatactgtggcccttcaagttatcctctccacaaagtggaatgaagaaaaagaccacccattttgtagaaaatggagctgctgccaacagggagggccagatccacaggcttcttataagaatgaactgcggtgtctaccgtgattatttttctaatctggtcagtta

SEQ ID NO: 87576 - DNA, 408 bp, Homo sapiens
  misc_feature (1)...(408): n = a,t,c or g
atctnnncccattacacatggaataattattgactattgaaccacccttgcatttctgggataaaatccacgtcatgatatattatccttttatagatcgctggatttaagctgcttgtattttgacatgaggatttttgtatctgtactcaagagggatattgtactgtagctttcttcttttgcaatatctctgtctgattttggtctcaaggtaaagctggcttcataaatgagttgggaaaggcaccctcctctttattttggaagagttcgtgtagaatatgacattattccttttttaaatatcttgatagagtttcgccgtgaaacaatctaagtttggaatatttgttgctggaagctttttagctgtaacatttgttgaataaggctttaacctactcc

SEQ ID NO: 87577 - DNA, 880 bp, Homo sapiens
atgcaagaacactcttatcagacagaacatcccaagagctcagttcccagcaaccagcccaaggtccataattcagcagccaaatctttccctcgaaggtttgttttgcctttaaatgtcagtttgaatgcccctgagggagacaacctgagtccattgtcctatacttcagccagtgctgtgaaacaggctgatggaacgatctggtgctctcatgaaaatctacatcaggaggacctagaaaaggaaggaggcattgaatttcctcagatctactatgatcgattcagtggcaaaaagtatcatttcttttatggctgtggctttcggcatttagtgggggattctctgatcaaggttgatgtggtgaataagacactgaaggtttggagagaagatggcttttatccctcagaacctgtttttgttccagcaccaggaaccaatgaagaagatggtggggttattctttctgtggtgatcactcccaaccagaatgaaagcaattttctcctagttttggatgccaagaactttgaagagctgggccgagcagaggtacctgtgcagatgccttatgggttccatggtaccttcatacccatctgatgggacaaccacaaggtctggaaactaggtttaaaataagtgtgcacttggacataaagactggagaaataaacactgaggactccaaaaggggggcaaggaggaagaggggcaggggttaaaaagctacctattgaatactatgttccctatttgggtgatgggttcgttagaagtccaaacctcagcagcacacaatatactcatgtaacaagcctgcacatgtaccccagaatctaaaataaaaataaaaagaaaaacaaaaaaaaaa

SEQ ID NO: 87578 - DNA, 7150 bp, Homo sapiens; identical to SEQ ID NO: 65622
  misc_feature (1)...(7150): n = a,t,c or g

SEQ ID NO: 87579 - DNA, 1977 bp, Homo sapiens
catgaagggcctctacacagacgccgagatgaagtctgataatgtgaaggataaagatgcaaaaattagcttcctacaaaaggccatagacgtggttgtaatggtgtcgggagagccactgttggccaaaccagcccgaatcgtggcggggcatgagcctgaaagaacaaacgagctgctccagataattggaaaatgctgtctcaacaagctctctagtgacgatgcggtgcggagggttttagctggagagaagggagaagtgaaaggccgggcctcactgacctcaagatctcaggaattggataataagaatgtgcgagaagaagagtccagagttcacaaaaatacagaggatagaggagacgctgaaataaaagagagaagtacaagcagagatcgaaaacagaaggaagaattgaaagaagaccgcatgccaagagaaaaggacaaggacaaggagaaggccaaggagaatggcggaaacagacacagagaaggggagagagagagagccaaagcccgggccaggccagacaacgagcgacagaaagacagaggcaacagggagcgggacagagactccgagcgcaagaaggagacagagagaaagagtgagggggggaaagagaaggagagactgagagacagggaccgagagcgcgaccgggacaaagggaaggacagggacagacggagagtgaaaaacggggagcactcctgggacctggacagggagaataacagagagcatgacaaacctgagaaaaagtcagcaagctcaggggagatgtctaaaaagttatcagatggaacttttaaagactccaaggctgaaacagagactgagatttccactagagcttccaagtcattgacaacaaaaacatcaaaacggcgatccaaaaattcagtggaaggtgactccaccagtgatgcagaaggagatgctggacctgctggccaagataagtctgaggtgccagagactccagaaattcctaatgagctttcatccaacatcagaagaattcctcggcctgggagtgcaagaccagcccctccccgggtcaaacggcaagacagcatggaggcgctacaaatggataggtcagggagtggtaaaaccgtttcaaatgtgattacagagtcacacaattctgacaatgaagaggatgatcaatttgtggtggaagctgcccctcagctctctgaaatgtcagaaattgaaatggtaacagcagtggaactagaagaagaggagaagcatggtggacttgtgaaaaaaattttggagacgaagaaagattatgagaaattgcagcagtcacccaaacctggggagaaggagcgatctctctttgagtcggcatggaagaaggagaaggacatcgtttccaaggagatagagaagctccgcacgtccatccagaccctgtgcaagagcgcacttcccctggggaagatcatggactacatccaggaagacgtggatgccatgcagaatgagctgcagatgatatcacagcgagaacaggcagcacgccgaggccctgcagcaggagcagaggatcacagactgtgccgtggagccctttaaaggctgagctcgcgtgagctggagcagctgatcaaagacccagccaagacaagatctgtgctgtgaaggccaacatcctcaagaatgaagaaaaaatccagaaaatggtatatagtatcaatttgacttcgagaaggtgaacactcaaaagtttcagagatgaaaagtcacctcagtttaaaagcaaaaaggaagatagaaaatcattactcttttaagttccagtttgctaagaaaatgaacagtttacaatgttattatccagctaattttcagagctttaaaactgtaagcatgttaagtgtattaaaaaaaccatgttttcttacctccttccagatggaatactggctagttataaatagcgcttccaaaca

SEQ ID NO: 87580 - DNA, 427 bp, Homo sapiens
  misc_feature (1)...(427): n = a,t,c or g
ctcctcctgactccttttcatttcctaatcttaaatctttaaaaggcactcatttttcttcaattaataatgtgaaaagactatgctgacatggttaaattcccaggactctcagttatttagggatgagcttaatgttggtgtcattgcttacaaaattgtcttgaacttgatgaagcttgtgttgagaaataaaggcaatgttttttatttttatctattaaaattaataaatttattaaatctattcatttcatttttccacaaactttttgaagtctcctcatatatatatatattcttagctcccacttcaagaacctaggaaaagaagagcaaaagaaactcanagcaagaagaagaaagaaaataagatcagatcgcaatgaaactgaagcagaaaattagtagagaaataaaacacagn

SEQ ID NO: 87581 - DNA, 1447 bp, Homo sapiens; identical to SEQ ID NO: 65625

SEQ ID NO: 87582 - DNA, 391 bp, Homo sapiens
ggatcttatgaagctggtaaaattgattcttccaattaatatttaacaaggcaggaaattcctgggacttgaccttatggaaataaagagtagataaaaaattaaagctatgtcaaattattaatagccaggatggtgattatttgcattcgatcgctttgttgatgaagagtaaaagtctcacagcaaacattgtttgagtaacagaaaggaagacattttaagctttatttggaaaagcgacattctaaatgaatgtattatctcattaaatgtggattcctcagcttctcttatggccagacactcttcttaggagccaaatatgccactctcttcccttggggagctcacattcgagtgtggatgttggctggggtttgggggacat

SEQ ID NO: 87583 - DNA, 3830 bp, Homo sapiens
  misc_feature (1)...(3830): n = a,t,c or g
tttttttcgctatctaaggacataactttattggaaacaaagagtggggtgcagaagatggctaggagtcaggctctgagggaggtggtggcttctcatcatcagggggacaatcgatgaagtcggccagcatggcagctgtgtcatcctgctccttttcctggagagcttcggcctctgtctctgtctccatctcttcttctgcaggtgtctctggtgggggctgcaccttgtcactcccatcctcagtctcctcttccaacagggttgggggagcagagggctcttcttcaacaagctcctggggagggggccctgccgcagggctttccccttccctctccacctctccctgggaggggagcgcttcaggggccagggtgggagctgtgtcagccccacgctcctcctccgtccctggctcctccacttccaaaagcagcccgggttcgggttcgggttctggctgcacctttgggggagactcagggggaggcagagctggaggcagggttgggggtggaggtgcaccttcttctacctcccctcctgctgtgccaaactccaggtcttccacctcttccagttcttcttcctcctcctcatcctcctcttcttcttcttcctctaactcaccttcttcttcctcaaattcttcctcaaactcttcttcctcctcttcttcctcttcaaaatattcctcttcatcctcttcctcttcctcaaagtcttcctcctcttcctcttcttcctcttcttcttcttcctcttcttcttcttcttcttcttcttcctcttctccttcttcctcctcctcttcatcactgctgttgatattaataactgtcaaatcctcttccagggctgggggtcctcccccaccaggagtcccttcagggaccaactggggtggagggagngtcacaggaccaggaacaggcggcggcggaggtgggggcggcgggagaggccctggggccgcaggaagttcttcaggctcctccttcgctggcacaggaggggaggctgttggtggcccagtgggggctatagggggtggtgtggcacctgagggtggtgggggtggcagggggggaagcccctcgggcacgatcaccacgcttgtcatcagagtcacttttccaaggagatcttccacatcagatgcctcctcctttgtcattagtggacaaaggcttggtcttgggcactctccccccaaaagtttcatctgggggtatagtaggtgggggagtcccactaggggcaaggatggggtcctcatttgagcctgcccggtggttctcagggccaggaagaagccggggagggacagacactaggcctgggacagaaaggcctaggtggttggctgtggtgggaggtccagggctccgagggcacagggcctgcttgagggcatggggcctgctgaagggcatggggcctgctgagggcatggagcccactgagggcatggggcccggaggatggaacggtggggccctgaagggcgatggggcctcaggagggggactggagcaggtgtggggcaggtggggcccatgggctgcaggggaggaacccgggggtgggtcagagcagcacaggtcaccagtgcttctgagcaagaaagaggagacctcaaggctatcttctcgctggccgagggagaaggcttgcagggcacaggcaagaggaggtgggcagcgaggagatggggccagcagcagcgccagcagcaggcagtagagttcacggcggcagcgggagctcgtgtacggggagctgcctaggacctcaccctgctgtacacccatgaccagggggaggaccaggtcatgcagtctcctgtgagtctcctccttgatgagaggcccacacatgaggatggtccggctgaggcctctgagtgcagccgcacacacgtcgctgttggcattgctatcccctttccggtggcttggcggggccatagcttcccccacatccagctttagcttcttgggggcgctaggcttcccagtctgcaaactcccatcagggctcccccgcgggctacgcagcttaagggcatcagctggcggggagatgtcgctgagcaggtgggtgagcagggcctctccagaggctcctccctgaagcattcccgccgaggccccacaaacctgcacccacagctctaatatcgcatacaccttggtccgaaccgtgctgtaaggcctctcctggcctggagagagggaatctctaccgatgctccaggaattgaggacctggggaagcaggcggccgatcaggatcccaaagcgcaagagccggcttccacacgcgaggatgagtgcagacagcaggtccaaggccttcaaggtggatagagggcagcagcagcagccgcagggaccatctccatgcaagctctggagaaaaaaggggcagagataaagagtggaggaagaaagtgagagccagagagagacagaaacagggaatgaccatttacatatgtacacataggtaagaaacccaacccctgatctcatctctcccaacaaaatcaaacccctatcctctaaaatagaccctggatggaaggtaagaaggatggctgggcctctcagcaatgactcagctgagtccccaaattcaccctcccccaaggaagcatttgctacactctgacactgtgctcctgtgtcacgacacataggaagtgatgttatttggacaaaagtagaagctctctgggacggactccaggatgacactgtttggggagactcaggtccccagtactttcctggttgcctggtatcctgagcaagggctctgaagagatgacaaatcccacttacaatattcttgctactgacgctgagggtccggcagatgaaatccaggatttcctgcacagggacggacacgggagctccaaactcagagctgagcatgagccctaggcagcgggccagtcccgaaaacctctgccgaagctggagaaggacatgggcatcaccatcttctgaggacagcagcatctccaccccagggccttcattctgcacaggagcagtctctgctccctcgtacagggcccccagcagggtgtgcagtgaggccagcagactgtgtagctcctgctcccagctctcggtgtgcttcaggccttgggaaaagccagcccctaaagagggcagccgggaataacactcacaggccaactgttggagctgagggctcaaggcatccaccctagacagaaaaaatgaggccagcttgcctttgagagaaccacaagcccgagggaaataggtcatacaagccttcattccttccaatgctgactgctcacactctggcctgaggcccagcagggaggtgagaaggccagggaggtggttcatggagatgtcccggaacagtgcaggcagctgggctgcatatcggaggaggtccctcaggacagccacggccagctccattgtggcaggcgggtcctgggtctgtaacacctgctgaatgctccgaagccaagacacacagtgctgctggaatagctctgtggggctctcccctaccagcagggacagcagacacaggccctcaaaccgagttttgatggaactgagacgtgcattactgagactcaccaatgccccaagagctgaaaggttctgggccccgcccaccgacccatgcagccgcaataggcacatgagcccgggcaaatgtggggccgagcggtttgggggatgcaccggagcaacggcagaccccgttcgaggttgcagcaaaccagaaacactctccagcagcagcaggcggagccg

SEQ ID NO: 87584 - DNA, 4487 bp, Homo sapiens; identical to SEQ ID NO: 65331

SEQ ID NO: 87585 - DNA, 5795 bp, Homo sapiens
atgcaggagagccagaccaagagcatgttcgtgtcccgggccctggagaagatcctagccgacaaggaggtgaagcggccccagcactcccagctgcgcagggcctgccaggtggcgctcgatgaaattaaagcagaaatagaaaagcagaggcttggcactgctgcaccaccaaaggcaaacttcattgaagctgacaagtattttcttccattcgagctagcttgccagtccaagtccccaagggtagtcagcacatcccttgactgcttgcagaaactcatcgcatacgggcacatcactggcaacgcccctgacagtggagcccctgggaagcggctgatcgacagaattgttgaaaccatttgcagttgttttcagggccctcagactgatgaaggggttcagttacaaataattaaggctcttctgactgcagtgacttccccacacattgaaattcatgagggtactatcctgcagacagtgagaacatgttacaatatctatttggccagcaaaaatctcatcaatcaaaccactgccaaggctacccttactcagatgctgaacgtcattttcacccgcatggaaaaccaagtgttgcaggaggccagagaactggaaaaaccaatccagtcaaaaccccagtcccctgtgatccaagctgcagcagtatccccaaagttcgttcgtttgaagcacagtcaggcacaaagcaaaccaacaactcccgaaaaaacagatttaaccaacggtgaacatgccaggagtgattctggaaaagtaagcacagaaaatggagacgcacccagagaaagaggctcatcactgtcagggactgatgacggagcccaggaggtggtgaaggacatcttggaagatgtagtcacatctgccattaaagaagcagcggaaaagcatggtctgacagaacctgagagagttctaggtgaactggagtgccaggaatgtgctattcccccaggagttgatgaaaactcacagaccaacgggatagccgatgacaggcagtccttgtcgtcagcagataatctggaatcggatgcacaaggacatcaagtggctgccaggttctcccacgttctgcagaaggatgccttccttgtgttccgctccctgtgcaagctgtccatgaaaccccttggtgaaggccctccagacccaaaatcccatgagctgcgttccaaggtggtttccctgcagctgctcctctctgtgttgcaaaatgctggccccgtattcaggactcacgagatgttcatcaatgcaatcaagcaatatctctgtgtggccttgtccaaaaacggcgtctcttcagtgcctgatgtctttgagctctctcttgccatttttcttactcttctttcaaactttaaaatgcacttgaaaatgcagatagaggtctttttcaaagagattttcctgaacattttagaaacatcaacaagttcttttgagcacaggtggatggtcattcagactctgacgaggatctgtggagatgcccagtgtgttgtggatatttatgtcaactacgactgtgatttaaatgctgctaacatttttgagcgccttgtaaatgatttatccaaaattgctcagggaagaagtggacatgagctgggaatgacacctctgcaggagctcagcctgaggaagaaaggcctggagtgcctcgtgtccattctcaagtgcatggtggagtggagcaaagacctgtatgtgaatcccaaccaccagaccagcctcggtcaggagaggctcacggatcaggaaataggggatgggaaaggccttgacatggcaagacggtgtagtgtgacgtccatggagtccacagtgtcctcggggacccagacaactgttcaggatgaccctgagcaatttgaggtcatcaagcaacaaaaagaaatcattgaacacggcatcgagctgttcaacaagaaacccaagaggaggatccagtttctccaggagcagggcatgctgggaacgtcagttgaagacatagcccaattcctgcaccaggaggagcgcctggattccacccaagtaggcgattttctgggagatagcgcaaggttcaacaaggaggtgatgtatgcctacgtggaccaacttgacttctgtgaaaaagaatttgtctcagccctgcggacattcctagaaggtttccgcctacctggagaagcccaaaagattgaccgattaatggagaagtttgccgcaagatacatagaatgcaaccaagggcaaactctgtttgctagtgctgacactgcttatgtcctagcgtattcaattattatgctgactacagacttgcacagtcctcaggtaaaaaataaaatgacgaaagagcagtatattaaaatgaatcggggtatcaatgatagtaaagatctgccagaagagtatctctcaagcatctatgaagagatagaaggcaaaaaaattgcaatgaaagaaacaaaagagctaacgattgcaaccaaatctactaagcagaatgtagctagtgaaaagcagcggcggctgctgtacaacttagagatggagcaaatggctaaaacagccaaagctctgatggaggctgtgagccatgccaaagccccgtttaccagtgccactcacctggaccatgtccggccaatgttcaaactggtgtggacgccactattggcagcctacagcatcggactccagaactgtgatgacactgaagtggcctccttgtgtttggaaggcatccgatgtgcaatccgaatcgcctgcatctttggaatgcagctggaacgagatgcctatgttcaggctcttgctcgcttctccctactcacagccagctccagcatcacagaaatgaagcagaaaaacatcgacaccattaagacgcttatcacagtggctcacaccgatggcaactaccttgggaattcctggcatgagatcttgaaatgcatcagccagctggagctcgctcagctgataggaaccggtgtgaagacgcgctacctgtctggatctgggcgtgaaagagaagggagcctgaagggccacacattggcaggagaagagttcatgggccttggcctcggtaatttggtgagtggcggagtggataaaagacagatggccagcttccaagaatcggttggtgagaccagctcgcacagtgtggttgtagctgtggacaggatttttactgggtctaccagactggatggaaatgcaatagttgactttgtccgctggctgtgtgctgtgtccatggatgaactggcttccccccaccatcctcgcatgttcagcttgcagaagattgtggagatatcatactacaacatgaatcggatccgactacagtggtctcgaatatggcatgtgattggagatcacttcaataaggttggctgcaaccctaatgaagatgtggctatctttgctgttgactcattaaggcaactctccatgaagtttcttgagaagggtgaattagccaacttccgtttccagaaagattttctgaggccctttgagcatattatgaagaaaaacaggtctcccaccatccgggacatggcgatccgctgcattgcccagatggtgaactcccaggcggccaacatccgctcaggctggaagaacatctttgccgtgttccaccaggcagcctctgatcatgatgggaacattgtggagctggccttccagaccacttgccacattgtcacaactattttccagcaccattttcctgcagccatcgattcctttcaggatgctgtgaagtgcttatcagagttcgcctgcaacgccgcttttccctgacacgagcatggaagcgattcggctcatccgcttctgtggcaattatcttctctgagaggcctcgggtgctactagaatacacaagtgatgacatgaatgtagctcctggtgacagagtctgggtccgaggctggttccccatcttattcgaactctcctgcatcattaatagatgcaagttagatgtacgaacaaggggactcacagtcatgtttgagatcatgaagagctatggccacacctttgaaaagcactggtggcaggacctgttcagaatcgtgtttcggatttttgacaatatgaaactccctgagcaactgtcagagaaatctgagtggatgacaacaacctgcaatcacgcactttatgctatttgtgatggttttacccagttttatgaagctttgaatgaagttcttctttctgatgtatttgcacaattgcagtggtgtgtcaaacaagataatgaacagttggcgcgatcaggtacaaattgcttagaaaacttagtaatatccaatggagagaaattcagtcctgaagtctgggatgaaacctgcaactgtatgttggatattttcaaaacaaccatcccacatgttttgctgacatggagacctgtaggaatggaggaagattcatcagaaaagcatttggatgtggatctggaccgccagtctttaagcagcatagataaaaatccctctgagaggggacagagccagctctctaacccaacagatgacagctggaagggtagaccatacgcaaatcagaaactgtttgccagcctcctcatcaagtgtgtggtccagttggaattgatacagaccattgacaacattgtgttctaccctgcgacgagcaaaaaggaggatgcagagcacatggttgccgcccagcaagacacgctggatgcagatatccacatagagacggaggatcagggcatgtataagtacatgtcttcccagcacctcttcaagctgttggactgtttgcaggaatcccattcattctcaaaggccttcaactccaattacgagcagcggactgtcctgtggcgagcaggttttaagggcaagtctaaacccaatcttctaaaacaagaaaccagcagcctggcctgttgtttgaggatcctgtttcgaatgtatgttgatgagaaccgcagggattcctgggaagaaatacagcagagacttttaactgtttgcagtgaagctcttgcctatttcatcactgtgaattctgagagccatcgggaggcctggacaagtctcttgttgttacttctaactaaaaccctcaaaataaatgatgaaaagttcaaagcacatgcttcaatgtactacccctacttgtgtgaaattatgcagtttgacctgatccctgagctccgagcagttctgcggaagttcttcctacggataggtgttgtgtataagatatggataccagaagagccatcacaggtacccagcagcactgtcaccagtgtggtagccctggctgcccaggccagtgctgcagctctgcagaatgttcagcatgccatttctgactggcacatctcgtgaagtttcatagaaacaaggagttggcatcttggatctcagaatggcctggaaacggatggcctctacgctgttccatcacagtctccaactaaggcttatggtatttcattaaactgttgcatacccagttagcacagtaggtggggagtctgcttcatttctatcattccatttttctgattaaactgtcaaatctgtcattgcatatgccatcgttttctagcaaaatcccatgattggctataaacgttttgtaagaagtcactctccttgaaaatactgaacatagctgtataggtttgtgattattagagaatatgttaataaaacttcttgtaacggctaactgccacctaaaat

SEQ ID NO: 87586 - DNA, 2487 bp, Homo sapiens
atgccgaccgtcattagcgcatctgtggctccaaggacagcggctgagccccggtccccagggccagttcctcacccggcccagagcaaggccactgaggctgggggtggaaacccaagtggcatctattcagccatcatcagccgcaattttcctattatcggagtgaaagagaagacattcgagcaacttcacaagaaatgtctagaaaagaaagttctttatgtggaccctgagttcccaccggatgagacctctctcttttatagccagaagttccccatccagttcgtctggaagagacctccggaaatttgcgagaatccccgatttatcattgatggagccaacagaactgacatctgtcaaggagagctaggggactgctggtttctcgcagccattgcctgcctgaccctgaaccagcaccttcttttccgagtcataccccatgatcaaagtttcatcgaaaactacgcagggatcttccacttccagttctggcgctatggagagtgggtggacgtggttatagatgactgcctgccaacgtacaacaatcaactggttttcaccaagtccaaccaccgcaatgagttctggagtgctctgctggagaaggcttatgctaagctccatggttcctacgaagctctgaaaggtgggaacaccacagaggccatggaggacttcacaggaggggtggcagagttttttgagatcagggatgctcctagtgacatgtacaagatcatgaagaaagccatcgagagaggctccctcatgggctgctccattgatgatggcacgaacatgacctatggaacctctccttctggtctgaacatgggggagttgattgcacggatggtaaggaatatggataactcactgctccaggactcagacctcgaccccagaggctcagatgaaagaccgacccggacaatcattccggttcagtatgagacaagaatggcctgcgggctggtcagaggtcacgcctactctgtcacggggctggatgaggtcccgttcaaaggtgagaaagtgaagctggtgcggctgcggaatccgtggggccaggtggagtggaacggttcttggagtgatagatggaaggactggagctttgtggacaaagatgagaaggcccgtctgcagcaccaggtcactgaggatggagagttctggatgtcctatgaggatttcatctaccatttcacaaagttggagatctgcaacctcacggccgatgctctgcagtctgacaagcttcagacctggacagtgtctgtgaacgagggccgctgggtacggggttgctctgccggaggctgccgcaacttcccagatactttctggaccaaccctcagtaccgtctgaagctcctggaggaggacgatgaccctgatgactcggaggtgatttgcagcttcctggtggccctgatgcaaaaaaaccggcggaaggaccggaagctaggggccagtctcttcaccattggcttcgccatctacgaggttcccaaagagatgcacgggaacaagcagcacctgcagaaggacttcttcctgtacaacgcctccaaggccaggagcaaaacctacatcaacatgcgggaggtgtcccagcgcttccgcctgcctcccagcgagtacgtcatcgtgccctccacctacgagccccaccaggagggggaattcatcctccgggtcttctctgaaaagaggaacctctctgaggaagttgaaaataccatctccgtggatcggccagtgaaaaagaaaaaaaccaagcccatcatcttcgtttcggacagagcaaacagcaacaaggagctgggtgtggaccaggagtcagaggagggcaaaggcaaaacaagccctgataagcaaaagcagtccccacagccacagcctggcagctctgatcaggaaagtgaggaacagcaacaattccggaacattttcaagcagatagcaggagatgacatggagatctgtgcagatgagctcaagaaggtccttaacacagtcgtgaacaaacacaaggacctgaagacacacgggttcacacttggagtcctgccgttagcatgattgcgctcatggatacagatggctctggaaagctcaacctgcaggagttccaccacctctggaacaagattaaggcctggcagaaaattttcaaacactatgacacagaccagtccggcaccatcaacagctacgagatgcgaaatgcagtcaacgacgcaggattccacctcaacaaccagctctatgacatcattaccatgcggtacgcagacaaacacatgaacatcgactttgacagtttcatctgctggcttcgttaggctggagggcatgttcagagcttttcatggcatttggacaaggatgggagatgggttattcatcaaggttcaacgttttgggagtgggtggcaggttcaccatgtatggctggaaccagga

SEQ ID NO: 87587 - DNA, 460 bp, Homo sapiens
  misc_feature (1)...(460): n = a,t,c or g
tctgttttaaacccccttctaccagcgctatcaaaacttgaattgcaaactggcttccgttcgccgccctcctcctccttcctntgctccgagcctccggagggtgtctcggtttcaatccaaatcttgctgggctcttctcccgtgcctctctctcttccttgtcctaaaacctctccttcttctccccgccccgggcgagccgggcgggtggccgagcctccccgcgagctgccatccggccactcggttctacaaaagccggcggcagccgagaagcgagcgccgagactccaggcttgcgtgctctccagccccacgtggagccaagctccgcccggccgccgctgaagggctcccgagctcgggtgtctcggtgctggtctcccctgcgtctgggctgggggagcacaaggatgcggccatatctcagcacacgcatgtgtgggcttcctctcca

SEQ ID NO: 87588 - DNA, 415 bp, Homo sapiens
attgcagggtttttttggtcatctctttaaactcttgttttctttgcaggttaaaagaatggcaaattcatatctatatttttaataactttgtatctctttttagatttgtattgaacgatgtcttgagaggggaaagagtagtggtaggagtgatgacaacagagagagcttggaaaagaggtacttggcagtttttacatacaaccacttcaatcccagacctgccttatttggtacaggaataaaagagtcacatttaaacatgtaaaatggcttgtttaagatgttaggtcaatcagtcggggcagatccagtgttctgtgagctctcctataacatgtagaagaaaggatagatacctacaaccttgcaatatttacttcttttgcagaaatcagacctaccttcagtc

SEQ ID NO: 87589 - DNA, 2072 bp, Homo sapiens
tttagtgcagtatcctgaatttagattcacacagagttttaaatagttttatttaaaaattggtggagggaaacccataatttgaataatggagtctcttaaattcagtctgaattggactgcttgcattggtctgtcaggtgataactaaatttccctttcagttggtcctgttgaaacggaaccataaaatgactgtgatattacttatccaacataagaaggaaatcagcattttatttacattttatccctgtttcaatacacaaaagcaactccaaagtgaattgtttgagatttaaggtttgcttaactcttcccaaccctttggcttttagatttgcttggaacggtagaagaaatccttccaagcctctcagaaaatatcagtgtttgggggatgaaagattctgttccacaaggtgtaatttcactcaaagaaaaactgagcacctcacctgatgagcccgtgccacgcagccaccatgttgtctcactcctcaagtctacttgtctttacatttttacctctggaacaacaggtctaccaaaagcagctgtgattagtcagctgcaggttttaaggggttctgctgtcctgtgggcttttggttgtactgctcatgacattgtttatataacccttcctctgtatcatagttcagcagctatcctgggaatttctggatgtgttgagttgggggccactggtgggttaaagaggaaattttcagcaagccagttttggagtgactgcaagaagtatgatgtgactgtgtttcagtatattggagaactttgtcgctacctttgcaaacaatctaagagagaaggagaaaaggatcataaggtgcgtttggcaattggaaatggcatacggagtgatgtatggagagaatttttagacagatttggaaatataaaggtgtgtgaactttatgcagctaccgaatcaagcatatctttcatgaactacactgggagaattggagcaattgggagaacaaatttgttttacaaacttctttccacttttgacttaataaagtatgactttcagaaagatgaacccatgagaaatgagcagggttggtgtattcatgtgaaaaaaggagaacctggacttctcatttctcgagtgaatgcaaaaaatcccttctttggctatgctgggccttataagcacacaaaagacaaattgctttgtgatgtttttaagaagggagatgtttaccttaatactggagacttaatagtccaggatcaggacaatttcctttatttttgggaccgtactggagacactttcagatggaaaggagaaaatgtcgcaaccactgaggttgctgatgttattggaatgttggatttcatacaggaagcaaacgtctatggtgtggctatatccaggttatgaaggaagagcaggaatggcttctattattttaaaaccaaatacatctttagatttgggaaaaagtttatgaacaagttgtaacatttctaccagcttatgcttggtccacgatttttaagaattcaggaaaaaatggaagcaacaggaacattcaaactattgaagcatcagttggtggaagatggatttaatccactgaaaatttctgaaccactttacttcatggataacttgaaaaagtcttatgttctactgaccagggaactttatgatcaaataatgttaggggaaataaaactttaagatttttatatctagaactttcatatgctttcttaggaagagtgagaggggggtatatgattctttatgaaatggggaaagggagctaacattaattatgcatgtactatatttccttaatatgagagataattttttaattgcataagaattttaatttcttttaattgatataaacattagttgattattctttttatctatttggagattcagtgcataactaagtattttccttaatactaaagattttaaataataaatagtggctagcggtttggacaatcactaaaaatgtactttctaataagtaaaatttctaattttgaataaaagattaaattttactgaa

SEQ ID NO: 87590 - DNA, 6392 bp, Homo sapiens
aaaagggatggatgagcagctgacttccctgaaggttctttacaatgacctgggcgcacaggtgacagaaggaaaacaggatctggaaagagcatcacagttggcccggaaaatgaagaaagaggctgcttctctctctgaatggctttctgctactgaaactgaattggtacagaagtccacttcagaaggtctgcttggtgacttggatacagaaatttcctgggctaaaaatgttctgaaggatctggaaaagagaaaagctgatttaaataccatcacagagagtagtgctgccctgcaaaacttgattgagggcagtgagcctattttagaagagaggctctgcgtccttaacgctgggtggagccgagttcgtacctggactgaagattggtgcaataccttgatgaaccatcagaaccagctagaaatatttgatgggaacgtggctcacataagtacctggctttatcaagctgaagctctattggatgaaattgaaaagaaaccaacaagtaaacaggaagaaattgtgaagcgtttagtatctgagctggatgatgccaacctccaggttgaaaatgtccgcgatcaagcccttattttgatgaatgcccgtggaagctcaagcagggagcttgtagaaccaaagttagctgagctgaataggaactttgaaaaggtgtctcaacatatcaaaagtgccaaattgctaattgctcaggaaccattataccaatgtttggtcaccactgaaacatttgaaactggtgtgcctttctctgacttggaaaaattagaaaatgacatagaaaatatgttaaaatttgtggaaaaacacttggaatccagtgatgaagatgaaaagatggatgaggagagtgcccagattgaggaagttctacaaagaggagaagaaatgttacatcaacctatggaagataataaaaaagaaaagatccgtttgcaattattacttttgcatactagatacaacaaaattaaggcaatccctattcaacagaggaaaatgggtcaacttgcttctggaattagatcatcacttcttcctacagattatctggttgaaattaacaaaattttactttgcatggatgatgttgaattatcgcttaatgttccagagctcaacactgctatttacgaagacttctcttttcaggaagactctctgaagaatatcaaagaccaactggacaaacttggagagcagattgcagtcattcatgaaaaacagccagatgtcatccttgaagcctctggacctgaagccattcagatcagagatacacttactcagctgaatgcaaaatgggacagaattaatagaatgtacagtgatcggaaaggttgttttgacagggcaatggaagaatggagacagttccattgtgaccttaatgacctcacacagtggataacagaggctgaagaattactggttgatacctgtgctccaggtggcagcctggacttagagaaagccaggatacatcagcaggaacttgaggtgggcatcagcagccaccagcccagttttgcagcactaaaccgaactggggatgggattgtgcagaaactctcccaggcagatggaagcttcttgaaagaaaaactggcaggtttaaaccaacgctgggatgcaattgttgcagaagtgaaggataggcagccaaggctaaaaggagaaagtaagcaggtgatgaagtacaggcatcagctagatgagattatctgttggttaacaaaggctgagcatgctatgcaaaagagatcaaccaccgaattgggagaaaacctgcaagaattaagagacttaactcaagaaatggaagtacatgctgaaaaactcaaatggctgaatagaactgaattggagatgctttcagataaaagtctgagtttacctgaaagggataaaatttcagaaagcttaaggactgtaaatatgacatggaataagatttgcagagaggtgcctaccaccctgaaggaatgcatccaggagcccagttctgtttcacagacaaggattgctgctcatcctaatgtccaaaaggtggtgctagtatcatctgcgtcagatattcctgttcagtctcatcgtacttcggaaatttcaattcctgctgatcttgataaaactataacagaactagccgactggctggtattaatcgaccagatgctgaagtccaacattgtcactgttggggatgtagaagagatcaataagaccgtttcccgaatgaaaattacaaaggctgacttagaacagcgccatcctcagctggattatgtttttacattggcacagaatttgaaaaataaagcttccagttcagatatgagaacagcaattacagaaaaattggaaagggtcaagaaccagtgggatggcacccagcatggtgttgagctaagacagcagcagcttgaggacatgattattgacagtcttcagtgggatgaccatagggaggagactgaagaactgatgagaaaatatgaggctcgactctatattcttcagcaagcccgacgggatccactcaccaaacaaatttctgataaccaaatactgcttcaagaactgggtcctggagatggtatcgtcatggcgttcgataacgtcctgcagaaactcctggaggaatatgggagtgatgacacaaggaatgtgaaagaaaccacagagtacttaaaaacatcatggatcaatctcaaacaaagtattgctgacagacagaacgccttggaggctgagtggaggacggtgcaggcctctcgcagagatctggaaaacttcctgaagtggatccaagaagcagagaccacagtgaatgtgcttgtggatgcctctcatcgggagaatgctcttcaggatagtatcttggccagggaactcaaacagcagatgcaggacatccaggcagaaattgatgcccacaatgacatatttaaaagcattgacggaaacaggcagaagatggtaaaagctttgggaaattctgaagaggctactatgcttcaacatcgactggatgatatgaaccaaagatggaatgacttaaaagcaaaatctgctagcatcagggcccatttggaggccagcgctgagaagtggaacaggttgctgatgtccttagaagaactgatcaaatggctgaatatgaaagatgaagagcttaagaaacaaatgcctattggaggagatgttccagccttacagctccagtatgaccattgtaaggccctgagacgggagttaaaggagaaagaatattctgtcctgaatgctgtcgaccaggcccgagttttcttggctgatcagccaattgaggcccctgaagagccaagaagaaacctacaatcaaaaacagaattaactcctgaggagagagcccaaaagattgccaaagccatgcgcaaacagtcttctgaagtcaaagaaaaatgggaaagtctaaatgctgtaactagcaattggcaaaagcaagtggacaaggcattggagaaactcagagacctgcagggagctatggatgacctggacgctgacatgaaggaggcagagtccgtgcggaatggctggaagcccgtgggagacttactcattgactcgctgcaggatcacattgaaaaaatcatggcatttagagaagaaattgcaccaatcaactttaaagttaaaacggtgaatgatttatccagtcagctgtctccacttgacctgcatccctctctaaagatgtctcgccagctagatgaccttaatatgcgatggaaacttttacaggtttctgtggatgatcgccttaaacagcttcaggaagcccacagagattttggaccatcctctcagcattttctctctacgtcagtccagctgccgtggcaaagatccatttcacataataaagtgccctattacatcaaccatcaaacacagaccacctgttgggaccatcctaaaatgaccgaactctttcaatcccttgctgacctgaataatgtacgtttttctgcctaccgtacagcaatcaaaatccgaagactacaaaaagcactatgtttggatctcttagagttgagtacaacaaatgaaattttcaaacagcacaagttgaaccaaaatgaccagctcctcagtgttccagatgtcatcaactgtctgacaacaacttatgatggacttgagcaaatgcataaggacctggtcaacgttccactctgtgttgatatgtgtctcaattggttgctcaatgtctatgacacgggtcgaactggaaaaattagagtgcagagtctgaagattggattaatgtctctctccaaaggtctcttggaagaaaaatacagatatctctttaaggaagttgcggggccgacagaaatgtgtgaccagaggcagctgggcctgttacttcatgatgccatccagatcccccggcagctaggtgaagtagcagcttttggaggcagtaatattgagcctagtgttcgcagctgcttccaacagaataacaataaaccagaaataagtgtgaaagagtttatagattggatgcatttggaaccacagtccatggtttggctcccagttttacatcgagtggcagcagcggagactgcaaaacatcaggccaaatgcaacatctgtaaagaatgtccaattgtcgggttcaggtatagaagccttaagcattttaactatgatgtctgccagagttgtttcttttcgggtcgaacagcaaaaggtcacaaattacattacccaatggtggaatattgtatacctacaacatctggggaagatgtacgagacttcacaaaggtacttaagaacaagttcaggtcgaagaagtactttgccaaacaccctcgacttggttacctgcctgtccagacagttcttgaaggtgacaacttagagactcctatcacactcatcagtatgtggccagagcactatgacccctcacaatctcctcaactgtttcatgatgacacccattcaagaatagaaacaatatgccacacgactggcccagatggaaaggactaatgggtcttttctcactgatagcagctccaccacaggaagtgtggaagacgagcacgccctcatccagcagtattgccaaacactcggaggagagtccccagtgagccagccgcagagcccagctcagatcctgaagtcagtagagagggaagaacgtggagaactggagaggatcattgctgacctggaggaagaacaaagaaatctacaggtggagtatgagcagctgaaggaccagcacctccgaagggggctccctgtcggttcaccgccagagtcgattatatctccccatcacacgtctgaggattcagaacttatagcagaagcaaaactcctcaggcagcacaaaggtcggctggaggctaggatgcagattttagaagatcacaataaacagctggagtctcagctccaccgcctccgacagctgctggagcagcctgaatctgattcccgaatcaatggtgtttccccatgggcttctcctcagcattctgcactgagctactcgcttgatccagatgcctccggcccacagttccaccaggcagcgggagaggacctgctggccccaccgcacgacaccagcacggatctcacggaggtcatggagcagattcacagcacgtttccatcttgctgcccaaatgttcccagcaggccacaggcaatgtgaagtattcatccggccaaccaatgtttcctgacgtacagtgttgcccttttcagcaaatgccaattccaagttccattaaatcagaagctgccatggctccttggcccacgatgttgagtgctgactgtgtgttctactgaaagagtaaaacactgactatccaaagagaaatggatattttgtttttataataaccatatattattgttttcttcttccctttctatgcaagtgtaaattaatgaacagagaggtatttggaaatggtaatacatttgtcacggatttgtataatgtatacagcattgggaaagtgggtgggggctttctaatatgataccgtctttttaataactatgacaaagcttacataagaattagaagaccactttacatttttacattccttctgctgttcatattaaccttgcacaattactttcattttttctttgactcttttaccacaatgttttggttatttataatttatcagccatatgtttatcagccatataaccaactagatcccaaatagatccatgtatttgtttccgtgatttggccacattaataaattcataaatttcaatcaaatatcttatatatacacacatatgg

SEQ ID NO: 87591 - DNA, 1924 bp, Homo sapiens
tcccccagggggggcttgctggcgtctccgagctgcagatccactctttcgggccgggtccaggccctggggccccgcggtccccctgcagcgcccggctcccctgccgcctcttcttcagagtctgcctgaagcctgggctctcagaggaggccgccgagtccccgtgcgccctgggcgcggcgctgagtgcgcgcggaccggtctacaccgagcagcccggagcgcccgcgcctgatctcccactgcccgacggcctcttgcaggtgcccttccgggacgcctggcctggcaccttctctttcatcatcgaaacctggagagaggagttaggagaccagattggagggcccgcctggagcctgctggcgcgcgtggctggcaggcggcgcttgtcaggcggaggcccgtgggcccgggacattcagcgcgcaggcgcctgggagctgcgcttctcgtaccgcgcgcgctgcgagccgcctgccgtcgggaccgcgtgcacgcgcctctgccgtccgcgcagcgccccctcgcggtgcggtccgggactgcgcccctgcgcaccgctcgaggacgaatgtgaggcgccgctggtgtgccgagcaggctgcagccctgagcatggcttctgtgaacagcccggtgaatgccgatgcctagagggctggactggacccctctgcacggtccctgtctccaccagcagctgcctcagccccaggggcccgtcctctgctaccaccggatgccttgtccctgggcctgggccctgtgacgggaacccgtgtgccaatggaggcagctgtagtgagacaccccaggtcctttgaatgcacctgcccgcgtgggttctacgggctgcggtgtgaggtgagcggggtgacatgtgcagatggacccttctctcaacggcggcttgtgttcgggggtccagacccctgaactcggcatacatctggccacgcccacacttgtttccaaggctccaactgtaagaagagggtggaccggtgcagcctgcagccatgccgcaatggcggactctggcctggacctgggccacgccctggcgctgccgctgccgcgccggcttcgcgggtcctcgctgcgagcacgacctggacgactgcgcgggccgcgcctgcgctaacggcggcacgtgtgtggagggcggcggcgcgcaccgctgctcctgcgcgctgggcttcggcggccgcgactgccgcgagcgcgcggacccgtgcgccgcgcgcccctgtgctcacggcggccgctgctacgcccacttctccggcctcgtctgcgcttgcgctcccggctacatgggagcgcggtgtgagttcccagtgcaccccgacggcgcaagcgccttgcccggcggccccgccgggcctcaggcccggggaccctcagcgctaccttttgcctccggctctgggactgctcgtggccgcgggcgtggccggcgctgcgctcttgctggtccacgtgcgccgccgtggccactcccaggatgctgggtctcgcttgctggctgggaccccggagccggtcagtccacgcactcccggatgcactcaacaacctaaggacgcaggagggttccggggatggtccgagctcgtccgtagattggaatcgccctgaagatgtataccctcaagggatttatgtcatatctgctccttccatctacgctcgggaggcctgacgcgtctcctccatccgcacctggagtcagagcgtggatttttgtatttgctcggtggtgcccagtctctgccccagaggctttggagttcaatcttgaaggggtgtctgggggaactttactgttgcaagttgtaaataatggttatttatatcctattttttctcaccccatctctctagaaacacctataaaggctattattgtgatcag

SEQ ID NO: 87592 - DNA, 4042 bp, Homo sapiens
aataaaatacctaggaatccaacttacaagggatgtgaaggaactcttcaaggagaactacaaaccactgctcaatgaaataaaagaagatacaaacaaatggaagaatattccatgctcatgtgtagaaagagtcaatatcgtgaaaatggccatactgcccaaggtaatttatagattcaatgccatcaccatcaagctacaaattactttcttcacagaattggaaaaaactactttaaagctcatatggaaccaaaaaagagctcacattgccaagtcaatcctaagccaaaagaacaaagctggaggcatcacgctacctgacttcaagctatactacaagactacagtaaccaaaacagcatggtactggtaccaaaacagaggtacagaccaatggaacagaacagagccctcagaaataatgctgcatatctacaactatctgatctttgacaaacctgacaaaaacaagaaatgtggaaaggattccctatttaataaatggtgctgggaaaactggctagccatatggagaaagctgaaactggatcccttccttacaccttacacaaaaattaattctagatggattaaagacttaaatattagacctacaaccataaaaaccttagaagaaaacctaggcaataccattcaggacataggcatgggtaagaacttcatgtctaaaacaccaaaagcagtagcaacaaaagccaaaatttacaaatgggatctaaataaactaaagagcttctgcactgcaaaagaaattaccatcagagtgaacaggcaacctacaaaatgggagaaaatttttgcaatctactcatctgacaaagggctaacatccagaatctgcaatgaactcaaacacatttacaagaaaaaaacaaacaaccccatcaaaaagtgggtgaaggatatgaacagacacttctcaaaagaagacatttatgcagtcaaaagacatgaaaaaatgttcatcatcactggccatcagagaaatgcaaatcaaaaccacaatgagaagacatggacacaggaaggggaacatgacacaccggggcctgttgtggggtggggggagggtggagggatagcatttggagatcgcgggcctgtcggtgtctgctcctacacgccaacgccggtgggcaggaccatgtctctggtaagccagaattcgcgccgccgccgccgccgcgttgcaaaggctactgcgcacaacagcagctggggcgaaatgcaggcccctaatgcccccggtctccccgctgatgtgccaggctcagacgtcccccagggtcccagcgattcccagatcctccagggcctctgcgcctctgagggcccaagcacctccgttctgcccacctccgctgagggcccaagcacctttgtgccgcccaccatctctgaggcctcaagcgcctccgggcagcccaccatctctgagggacctggcacctccgtgctgcccacccccagtgagggcctaagcacctccgggcctcccaccatctctaaggggctgtgcacctctgtgacgcttgccgcctctgagggccggaacacctccaggccgcccacttcctctgaggaacctagcacctccgtgccgcccaccgcctctgaggtaccgagcacctccctgccgcccacccctggtgagggaacgagcacctccgtgccgcccacagcctatgagggaccaagcacctccgtggtgcccacccctgatgagggaccaagcacctccgtgctgcctacacctggtgagggaccaggcacctccgtgccgctcgccgccactgagggcctgagcacctccgtgcaggccactcctgatgagggaccgagcacctccgtgccgcccaccgccactgagggcctaagcacccccgtgccacccacccgtgatgagggaccgagcacctccgtgccggccactcctggtgagggaccgagcacctccgtgctgcccgccgcctctgacggacaaagcatctccttggtgcccacccgcggtaagggatcaagcacctccgtgccccccaccgccaccgagggcctgagcacctccgtgcagcccactgctggtgagggatcgagcacctccgtgccgcccacccctggtgggggactgagcacctccgtgccgcccaccgccactgaggagttgagcacctccgtgccgcccactcccggtgagggaccaagcacttccgtactgccaatccccggtgagggactgagcacctctgtgccgcccaccgcctctgatggatcggacacctccgtgccgcccactcctggtgagggcgcaagcaccttagtgcagcccaccgcccctgacggaccgggaagctccgtgctgcctaaccctggtgagggcccgagcacattgtttagctctagtgcttctgtggaccggaaccccctccaagtgttcccttgttttgccaagccctagggtaaccaaggcctccgtggactcagattctgagggtcctaagggtgcagaaggccctatagaattcgaggtcctgagagactgtgagagccccaactccattagtattatgggcctcaatacttcccggaatgcaattaccctgaagccccaagaccctatggaacagaacgtagctgagctgttgcagttcctgctggtgaaggatcagagcaagtaccctatccgggagtctgaaatgcgggaatatattgttaaagaatatcgcaaccagtttcctgagatactcaggcgagcagcagcccacctggagtgcatttttaggtttgaattgagagaacttgaccctgaggcacacacctacattctgttaaacaaactgggacctgtgccctttgaagggttagaagagagcccaaatgggccaaagatgggcctcctgatgatgattctaggccaaatattcctgaatggcaaccaagccaaggaggctgagatttgggaaatgctctggaggatgggggtgcagcgggaaaggaggctttccatttttgggaacccaaagagacttctgtctgtggagtttgtatggcagcgttacttagactacaggccagtaactgactgtaaaccagtggagtatgagtttttctggggcccaagatcccacctagaaaccaccaagatgaaaattctgaagttcatggcgaaaatatataacaaagatcctatggattggccagagaaatacaacgaagctctggaagaagatgctgccagagcctttgctgagggttggcaggctctccctcactttaggaggcccttttttgaggaagctgctgcagaggtaccatcccctgattcagaggtttccagctattcctcaaaatatgccccacattcatggcctgagtcaagattggagagcaaggcaaggaagctggtgcagttatttctgcttatggattcaactaagctgcctataccaaagaaaggaattctgtactacattggccgagagtgcagcaaagtgttccctgacctcctgaatcgtgctgcccgcaccctgaaccatgtctatgggacagaactagtggtacttgatcccaggaatcactcctatactctgtacaaccgaagggagatggaagaaactgaggagatcgtagacagtccaaacaggcctggcaacaactttttgatgcaggtcctaagcttcatctttattatgggcaaccatgccagggagtctgcagtctgggcctttctgcggggcttaggggttcaagctgggagaaagcatgtgattacctgcagatacttgagtcagcgctatatagacagtttacgggttcctgacagtgatccagtgcaatatgagtttgtatggggtcctagagcccgtttggaaacctctaagatgaaagccttgcgatatgtggccagaatccacagaaaggaaccacaggactggccacagcagtacagggaggcaatggaagatgaggccaatagagctgatgttgggcacaggcaaatctttgttcacaacttcag

SEQ ID NO: 87593 - DNA, 685 bp, Homo sapiens
  misc_feature (1)...(685): n = a,t,c or g
ggctccgggctgccccgggtcttcttgagcgtcgtccgggatggagggtgctgaactagggaagtgctgctgctgcgagaccccgttacctccggccctccaggatctgggctgcgatctggccatgacgggacaactccttttcggggctctcccacccctcgaggcttgccagggtgggtctccagaggccgacgaataaccaggtggagctgggggcctccagctcggatccgctccacggcctgggcatggggtgaggccctgcgttgactctccgttgatgtggagcacgaggtccccgacctccaaacgaccacagcgctgtgctggggccatccttcagcagcccgcgcacggccagcggagtgtccccagctacatcccggcccccacctaaggtgaggccaaagcctgcgtaaccgcgaaccagctccacagagaaatgaccagaggcctgggatggcttcggagcactacgtgccttaccctggatcaattggggaggtgcgttacatgtctctaaccaacggtgctggggccggtgatccacaatagtggcatgaggcaggcgactgtctgtgacctctatgtccgcagagtccagcacgctaacagcctccttccggcgcaggcgcagaattccaccacactgcctatggacaagaactcataanccccgcac

SEQ ID NO: 87594 - DNA, 583 bp, Homo sapiens
cggtggcattcccggtacacacagctagcaagaggctgtactgggattcatacactcaacccttaggtttctattaattgagcgatccgcgggggctcactttaaccctcacccagcgaggggtttcactttaaccctcagccagcccaggatgcttgcttcattttcaaaggaggcatgtgaccctcggggaccagtgctcacacagaagctgggcctgagccctgtccccttttccttcaggaattgcatcggacagagcttcgccatggccgagttgcgcgtggttgtggcactaacactgctacgtttccgcctgagcgtggaccgaacgcgcaaggtgcgggggaagccggagctcatactgcgcacggagaacgggctctggctcaaggtggagccgctgcctccgcgggcctgagcgtgggcgcgcccctgcggctcccgagggtccaggccccgcccccaaaggaccaggactcgccccaaagatcccgagggcataggccacccccctcgaagttcaggttcagctcctggatgaccaggcaccgctgttgagcagcctggtggtactggccac

SEQ ID NO: 87595 - DNA, 1502 bp, Homo sapiens
atgcaggtgtctatcgcgtgtaccgagcagaaccttcgcagccggagcagtgaggaccgtctgtgtggaccccggccgggccccggaggcggtaatggtgggccggccgggggggggcacgggaatcctccggggggtggagggtctggccccaaggcccgagctgcagtggttcccggacccccagcgcccggtggggccgtccgagagagcaccggccgaggcactggcatgaaatacaggaacctagggaagtgtggtgttcgggtatcctgtcttggcctaggtacctgggtcacatttggttctcagatctcagatgagacagcagaggatgtgctgactgtagcctatgagcatggtgtaaacctgtttgacaccgccgaaagtgttacgcagcaggaaaggctgaaagaaccctagggaacatcctcaagagcaaaggttggaggagatcaagctatgtcatcactaccaagattttttggggaggacaggcagaaaccgagcgaggtttaagccgaaagcacatcattgagggcttgcgaggatccctggaacgcctccagctgggatacgtggacattgtctttgccaatcgctcagaccccaactgtcctatggaggagattgtgcgagccatgacctatgtcatcaaccagggcctggccctatactgggggacatcccgatggggggctgcagaaatcatggaggcctactccatggccagacagttcaatctgattcctccagtgtgtgaacaagcggagcaccatctgtttcagagggagaaggtggagatgcagctgccagagctctaccacaagattggagttggatcagtcacttggtaccctctagcctgtggtctcattactagcaagtatgatgggcgagtcccagatacttgcagggcctccatcaagggctaccagtggctcaaggacaaagtgcagagtgaagatggcaagaagcaacaagccaaagtcatggaccttcttcctgtcgctcaccagctgggctgcaccgtggcccagcttgctattgcgtggtgtctccgcagtgagggtgtcagctctgtcttgctgggggtgtcgagtgcggagcagttgatagaacacctgggcgcgctacaggtgctgagccagctgaccccgcagacagtgatggaaatagacgggctcctgggaaacaagccgcattccaagaagtagtctgtcgcgggcgcagggacccaacccggtgtcgctgcacccgcccgagccccgctcctcgcagccgcctctcccgctccggatccctccacgcagcggccggagccagactagccccgcccaccaacgagtcccggcttcgagtagtgatacgcatgaacaaagccatatccttttgcagtggggtcgagagagaaagtagcacgcccgccccctgctgcgtctttctaggcccttcttgcaaatcccgggcatgagctactcgccgtcggctctctgccactt

SEQ ID NO: 87596 - DNA, 708 bp, Homo sapiens
aattcgccctgcgtttctacctgatccgggccctgcagctgctgcgaggcagtttgggcttagcaggggacctggggaggtggtgttccgaggtgtgggcagccttggctttggacccaagaggctgggggactctgtccgcttgggccagtttgcctccagctccctggataaggcagtggcccacagatttggtaatgccaccctcttctctctaacaacttgctttggggcccctatacaggccttctctgtctttcccaaggagcgcgaggtgctgattcccccccatgaagtctttttggttaccagattctctcaggatggagcccagagcttggtgactctctggagctataatcagacctgtagccattttaactgcgcctatctgggtggggagaagaggcggggctgtgtgtctgcgccaggagccctgggaacgggtgaccttcatatgacgaagaggcacctccagcagccttgagaagcaagaacatggttccggacccagccctagcagccttctccccaaccaggatgttggcctggggaggccacagcagggctgagggaactctgctatgtgatggggacttcctgggacaagcaaggaaagtactgaggcagccacttgattgaacggtgttgcaatgtggagacatggagttttattgaggtagctatgtgattaaatggtattgcagt

SEQ ID NO: 87597 - DNA, 1929 bp, Homo sapiens
tttttttttccattccaatttcacatttattaatgaaaaataatgccttctctacatctattgtgactgtcacagaatcaagcagtaatacaaatatttgctgaaagtaaacacatgatgttaataaagaaaaaaggttcttttcttaagattttgaaaagaacatattcaagaattggaatcctacacaggatgcagaagcaatgctaaggataaaatatcctgactacctttattgacatgatttgtgtttaccagctcattaaaatctatgtttcaaattccctggattttcccaagttccaagactggtaaaaagtatttttacatacacatttgatgctcacattacaaacttaatatctataaacttgaaacttgttttgcacaagtctatggctttactacttttcaagacaaaagtcacatattaaaatacaaactactcaaaagcaaatagttgtcaagaatgtggtttacaagacagatcttacagataatacagactatattatgatttatctgtttgaaaacagaaagtagtgtattatactgaattctggtataaggtgcgcaggaaactttacttacaatcctttattttcataaggtaaacaccaaagtatttctcacatatattaccaccagattttttttaaaccaaattccggtttaaaaatcacacactgacaacacagaaatacgaaatgctaggaaaagtctagcatatgaaggaaaaacatgtcttatgcattctaatataattttttacaatctagcataaaggcaaatgcggtttttttaaaaatgcagtccatatacaattatagaaaaaacattagtcaagccacctaatataaccaatttcacagatagcactcatttaatataatgtccaaaaatttccaagtaagtgtctacgtatcagttagaataatgcccacaaggatctccaaactacaaaatatcagcaagtaaatgaaaatcacacatttctctttgaaagactgaagcttgactatgagttaaaaggcaacaactatgaactaactttctttaaaatgacttaaactgcccaatctagagcaatacatgtttcctagctatacatgcaaactggactgtgtggtaaaaatgactcagttacttaaaaaaagcaaaaaagatccaaaataaccagagctcaagctaagctggtgaaaccacagagacactgaagcccagcaactcccaagaagctgaggattaagattaaaaataaactctggatactgaatcctatatcaacactctgaatttatatttattgttagtaatttctattattcttttctttgggtaaaaaaaaatgttttaaaaagaaccaatgttttggaataagcaatgtaactctgatcattctgctatgtgactaccaaaaaggctgttgttcttttagccctaccacttggtaagatagaaagctctccacacacaaggcccagagaaggctgatatcacaagtcagtgtgagttacactcttctcatgcaatggagctactaaaatacatacatttggtcttacaaaaaaattacaaaactaacaaatctttttctccagaattataaaagatagaatctatgaatcagtactaatgtgatcacagaaaaatagcaaactgaagtcaaaaagcacaggctgcccatcatagagtccccagtctatttaatattttcgacctgctctgaggatggagggtgtcaacaccttagaataccatgatgggctttaaaactgggtaaagaatcatccctagggttagggcaaatgtaacttcacttattgcttacacacaggaaaaaatctgtttccttttccaagatattcttttaaggattacttgacagtggttcttttaaaggtatcaaaagatgtcctaaaaaaaaaa

SEQ ID NO: 87598 - DNA, 1398 bp, Homo sapiens
tacaatggcagagttaaagcaactgtgacaaaagacaataaggcccataaagcttaaaatatttgccatctgtctctctaacaaagagtttgtatgtgaaggaaagattgcaaggaaattgaattattttatggaatggaaggtgaatctgtagagagaacagagtccagtcctctttactttcaggaagcttagggagagcctaaacgggtgctgagaatgtctcttttctttccaggttttctctttctttgatttgatccgctactgtgtcagtgtttgcaatcagattgcgtctcacctgcacatacatgtcttcagaatcaaggtctctacagctcattctaatcatcattaatgatgtaattggtatataggaacatcatgttttctgtgtcacctctgcaaaaaatggagctctgagcccagttctgtgagcatggtgtcagagccctccaaagtcctgagaaatcaataccagggatccaaatctcagacaccagtttgaagcaatacctggataccaagactcagagtgaggatatggattttgggagctgacagttttgctgatcctgccacactggcaggggctgaagtccagaaatggtgtgtagctctagtcattcttattcaccacagctcttatttcacagttttttcccttggtttcttctgtttcttctgttcctcatattcaagtattttctgttggaaatagcctgcaggaggattcttgctcttctcggcttcctggatgaaaagtgagaagagctgtgtcttcacaaacttcttcacaaatcggcggttggtcttggaggtcagagccttacagaaggatctttcttggaagtggccttgcccatttgcctcccgcttgatataggaagcataatggcccacaatcttgacaaagaactgcacaaaggggcctgaaacatgctcgttgatttgttctgcagtctttaactcattgatcccctgaccaagagagtctaagatgtcatcctgaagcttcggtggcaggatgtctttttcatcaccaaccgacattaagaaggttccttcacaaagattgaccagcaggacctcttccatagggctgtccatgacctcctgctggaagcgcatttgtactccaaccatgaagggggtggggcagcagacggtggccagaaggctctcagggacaacagggatgtaggtgtgcgcccagctgaaggggtagagcagtgcggcagcagcatggatgcactgagacaaggtgctgagaccttccgccaggaagatgatttttctctccagcacggcagaggcaaagatctgaagtatctgttcaaaactgagacagtgcaatagagaactaaaatccacatgttctaggtgggagtccagggg

SEQ ID NO: 87599 - DNA, 2273 bp, Homo sapiens
ttttttttttttacacttgggttttaggtatttatttacaaagttcttactaatacaattgcttttaaaatgtagcaaagagtcatttactactctcagaagtggcacatacatggcatagaaaacaatctatagtcagttaactattaaaacagagacttgaaatttaagtgacaaacatttgtagcactccctaaagaaataggaaataaaaatgcatttatccatatgaacttgattattctgaattactgactataaaaaggctattgtgaaagatatcacactttgaaacagcaaatgaattttcaattttacatttaattatgagaccacaataaaaagttgaacatgcgcatatctatgcatttcacagaagattagtaaaactgatggcaacttcagaattatttcatgaagggtacaaacagtctttaccacaattttcccatggtcttatccttcaaaataaaattccacacactatcaaactaaatcaagatttgctagtggataaaattaccataaatataccgtactctctctgaaacagctacaaacatcttgtttttgcaaaatatacaatgtttctcaatctttctgtccttatctcaatttgcaaaaatattttgaaacaatctcctttaaatgttattcttgttaatgagggcaaatcttttaaaatccacatgctagatcttgaaaacgcttgagaagaaaataaactgtgaaaggagtggttatttaaatacttcaaactgcacatgtgaaacagacccactatttaatcagaattctatgcaagttttcatccagtattatgatgtccatttaatctctgcataaattgagctgcacaaatatctatttccataaattcattcatggatactatacaaatagattcacagcagtatttggcacccgcccataaaatttatttactctatcagggttgcaaagctactaatatcagctgatagcaacttaaattattggcctttgaatgacagattcaaacaagagataaattacatcaaaatcactatcattttttacatgaattaacttgaaaatgtaacaggtaaaccttactctttcaagaagaaaaatcaaatagcatagtttagtgttatttatcttccttccagctttcaccaagtgctaattacaagtaccatttaagtcagtttcttatttgagtatgaggtgtctatacatttctataatttaagattttggtaacgcttcatatcaaatgagttgtagatctacttaacgtatgacttctcctttcaaagaaggaaggaaggctgacaagggagggagaagggatacctgctaatgatgatgtgctagaaagacgactcattacatgcttatcattgctggaaggacttcttccctccactgagccgtgggatgtcataagagcccttcgaagagctctttttggagttttggagaaagagaatgctcttgtaaccttttttgaagtcttttttattgctcttgatgctctactcaatgtactgtccatatcttttgtatttacttcaaaggattctggatcagcagtataaataagattctcagcatctgctttacaaatggtgttagctacatgtcgacacagcatctttagccagttttcttttggaagttcatctgatgtcatctggaaactgagtagcacatttgcctgctctgttggtggcctcacaagcaaggcaaaagcattatggcaatcttctgtctctcttatgtccaataccttcttaatctgagaaagaggcattaggtgaatatgcttaagagaagctgggggtcgggtttggccatgaggactcctaaaagtgccaataaccttgtgccgttttcttgctatctctaggcaatcattgaagaggaagagagttacttgttctcctctgtcacaggggtgctcacctagagaaattgtttcaacccgctgtactaagcttcggtgagaagataaaagattagctgggcatccatctacttcataaagcaacatcaaaaatttgcttttgagcttctgtttttctcttatcctcattaatatgcgtcattacttccttcagtgatccaatagctttttctaaagtgcttttgtctggattttcatcagctgtatgcttcttaagatcatttaaaagtaatgcaacactgggtaacctctgtactggtcggataagaagttcaacaaggctctgccgtccacattctggttttgcttggtttatcttgag

SEQ ID NO: 87600 - DNA, 638 bp, Homo sapiens
ggcggccaaaacaaacactaatgagtttttgattgatgtggataaaggagaaaactactgtttcagtgttcaaggagtgattccctcccgaacagggagaccggaagagtacagacagcccggtagagtgtatgggccaggagaaaggggaattcagaggtgagtggctctgccagccatttgcctgggggtatgggtgctgtgggtgacttctggaggagtagctccaccctcagggctgggatatacttccttggttaaatattcaggaaaacaaactgcccgaggttttttgttgttatttgtttgttttggttttgattttgctttggtacaaaaaagattttggacatttagaaatgtttctgtgttgattgtgcccttgtattagcaggtgttttcttgagcacctgtcatgtgctaagccctctgctgagcactggatacacaaactgtgtttaggatttagcaacaagtcacagatttccctgggcattttttcatgcttaaattctaattctgggggtggcttctggaccagctgcagcaggacacagtagacattcgtgagtacccactgtgggctgttgcacagaggctgtagagtctaacccatcaagggaagggattgagtatat

SEQ ID NO: 87601 - DNA, 6433 bp, Homo sapiens
atggggccccggctcagcgtctggctgctgctgctgcccgccgcccttctgctccacgaggagcacagccgggccgctgcgaagggtggctgtgctggctctggctgtggcaaatgtgactgccatggagtgaagggacaaaagggtgaaagaggcctcccggggttacaaggtgtcattgggtttcctggaatgcaaggacctgaggggccacagggaccaccaggacaaaagggtgatactggagaaccaggactacctggaacaaaagggacaagaggacctccgggagcatctggctaccctggaaacccaggacttcccggaattcctggccaagacggcccgccaggccccccaggtattccaggatgcaatggcacaaagggggagagagggccgctcgggcctcctggcttgcctggtttcgctggaaatcccggaccaccaggcttaccagggatgaagggtgatccaggtgagatacttggccatgtgcccgggatgctgttgaaaggtgaaagaggatttcccggaatcccagggactccaggcccaccaggactgccagggcttcaaggtcctgttgggcctccaggatttaccggaccaccaggtcccccaggccctcccggccctccaggtgaaaagggacaaatgggcttaagttttcaaggaccaaaaggtgacaagggtgaccaaggggtcagtgggcctccaggagtaccaggacaagctcaagttcaagaaaaaggagacttcgccaccaagggagaaaagggccaaaaaggtgaacctggatttcaggggatgccaggggtcggagagaaaggtgaacccggaaaaccaggacccagaggcaaacccggaaaagatggtgacaaaggggaaaaagggagtcccggttttcctggtgaacccgggtacccaggactcataggccgccagggccccgcagggagaaaagggtgaagcaggtcctcctggcccacctggaattgttataggcacaggacctttgggagaaaaaggagagaggggctaccctggaactccggggccaagaggagagccaggcccaaaaggtttcccaggactaccaggccaacccggacctccaggccttcctgtacctgggcaggctggtgcccctggcttccctggtgaaagaggagaaaaaggtgaccgaggatttcctggtacatctctgccaggaccaagtggaagagatgggctcccgggtcctcctggttcccccgggccccctggacagcctggctacacaaatggaattgtggaatgtcagcccggacctccaggtgaccagggtcctcctggaattccagggcagccaggatttataggcgaaattggagagaaaggtcaaaaaggagagagttgcctcatctgtgatatagacggatatcgggggcctcccgggccacagggacccccgggagaaataggtttcccagggcagccaggggccaagggcgacagaggtttgcctggcagagatggggttgcaggagtgccaggccctcaaggtacaccagggctgataggccagccaggagccaagggggagcctggtgagttttatttcgacttgcggctcaaaggtgacaaaggagacccaggctttccaggacagcccggcatgccagggagagcgggttctcctggaagagatggccatccgggtcttcctggccccaagggctcgccgggttctgtaggattgaaaggagagcgtggcccccctggaggagttggattcccaggcagtcgtggtgacaccggcccccctgggcccccaggatatggtcctgctggtcccattggtgacaaaggacaagcaggctttcctggaggccctggatccccaggcctgccaggtccaaagggtgaaccaggaaaaattgttcctttaccaggcccccctggagcagaaggactgccggggtccccaggcttcccaggtccccaaggagaccgaggctttcccggaaccccaggaaggccaggcctgccaggagagaagggcgctgtgggccagccaggcattggatttccagggccccccggccccaaaggtgttgacggcttacctggagacatggggccaccggggactccaggtcgcccgggatttaatggcttacctgggaacccaggtgtgcagggccagaagggagagcctggagttggtctaccgggactcaaaggtttgccaggtcttcccggcattcctggcacacccggggagaaggggagcattggggtaccaggcgttcctggagaacatggagcgatcggaccccctgggcttcaggggatcagaggtgaaccgggacctcctggattgccaggctccgtggggtctccaggagttccaggaataggcccccctggagctaggggtccccctggaggacagggaccaccggggttgtcaggccctcctggaataaaaggagagaagggtttccccggattccctggactggacatgccgggccctaaaggagataaaggggctcaaggactccctggcataacgggacagtcggggctccctggccttcctggacagcagggggctcctgggattcctgggtttccaggttccaagggagaaatgggcgtcatggggacccccgggcagccgggctcaccaggaccatggggtgctcctggattaccgggtgaaaaaggggacccatggctttccgggctcctcaggacccaggggagaccctggcttgaaaggtgataagggggatgtcggtctccctggcaagcctggctccatggataaggtgtacatgggcagcatgaagggccagaaaggagaccaaggagagaaaggacaaattggaccaattggtgagaagggatcccgaggagaccctgggaccccaggagtgcctggaaaggacgggcaggcaggacagcctgggcagccaggacctaaaggtgatccaggtataagtggaaccccaggtgctccaggacttccgggaccaaaaggatctgttggtggaatgggcttgccaggaacacctggagagaaaggtgtgcctggcatccctggcccacaaggttcacctggcttacctggagacaaaggtgcaaaaggagagaaagggcaggcaggcccacctggcataggcatcccagggctgcgaggtgaaaagggagatcaagggatagcgggtttcccaggaagccctggagagaagggagaaaaaggaagcattgggatcccaggaatgccagggtccccaggccttaaagggtctcccgggagtgttggctatccaggaagtcctgggctacctggagaaaaaggtgacaaaggcctcccaggattggatggcatccctggtgtcaaaggagaagcaggtcttcctgggactcctggccccacaggcccagctggccagaaaggggagccaggcagtgatggaatcccggggtcagcaggagagaagggtgaaccaggtctaccaggaagaggattcccagggtttccaggggccaaaggagacaaaggttcaaagggtgaggtgggtttcccaggattagccgggagcccaggaattcctggatccaaaggagagcaaggattcatgggtcctccggggccccagggacagccggggttaccgggatccccaggccatgccacggaggggcccaaaggagaccgcggacctcagggccagcctggcctgccaggacttccgggacccatggggcctccagggcttcctgggattgatggagttaaaggtgacaaaggaaatccaggctggccaggagcacccggtgtcccagggcccaagggagaccctggattccagggcatgcctggtattggtggctctccaggaatcacaggctctaagggtgatatggggcctccaggagttccaggatttcaaggtccaaaaggtcttcctggcctccagggaattaaaggtgatcaaggcgatcaaggcgtcccgggagctaaaggtctcccgggtcctcctggccccccaggtccttacgacatcatcaaaggggagcccgggctccctggtcctgagggccccccagggctgaaagggcttcagggactgccaggcccgaaaggccagcaaggtgttacaggattggtgggtatacctggacctccaggtattcctgggtttgacggtgcccctggccagaaaggagagatgggacctgccgggcctactggtccaagaggatttccaggtccaccaggccccgatgggttgccaggatccatggggcccccaggcaccccatctgttgatcacggcttccttgtgaccaggcatagtcaaacaatagatgacccacagtgtccttctgggaccaaaattctttaccacgggtactctttgctctacgtgcaaggcaatgaacgggcccatggccaggacttgggcacggccggcagctgcctgcgcaagttcagcacaatgcccttcctgttctgcaatattaacaacgtgtgcaactttgcatcacgaaatgactactcgtactggctgtccacccctgagcccatgcccatgtcaatggcacccatcacgggggaaaacataagaccatttattagtaggtgtgctgtgtgtgaggcgcctgccatggtgatggccgtgcacagccagaccattcagatcccaccgtgccccagcgggtggtcctcgctgtggatcggctactcttttgtgatgcacaccagcgctggtgcagaaggctctggccaagccctggcgtcccccggctcctgcctggaggagtttagaagtgcgccattcatcgagtgtcacggccgtgggacctgcaattactacgcaaacgcttacagcttttggctcgccaccatagagaggagcgagatgttcaagaagcctacgccgtccaccttgaaggcaggggagctgcgcacgcacgtcagccgctgccaagtctgtatgagaagaacataatgaagcctgactcagctaatgtcacaacatggtgctacttcttcttctttttgttaacagcaacgaaccctagaaatatatcctgtgtacctcactgtccaatatgaaaaccgtaaagtgccttataggaatttgcgtaactaacacaccctgcttcattgacctctacttgctgaaggagaaaaagacagcgataagctttcaatagtggcataccaaatggcacttttgatgaaataaaatatcaatattttctgcaatccaatgcactgatgtgtgaagtgagaactccatcagaaaaccaaagggtgctaggaggtgtgggtgccttccatactgtttgcccattttcattcttgtattataattaattttctacccccagagataaatgtttgtttatatcactgtctagctgtttcaaaatttaggtcccttggtctgtacaaataatagcaatgtaaaaatggttttttgaacctccaaatggaattacagactcagtagccatatcttccaaccccccagtataaatttctgtctttctgctatgtgtggtactttgcagctgcttttgcagaaatcacaattttcctgtggaataaagatggtccaaaaatagtcaaaaattaaatatatatatatattagtaatttatatagatgtcagcaattaggcagatcaaggtttagtttaacttccactgttaaaataaagcttacatagttttcttcctttgaaagactgtgctgtcctttaacataggtttttaaagactaggatattgaatgtgaaacatccgttttcattgttcacttctaaaccaaaaattatgtgttgccaaaaccaaacccaggttcatgaatatggtgtctattatagtgaaacatgtactttgagcttattgtttttattctgtattaaatattttcagggatgttttcagggttttaaacactaatcacaaactgaatgacttgacttcaaaagcaacaaccttaaaggccgtcatttcattagtattcctcattctgcatcctggcttgaaaaacagctctgttgaatcacagtatcagtattttcacacgtaagcacattcgggccatttccgtggtttctcatgagctgtgttcacagacctcagcagggcatcgcatggaccgcaggagggcagattcggaccactaggcctgaaatgacatttcactaaaagtctccaaaacatttctaagactactaaggccttttatgtaatttctttaaatgtgtatttcttaagaattcaaatttgtaataaaactatttgtataaaaattaagcttttattaatttgttgctagtattgccacagacgcattaaaagaaacttactgcacaagctgctaataaatttgtaagctttgcataccttaaaaaaaaaa

SEQ ID NO: 87602 - DNA, 515 bp, Homo sapiens
acgcgaagcttggacgaggctcctcacctacctgctcctggagcggctaaaggtgtctgcccctgcacgggtggttaatgtgtcctcggtggctcaccacattggcaagattcccttccacgacctccagagcgagaagcgctacagcaggggttttgcctattgccacagcaagctggccaatgtgctttttactcgtgagctggccaagaggctccaaggcaccggggtcaccacctacgcagtgcacccaggcgtcgtccgctctgagctggtccggcactcctccctgctctgcctgctctggcggctcttctccccctttgtcaagacggcacgggagggggcgcagaccagcctgcactgcgcgcctggctgagggcctggagcccctgagtggcaagtacttcagtgactgcaagaggacctgggtgtctccaagggcccgaaataacaaaacagctgagcgcctatggaatgtcagctgtgagcttctaggaatccggtgggagtag

SEQ ID NO: 87603 - DNA, 635 bp, Homo sapiens
  misc_feature (1)...(635): n = a,t,c or g
gccagcgctcgcggatgcggctggtgcgcagtagcgggcctggccagcggctcggggcttgcagggagggcggatctcgggtcggacccgcagccccagacgccgggcttgggggttccccccgccccggcctcctgccagtcactaccacccctagcctctccaactgagctcggcgccgggagaggattaagttttgtacatcaggaagaagaagaggctggagaagctacgccaccagctcatgcccatgtacaacttcgaccccacggaggaacaagatgagttggagcaggagctgctggagcatgggcgggacgccgcctctgtacaggctgctacttctgtgcaggccatgcagggcaagactactctgccctccccagggcccactgcagagacccagccggctggtgtttaccngatgtggccaatgccatccatgtgtgagtggcctgggacaagcctgggacttctgattagaggacccattcaagggtggcctacagaggttccccactcccttgattgtcaagacctaatctgaagatctttccctgccaagacacaagagggctgagccaggttcctagctgttctccagacccacctgcttgactttagactctaagaga

SEQ ID NO: 87604 - DNA, 2582 bp, Homo sapiens
  misc_feature (1)...(2582): n = a,t,c or g
ggagaactccaccgggctatgcgaacagaatcctgcgaagaggatggcattccctgtggatatgctggaaaattgcagccatgaggaattggaaaattctgctgaagattacatgtcagatttaaggtgtggggaccctgaaaatccagagtgtttttctcttctcaatattacgattcctattagcctgtcaaatgtaggctttgtacctctttatggtggagatcagacccagaaaattcttgctctctttgcacctgaagattcactgacagctgtggcactttaccttgctgatcagtggtgggctattgatgatattgtgaaaacatctgttccttcaagagaggggcttaagcaggtgagcactcttggggagagagtggttctgtatgttctgaatcgaattatttatagaaaacaggaaatggagagaaatgagatcccattcctgtgtcatagcagtactgattatgctaagattctgtggaagaaaggagaggccattgggttttattcagttaagcctacaggaagcatatgtgcctcttttcttacccaaagttaccaattgccagttcttgatacaatgtttctaagaaagaaatacagaggtaaagattttgggcttcacatgctggaggactttgttgattcctttacagaagatgcgcttggcttgcggtatccactgtcttctctcatgtatacagcttgcaagcaatactttgagaagtatccaggagaccatgaactcctttgggaagttgaaggtgttggacactggtaccagcgaataccagtcaccagagcattacaaagagaagcacttaaaattctagcactttctcaaaatgaacctaaaagacctatgtctggagaatatggtcctgcatctgttccagaatacgaagcaagaactgaagacaatcagtctagtgagatgcagctaactattgattctctaaaagatgcctttgcaagcacttccgaaggtcatgataaaacatctgtttccactcatactcgaagtggtaatctaaagcggccaaagattggaaagcggtttcaggattctgaatttagcagttctcaaggtgaagatgaaaagacctcccagacttcacttacagcttcaataaacaaattggagtctactgcacgcccatcagagagctcagaagaattcctggaagaagaacctgaacagagagggattgaatttgaggatgaaagcagtgatagagatgcacggccagcactggaaacccagccacagcaagagaagcaagatggtgaaaaggaatctgaattagagcctatgaatggtgagataatggacgattctcttaagacctcacttataacagaagaggaagactccactagtgaagttttagatgaagaattaaaattgcagccttttaattccagtgaagactctacaaatcttgttccactggtggtagaatcttcaaaaccccctgaggtagatgcaccagataagaccccacgtatacctgactcagaaatgttgatggatgaaggcacatctgatgaaaaggggcacatggaagagaaattgtccctacttccaagaaagaaagcacatcttgggagttcagacaatgttgctactatgtcaaatgaagaacgatctgatggtggttttccaaactctgtgatagctgaattttccgaaggaaccggtctctgagaatttttctcctaatactacttccctccattggaagaccagggtgaggagggggtatctgagccccaggaaacatctactgcttcttcctccagagttcttttgatagaggttgaactttgnaagacgtgccaatttttcacagaatgcaggaccagaagaatcagtcagaggagcagtctgaagcatcttccgagcaactggatcagtttacacaatcggcagaaaaagctgtggatagcagctcagaggaaatagaagtggaagtgcctgtggtagacaggcggaatttaagaagaaaggccaaagggcataaaggacctgctaagaagaaagctaagctgacctgaaggaagaagaaagtggatgataaatcctcttctttgtaacatagttgttgtttttaaaatatggtaattaataaacagcatggggcacaggacaaaaatttccaaaatttcaatttgaacttacttactatgcagttttttgcttccctttagaacgtagaattcaccattgtttttaattttccaggctatttttggtaaatgcaattttttatttttattaaccatgtttcaattttgggaaaccagatcatattatattttctttatcaggtggtacatctgaccattatttcaaaaatataattaaaaagctgtggaaagtagtaggatttccattacttataaggatcacagaaatcttttatactaagggttttaatagtaaaacttggtgagggttctagaagttttaaatttcaaaactaatcaccaattttttaaaatgtaggcatgcctaaacaaaaataagtgtcaataaattagaaaaaatataacttcaagtaaatgagagc

SEQ ID NO: 87605 - DNA, 808 bp, Homo sapiens
tgtgccgctttttcggatactctacagcagccgcacctatgaccccatcctcaggtggcagcaccctttcgggcatcactgcaccagccgtgcctaacatcccatcccccattggggtgaatggcttcaccggcctccccccacaggccaatgggcaacctgctgcggaagaaattgttcgccaatggcatccacccctacccagcacagagccccaccgccgcggaccccctggcagcaggcctacgccggagtgcagcagtatgcaggtccagctgcctaccctgctgcctatggtcaaataagccaaggcctttcctcagccgcctccaatgatcccccagcagcagagagaaggcttcgtgagcttcgacaacccggccagcgcgcagaccgccatccaggccatgaacggcttccagatcggcatgaagaggctcaaggtgcagctgaagcggcccaaagacgccaatcgcccgtactgagcgccggcgggagcgtcccccgggggagaccaggactcgcacagggccagtcaaatccaccacagtctcgcgctgagctaggaataaagttcacgtaatcacatgagagtggagaaaagtcccccatccggcaggatgctgaacgggctacattaaaaaacaaacctctctctatatatatttataaatgagaactgttggatgacacctttgacatatcagccaatatcaatcaagctgaagactccagacactgtctgtgtgactgtaacatttcttcaaggaaagtatagcgtctatggagttcagagggcacgtgtttg

SEQ ID NO: 87606 - DNA, 2032 bp, Homo sapiens
agggggcctcttcggtgttggtgagacagcagccaagatcttaaaaagcaacatcgatgtgttatttgcagacgtagctgggtgcgaagaatcaaattggaaattatggaatttgtgaatttcctgaagaatcccaagcagtatcaggacttaggagcaaaaattccaaagggagccatgctcactggtcctcctggtaccggcaagacccttcttgccaaagcaactgcaggggaggccactgtgcccttcatcactgtgaacgggtctgagttcctggaaatgtttattggcgttgggccagcaagggtaggtggatgggaacctgctgcagggttcaactctgccaccaacgtcgtggtgttggctggcaccaaccgccctgacgtcctggacccggccctcatgcggcctggccggtttcatcgccagatttacactggtcccccttacattaaaggcaggtcctccatctttaaggtccacctgcgcccactgaagctggacaagagcctcaataaggacaccctggcgaggaagctggcagtgctcaccccaggcttccctgatgtctgtttacataccaaagttaaaaagctggaatgttaccaagactgctttcttctgcccatagacggggatgactcagcactacccctcaacagagatgactttgatgactctgcccctcagcagggcttactaagcactaccccttaacagggatgactccgcactgcccctcaacagggatgactcagcagggatgactcagcactgcccctcaacagggatgactcagcagggatgactcagcactgtcccttagcagtgatgacacagcaaggatgactcagcactgcccctcagcaaggatgactcagcactgccgctcaacagacatgactcagggatggcttagtactgcccctcagcagggatgactcagcaccgcccctcaacagggatgactcagcactgcccctcaacagggatgactcagcagggatgactcagcactgtcccttagcagcgatgacacagcaaggatgactcagcactgcccctcaccaaggatgactcagcactgccgctcaacagacatgactcagggatggcttagtactgcccctcagcagggatgactcagcagggatgactcagcaccacccctcaacagggatgactcagcagggatgactcagcactgcccctcaacagggatgactgcagggatgactcagcactgcccctcagcagggatgactcagcactgcccctcagcagggatgactcagcagggatgactcagcaccgcccctcaacaggcatgactctgcagagatgactcagcactgcccctcagcagggatggctcagcagggatgactcagcattgcccctcaacagggatgactcagcagactcagcagggatgactcagcactgcccctcaacagacatgactcagcagggatgactcagcaccacccctcagcaaggatgactcagcagggatgattcagcagagataactcggggatgactctgattgtccttcagcagggatgagtctgttttgctccgatggaagcatctgtagtgtccatcagcaggtgaatggccaaagtggtatatactgtagtcacattcagctataaaaaggaataaagtatcgatgcatgccacaacatgggtgaacctagaaaatactgatctaaatgcaagaagccaggcacaaaaggccacatagtatatgttcccatttatgtgaaatgtgcagaataataataaaaatgtatagaatagcaaatctgtagggacagacatgaggtgagtggttgccagaagtggaaatgggagttaactataaattgcacagggtaccttacagagatgatggaaatgtcctaaaactagattatggcaatagttgcactacgtgatcagtttattaaaaatcgttgatgtgtgtgtgtaaaatgggtggattttatggtttataaattataccttaataaaggttaacaaa

SEQ ID NO: 87607 - DNA, 4242 bp, Homo sapiens
tttaatcttctaaatctcaatcagttgtttattggttggcaaacaagtttcacttttacaacaaatattagtaatgaggtcatccaactttgaggccatacaaaatggatcataaattaaaaaaaaaattatatgtgctgctaatttaccttttgtattcctacattactcaaaatcctgtcaaataaataaattttcctgttaataaacagaagacttttttttaaaaaaatcacttcaaaataatttgaccttccaatgcttacgagggagtgaatttcctctaaaaagtggtagtgcaggtgcccacttgttgatcagactgagcattcagcactttaatgcctatggaaaaccgtttttcacatgcagaagccccactagttctatagacaccttttgacttctagaatcatagctagtgtcctggtgatgaactgcttgccaaatatgctttgcattacaacagacgtgccctgtaaacataaaagtttgtcctgctctaatttgcaaaaaacactgttggaaatattctgactgcataaagatatatagtgagggaaggaagtctaattttatttattttgtttttttgtaaaaaataatttgtttgcattactagaaaatgattcttataaagtgatagttccatttatttattttttgccaggcgaaattttaaaggaataaaaggcaaaaaagaaaaaaagaaaatgaagaaagagaagaaaggaaggaaactttgctctcttactggtagacaaacttgcaagaccattcttaaaagaaaaagaaaatttctttttttttttttctactacattaacaggactccaaattctggaggaacagaaaagcagacctatatgtgcaatgctacgtatctgtaccattaccataggaaattgctccacctctttttctgcccattaggtttaatcatcagttaatacagcaaatcataaaatatgcattttagcatataattctaggaattcccctcccatttcattattaattttggttggttttaatttggtttccacagctattccagctgtgggtgaaattcagggttgtgaggtgaccaaaaaccctatgtgatacagttttgcttttgctcttatgtttggtttggtggcaggcactccaatctaggatggcggcattgcttacttaatttcaggacaattgttctggggcctttttaaaaggcagggtccttggtaaattttaggtaaacacagcatcaggggatgtttaaaacatacacgaacataattccaacaaggccacaatgagtgcccactttccttcatatcttgttcattaacataatgaagtctccatctgaaggggaaaggacaagcaaaggatggggtaccaggggaattttagcagttatctttctccccctgggctgaccctaaaaattcccattaaaaaaaaaaaagtctgagagtttgtgtttgtctttagaggacagcataaagatttaggagtacacacattattaccactgcttatatcaactcagaacagtcaacaaggtgttagcagttttgttggttccaatttctgtgtcatcttctatagactagtgaccaaatgagccggtccttttgaacttccctcgggaggggtcccatctttgtttggaggaactataaatccatcactgctgccgcgacctagctggtagtaagtatgcagctgatggacgtggtttctggagcctaggtttggcatgcttttgtagtaaacatcttcggcatcaccacatttggccggtgggggttcggtctgggtgctggtggtaacactctctgtggcggccacaccagccagtgtcggcatgctggtatagagagagtctctatggggtgactggagatcttctgtgtgctcgttggttagcaaagggaaaaagctctcactgtggtcttgggggaatccgcccttctggtataatggtgtggctggtggttctcggtggagtatactcttgggggcagcaaaggagcatcagattcctcatgaatgagttccaggcccaaactctcctcgtggttaaacgaggtggcatcatccaggacaatggcatcatcttcccttccactgccaaggttattcaccagcttgttcatcagattcctgttctgttcactggagcgctcatggttgttcaggtaagaagggatatagttggaagtgagttccttcagaatctttttctctagggcggtctcgttatggttatagccacggtctatgatttgcacacagttgctcaggtattcgccgctggcaatgctgtaactattgccatggttaccattcagtggtagagtatccatgacacttgtatccctggcattgttcagaagcccctctctgttgagtgacgctgaactgtttatgtctccagtaataaaggaagactctgactgctttcgaaccgtgtcattccacattctacggattcggctctgtgagcctgtggagtagcgtccaggagttcgagaaccagatgttttccctgaaccaatggaactctctgtacttttgccactacagcaatgtgttcgcaggcatttcccatactcttttcgtaccttcttctgtaggacacaatggaaaataaatataaacattccctgtagagaattgaaaatggtgaagagataaggcccatgatgactgtgctttccattaatatacatgagtccaaaggccccaggtcaatcctaataggcagagaagagctattgcacctataacccatgacttgatgaagggtctgttatcctcatagttgatgttatcaagacagcctgattcaggtttcagtatagcagtatgatgaaacattttatataaagcaatcccaaggaagattacattaagcataattatcaaagttgctggtcctataaaactccaaatgaagtaggtgtcaagtcggagccaacatactttatctgttccataactcctgtagtctactgcagctgacacagccacaatgagtgcaggcatcccatagccgaccagataaaagtatttcctacgtgaatgttcactctcaaaaacctccaccagcatgatataaagctgcaccccctccaggaacatccaggtgaaggcagccaagaagaagaaatgtaacagggcagcgaaaacagcacaggcaattggttggtcagttcggttgatcccaatcaggaagagcagctctgctacaaagagactgatgcagaggttcttgtggatggtgttacggtcactctggagcccgcggaaaaagcaaaatgtgaagatgcaaatcaggagacaaacaagggacagcaaaattccaacccacgtgatcacatccagaaggaggtcatggaccgcatcactgtgcttaacttccacatgtgccatcagtactgcaaaatttgttaggtggttacaagagcatgtagtatgtgtcttatttgttgtcaggagccgacagccttgtgttgaccaataacctgtcattgtacgcttggagtagctccaaaatgaacagttagggttgaaattttcctctgactgcttgatatgtttaacagtaaataccacaggatcagccaaataaaccttgttactgaactctttgtttattgctgccgtaataacaggggaattgacaataacagaatgatttgtggacaaagcttccgttcccaacttcatactggcattctccgtggataaataaggacccaagttgttatacaggacaaaggccactctgatctctccatttcggccattttgctttaaggtatttgcagacagctggatagtgcttccatggcccatgttttctggaaattttaggtcttctaagtttccttctgtgctcagtcttgcaacttccaatttaatattgtctgtattctccctgacaatgtcagtcttcaaaaggttatcagccagcacaaaagcactttcctccacagtatgaagcaacatggtggccgcacgcagctgatcactcgtagtcaggtctctccatgcattcaaagcttgtggctgaaggaggttgttaactgtctcgaccattgccttgttcaaactccgggcagcactatcttttccacctggggtcaagttccgaagctgtacatctaggaggcctaccagctggtccatggcccggacagagtaggtgatgtccccagcattcaagtgatttcttgtctgttcagc

SEQ ID NO: 87608 - DNA, 2018 bp, Homo sapiens
gcggccgcggccaccgcctcccggcccggggccgcccgtggagcccgcggtggcctgaggcgccgccgccgccggccgacgtgctcggggatgcggccctccaacgcctgcgcgaccggcagtggctggaggcggtgttcgggaccccgcggcgggcaggctgtccggtgccccagcgcacgcatgccgggcccagccttggcgaagtgcgcgcgcgattgctccgggctctgcgcctggtgcggcggctgcgcggcctgagccaggccctgcgcgaggccgaagccgacggcgcggcctgggtcctgctgtactcccagaccgcgccgctgcgcgcggaactggccgagcggctacagccgttgacccaggctgcctatgtgggcgaggcgcggaggaggctggagagggtccggcgccgccggctgcggcttcgcgagagggcccgggaacgcgaggccgagcgggaggcagaggccgcgcgggcagtggaacgcgagcaggagattgaccgctggagggtgaagtgtgtgcaggaggtgggggagaagaagcgggagcaggaactcaaagcagccgctgatggcgtactatctgaagtgaggaaaaaacaagcagataccaaaagaatggtggacattctacgggctttggagaaattgaggaaactgaggaaagaggctgcagcgaggaaaggggtctgtcctccagcctcagcagatgagacttttacgcatcatcttcagcgactgagaaaactcattaaaaagcgctctgaactgtatgaagctgaagagagagccctcagagttatgctagaaggagaacaagaggaagagaggaaaagagaattagaaaagaaacaaagaaaagaaaaagagaaaattttacttcagaaacgtgaaattgagtccaagttgtttggggatccagatgagttcccacttgctcacctcttggagcctttccgacagtattatctccaagccgagcactccctgccagcgctcatccagatcaggcatgattgggatcagtacctggtgccatccgatcatcccaaaggcaacttcgttccccaaggatgggtccttcccccgctccccagcaacgacatctgggcaactgctgttaagctgcattagtaaagatgctccaggagtgtggtccagccagcgctctttccagctgtaaatattagcgatggtgccatcttttgctgtagactaaactgcaacttctaaattccatgtggcattcccctaccctgaatttatgctttccttctgtgctctgtgctggccagaggtgcctcttgaatcagattaatgtggtttttcaggaaaggacttaggtgaactgaggtttttaccacaggcagtgaatgaccttggttcaccaaatttgcctctgttttgaggggcttggtccagagtgacttgttaatttactctaacttccttgtgtgttgatgggtaagtacactcaaacactgaatacaggtgtgtgatgggtagatttcacagcccttctactaatagtgagtgtgaaggcaagcttgatgcaaaacctcctgacctttcctacctgaagagccctttgacttctaggaagaaaggtcaaaaatgttatcttcagttgtgttaatcccagttttagtgcagcttaggaggctgctagttaggaagataacagtggctgtaggctgggttgccagaaaagatggtggcctagtcttattattcagatggagaacttagaaaacctgaagagtacccaaattggattgtattttaatggacaatggctgtattttttccatgttagaaggatcctaatgaaagcacctgttatttttaagtttctaagggtctagttgttcagaatccccaaggatatttccctaacctcactcagtcacattgtaggagccagtgtagctatggaattatcttaggaactcaagcttctaaaactatccatgtagtcaaatctaggggaaaaagcaaataaaaata

SEQ ID NO: 87609 - DNA, 819 bp, Homo sapiens
  misc_feature (1)...(819): n = a,t,c or g
ttttttttttgagaggaaacaaaagctttattggtgtgtttgagctggggggtgcattagctgaaatggaagtgacaaatgccgagaggaattgtaaggttgccaggattctagaagaccaggaggcttcctggaattccctgctaggagccagttagagaggctgcccttggagggacagaggtgggtgggatggatttccgagcagagtgagggcaccagagaaattcaccaggaaaaaaaccagcttttttgggctcttgtggctttattgagggactggggtctctcttggacccctgattcttaaccctcaaagcacttcttaagatcagcgactctgggccggctgctgggctgggacttttgacagttgctggtgggtgtagcaggggaattcagggctcctggttcctcccgtggctggaggtgagcgcgctctgccagcagggctttgggaggccgggctctggggtcctccagagaactggggtctgaggaaggatcaaggggctgggacgtccaggctatatcaaagttgggctttgtgggggccagaatttgggggctttctggagggctgggctcagtgggtgcagtggagagccagggagtggggttttcctgggctgtagaatcttcagctgccttgtgggaaggggtgagatgaagaattaggggctctgtgagaggagagggtttggggtccccccagatgcttgggtctgcagaagctgttgagggaagggctcagtgggtgcagtggagcggacgcgtgggtcgaangggaactcgagtccggtccgggcaggcgcaagg

SEQ ID NO: 87610 - DNA, 416 bp, Homo sapiens
  misc_feature (1)...(416): n = a,t,c or g
ggatgcangatgcacttcnnngaanaaggaacagcccgttttttttggccaaaccattcttgtcttctcggttggactccaatcccgngggccaaagggggggctgttcgaaaggcgggtggcacagcggttggggcaggcgcgccggtgtacctggcgggggtgttagagtacctgaccgcgagatcctggagctggccggcaacgcggctcgcgacaacaagaagactcgatcatcccgcgccacttgcagtggcatccgcaacgacgaggagctaacaaactgctggccgggtgaccattgccagggcggtttctttctaacatccagccgtgcttctgctaagaagccgagagtcaccacaaggccaagggaagtgatttgcaggtatctgagctcccggaacgctataaac

SEQ ID NO: 87611 - DNA, 396 bp, Homo sapiens
ccgcggacgcgtgggctctgcacccacatccactgcacctacaccctctgcacccacatccactgcacctacatccactgcacctacaccctctgtacctacatccactgcatctacacgctctgcacctaccactgtctgcacctaccactgtctgcacctacatccactgaacctacatccactgcacctacaccctgtgcacctaccacctgctgcacctacaccctctgcacctaccataccttcttgttcatgccacttagccatgcttcctccatgttactcacacacaccaagtatgttccccctctgtcccttgtgctggaatattggactgtaaataaccacatggctgcttctctcactttttaaatgtctctgctcaaatatcac

SEQ ID NO: 87612 - DNA, 444 bp, Homo sapiens
  misc_feature (1)...(444): n = a,t,c or g
ggggaggcaggagatggggatgagcagaccgtgccaggccttgttggctgccaggaggacttggagttttaccctgagttgggtgggagctagggggtgctgtgagcagaggagggggaggacctgactcaggggcagagaggacaagacagtgggagacaggagggagcgagggcctgggcggagctgactattcctgcctgggggtccaggtgagtgatgctgcggctgcttcccggnggcagaggcanagatgaggagtgcggtggattctggagagattctgacaccanaactgccagggtttgctgatggattgggtgtgagagaaagaggagctgctggagaggacagtggaggagccatatgtgtgtgcacatggggatggggacaatcacgccacattatctttgagatgcctgtgagacctcagcacgtcgaggg

SEQ ID NO: 87613 - DNA, 432 bp, Homo sapiens
atgggcttcaaagaggactatgtctttgaccccaagggaggtgggagccatggagggctgcgagcagaggagggtcgggactcgggccgctggtttttaatggggtcctcctggaatgtgggacagggagcagaggaagagcaggggcgccaggcctggctcagggggcaaaggaggactgagctggaccgaggaggactgagctggacggaggaggatcgagctggaccgaggaggaccgagctggacaaaggaggactgagctggaccggggaggaccgagctggaccaaggaggaccgagctggaccgaggaggaccaaggaggaccgagccagacgaaggaggactgagccggacgaaggagaaccgagccggacagaggaggaccaagctggactggggaggactgagccggatggaggaggactaa

SEQ ID NO: 87614 - DNA, 410 bp, Homo sapiens
gcgccggggcccccggttcctcctccaggttcacctccagagcaaatgcccggcccctgcccagcatccatgcccccggccctcctccaggttcacctccagagcaaatgcccggcccctgcccagtgtccgcgccccctgccctcctccaggacacttctgtttgagtagcacctgccacgtgcagcaggctcaccccaacctcactaccaaaagtgccactgagacagatgaggaaacacacactgctctcactccattttacagacagggaaatggaggcagaaaggccgtggcgtggcctaagtcccgctggtggcagcagtggcgcaggaggtgagcccatgctgccagctaccaagctcaggctcagcaccccaaggggagggttgggcgggacctccatgctg

SEQ ID NO: 87615 - DNA, 1900 bp, Homo sapiens; identical to SEQ ID NO: 65472

SEQ ID NO: 87616 - DNA, 2992 bp, Homo sapiens
atgcccggcggccccagtccccgcagccccgcgcctttgctgcgccccctcctcctgctcctctgcgctctggctcccggcgcccccggacccgcaccaggacgtgcaaccgagggccgggcggcactggacatcgtgcacccggttcgagtcgacgcggggggctccttcctgtcctacgagctgtggccccgcgcactgcgcaagcgggatgtatctgtgcgccgagacgcgcccgccttctacgagctacaataccgcgggcgcgagctgcgcttcaacctgaccgccaatcagcacctgctggcgcccggctttgtgagcgagacgcggcggcgcggcggcctgggccgcgcgcacatccgggcccacaccccggcctgccacctgcttggcgaggtgcaggaccctgagctcgagggtggcctggcggccatcagcgcctgcgacggcctgaaaggtgtgttccagctctccaacgaggactacttcattgagcccctggacagtgccccggcccggcctggccacgcccagccccatgtggtgtacaagcgtcaggccccggagaggctggcacagcggggtgattccagtgctccaagcacctgtggagtgcaagtgtacccagagctggagtctcgacgggagcgttgggagcagcggcagcagtggcggcggccacggctgaggcgtctacaccagcggtcggtcagcaaagagaagtgggtggagaccctggtagtagctgatgccaaaatggtggagtaccacggacagccgcaggttgagagctatgtgctgaccatcatgaacatggtggctggcctgtttcatgaccccagcattgggaaccccatccacatcaccattgtgcgcctggtccttgctggaagatgaggaggaggacctaaagatcacgcaccatgcagacaacaccctgaagagcttctgcaagtggcagaaaagcatcaacatgaagggggatgcccatcccctgcaccatgacactgccatcctgctcaccagaaaggacctgtgtgcagccatgaaccggccctgtgagaccctgggactgtcccatgtggcgggcatgtgccagccgcaccgcagctgcagcatcaacgaggacacgggcctgccgctggccttcactgtagcccacgagctcgggcacagttttggcattcagcatgacggaagcggcaatgactgtgagcccgttgggaaacgacctttcatcatgtctccacagctcctgtacgacgccgctcccctcacctggtcccgctgcagccgccagtatatcaccaggttccttgaccgtgggtggggcctgtgcctggacgaccctcctgccaaggacattatcgacttcccctcggtgccacctggcgtcctctatgatgtaagccaccagtgccgcctccagtacggggcctactctgccttctgcgaggacatggataatgtctgccacacactctggtgctctgtggggaccacctgtcactccaagctggatgcagctgtggacggcacccggtgtggggagaataagtggtgtctcagtggggagtgcgtacccgtgggcttccggcccgaggccgtggatggtggctggtctggctggagcgcctggtccatctgctcacggagctgtggcatgggcgtacagagcgccgagcggcagtgcacgcagcctacgcccaaatacaaaggcagatactgtgtgggtgagcgcaagcgcttccgcctctgcaacctgcaggcctgccctgctggccgcccctccttccgccacgtccagtgcagccactttgacgctatgctctacaagggccagctgcacacatgggtgcccgtggtcaatgacgtgaacccctgcgagctgcactgccggcccgcgaatgagtactttgccaagaagctgcgggacgccgtggtcgatggcaccccctgctaccaggtccgagccagccgggacctctgcatcaacggcatctgtaagaacgtgggctgtgacttcgagattgactccggtgctatggaggaccgctgtggtgtgtgccacggcaacggctccacctgccacaccgtgagcgggaccttcgaggaggccgagggtctggggtatgtggatgtggggctgatcccagcgggcgcacgcgagatccgcatccaagaggttgccgaggctgccaacttcctggcactgcggagcgaggacccggagaagtacttcctcaatggtggctggaccatccagtggaacggggactaccaggtggcagggaccaccttcacatacgcacgcaggggcaactgggagaacctcacgtccccgggtcccaccaaggagcctgtctggatccaggtgcctgcctcccgtggcccaggcgtggggagcagaggcggagtccccaggcccagcacctcccatggtaggtctcgtcctggaggagtgagccctgggttagtcacagagcctggctctgagccagaccctcctgctgaggcctctacctcggtttccccatctttaagatggcccaactgtgtagctgcagttcacagaggtggctggggtcaagctcctttaggactgggtggatggagaagacaccttgtgctcatgggcccccgcctgcccacccagctgctgttccaggagagcaaccctggggtgcactacgagtacaccatccacagggaggcaggtggccacgacgaggtcccgccgcccgtgttctcctggcattatgggccctggaccaagtgcacagtcacctgcggcagaggtgagaagtggggcaggcacagccccacctgcaggggcttagtgtctggacagggacactggcttcagctcccagctcactgctgggccaccacgggtttggaagtttgcttctctgagcctcagttctccatctgtgagatgaggctagcgattgccctgtgtcccaggcccgctgggagggtacatgga

SEQ ID NO: 87617 - DNA, 435 bp, Homo sapiens
  misc_feature (1)...(435): n = a,t,c or g
ggaggcaggagatggagcagggagcctagatgatggagctggcagctgggatgacagagtggggagcaggatgatggagcagggagccaggatgatggagcgggggggccaggatgatggagcggggagctgggatgatggagcaagcagccaggatgatggagtggggagctgggatgatggagcagggaagccgggatgatggagcacggaagccgggatgatggagcagggagccaggatgatggagcagggagcctagatgatggagctggcagctgggatgatggagcacggcagctgggatgaaacagcacggagctggaatgatagagcacggcagttgggatgatggaggagggaagccaagatgatggagcagggagctgtgatgttggagcaaacagtntggatgatggagcanggggcttggat

SEQ ID NO: 87618 - DNA, 692 bp, Homo sapiens
tcagccacaccccagcagccatccgcaccccaacaccaagggactctgaaccagcccccagtccccggcatggatgagagcatgtcctaccaggctccccctcagcagctgccgtcggctcagccccctcagccctcaaatcccccacatggggctcacacgctgaacagtggccctcagcctgggacagctccagccacacagcacagccaggcggggcccgccacgggccaggcctatgggccacacacctacaccgaacctgccaagcccaagaagggccaacagctgtggaaccgcatgaaacccgcccctgggactggaggtctcaagttcaacatccagaagcgaccctttgctgttaccacccagagctttggctccaacgcagagggccagcacagtggttttggcccccagcccaaccctgagaaagttcagaaccacagcgggtcctctgcccgggggaacctgtctgggaagccggatgactggccccaggacatgaaagagtatgtggagcgctgcttcaccgcctgtgagtcggaggaggacaaggaccgcacggaaaagctgctcaaggaggtgctgcaggcgcggctgcaggacggctcggcctataccattgactggagccgggagcccttgccggggctgacccgggagcctgtggctgagagccctaagaagaa

SEQ ID NO: 87619 - DNA, 392 bp, Homo sapiens
  misc_feature (1)...(392): n = a,t,c or g
tttcgtgttagtgaggcggttgctgagacagacgcttaggctggtaggaggagcccgagccgtaagggaagccgtgatgagggccgtgttgacgtggagagataaagccgagcactggtgaggagcggggcggttcgcgaagagcaggaggccgtgtcctcgcggggagtgcgcgagccgctgcagcgtgtttgaggggggcagcgggcttgctgcctgggccgagggcactgaaccccggcctgggagactgcagggtcgtcctcccgccccttggcggttggagaaactcccgagggttggagagcggcaaagggaggtgccgcgcctgaggtggtggcgggtggaggcggctcttccctcacgggctggccctgtcgctgtcttggatn

SEQ ID NO: 87620 - DNA, 5017 bp, Homo sapiens; identical to SEQ ID NO: 65356

SEQ ID NO: 87621 - DNA, 522 bp, Homo sapiens
tttcgtgcccggcggcgggtcctcagcttcgagccgaggtgcagtgagctggtggggggaccgcgaggcgagcgcgggagcctgggcggcgagccgggtgtgagctgcctgaaaatgcactcggatgccgccgctgtcaattttcagctgaactctcatctctcaacactggcaaatattcataagatctaccacacccttaataagctgaacctaacagaagacattggccaagacgatcaccaaacaggaagtctgcggtcttgcagttcttcagactgctttaataaagtgatgccaccaaggaaaaagagaagacctgcctctggagatgatttatctgccaagaaaagtagacatgataggtctcactcattcacttcaaccacagagctggagagatcttcctgtacttaatggtctgtgcccgcccagaatatcagccaagctgaggtttattctcacatgggtgagaattcgatagaactgtgaaaaacaaggctctttaaatcgcttctcttt

SEQ ID NO: 87622 - DNA, 2915 bp, Homo sapiens; identical to SEQ ID NO: 65367

SEQ ID NO: 87623 - DNA, 412 bp, Homo sapiens
tttcgtattccaggtctccactcatttatatgttcccagtagggctggctcttgggagggtcttcatggtgactgaggccatggatcctttgcactgttccttgaattcacttggcacttaaattctcatcctgaaatgatgctttgaaagtgatgcttgcagtcaattatgggttcactgtattatggattcctaacacccaatacatggggctgtcactgactttacatgctgctgcagctccttaatcagctggtccttgtcatgggacagaaactgtggggtcaggacaatcaatgccttcaccacccagaggcattgatagtgtgatgactcctccccaggaaccagatgtagccctcttcatccacagatgctctgtccccggtgtcgcagacgtccccacattcc

SEQ ID NO: 87624 - DNA, 869 bp, Homo sapiens
cgcgtcctggcgctgtgcggaaagctctttctcgcggagcggctggctgcgccccgaaggcctggtgcgctccctgcgtttcgggtggggccgcgcaggcaaggacaaggccacagagtcggggtcttcacgttgccccccagcggtcccggaaaaagcgctgtccctataccaagtaccagatccgcgaactggaacgcgagtttttctttaacgtgtacataaacaaagagaaaagacttcaactctctcggatgctcaacctcactgaccggcaagtcaaaatctggttccagaatcgcaggatgaaagaaaagaaactgaacagagaccgtctgcagtatttcactggaaaccccttattttgagagctccaggaagcgccctcaccccagccccactcacccaccctccttcccaccagcctgctctccgcaggcccactgtccttgggtttaatgacgtctcttctctgtggaacttcacgattccttcccacggtcaactcgggacctcccagcgaccactgcagcctgcggacgaggccgggacttggccgagcggatcctaataaggggaaaatggtaaatgcaaacgtccctttacaattttaccgccagtgtgctgtcgttccccctccccctctccgagtcctcgtggggacacggcggggtctgtaggaagttgggccgggttgggggttgctagaaggcgctggtgttttgctctgagttttaagagatcccttccttcctcttcggtgaatgcaggttatttaaactttgggaaatgtacttttagtctgtcatatcaaggcatgagtcactgtctttttttgtgtgaataaatggtttctagtaaaaaaaaaa

SEQ ID NO: 87625 - DNA, 576 bp, Homo sapiens
gctcgttacgcacgcaggtacgaattcccgagtcgacgatttcgtgaaatggttcatggggacgtttgcttcctccacgctgtggatcgcagccttctcctacatgatggtgtggatggtcacaatcattgggtacaccctggggattcctgacgtcatcatggggatcaccttcctggctgctgggaccagcgtgcctgactgcatggccagcctcattgtggccagacaagggatgggggacatggctgtgtccaactccattgggagcaacgtgtttgacatcctgattggcctcggtctcccctgggctctgcagaccctggctgtggattacggatcctacatccggctgaatagcagggggctgatctactccgtaggcttgctcctgggcctctgtttttgtcacggtgttcggcgtccacctgaacaagtgggcagctgggacaagaagctgggctgtggggtgcctcctcctgtatgggtgtttttcctgtggtttcttccatcatgactgagtttcaacgttgtttcaacttttgtgaacctggcccatgtgcgggggaccactga

SEQ ID NO: 87626 - DNA, 834 bp, Homo sapiens
tcgacccacgcgtccgatttactgtgtgtgggaccccaacttacgtagctcccgaaattctttctgagaaaggttatggactggaggtggacatgtgggctgctggcgtgatcctctatatcctgctgtgtggctttcccccattccgcagccctgagagggaccaggacgagctctttaacatcatccagctgggccactttgagttcctccccccttactgggacaatatctctgatgctgctaaagatctggtgagccggttgctggtggtagaccccaaaaagcgctacacagctcatcaggttcttcagcacccctggatcgaaacagctggcaagaccaatacagtgaaacgacagaagcaggtgtcccccagcagcgagggtcacttccggagccagcacaagagggttgtggagcaggtatcatagtcaccaccttgggaatctgtccagcccccagttctgctcaaggacagagaaaaggatagaagtttgagagaaaaacaatgaaagaggcttctttcacataattggtgaatcagagggagagacactgagtatattttaaagcatattaaaaaaattaagtcaatgttaaatgtcacaacatatttttagatttgtatatttaaagcctttaatacatttttggggggtaagcattgtcatcagtgaggaattttggtaataatgatgtgttttgcttcccctttgtaaccaagtttattctgtactacaggagtggtgcttaccagggtctaaactccccctgtgagattaataaggtgcattgtggtctttctgtgttaataaaatgtgctctgaataa

SEQ ID NO: 87627 - DNA, 381 bp, Homo sapiens
ctccttctgcccgcgtgctggagagggaatgacccccattgcctgctacttcaaacacactgaatggccaatgacccacactgcctcgtccgtcacaacccctgcggggggaaagatactcaccgtgcactccacccccaacactggagggggaatgacccccactgcctcctcctccccgcacactgcagggggaatgacccccactgtcttctcctccccccacactgcagggggaatgacccccactggctcctcctcccaacacactgcagggggaatgacccccactgtcttctcctccccccacactgcagggggaatgacccccactgtcttctcctcccaacacactgcagggggaatgacccccactgcctt

SEQ ID NO: 87628 - DNA, 3744 bp, Homo sapiens
aaaattgggtattgattggtttcagtattttaataatggtaactatggttttattaatatgtatatatttttatttgacataaacaaatagtaattcgcccagactttagctgtttgataaggtagtagtgcatgttatgtaaaaatttgcataaactttcttgtgtttatttcagtcattaagtttctcttaaaatttgtggttatattatttgccagtgcttcatcaatatatgtaacagtttggatttataatttaacacaatactcttcttcttttccgattttgtttctaggtgctaactgccaaagaaaggaaaactcaaattgatgatagaaacaaattgactgaacattttattattacacttcctatgttactgtcaaagtattctgcagatgcagagaaggtagcaaacttgctacaaatcccacagtattttgatttagaaatctacagcacaggtagaatggaaaagcatctggatgctttattaaaacagattaagtttgttgtggagaaacacgtagaatcagatgttctagaagcctgcagtaaaacctatagtatcttatgcagtgcaagaatataccatccagaacagagttgacatagctcgaagccagctgattgatgagtttgtagatcgattcaatcattctgtggaagacctattgcaagagggagaagaagctgatgatgatgacatttacaatgttctttctacattaaagcggttaacttcttttcagaatgcacatgatctcacaaaatgggatctctttggtaattgctacagattattgaagactggaattgaacatggagccatgccagaacaggtagtcgtgcaagcactgcagtgttcccattattcgattctttggcagttggtgaaaattactgatggctctccttccaaagaggatttgttggtattgaggaaaacggtgaaatcctttttggctgtttgccagcagtgcctgtctaatgttaatactccagtgaaagaacaggctttcatgttactctgtgatcttctgatgattttcagccaccaattaatgacaggtggcagagagggccttcagcctttggtgttcaatccagatactggactccaatctgaactcctcagttttgtgatggatcacgtttttattgaccaagacgaggagaaccagagcatggagggtgatgaagaagatgaagctaataaaattgaggccttacataaaagaaggaatctacttgctgctttcagcaaacttatcatttatgacattgttgacatgcatgcagctgcagacatcttcaaacactacatgaagtattacaatgactatggtgatattattaaggaaacactgagtaaaaccaggcagattgataaaattcagtgtgccaagactctcattctcagtttgcaacagttatttaatgaacttgttcaagagcaaggtcccaacctagataggacatctgcccatgtcagtggcattaaagaactggcacgtcgctttgcccttacatttggattggaccagattaagacacgagaagcagttgccacacttcacaaggatggcatagagtttgcatttaaataccaaaatcagaaaggacaagagtatccacctcctaatctggcttttcttgaagtactaagtgaattttcttctaaacttcttcgacaggacaaaaagacagttcattcatacctagagaaattccttaccgagcagatgatggaaaggagggaggatgtatggcttccactcatctcctatagaaattcattagtcactgggggtgaagatgatagaatgtctgtgaacagtggaagtagcagcagcaaaacctcatcagtaaggaataagaaaggacgacctccacttcataaaaaacgagtagaagatgagagtctggataacacatggctaaacaggactgacaccatgattcagactcctggccccctgccagcaccacaactcacatccactgtactgcgggagaacagtcggcccatgggagaccagattcaagaacctgagtctgaacatggttctgaaccagactttttacacaatcctcagatgcagatctcttggttaggccagccgaagttagaagacttaaatcggaaggacagaacaggaatgaactacatgaaagtgagaactggagtgaggcatgctgttcggggtctaatggaggaagatgctgagcccatctttgaagatgtgatgatgtcatcccgaagccagttagaagatatgaatgaagaatttgaggacaccatggttattgatctgcctccatcaagaaatcggcgagagagagctgagctaaggccagacttctttgactctgcagctatcatagaagatgattcaggatttggaatgcctatgttctgaagtctgaagaaaatttacaaatctggaactctattatttagagctagaggcctatatactgtgatagcttgtatggggaaaaacacttttgatgtgatctgatttgttttttaatcaaatgattaaggtcaatccctttttgcagtgacagaagaggagcatgtaaattacccaagggaatgttggtgaatgtcaactcagaaagactgacctgaaaatcatttgtgtcctactattggacttatcccaatacagatgtgtgtgtttttctggagggaggaagaaattttaaatttttaaaacagctgtcaagataaacactgttatacacctgttttatgaaaactcaacattgagtaaaaaaaaacatatttttaactttattttcctgttgtacaatttaaaaaccgttttaacattttgcctttttatgttttaaaagctaaccatttttattaaacctatgaggtaaggcaggctcatcctaattgcgaagagtgttttgggagttcactggggatttgggttggacctttgtggaacacaaataatgaaggagcagaacattgacaagctaagatgaaattctgacatagtacatctctgccaaaaaccacacaccctctgtggatatggatatgaattcccagattttatatactcttgaataaaggtttatttttatttataagtgggcataaaataagaaatgtccatgcagccatttttccaacagatgctgtacaccgttcattttatatagactagggagattcaaatacagtgcattttctattggtatttgttctgtgcatttttagcaacttctaccagcaaataaagtattctcagtaaaacgaaaatgattctcaagttatcagtttgctgtttttaccacttatttcatgccctgccaaattcaagttacacagacttccattttcttaagataatcaatcatgaagaaatcctttatcaatcattcaaaagtaattttaagtgtaacataactgtgtttacttcccatgcacttaatacccttatgcgctaattttgtgaattaagtttactgattatagaagtatgtgctgcatagaagtctgtgcttagagggtgaagttcctaagcttaccttgaattacagctacatttcagtgttaaatgtgcatattaagaataattcttttggggaaagaaattatgaatcttcaggacagtctacaatggtttagagttacattctgcctagacttttatgacttgctgctattgttttagaaaccccacttagtctcttcctttctgatttccaaagtaagc

SEQ ID NO: 87629 - DNA, 4132 bp, Homo sapiens
acaatgtggtcccgaagcggccagcgccgggagctgcagcgctgagacccccagcccgccccctcgggctcccggccggggccccatcatgttctccaggaagaaacgagagctcatgaaaaccccttccatctcgaaaaagaaccgcgcgggaagccccagcccgcagccctcgggggagctgcccaggaaggatggggctgacgcggtgttccccggaccaagcctggagccgcccgctgggtcctccggcgtcaaggccacagggaccctcaagcggcccaccagcctgagccgccacgccagcgcggctggcttccccctgtcgggtgctgcctcctggacactgggccggagccaccggagcccactgacagccgccagcccgggcgagctgcccaccgagggtgccggcccggacgtcgtcgaggacatctcccatctgctggcggacgtggcccgcttcgctgagggccttgagaaacttaaggagtgtgtgctgcatgacgacctccttgaggcccgccgcccgcgggcccacgagtgcctgggtgaggctctgcgtgtcatgcatcagatcatctccaagtacccgctgctgaacaccgtggagacgctcaccgcagccggcaccctcattgccaaggtcaaagccttccattatgagagcaacaatgatctggagaaacaggagttcgagaaggccctggagacgattgctgtggccttcagtagcacagtgtccgagttcctcatgggtgaagtggacagcagcaccctcctagcagtgcctcctggggactcgagccagtccatggaaagcctgtatggaccgggcagtgagggcacgcctcccagcctggaagactgtgacgccggctgcctgcccgccgaggaggtggacgtgctgctacagcgctgtgaggggggcgtggatgccgcactgctgtatgccaagaacatggccaagtacatgaaggacctcatcagctacctggagaagcggacgacgctggagatggagtttgccaagggcctgcagaagatcgctcacaactgcagacagagcgtcatgcaggagccccacatgccgctcctgtccatctactcgctggccctggagcaggacctggagttcggccacagcatggtgcaggcggtgggcaccttgcagacccagaccttcatgcagcccctgaccctgcggcggcttgaacacgagaagcgcaggaaggagatcaaggaggcctggcaccgtgcccagaggaagctgcaagaggcggagtccaacctgcgcaaggccaagcagggttacgtgcagcgctgcgaggaccacgacaaggctcgcttcctcgtggccaaggcggaggaggagcaggctggcagcgcgccgggagcaggcagcacggccaccaagaccctggacaagcggcggcggctggaggaggaggccaagaacaaggcggaggaagctatggccacctaccgcacctgcgtggccgacgcgaagacgcagaagcaggagctggaggataccaaggtgacggcgctgcggcagatccaggaggtcatccggcagagcgaccaaaccatcaagtcggccacgatctcctactaccagatgatgcatatgcagacggcgccgctgcccgtgcacttccagatgctgtgtgagagcagcaagctgtatgacccaggccagcagtacgcctcccacgtgcgccagctgcagcgggaccaggagcccgatgtgcactacgactttgagccccacgtctccgccaacgcctggtcccccgtcatgcgtgcccggaagagcagcttcaacgtgagtgatgtggcgcggccggaggctgccgggagccccccagaagaaggcgggtgcactgagggcacacctgccaaggaccacagggccgggcgaggacaccaggttcacaagtcatggccgctctcgatctcagactcggacagtgggctggaccccggccctggcgcaggggactttaagaagttcgagcggacgtcatccagtggtaccatgtcgtccacggaggagctggtggacccagacggtggagccggggcttcagcctttgagcaggctgacctcaacggcatgacccccgagctgccggtggccgtgcccagtggaccgttccgccacgaggggctgtccaaggcggcccgtactcaccggctccgggaagctccgcacgcccgccaagtgccgcgagtgcaacagctacgtctacttccagggtgctgagtgtgaagagtgctgcctggcctgccacaagaaatgtctggagacgctggccatacagtgcgggcacaagaagctgcaaggccgcctgcagctgttcggccaggacttcagccacgcggcccgcagcgcccccgacggcgtgcccttcatcgtcaagaagtgcgtctgcgagatcgagcggcgggcgctgcgcaccaagggcatctaccgggtcaatggggtaaagacacgcgtggagaagctgtgccaggccttcgagaacggcaaggagctggtcgagctgtcgcaggcctcgccccacgacatcagcaacgtcctcaagctctacctgcgtcagcttcccgagccgctcatctccttccgcctctaccacgagctcgtagggctggccaaggacagcctgaaggcagaggccgaggccaaggcggcgtcccggggccggcaggacggctcggagagcgaggcagtggcggtggccctggcaggtcggctgcgggagctcctgcgggacctgccgcctgagaaccgggcctcgctgcagtacctgctgcgtcacctacgcaggatcgtggaggtggagcaggacaacaagatgacccccgggaacctgggcatcgtgttcgggcccacgctgcttcggccacggcccaccgaggccaccgtgtccctctcctccctggtggattatccccatcaggcccgcgtcatcgagactctcatcgtccactacggcctggtcttcgaggaggagccggaggagacccccgggggccaggacgagtcatccaaccagcgagctgaggtagtcgtccaggtgccgtacctggaggcgggcgaggcggtggtctacccgctgcaggaggcggcggcggacgggtgcagagaatcccgagttgtgtccaacgattcggactcggacctagaggaggcctccgagctgctgtcctcatcggaggccagtgccctgggccacctcagcttcctggagcagcagcagagcgaggccagcctagaggtggcttctggcagccacagcggcagtgaggagcagctggaggccacagcccgggaggacggggacggggacgaggacggcccggcccagcagctctcaggattcaacaccaaccagtccaacaacgtgctgcaggccccactgccccccatgaggctccgtggcgggcggatgacactgggctcctgcagggaaaggcagccggaattcgtgtgagctggggtggggctgggaccacaggtggcttctctcttgcctgctcctgtccctccagcacgtcccctgcaccacggcatagcttaggtgcgccgtcctggggtcgctgccgagagcgcctggacttcgacgtcccaccagcgggcgcctcctcccagaggcttccaggagcacgagggccttgcggcacaggactgtgccctgtgctgtcccctgcaccccggctcagctgagctggggaacactgctgtcgtgtgaagtcacagtggccttgttggtgcccacagggctgtgtggatggaggaagctgtccctgcccagtgcatcccccaggtcatcacggggacgcaggaggcaggccctgccctgccctctcctcacaggtctgttgcagggactccagaaaccattctgggagccgtggatgggggcggagctggggtttggtgcagtttccagggtgcagtacagcagggcctgaatactggccctggactcccttttccagaacaccaggtgtggccacctggggctcaggtacacagtggggtctctcggaagccaccgtgtggttctttcacaggcacgtttattttgctgaaataaaaagtttttaatcgggaaaaaaaaaa

SEQ ID NO: 87630 - DNA, 4936 bp, Homo sapiens; identical to SEQ ID NO: 65324

SEQ ID NO: 87631 - DNA, 3965 bp, Homo sapiens; identical to SEQ ID NO: 65503
  misc_feature (1)...(3965): n = a,t,c or g

SEQ ID NO: 87632 - DNA, 3399 bp, Homo sapiens
gggcccggggtcccgccaccaccgcgcgcgggacagattgattcactttggagctgtaagtactgatgtattagggtgcagcgctcattgttccttgacgcagagtcccaaaatgaatatccaagagcagggtttccccttggacctcggagcaagtttcaccgaagatgctccccgacccccagtgcctggtgaggagggagaactggtgtccacagacccgaggcccgccagctacagtttctgctccgggaaaggtgttggcattaaaggtgagacttcgacggccactccgaggcgctcggatctggacctggggtatgagcctgagggcagtgcctcccccaccccaccatacttgaagtgggctgagtcactgcattccctgctggatgaccaagatgggataagcctgttcaggactttcctgaagcaggagggctgtgccgacttgctggacttctggtttgcctgcactggcttcaggaagctggagccctgtgactcgaacgaggagaagaggctgaagctggcgagagccatctaccgaaagtacattcttgataacaatggcatcgtgtcccggcagaccaagccagccaccaagagcttcataaagggctgcatcatgaagcagctgatcgatcctgccatgtttgaccaggcccagaccgaaatccaggccactatggaggaaaacacctatccctccttccttaagtctgatatttatttggaatatacgaggacaggctcggagagccccaaagtctgtagtgaccagagctctgggtcagggacagggaagggcatatctggatacctgccgaccttaaatgaagatgaggaatggaagtgtgaccaggacatggacgaggacgatggcagagacgctgctccccccggaagactccctcagaagctgctcctggagacagctgccccgagggtctcctccagtagacggtacagcgaaggcagagagttcaggtatggatcctggcgggagccagtcaacccctattatgtcaatgccggctatgccctggccccagccaccagtgccaacgacagcgagcagcagagcctgtccagcgatgcagacaccctgtccctcacggacagcagcgtggatgggatccccccatacaggatccgtaagcagcaccgcagggagatgcaggagagcgtgcaggtcaatgggcgggtgcccctacctcacattccccgcacgtaccgggtgccgaaggaggtccgcgtggagcctcagaagttcgcggaggagctcatccaccgcctggaggctgtgcagcgcacgcgggaggccgaggagaagctggaggagcggctgaagcgcgtgcgcatggaggaggaaggtgaggacggcgatccatcgtcagggcccccagggccgtgtcacaagctgcctcccgcccccgcttggcaccacttcccgccccgctgtgtggacatgggctgtgccgggctccgggatgcacacgaggagaaccctgagagcatcctggacgagcacgtacagcgtgtgctgaggacacctggccgccagtcgcctgggcctggccatcgctccccggacagtgggcacgtggccaagatgccagtggcactggggggtgccgcctcggggcacgggaagcacgtacccaagtcaggggcgaagctggacgcggccggcctgcaccaccaccgacacgtccaccaccacgtccaccacagcacagcccggcccaaggagcaggtggaggccgaggccacccgcagggcccagagcagcttcgcctggggcctggaaccacacagccatggggcaaggtcccgaggctactcagagagtgttggcgctgcccccaacgccagtgatggcctcgcccacagtgggaaggtgggcgtggcgtgcaaaagaaatgccaagaaggctgagtcggggaagagcgccagcaccgaggtgccaggtgcctcggaggatgcggagaagaaccagaaaatcatgcagtggatcattgagggggaaaaggagatcagcaggcaccgcaggaccggccacgggtcttcggggacgaggaagccacagccccatgagaactccagacccttgtcccttgagcacccctgggccggccctcagctccggacctccgtgcagccctcccacctcttcatccaagaccccaccatgccaccccacccagctcccaaccccctaacccagctggaggaggcgcgccgacgtctggaggaggaagaaaagagagccagccgagcaccctccaagcagaggtatgtgcaggaggttatgcggcggggacgcgcctgcgtcaggccagcgtgcgcgccggtgctgcacgtggtaccagccgtgtcggacatggagctctccgagacagagacaagatcgcagaggaaggtgggcggcgggagtgcccagccgtgtgacagcatcgttgtggcgtactacttctgcggggaacccatcccctaccgcaccctggtgaggggccgcgctgtcaccctgggccagttcaaggagctgctgaccaaaaagggcagctacagatactacttcaagaaagtgagcgacgagtttgactgtggggtggtgtttgaggaggttcgagaggacgaggccgtcctgcccgtctttgaggagaagatcatcggcaaagtggagaaggtggactgataggctggtgggctggccgctgtgccaggcgaggcccttggcgggcacgggtgtcacggccaggcagatgacctcgtactcaggagcccgatggggaacagtgttgggtgtaccacccatccctgtggtctacccgtgtctagaggcaggtagggggtccctccaagtggtccacaagcttctgtcctgcccccaaggaggcagcctggaccactccttatagcaatacttggagggccccagccaaagtggggcagccgaggtccctgctgccagcttcaggtgaccccccccccatcccccggcacctcccttgggcacgtgtgctgggatctactttccctctgggatttgcccacgtaccccaggtctggctggggcccaggcccggaatgcagaggcctgaagggcctctgtcaattgtccgcgccaccgagtgccttcaaaacagcttgtcacttgcctgccactgtgtgaatcggcgacggaacactgcacctgccttccagccgccggctgtgcagtcctgggtcctcctttctgagggcccgtgtaaatatgtacatttctcaggctagggccagcaggggctgcccgagtctgtttttcatgcgatgacacttgtacaattaattatcttttcaaaggtacttggataataaaaaacctcaaactgtttttgaacctgaaaaaaaaaa

SEQ ID NO: 87633 - DNA, 1413 bp, Homo sapiens
tttcgtacgaaatctgacaggatcttctgaaaaaaatgagagcctgttattggaatgagctgcctgactcctggatttgagggaaatgtctgattagtagacacggccccagaagctgtgaggggcactcgcacgcgaccaaggcacctgtttccaagcagcttgctcaggatctggcataccccagtgccaatatctgcaatgtggtcctgatgcggtacggggagctggaggaagggattgatgtcctggacagcgatggcaacctcgtgggctcctccaagatcgcagcccgacacgccctgctggagcacggcgctgacgcgagtggtcctgcccatgcccatcctggtgctacccccgatcgtcatgtccatgctggagaagacggctctcctgcaggcacgcccccggctgctcctccctgtgcaaagcctcgtgtgcctggcagccttcggcctggccctgccgctggccatcagcctcttcccgcaaatgtcagagattgaaacatcccaattagagccggagattagcccaggccacgagcagccggacagtggtgtacaacaaggggttgtgagtgtggtcagcggcctggggacggagcactgtgcagccggggagctgaggggcagggccgtagactcacggctgcacctgcagggagcagcacgccaaccccagcagtcctgggccccctgggagagtgctcaacctacagtggagggagactgacccattcacattttaacataggcaagaggagttctaacacatttcgtacaaaaaaataatcaagtgcatttctgggccttatgtggggttgtcaaaactccactcagcacaattatgtgtgaagctgaaaaattgtagagtgcccatggggtagaagtagaatccttttatactttggttccttttttatttttattttttatcagaatcaaatctgagccttagtttcagctgaccagaagtggcaggaggacaggtggaggcgagccagattaggcctggagttgggctggtttggtggccaggctggtaaatttaggatattacaatggccagcccagatggctccctgggctggcatggggaggggagagaaggtggtctgcaccccacaggatgaactagccatgactagggtcctcaggcagtggcccagggaatcagggagcactggaggcctctgcaagattctgtgggcagctggctctgaatgtagccagcccacatccattccagagctgcagaaccagtccctctgagtgaagtccagtgaccctgggagctagggtcccccttcgtggagctctaactgattcagggcccctgaagtgaccccagctccaggcaggaaaccccgagaaggaatggtgctttgcaggaaccatggacctgcaa

SEQ ID NO: 87634 - DNA, 817 bp, Homo sapiens
  misc_feature (1)...(817): n = a,t,c or g
ctcagttaaaaaacaacaacaacaaaaaactaagcgattgggaaaaaacaggaattttatctggttattgcatctggtgatagaggccttcaaagcctattatttctaacctaagtaaaggccccagtgaaaaacatactggggaaataaaacctctgagaaaaggttcaagcaccttttccaaatttaaatcttgccttaaattctctctaccacactgcctttgacactcttggaagtccatgtagttctctacagacagacttcaaagaaacgttaccttatcaaagactaatctgtgccacctctgattcagtgttttatgtctttcactttccctgggaaggagtaaagttcttttctacagctctgggactattacatttaattctgctcttgatagtcaaagaccatggacaacaactgtcatctgaaggactcttctagaagccagagactggtgtttgatggatgttttatactaaataaaacccatcagcatggggttatgtagaaaagcaatttattccattttaagcacttacacagttagtcatggagagtaacaggcctgctggtgaaacaggtcacccaaaatggagatgggcatcaaactagtgggtccagggacctaactcctaaaaaaaaaaaagcaactcttatcaaggattaatttaatttttaaaacaaatacaagttattgattcactcttctcaacttgacagtctacctggtggtattaactgtcagggtaaaaacatacatcttttttttttnaaaccanactgtgggtgggtgcccaagttaaaaaaaaaa

SEQ ID NO: 87635 - DNA, 427 bp, Homo sapiens
tgaaacctggctcaacatccgtaagttgataagggttgcatttttttgctactactacagtttcacagaatatctgaggagacacacgggagaaactttttgggtgtaatgaatgtgggaaaacctttcaccagaagtgggccctaattgttcaccacagaactcatataagacagaaaccctatggatgtaatgaatgtggaaaatcattctgtgtgaagtcaagaggccacagaaaatgcacaaactataggaaagcatttactatgaggttatattttatagagtatatgtaataagaagtaccttcttagtgaacatcagatagtgagaaagtatttttaactgtatccaatgtgtggacactttaggttaaaatctaaatttaatatacaccagaggtgttgaattgcaggatatctagcaa

SEQ ID NO: 87636 - DNA, 981 bp, Homo sapiens
tttttttttttttaaaatatttatatggatcaactttattgaaagtgaataaacagagataatgtggcaaaaagaaattttcccaatattaaacccttgatgatacttttaaattcactataaggaaaagaatccaccagtagtaggtagctacttatttttgctgagtgtcctctgcttttctgcatgctccacaatcttttcttccacataaagccccttccgctttcggtactgcgttcatgtacttccgggcttggttctcagagtcagccttctccccaaagtgcaagtattcctcctcagtagttggcacccagaaggggtcactgggaatgatctcccaatggctgaatactagttgtgggctggccaggccacttgtcctcttcctgatttcatcagcaaaaccaaagctttcagcaacaggcagcacagccttgatgatgaacatgtctgtcccttctttcatttcttcttgaagtacccgaccttctctctttgacaagacagcatagactcgaccgagaacatcaccagtggccatgatgtcacatgtgtacatagctgccatcaggcgctgaggtttcacttgcagtgcatagcgacatgcttctttcatggtggcaattagctgtcctgagaaaggtccatagcaatcagtgagtggagattctcctttctgtgatgtcctcttctcaaaggcctcagagcagccatcttgtagctcttggttttcatttccaccagaacaggtttcattttcctcctgtccctcttttgccagatcacttgctccttgttcctcaaatttacttaggtcccatttttccagaacaaaacagacacccatgagaggctcctcacacatggggcccagagagggttgctagttggaagccacttcacaatgctattgcccaaatctcggtatctactggcttcttttgaagctttgtcagctggacctgtccatactga

SEQ ID NO: 87637 - DNA, 410 bp, Homo sapiens
cttaaaggttactttcaccatatgtactattttagggtaaaagggtttttttttccttcggcactttaaaaatgtcatgccactttttcctacctgggcaggtttgcactgaaaagattgctgccagatgaatgggagtccaatggaatggggcttcttttctctcgctgcttttaggatccttttttaaaaaccttggcctttgggaatttgactactaaaggcctaacctagacttctttgggtgaactctgctgggggctctataaccttcttgcacttcaatatggatacctttctctaggttggagaaggtctgataacatccctttgaataagctttctacccctatctctttctggaaggccaataactgtaagattaaccctttggaggctgtttactagag

SEQ ID NO: 87638 - DNA, 3110 bp, Homo sapiens
atggaatctacgttgactttagcaacggaacaacctgttaagaagaacactcttaagaaatataaaatagcttgcattgttcttcttgctttgctggtgatcatgtcacttggattaggcctggggcttggactcaggaaactggaaaagcaaggcagctgcaggaagaagtgctttgatgcatcatttagaggactggagaactgccggtgtgatgtggcatgtaaagaccgaggtgattgctgctgggattttgaagacacctgtgtggaatcaactcgaatatggatgtgcaataaatttcgttgtggagagaccagattagaggccagcctttgctcttgttcagatgactgtttgcagaagaaagattgctgtgctgactataagagtgtttgccaaggagaaacctcatggctggaagaaaactgtgacacagcccagcagtctcagtgcccagaagggtttgacctgccaccagttatcttgttttctatggatggatttagagctgaatatttatacacatgggatactttaatgccaaatatcaataaactgaaaacatgtggaattcattcaaaatacatgagagctatgtatcctaccaaaaccttcccaaatcattacaccattgtcacgggcttgtatccagagtcacatggcatcattgacaataatatgtatgatgtaaatctcaacaagaatttttcactttcttcaaaggaacaaaataatccagcctggtggcatgggcaaccaatgtggctgacagcaatgtatcaaggtttaaaagccgctacctacttttggcccggatcaaaagtggctataaatggctcctttccttccatatacatgccttacaacggaagtgtcccatttgaagagaggatttctacactgttaaaatggctggacctgcccaaagctgaaagacccaggttttataccatgtattttgaagaacctgattcctctggacatgcaggtggaccagtcagtgccagagtaattaaagccttacaggtagtagatcatgcttttgggatgttgatggaaggcctgaagcagcggaatttgcacaactgtgtcaatatcatccttctggctgaccatggaatggaccagacttattgtaacaacatggaatacatgactgattattttcccagaataaacttcttctacatgtacgaagggcctgccccccgcatccgagctcataatatacctcatgacttttttagttttaattctgaggaaattgttagaaacctcagttgccgaaaacctgatcagcatttcaagccctatttgactcctgatttgccaaagcgactgcactatgccaagaacgtcagaatcgacaaagttcatctctttgtggatcaacagtggctggctgttaggagtaaatcaaatacaaattgtggaggaggcaaccatggttataacaatgagtttaggagcatggaggctatctttctggcacatggacccagttttaaagagaagactgaagttgaaccatttgaaaatattgaagtctataacctaatgtgtgatcttctacgcattcaaccagcaccaaacaatggaacccatggtagtttaaaccatcttctgaaggtgcctttttatgagccatcccatgcagaggaggtgtcaaagttttctgtttgtggctttgctaatccattgcccacagagtctcttgactgtttctgccctcacctacaaaatagtactcagctggaacaagtgaatcagatgctaaatctcacccaagaagaaataacagcaacagtgaaagtaaatttgccatttgggaggcctagggtactgcagaagaacgtggaccactgtctcctttaccacagggaatatgtcagtggatttggaaaagctatgaggatgcccatgtggagttcatacacagtcccccagttgggagacacatcgcctctgcctcccactgtcccagactgtctgcgggctgatgtcagggttcctccttctgagagccaaaaatgttccttctatttagcagacaagaatatcacccacggcttcctctatcctcctgccagcaatagaacatcagatagccaatatgatgctttaattactagcaatttggtacctatgtatgaagaattcagaaaaatgtgggactacttccacagtgttcttcttataaaacatgccacagaaagaaatggagtaaatgtggttagtggaccaatatttgattataattatgatggccattttgatgctccagatgaaattaccaaacatttagccaacactgatgttcccatcccaacacactactttgtggtgctgaccagttgtaaaaacaagagccacacaccggaaaactgccctgggtggctggatgtcctaccctttatcatccctcaccgacctaccaacgtggagagctgtcctgaaggtaaaccagaagctctttgggttgaagaaagatttacagctcacattgccccgggtccgtgatgtagaacttctccactgggctttgacttctatcaggataaagttgcagcctgtctctgaaatttttgcaactaaaagacatatttaccaacatttgaaaccactatttaagcttaattaatggtctaccttaatatataatttactgtataaggtaattttgggcaaaatataagtgatttttttctggagaattgtaaaataaagttttctatttttccttaagtcccctaaaagccataattttttattattccctttttctctattttcaattcctatgaatatgtattattttaaagttatatttgtcacacagagatgatgctatattacaccttcccttttttgttggtttcttaaactctaatctcatgacagattataccttccttattacttgttttatcttactcagaatctttgaatatatttttctgcccagaattatctaaacaaaagggagaacaaaagaagtatgtctcacttgggaactgaatcaactttaaatcagttttgtcacaaaactttttgtatttgactggcaatgctgattaaaattaaaaatgcactgaaaaaaaaaaaaa

SEQ ID NO: 87639 - DNA, 408 bp, Homo sapiens
  misc_feature (1)...(408): n = a,t,c or g
atcaatacatttgatattgattgagggcaagattctaggacaaatgattaaaaggatggttggtgagcacttacaaaaggaagcgacgatcactcagtccccacatggattcaggaaaaacaaatcatgccccactgggttcatttcccttgacagagtgactggacaggtagaggagggaaaagttatcacccacagcgtatctagagttcaaccaaacattctctcaatgcttttgggaaaacatgtatacatgtggggtgggtaaaggtaaacctaggcgaattcttaactggttgaatgactacatacaaaatagttctgttttaatgtcactagatcaaatttgcgaattacacaaagntggtaaagtcccttatttgaacttcaaaatgtggcagtacaaaa

SEQ ID NO: 87640 - DNA, 1326 bp, Homo sapiens
ttttttttttttggctatagagcatttattgcaaacaaaattgaggtaaaagaagctgacccagaacccacgcccgtccaggctggggaagtctctactcgccccacaccaggccccgagcaccgcgggcccgaagcagcccccagaggacagacgggccctgcgcactgaggtagctgcatcttaagcccccatgagtacaactgcccagggctgcccaattcccagaggggaggaggagagagaggcaggcagggggagccccggcttcaggtgggggcacaccccacaccctcaacaaacctcccagcctctcgggctgggcacttcctgcctggccacccagccagccatggggcagcggggtggccaccagaggcgggcgtgctggggtgcgaggtcactgctgctccaggcagtcctcggtcaccccctgggcagccagctcagccagcacgttctgcaggtagttggggtcgggatagccgtggcccgtaatgttgcggtccatctctgtcttgtggtggatctcgttccataccacggtgtccgtctcacccgtggtgctggacgtgcccactgtgaagatgagccgcctcttccaggccaccttcaggagctctaggacccttgcgggccctgggcgttgtctggaaggtagcactgggcggggaaaccctctggcagtgaaacggctttccgggattggggtgctcagggccctggataccatggggaatgctgtaaactatgaggatggtcccgcagtcctcgtggccggggagcgacatctggaaccgtaatacctccatctttccctggggctgggtccccgtcttctctccatagatggttttgcaggagggacactgcagacttccatccttattgccgttgcagtacatggccaggaggcacagcaggtggaaggcatggctgcacttggtgaggtggcccacagctagggacccgattgccttgctgtcagtcacatcgctgtatccagacgctgtggacagcttctccatgcagatgatgcagtcctcatctgggggcactttcagctcttccgtgtagttttttatgacctgctctggctctggctctggcttcggggtcgcttctgcgagcgcctgctggactctgctgggctttggcatctgcatgggcacagtggcagggacgctccctgggctgcttgagggaccgctggggagggaggcactgactgcaccggaggtggaggatcctgggggcaggtgctgcggtcccaggtgggagaggctggagcggtagaggggctggctccccagggaaggaggagct

SEQ ID NO: 87641 - DNA, 4620 bp, Homo sapiens
tttttgccagtgtgttttctttagtctttatttatttcagaacatttccttacatttaagtatgagtcatattaagtttagctgcatttgctcataagtaaattcataattataactttagtcaaatgtatttaaacaaacaaaaaaaaaaaggtttaagtagtaaaataatatgctttctttactcagccagccaacaagaaataaataggaacaaggaaatgatgtcttctggttatgaattaagttgacataacagtgctacacctcgtccaatccagtgttccttgggttggtcagagggaagagtcattggcaatcacaaaattcgtggaatggccagtggtggataatactcctctccgctcacttgtcttatacaatggagcaacataacttggccgttttggtatatctgccctcttacagggctttagccacatcacaggcactgtatcataaagaattttgggatgcgattctgcaagtttcttgatctttctattccaggaagctccatccagaaataatccgtgaatgaaaacaccatcctcaggaggatgcttgtattctttgtcttccatcacttcatagtcaaacccaagaagatcaataggaattgtgtatttcctggcgtagttctgctgggcaccggtcaggaaggcttgtgtgaagaagaagccagaaagccagaagactggaggaggaccaacctcataccattgctgcaagaattttagtcttgcaaggaagtcattcacatagctgccaagtggtttaaggcttgggtaggatttacccatccacatttctggaattttgacattcaaaatgctgctaaccacttcttcaagatctgtagacatgactgcaagccccttgattgctttttgaatatttacgcacgaatctcttatggtcttcagtaacttattgaaccgtcccatctcttggacaagtacagtgttcatgctctgagtataagttgttgggtacctcctcatggcagcctcgatgtcgaagttgtttggaagtttgcccaagatgtcactagcgacctcattcactacttcatctgatgattttgcaccagcacctgctgaacgagactgtgtaagaagaatgttatcaaatagcagctgagtttctgactgatccttagtgatatctgcattggcattcatcccaaagatttctggtgctggggtcagtggcagagtctttgtgtattcgatgtagcttttgtgatccccagaaggaggaacaaaatagatgccacttgagtcgaacttatagtctgaattttcaactaattcgggattgaagaatttgtttagaatgctgcgcagcgtgcgccggtcccagtcatcggtcactctacctccgtaattgcattcgccagtcatgtaccgcagagcctcatacggcagttcctcatactggttcaggaacatgtggagttgctgtacgctgattctcagatctgtctcattgaactcataaggaatattccaccataggggtccaaatttccgtctttcttgtaccaaagcatgaaagaaacacaggccataaagcaatttcttgaattcctcaggctttttgcagctgccaaagaactccggatcagagatcgggtccatgaggtatgatcgaatgatattagcccgtaaaccttttggtgcttcattggtcattttcactccattctgcagtactgacacagggaaatttggagatgggtaactcgttagccacattcggaaatctggatgtgttgactctgggcttaactcctcacagactttctcaagggttggcatccaagaggtggcaaggtgacaattctgaagaacaacccatgttccttccttgacagctttttctaacatcttcatagcaatgggcccttggccttgaccaagagataaagagctaagttttgatcccccatatccctggtcatcagcaaattttagaagggcagccatgggatctgctccaggagagagcacgaaaatcagtggtgcacagcagttactgtctccaaatgccttggctaaatcaaaggggggtggttcaatgaatgcacgtcccaatctgttgattataaattcctgcaacattggaataaccttgtctggcctcaagcaacgaataataagcatcctttgaaactcatttgctttatcttcccattcttcagggaaaacctcatggtgtggttccaaactatcatatactttcttccatccatcctttaagcgcataaactctctacgaatggttttgaaggcaggcaaatcatctaatcgacatatttcatcccaggatttctgaggaagccatgtacaagggttggcataaggattatccagtccaatgccaccagttagcagaaatctccactcagctttattaatcgcccgctcatgcagcagtagatttatggttagacaaaaggaaaagagcagcttatccttttcaaagagtgaccggcagacattaacatacagtgaataagtaaagtgatccttgagaatctgaagcctttttgccaaaatttctgatttctctgaattttcaatagacaggatgaaaaggttaataaaccaggtcagtgaatactggtacatgggctcaatgttggctaaatcagcaagagaaaaaaataggatggaagaatggatggcaataggacgatagcccatgcgggtggtgtcaatctttttctctgtctcttcggctacttcctgcttctgagaaatctcattagccaaggccttggaggaagataatatcttaatagcagtttcatcttctaatatattgccttccgaagatgaaagaacttctaaaatcttgtcttctatttcttttaactgccttttattttcagctccttgtaatatcaaggcttgcttttcttcttcaaggtctggcctttcttgtgccaccacaattcccagaagctgatcttgcattccctcaggggttatcatgaagtttaataatgttacctttactgatgtttcaggaagataatgaggatttcttaacttggtagtaatatagaagcggaagtcaggtgcatattcaattgtggagtccccaagccggatacatgtactcccaccctgcttaaaggtttgttttagtagaagaggttccaaaataggatctagttcttcgccaacattttctagcaacacaggagtaccaaactggatgcaattttccagagtcctgacatagtcaggttcactaagtttaatcacataaagactattggctttttccatgttcttgatccatttattagcctgactttgaggatctatcatcagaggccaccttcttgcattcattatgattatcccattatcaatggaaaatgagtcagaaggtaatccagcaatattccaagttcgaattgtcacagcttctcccagggtacccataagagagcaatcatctgagcaggggatatctcttcctttgcacaaagttgtccactctttagtttgattctgtctataggtggatgtgaaggctccgaggtaagcaaccactccggaggaaatgaggatatccccagtcaagttgatgtacagctgacctagctccagagctgtgtggctccatcgagttttctcacctccaaggcctccaatcaactgttcagctcgttctagttttttgctgcaaaggtcaacctggttttccaggtcagccttcttttgtttatttaattcaagtgtgtcttgaagcctggccagcttgtcctgaacttccttaagggctgcctgcttctttctaagaccatccatggcaattttaagctccccttcagctgcagccagttttatctttttgggagctactatttttgccactttatcatatgaatccattgctatgacccatttgcacagaccttcggccgctgtagaagcatttctgattttttctggtacaaaatctggatttggaatataattttttcttatgatattcatataagctggaggaatattgtccttgtcatattcatgaagtgactgcagaaacctcatgtcaccaagaagtctcttagctgggccccagaaatcctcaatttttttccctgaacctgttgggtcagggattttgtcagctttgattcctttcaagatgcatatagcttccataacaagcttgacaccagcaggaggactcttcatggattttaccactgtaatatcctgtgcagtaagagtatcaagggcggccagtgctgactctaatattggcaaggcacctgccaggtcagcatcgcactcatctttgatggctttggaagccatagcttgttcattcgctattgtttcatcagctttcactattttttcagttttggcaacttctacagactctttctcaatcattatcatcatttcatcaacctctttgctagcaacttttaattgaggatgtagtgcctccaactccatctgcattgtggctacttgagatgaagcagaatccagtttctccaaacccacttcatatctctttttcattttcattacttcacttcttttcttttctaacaacagtttgaaggtggagattaattcg

SEQ ID NO: 87642 - DNA, 1749 bp, Homo sapiens
gatatttgacacaaaccggttaccaattcaagggacactcaagaggtacccctagaaaaagctaagcaagtgcttaaaataattgctactttcaagcataccacctcaatctttgatgactttgcacattatgaaaagcgtcaagaagaggaggaagccatgcgtagggagagaaatagaaacaaacaataaccgtatgaagatgtcctgttaaatttacaacactaacgatgtagactctggaaatgcctaataagtcaaagaagacgtattaaagctcttttctgcttaaggtgacatctttgaacactttaacacaaagttgactcttctcgtaatggttttcatcagcgcatctgcccttatactcttcaccaaacacacttgagaactgtaacttcgtcaagcactttctgtcctgaagcttttaccagtatctgctgtcttttgtaattatgcatcctagctaaggcacagaagactgaatgaatgcaaggattcattaactctttgaatttgttaaatactaacagttaaccattagaagtggttcaatgatgtaagagtcacactgcttcaactttttctttgttgtagtttttaaattgtcgatttttagctatttgacagattaaaagcaaaataatcatgccatatttagtcctggagttcaatgtctaaatgttggatgtgaaaaattattgtagtaaacttttaatatgggcaaagcaaccttaagctctattttagccaaatgaaacataatctgaaattatattagaacatttcccttgtcttcaaactgtttggtgtaacagaatattgatatgccagcttggtggatttcaccaggttaatgcacattcttcttccctcctccccccattaatatgtatactgaaaaatgtgcatttgtctgaggaattattttgtttgctaccacttaatgaatctcaaaattttgagtaaatgtacctcagtctaatcagactttttatgacctttataactacatttaaaacccttaattcctatttctgggtgtttgcgagcctgattgctatcatgaagtaaaaatttattactctaggtattcactagctaaataaacatagttcttgtttagcaagcatatgttgttcctcagctcttttctccagcttttgcagtgtcctggcatccttaaaatactttgaaaatatggccttgatccatggattaaatcagtatctaagtgaatgtgttgatgttttattgatcagatctatataagtgggaatacagcatatatctggatattcttatagttatctttttaacatcttatttttttcattaattacatatcaacattaattttgtatcttgaagcaaattgattttggtataattaaatgtgtcaagcatctgtattaattgatttgatggcataagggttatgaaaataatgtactgccccatgtattactgttccaaaaggagaaagctatgtagaaagatacattaagggtgaaaatagcaatacagatgcttgacacatttaattatacaaaatcaatttgcttcaagatacaaaattaatgttgatatgtaattaatgaaaaaaataagatgttaaaaagataactataagaatatccagatatatgctgtattcccacttatatagatctgatcaataaaacatcaacacattcacttagatactgatttaatccatggatcaaggccatattttcaaagtatttt

SEQ ID NO: 87643 - DNA, 1308 bp, Homo sapiens
ttttttttttttgctagttgtatataaaatttaatctcaccgaatgtacagttttcaaatttcacgtgtatattaaggaactgatgcatctgagcattgtcaaacaaacgggaagaagaagttaaagggcagcctggcattgatggctggtggagctctgaagcctgcctctgcaggtgcagacacatccacaaaagtaaccgcagtggaaataagaatcgtcctttcatttcctgagttggcctcaggaaaggaggatgaaattagatttgcagttacattgactattttggcctgtggattcagcagggatccgtatttagtccacttcacttctataaccaaagcccctgggagctggcaggaatccttcctgttgaatgactgggtgatgaagtggatgggcacccagtccagcatgtccctgggccctgggaatttccaaaaggggccacgtaatctgggaagccctggccccacagcaggctcttcaccttctgtgctacgagctgacacgggagagctccagtcagtcttagtttacagccagattgcatagtgtaaccaaataatactggggtccggaccccctccagtgctaagcagtcttgctcagttgtgctatgaagaatagtaagctgtccatatctatttgtggtctgaataatcccagaccccttatgaggctggaatccagcagctaatgggagccccacgacataaccagggtttccactgagagggactggctgggtattttcctgaagaaaatgaatttcaaacttttgctgcagtgggaccactacgctgctaactgtccccagaacgaatgagagatcagctttggtgacttcacctgcatctgtgtatgtgaggctgtactttacctcaagaacaacattcacgcaaaggctaaagtgtccagcgttgacgagagtcggctgcagcacatcagtgtcctcccgtcgggtgagcgttttatttagagactgaatgacgatggactgaacagtgatagggaccttttttcttgaatcaggtaccctcagaatttccgggctgctgtaaaaagccatgctgagggcttcaatttcttcacactgttctaaatttatttttctggtgcacttaacagcctggttcaccagaaacgctgcagggttattatcagtgcacagagatgatgtcagggacgaaggaaatctcagaaacgaatctgaagtctgcagaggaaccccatactcatatttagcagcagtaggaatatccagtttggttgtgaaggaaacatatgattcagcattcaat

SEQ ID NO: 87644 - DNA, 1266 bp, Homo sapiens
  misc_feature (1)...(1266): n = a,t,c or g
ttttttttgtttttttttttagacaaaccacaactgtttattggtgaaagactcagcttcctcatgtgctcgctgcaaaataaataaaataccagatgctagtatcgtacactatttacaacctgcagctgaccaagcaggtcctgaagccttctctgtggaccagtactgcactcttctgaggctacgggagaggtccagcagccgggccagggactaaaaggaaacgaaggatctgttttatttcgagctcgggggcaggctgcacttctcgcagatctgaacgggcagcatgtgagtcaaggaagtactgtttatggccaccagcagctgcaacttgcccatacagtcctccagcgccgcctccggggtggtctcccagtcgcaagtccacgggccgcgagacccccagcatgtttctcgccagcgccaggcaagcagatacgcccaggagggaaaggggagtagactggtgaaggcattagtcggccagactcagctctgccaccccccggcgccagggcttgcgcttccagagcttcggaggcctcagcctgccccgcctccagcgagcgtgcgtgaaatgctccaggaagaagctaatggtgggcgcacccagggtgaagtgcagcttgtgcagcacgatgcactcgaggttgcagagctgctgccgggagaaggcgccgcagcagagggccagaagctgcttcacgcgcggcgggtgcacctccacctgtttgcaagcgatgagcaaggaggtgaccccaagcagctggaagcagtctgcagccaccggcgtggtggtgaggaagcggtccagagtgttcaccgtcaggcacagcgactcgaaggagaggctgaattggcggtgctccgggatcagccagctgagcagcttacagcgggattccgccgtcacctgccgggaaggaggggggaggcgggcccgctgggcttagggtggagagggactgtggaagggaaggaagggccaagaagaatcggggagcttcccaggagaggggcaagaagatttcagaaagagaaacgcaatggaaactgggaaacgcgtgggccgtgctgagccggaacaccgggattgggacctggcgctgtgcagagagcgtcgtacacgttacctcgcgtaatgggctcagcaattcaaaggaanggggaggggttccattttgcagatgaagaaagaagctcatggggtgttaaataacttgcccgagttcggtaggagtccagactcaacccggaaac

SEQ ID NO: 87645 - DNA, 3884 bp, Homo sapiens
cttttttccgcccctggcgaaaagaggggtgttcttccaagggcattaattgggggaccccccggtttttccccccccccccgttggaaacaccgggccgttgatttttaatttgggcgccccattaaaaaagttttttgttgccaacccgggggcgttaaaatgggtcctttaaaacggccccccccttttttttttttttgcaaaatgctcaagtgtatttatgcaacagactggccatgtactgaggaggggagcgcaggctgagggctgaggtaggagtgaggttcttcctcctgcagccaccaggcagctgatcaccatgtccaagcgtcattcctgagaccctcaggtgatgctcacgtccccagaacagcaggctggatgcatggccagaggagctcggccagccccggggctggtcctgagaggtggctgcaggcggggtgggtaagggcccctcctccaggcagcaggtgacccatagcccacaccctccacaagaaagcgggcgtggacagtgtgttcaaagctgcagccgcctggacaggggcacaagttccactggccttggaagccgagctcagaggacatatgggaggttctccttggaggtcaggaggggcggcagtgctggtcagtgcatgggggacactgggacgcctctctcccagctcccactctctgcctcctggctgggctcgggttccgcctcctccgagtgctgggtgtcgcccggcgcagggcagcgccggcccatgcagccgcactcttccacctcggtgtagctgaaggcccggctggagccgtcggtgcagtgcagggtcacattcctcagcgaggtccgcagctcctggcagcactggcacctgtgctccaccgtgttgccctcgaggcgagtacatggaagagctgtccccacagttcccccggcagtaagccaggcgcacgggctccgaggagctgcagccctgctgctggatgatcagggctcctatggtacacagcacaggtcgactggttctggtacgggggcgggggcagcgggcagaagcggcagcagccgtccttgctcatgcgggcctcatccagagaacagctgagcggggggcacgccttcttcgtggtgaccaccacgagcccatcctggtgcttctcacactggtgggtcacacagtggttccctgcgtctgaccaggtgctcgccagggtagaagaggtgggcggggctcttgctggtgttggtgacacaggcgacctgcacacaggtgccacagcactgcccgctctgctcctggtactcgaagcccacagggcagtgtgtgttgcagatctgggtctcacagctgaccacaaacgcgtccgatggggggccacccggcagctcacacctgcaggtttcgcacaggctcgaggagaccacggcgccgggctggtacagggtcccgttgatgctgcacactgtccagctgcagttttggactgggcagcaggccccctcctggtaggtcgggatcgcgcgggcgccctcaggacagcccacgggcgcggggcagcggctggtgttgcaggcgcagctgtactgggggcagcactggccggcctgtggggctgcaggcacaggcacgaagccgggcagggggcaggcagggggcagcgggcagagcttgggtcggcaggtcagcgtccacgtggccgcctcacacgtgcactcctggcagtccatgccgacggtgtggcccaccttcaccggctctccgtggggccccagacacctggggcagcccgtgggcacgcagacttgggcactggtcgtgaagagggtcatgccctccggacagaagcagccttcggtgatggggccggcctcccggagagccccgaggctggcgctgtcattcccgtagcagtaggaggggttgctcgggccgcagggctggtacaccttgtcggctgggcaggtgaatgggcacatgtggccggtccggcctctccaatcgatgcagatgtcgtgggacgcgcagagtgccgcgtacagctccaggctggagcacaccacatccaggtccgtcatgtggcaccggtcaaagacgcagccctcatagaacagcagtggggggatcacagtgtggcacggctcaaagaccttgctcagaatcagctggcagatgggtgatggcaggcacggagcaggcggtgtggtgggcccgacggtggtagacccaactgtggtgggcccgaccgtggtagacccaactgtggtgggcccgaccgtggtgggcgtcgggtgaggccggtggcaggctggctggtcagggatgctcacgttccagaggccggacatctcggagcaggaagcgaccaccgtccccctaggcgtgcggcactcatccttcctgtcgttggtgcaagtgccgcactggccctcggtgttgttggcaaacttgctgaagggcacctccacggagaagatgaggccggagaacatgacctggactcccagctccgggatggtcgcgtacatcttgacgccgatgcgcgagaccacgatgccgtttttccggaagccggggctgaccaccttgttgttgaagatgatctcgttcgtcatcaccccgtggactggcttgcgggtcagcaccacgcggtcctggtggtactccaggatgatggacctcgggcaggagagcccgtcctccgcaccgcagaagtagttgtcgacgagcacgcggaagtggccatacacgggcacaatctgctgcaccagcacgtacgtgcagttgtccaggaaggtgtagtaggtgccgtcgaaggtgatgtagtgggggtcaccccagccgctgcacacacactggcactggtagtgatggcagcagccatcttggtcagccaccttcacagccgggtagccgttggcacaagtgggcttctccaccctcgggcacgtgcgcgggctcagggagatgacgttgttgccctcacaggtggcctcggagcagttgggtgtggcccaggtctcacctttctttctggggggaaccgcatttgggcatcccagctcagtgacgggctcggaggtggatattgaaggggacgtggctggggcaggaggcagcgtggtggacggacagtcactgtcaacccctctgaccacttggcagtcctggctacacagggcataatagcaatggccagcgaggtctctgtggcggtatatggtggatcctgcagggtagagccggtcagccacgttgcagaagcaggtttgggtggagtaagccacagagctggatgccacagagctggatgccacagaggtggatgccacggaggcggataccatggaagtagacagggaaggatacagagcattggtaggagaagtcccatatggggtcacagaggtcaccgggcagcctctgggggtctcgcagcagagcacgcgcacctcgtagttgaggcacatcttgaagggtccctgctggtcctggttccggcacaccaggccctcttcccggctgcactgcaccacctggcccaggtgttcgatgctcacctccgggtggctctcggctcggcactggagcctggtgatctcctcaggtcggcggcagattttttccccactcctgatgatgttgttgtaggtttccttgtccccaccgtggggtccaggggatggaaagtccacgtcaaaccacttggtccaggtgcaccggggatgacagtctctggtgactggttgggagtgggttgtcttggatacagaaacatggcttgtgctggtctttgaaacagaggctgtgctggtggtgggaacggggctgggagtagttccagaaccgaaggttgtgctgcttgtagcagctgagcgcacgcgtggg

SEQ ID NO: 87646 - DNA, 697 bp, Homo sapiens
  misc_feature (1)...(697): n = a,t,c or g
cggacgcgtgggtcgcccacgcgtccggtgagctgcccccacaaaccaccaagaccctggctcgcttcattcctgaagtggctgtagcttatcccaagtcaaagcccttgacgacccagatcaagataaagaagcctcccaaggtcactatgaagacaggcaagagcctgctgcacctccacagcaccctggagatgttcgcagctcggtggcggagcaaggctccaatgtccctctttctcctagaagtgcacttcaatctgaaggtccagtactcagtgcatgagaaccagctgcagatggccacttctttggacaggagagggaattaactggcttcatcaccagctatctcgaagaagcctacatcccagttgtcaatgatgtgcttcaagtggggctcccactcccggactttctggccatgaattacaacctggctgagctggacatagtagagaatgccctgatgctggacttgaagctgggctgaccatggcaggactcccctgccagctgcctgcttaccaccaaccacctgcaccccatggaggagaccccctgattggagccaggtgggcctggccccctaccactggtggctgcctcctttgacaaggagtgaatgggtcangcctgggctggagccttgccaataaacaggagaaaggctcttataaatatctgaaaaaaaaaa

SEQ ID NO: 87647 - DNA, 986 bp, Homo sapiens
ggtgatttcctcattgtgcaaacatcacagagtatacgtacacaaatctagatggtagcacctattacacacctaggctatatgctatagcttattgctcctaggctataaacctctacagcatgtttctgtactgaattctgtaggcaactgtagcagaatggaaagtatttatgtatctaaacatagaaaaatatatagtaaaaatacagcattgtaatcatatatgtgggccattaggggatgcataactgtaatatctaatatttaatttattagatagttatctcaaacatttagtatctagtaaataaacttattttatattactatctaggggacttatttgaaaattactgcagaaatgatgacctggtaacatttggaagattttgttatggtgtcactgtcattttgacataccctatggaatgctttgtgacaagagaggtaattgccaatgtgttttttggtgggaatctttcatcgggttttccacattgttgtaacagtgatggtcatcactgtagcccacgctggtgtcattgctgattgattgcctcgggatagttctagaactcaatggtgtgctctgtgcaactcccctcatttttatcattccatcagcctgttatctgaaactgtctgaagaaccaaggacacactccgataagattatgtcttgtgtcatgcttcccattggtgctgtggtgatggtttttggattcgtcatggctattacaaatactcaagactgcacccatgggcaggaaatgttctactgctttcctgacaatttctctctcacaaatacctcagagtctcatgttcagcagacaacacaactttctactttaaatattagtatctttcaatgagttgactgctttaaaaatatgtatgttttcatagactttaaaacacataacatttacgcttgctttagtctgtatttatgttatataaaattattattataggctttt

SEQ ID NO: 87648 - DNA, 367 bp, Homo sapiens
acaaaatgagtgaaaactctatactgtcatcctcgtcgaactgaggtccagcacattactccaacaggggctagacagagaaggccaacatccgtttgttgacatgggttatatcaaggcgtctgttcaggcttagaatgtggtctcttatgggtgatgggggtcacaggagagtggtggctcccacgtataggaaatttcttgtttgaaggactgtcagtgagggtgggtaacacatgcattgtctgcaggactaggtgaatgtccatgtggcctagcaagagttagctggtagcccgcctctggttgccaatttgttcttgagtccttgttctgggttctcaggtcccacggaggaagacagatt

SEQ ID NO: 87649 - DNA, 2128 bp, Homo sapiens; identical to SEQ ID NO: 65402

SEQ ID NO: 87650 - DNA, 683 bp, Homo sapiens
ccacggtgagtcatgagcagcttcctggatggtgttctgagagttggcacctatagcccccaagccagtggtccctggaattgctgcttcattggcactgcctcaaaaatattgagggatatttgtgaccaggctccaaattgtaggtgtctagatggagagtcatggtcttgcacatcttcccttggtgtcccttctctgtaggtcttgtacgaatgatgtgccttgactcctctttcaccttatcccacttccggtgatggccagtgatgaccagtgatagtcagcgaggctattccttgggggagaagggaatctacatctcctgcttagggtcttatatcgcatttgctgtctgacatagacttcaaaatacctatgtcagatacttcctgaatgcctcctctttgtagctgggcatggaggctcatgcttgttatcacaacctgtgggaggccaaggcaggaggatcacttgaagccaggagtttaataccagcctgggcaaccaagtgaaaccctatctttacaaaaaacaaaattagccagatatggcagcatgggcctgggcccagctactttgaagctgaaacaggcggatgctctacccaggagtcagggttgagaaatttttttggcccatttcttcccctgtgggaaacctacaaaacaaaggtttttttc

SEQ ID NO: 87651 - DNA, 395 bp, Homo sapiens
aatacatgggggatggaggaagaagttgggagcaggggatgaggaggagcctggggggacccagtgtttccacccacaccagagcccccgcagcagatgccagcccactaggacctggtgggcccagaggtgtgcagagggagcaggtggcaccatgtggccccaccacctacgttggtgacaaggccaacccagagccaaggggaggggcgacgtggaccctgccgcaactggagacctggcagaggagctccggaaaacaccacgggggcctccttgagaacaatctgttctgtgatttcgtcaagctgagtgagggaagccaggcacgggctgcatattgcatgttccgcttctgtgaaatgtacagaacaggcaaactcacagaggcagag

SEQ ID NO: 87652 - DNA, 411 bp, Homo sapiens
aatacattctgcccaacagtctcagggcggtttttctggcccttccttgtagttctggcggtagcagatccctttggcctgcctctgcccctgggctgggtccgagccaccttggccttggcccgtactgccttggctttagccttggccttggcccgtgctgccatgactttggccttggccttgacctgtgctgccttagctttggccttagccttgaccagtgctgccttggccttggcccgggccttagcagccttggcctgtgttcgagccaccttggcttgggcacgagcagctttggccagtgttcgagctaccttggcctgggctgttttggtgcccagggcagagccccctttcattcgccggacactgggggacccagtggctctgttggttttgctcatg

SEQ ID NO: 87653 - DNA, 2426 bp, Homo sapiens
cttcaggcccagctgaaagaactgcagagagagaatgacctcctccggaaagagctagacatcaaggacagcaaattgggatcttccatgaacagtattaagactttctggagtcctgagcttaagaaggagagagtcttgaggaaagaagaggcagcgcggatgtctgtcctcaaggagcagatgagggtttcccatgaagaaaatcagcacctacagttgacaatccaggcccttcaagatgagctgcgaacccagagagacctcaaccacctcctccagcaagagagtggcaaccgaggagcggagcacttcaccatcgagctgaccgaggagaactttaggcggctccaagccgagcatgacaggcaggctaaggagctgttccttttgaggaagacattagaggaaatggagctgagaattgaaacgcagaaacaaaccctcaatgcccgagatgagtcaattaaaaaacttcttgagatgttgcaaagtaaaggcttgccatccaaaagcctggaggatgacaatgagcgaacgcggcggatggcagaggctgagtctcaggtcagccacttggaagtgattttagatcagaaagagaaggaaaacatacatcttagagaggaattgcaccgaagaagccaacttcagccggagccagccaagacgaaggctctccagactgtcatcgaaatgaaggacacaaaaatcgcttcattggaacgaaacataagggatcttgaggatgagatccagatgttaaaagccaatggtgtgctgaacactgaggaccgcgaagaagagatcaaacaaattgaggtttacaaaagtcactccaagtttatgaagaccaagattgatcagctgaagcaggaactttcaaagaaagagtcggaacttcttgccttacaaacaaagcttgaaaccctcagcaatcaaaattcagattgcaagcaacacattgaagtgctcaaagagtcacttactgccaaagaacagagggctgccatccttcagactgaggtagatgcgctgagattacgactggaagaaaaagaatctttcctcaataaaaaaacaaaacagctacaggacctcacagaagagaaggggacactggccggtgaaattcgtgacatgaaagatatgttagaagtgaaggaaagaaaaatcaatgttcttcagaaaaagattgaaaacttgcaagaacaacttagggataaagacaagcaactgaccaacctgaaagacagagtgaagtccttgcagacggattccagtaatacagatactgcactggcgacgctagaggaagctctgtcagagaaggagagaataattgagcgcttgaaagaacagcgagaaagaggatgatcgggaaagactagaagagatagaatccttccgaaaagagaacaaagacctgaaagagaaggtcaatgctttacaggctgaactgactgagaaagagtctagtttaattgacctcaaagaacatgcatcttcattagcctctgcggggctgaaaagggattccaaattaaaatctctagaaatagccattgaacaaaagaaagaggaatgtagcaaattggaagcacagttaaaaaaggcacataatattgaagatgactccaggatgaaccctgagtttgcagaccaaataaaacagctcgataaagaggcgtcttactaccgcgacgagtgtggcaaggcccaagcggaagtggaccggttgctggagatcctcaaggaggtggagaatgagaagaatgacaaggacaagaagatcgcagaactggagagcttgactctcaggcatatgaaagatcagaataagaaggtggccaacctcaagcacaatcaacagttggaaaagaagaaaaatgctcagttactagaagaagtgcgcaggcgagaagacagcatggctgacaactcacagcatttgcagatagaggaactgatgaatgcactggagaagaccagacaggaactggatgccaccaaagcacgcctcgcctccacacaacagtccctggccgaaaaagaagcgcacttggccaacctccggattgagaggaggaaacagctggaggaggatcctggagatgaaacaggaagcactacttgcagccatcagtgaaaaagatgcaaacattgccttgctggaattgtctgcctccaaaaagaaaaagacgcaggaagaagtcatggccctcaagcgggaaaaagaccgactagtacatcaattaaagcagcagacccagaacagaatgaagttgatggcagacaactatgatgatgaccatcaccattaccaccaccaccaccatcaccaccaccatcgatctcctgggaggtcgcaacattccaatcacaggccctctccggaccaggatgacgaggagggcatatgggca

SEQ ID NO: 87654 - DNA, 1962 bp, Homo sapiens
ttttggaccctagtcattgaggtgcaattcgacacgtgtgagagtaccgtacaggtgagcaagttgcaagacctcatccaccgcatcaagatggcccggtgcagaggacggtttgtctgcccagtaatcctgttcaagggcaagaagtggtgacacgcatctttttgataaggtcagaggctatgacatcaagctgcttcgatacctgtcagtcaaatacatctgtgacctgatggtggagaacaagaaggtgaagtttggcatgaatgtaacctcctctgagaaggtggacaaagcccagcgctatgccgacttcactctcctctccatcccgtatccaggctgtgaatttttcaaggaatataaagatcgggattacatggcagaagggctcatatttaactggaagcaggactacgttgatgccccattgagcatccccgacttcctgactcactctctgaacattgactggagccagtatcagtgttgggatctggtgcaacaaacacaaaactacctgaagctgctgctttccttagttaacagtgatgatgacagcgggctgctggtacactgtatctcaggctgggatcggacccccctcttcatctccctcctgcgcctttccttgtgggctgatgggctcatccacacgtccctgaagcccactgagatcctctacctcactgtggcctatgactggttcctcttcgggcacatgttggtagatcggctcagcaaaggggaggagattttcttcttctgcttcaattttttgaagcatattacctccgaggagttctctgctctgaagacccagaggaggaagagtttgccagcccgggatggaggcttcaccctggaagacatctgcatgctgagacgaaaggaccgtggcagcaccaccagccttggcagcgacttctccctggtcatggagagttccccaggagccactgggagcttcacctatgaggccgtggagctggtcccagcaggagcgccaactcaggcagcttggaggaagagccactcatcctctccacagagtgtcctctggaaccggccacaaccctcagaggaccgcttgccttcccagcaggggctggcggaagccaggtcttccagctcctcttcctcaaaccattctgataactttttcaggatgggtagcagtcccctggaggtccccaaacccagatcagtggaccatcccctgcccggatcctctctctccacagactatggcagctggcagatggtaacgggctgtggcagtattcaggagcgggctgtcctgcacacagactcctctctccctttcagcttcccggatgagctccctaacagttgtctgcttgcagccctgagtgatcgagagactcggctgcaggaggtgcgctcagccttcttggctgcgtacagcagcacagtggggcttcgggcagtagcccccagtccttccggtgccatcgggggcctgctggagcaatttgcccgtggtgttggactccggagcatcagcagcaatgccttgtgaagaagccagcccatgacattttcctgctcctctctcagctgagcccttagcagagaatcaaagccatgcctggccgaaggggtacttccaggtcaggggaaatttcagtcccccatctccatcatgaacatggcagccccaaagctgagcaaggccaaagacagggttttccaacccccagcctcttgactggtgaccaccaccccttcttgtcactgtctcccacccaccccatctttgctgggattcccatcaactctcagaactgtgtggggtttccctggggccttgtggaagccatgacttcacaaagaccctacctgtcagttcttgtttctggggaggagggatcacctgcactgagaatgaggcagtttgacacagatcacaaaataaaatcaaagtctttttgaatagcc

SEQ ID NO: 87655 - DNA, 3565 bp, Homo sapiens
cggggtcagatacctgggggtggggaggggccacagaagacattgccagaccacgctgtcccggcagctttccctgcaactgacagtacctcagagggaaagagtgtgcgtcatcctaaaccatctacctcagaaagcaagcagagcactccctcagagacccaaacagtgggggcacatgtactgcaggtgtgcagtgagcacacatcacattccgcccatccagagcctgctctgaatttgactttggcatcgaaggaaatcccaagtaaactggaagcacaattaggtcagggaaagggagaggccaagctggatctgaaatatgttcctcccaggagagttgaacaggagggaaaggcagcccaggaagggtatctgggatgccacaaggaagagaatctgtcagccttggagggaagggatccatgtggggaagcacacccggaagccaccgatgcacttggccatctgctgaacagtgacctccaccaccttggggtgggaagaggcaactgtgaagagaagagaggagtcaacccaggggagcaggattctctccacaccacccccaaacagggctctgcttccttaggaggggctgataatcagcccactggcaaaatttcaccatgtgcaggtgagaagttgggtgaaaggacatccagcagcttttcaccaggtgacagtcatgtggcttttattcctaataatctgactgacagcaagcccttggatgtcattgaggaggaaaggcggttgggcagtgggaataaggacagtgttatggttttggtgttcaatccttctgttggagagaacaagacggaggtgcctgagtccctggaccctcaaagtggccgctcagaagcacgggaaagcaaagaggtcaccacatctgttgctgaaaacaggaaccttctagagaatgcagataagattgaaagcacctcagcaagagcagattcagttctcaatattccagcacccctccacccagagacaactgtgaacatgacctaccagcctacaacacccagtagcagttttcaggatgttagcgtgttcggtatggatgcggggtcccccttggtagttccaccccctactgatagtgcacgcttgttgaacacgtcccccaaagtgcctgacaagaacacttgccccagtgggatccccaagcctgtcttcacacattccaaggacacaccttcctcgcaggagggaatggagaactatcaggttgaaaaaacagaggagaggacagaaactaagcccatcattatgcccaagcccaagcatgtgaggcccaagatcatcacctacatcaggaggaatccccaggccctgggccaggtggacgcctcgctggttccagtggggcttccatatgccccgcccacatgtaccatgcctcttccccacgaagagaaggcagcaggtggtgacctgaagccatctgccaacctctatgagaaattcaagccagacctgcagaagccaagggtcttcagttccggattgatggtgtctggaatcaagcccccgggacatcctttcagtcaaatgagtgaaaagtttttgcaggaggttacagaccaccctggaaaagaagagttttgttctcctccctatgctcattatgaagtccctccaactttctatcggtcagccatgctccttaagccccagctaggattgggtgcaatgtcccgtttaccatctgcaaagagcaggattctgattgcaagtcagaggtcttcagcgagcgccatccacccaccaggacccataacaacagccaccagtctctacagttccgatccttcagatttaaagaaagcttccagttcaaatgctgcaaaatccaatctcccgaaatctggtctccgtcctcccggatactcacgtctcccggcagccaaactggcggcatttggctttgtccggagctccagcgtctcctcagtctccagcacccagtccggggacagtgcacagccagagcagggccggccagccacccgttcaacctttgggaatgaagaacagccagttctgaaggcatctctgccttctaaggacacacccaagggggccggccgggtggcccctccagcatcctccagtgtgacagcaccccgcaggagtttacttccagcgccaaaatccacttccacacccgctggaacaaagaaagatgctccgaaagatcaagatacgaataaacctgctgtttcatctcctaagagagtagcagcttcaaccaccaagcttcattcaccaggatacccaaagcagaggactgcggcagctcgaaatgggtttccgcccaagccggacccgcaggcccgtgaggctgagcggcagctggtgctgcggctgaaggagcggtgtgagcagcagaccagacagctgggcgttgcgcaaggggagctgaagagggccatctgcggctttgatgccctcgccgtggccacgcagcatttctttagaaagaatgaaagtgcccttgtgaaagaaaaagagctgtcaatcgaacttgcaaacatcagggatgaagttgccttccatacagcaaagtgcgagaaactacaaaaggagaaggaggagctggagaggcggttcgaggacgaggtgaagaggctgggctggcagcagcaggccgagctccaggagctggaggagcggctgcagctgcaattcgaggcggaaatggcgcgcctgcaggaggagcacggtgaccagctgctgagcatccggtgtcaacaccaggagcaggtggaagatctcaccgccagccatgatgctgctctcctagagatggaaaataaccacacagttgccatcacaatcctgcaggatgaccacgaccacaaagtccaagaattgatgtccactcatgagcttgaaaagaaagaattggaagaaaattttgaaaaactgcggctgtcattgcaggaccaggtggacacgctgaccttccagagccagtctctgcgggacagagcccgccgcttcgtaagaggccttgaggaagaacacagaggagcagctggagattgcattggctccttatcagcacttggaagaagacatgaagagtctgaagcaggtattagaaatgaagaatcagcaaatacacgagcaagaaaagaagattcttgagctggaaaagctggcagaaaagaacattatcctagaagaaaagatccaggttctccaacagcagaacgaagacctcaaagcaaggattgaccaaaacacagttgtcaccagacagctgtcggaggaaaatgctaacctccaggaatatgttgagaaggaaacccaggagaagaagagattgagccgaaccaatgaagagctgctttggaagctccaaactggggacccgaccagtccgattaaactctcgcccacatctcccgtttaccgcggctcctcctcggggccctcctctccggccagagtcagcacaacacccagatgacgccactacacggcctgcgggagctccggcttctcgtcctccggtctccaccctgagggagcaccgacccgg

SEQ ID NO: 87656 - DNA, 387 bp, Homo sapiens
tgctttgcctcgtgggggccgtggaggggcgcccttcggacctcctggagagggtagaggggtgcggccactaatttgcctcgtgggggccatggaggggtgcccttcggacctcctggagagggtagaggggggcggccactgctttgtctcgtgggggccgtggaggggtgccctttggacctcctggagagggtagaggggtgcagccactgctttgcctcgagggggctgtggaggggtgccctttggatcttttggagacacctggccacagttcccagccactcggggtccaccacgttccctcgaggccaggctccacccaggctgtccccagcctaggacaaagctccctgggctacagggacagccctccctggccag

SEQ ID NO: 87657 - DNA, 445 bp, Homo sapiens
ctgccacgcacgcatgcttgatcctctagagcggccgcatacacgtctggcttcttgttccatcattggtccccccagctccatcatcccagccccctgctccatcatcccaactgtctgctccaacatcccagctccctgctccatcatcttggctccccgctccatcatcccgctccctgctccatcatcccactcgctgatgcggcatcccagctgcctgctccctcatcccggctcccctgctccatcatcctcgctccccactccatcatcctggctgcctgctccaacatctgggctccccactccatcatcctggctgcctgctccatcatcccagctccccgctccatcatcctggcccccccgctccatcatcctggctccctgctccatcaaactgctccccactctgtcatcccagctgccagctccatcatct

SEQ ID NO: 87658 - DNA, 363 bp, Homo sapiens
tgaatgacagtttatgggttccttttttacttttcatgtatgcgggaatttcccattttccttttgttattgattggtagttttattctattgcgcccataaaagatacttggagtaatttcagtcttcttaaatctgataaaacttactttgtgacctagcatgtgatttatcctggagaatgttagtgtacacttgagaagaatatgtatgctgctacttttgcttggaatgttctgtatacatttgttaagcccatttgttctgtagtattgattaaatctgtgtttttttcttgagttttttgtctcaataatctatccatttctgactactattatggaattgctttctatttcttcc

SEQ ID NO: 87659 - DNA, 1780 bp, Homo sapiens
cagaaccggaggatctaatgtactacttctgaaaacggaaatccacagacattcaatacaggccgaaacagactctcaccccaaaaatattagtgaaagtgcatacactttattatgtacattgttggaaagggaggccacctggagaaacttctgcactggcactgtgttcctagagctccttctatgcgtccctcccaagtgatttaatttcagctgattggactacgaattcacaaggcagaaaagtcaaggtcatttggtatctggagacaggagaactcaaggaaccaaaagtactgttactctaagtctcagaaaaggttttcagtcaggatatggaggctcctggtcctcaagggtgaaccacttcacacaacagataaaaccatcattttaaaattcaaaatgtaagtgcaacttgagtttaagttgcactgctccatacctctaataaactcagctaggagccaggatacatggtagttcaaggcttcctaaaataagcttgaaattggggtacaggggaagggacatccattggctggatggacagagtggttgagctaaagagagctataaaggctcgtgctgggaaagaaagctgttatgcttagacttctctaggtgaactcagagtctcaaagaggaaatgttacaaatgtcacccgccagctttctggccagtaagcagaatgccaggttgctcagattcacagacatttgcaaaacagaagatgtctcctaatattatagactaagaatttgttgtccagaggagctgaccagttcctctttcagcatcaatatacatgatagaagaatgactaggtaaatttaaaaagacctacatctatatagatattgtaagtttgacagtatctgcccaagatcattagacactatatagtcaatatactgtgaattccttatactatgtaatgaatgggtttgtaatcaacatatttcacagtgtaccacagttaacagcatgcagatagtaaaatataatggtttcctgaagttatctcttaaaaaagtattttagtccttcagctattcaaatagatatataacaattgcatatagaacgtagagaaaattttattaaaaaattaaaactatttaaaacctgatatatgaaaataggcaacagtgagaaaaaagcacttttgtgacaaatatttagctggtttgaaagacagaacaaggaggaatcatttactcataaagaaggctcaaataagttaaaacatggatgtatttttaaaatgaccactctagtagtgaatttaaaagtcttttaagggttagagtaatctttttcattagtcttggctatttcctctagttctgacaagtacaggcaagaaaatggctactctcaagtaaggattattctgaaacacggtctggatttagaaaataaatgaacattagggaaatttccttaattaagactctccaaaccaggtgtggtagctcatgcctgtaatcccagcactttgggaggcagaggtgggtggatcacctgaggttaggagttcgtgactagcctggccaacatggtgaaaccccgtctctactaaaaaacaataataataatacaaaaattagctgggcatggtggcatgagcctgtaatcccagctactggggaggctgaggcaggagaatctcttgaacccaggaggcggaggttgcagtgagccgagatcatgctatttgcactccagcctggggcaacaaggagtgaaactccatcttcaggaaaaaaaaaa

SEQ ID NO: 87660 - DNA, 459 bp, Homo sapiens
  misc_feature (1)...(459): n = a,t,c or g
ncgatgccattgccncgncgnancgggncagnnnnnaccgagggacccacgcgtccgctctcatctgccatctgcagaaatttgtttttatgatggcatgagaagatgctgaagcaggtattggagggccccctcaagggcattctgatctacactgaggaccaagttgtctcctctgactttaagaggggcacctgcactcttctaccttcaatgccacgactggcattaccttcaatggccactttgtcaggctcctttcctgggatgaatttggcagcagcaacagggtggtggaccttatggtccacacggcctccaaggagtaagacccccagaccaccagctccatcaagagcatgagaggaagagtgaacccccagctgctggggagtcattgccccactcaggctccccaaagtcaggttccattccagacttctggaagaaagacagggg

SEQ ID NO: 87661 - DNA, 3718 bp, Homo sapiens
atgtgctccacaaatccaggcaaatgggtcacctttgatgatgatcctgctgttcaatcttctcaaaagtcaaagaattttcctctggagaatcaaggtgtctgtagaccaaatggactgaagctgaaccctcctggcctcagggaatttcccagtggatcttcctccaccagcagcactcctctctcctcccccattgtagatttttatttcagtccaggacctccaagtaactctcctctttctacacctaccaaagacttcccaggttttcctggcatccccaaagcagggactcatgtgctttatcctattccagaatcatcttcagacagcccactcgcaatatcaggaggagaatcttccttactgcctaccagaccaacatgtttatcccatgccttgttacccagtgaccactcatgtacacatccaactcccaaagtaggtcttccagatgaagttaatcctcaacaggctgaaagcctaggattccaaagtgatgatctcccccagtttcagtattttcgagaggactgtgctttttcaagtccatttcggaaagatgaaggcagtgattcccatttcacccttgacccaccaggaagcaaaaagatgttctcatcaagaaacaaggagatgcctattgaccaaaaaagcctaaataagtgttcactcaactatatctgtgagaagcttgaacatctccagtcagctgagaaccaagactcacttagaagtttgtctatgcactgtctatgtgctgaagaaaatgcctcttcctttgtcccccacacactcttcaggagtcagccaaaatccggatggtctttcatgctgagaattcctgagaagaagaatatgatgtcttcccggcaatggggaccaatttttctgaaagttttgcctggaggaattttgcagatgtattatgaacagggattagaaaaaccatttaaagagatacagcttgatccatattgtaggctttctgaacccaaggttgagaacttcagtgtagcaggaaaaatccacactgtgaagattgaacatgtgtcttacacagaaaaaaggaaataccattctaagacagaagtagttcatgaacctgacatagagcagatgctgaagttggggtccacatcgtaccatgacttccttgactttctgactactgtggaggaggagctgatgaagttgccagctgtttcaaaaccaaaaaagaactacgaggagcaagaaatttccttggaaattgtggacaacttttggggtaaagtcacaaaagaaggaaaatttgttgaaagtgctgtgataactcaaatttattgcctctgctttgtgaatgggaacctggaatgctttttaaccttgaatgaccttgagttgccgaagcgagatgaatcctattatgagaaggactcagaaaaaaaggggattgatattcttgactaccattttcataagtgtgtgaatgtacaagaatttgagcaatcaagaatcattaagtttgtacctctggatgcctgccggtttgagctgatgcgtttcaagactttgtataatggggataatcttcccttttccttgaagtctgtagtggttgtccagggagcatacgtggaacttcaggcttttgtcaacatggcctcattggcgcagaggtcatcctatgctggttccttaaggtcctgtgacaatataaggatacactttcctgtcccatcgcagtggatcaaggccctttggaccatgaacctccagaggcagaagtctctgaaagctaaaatgaaccgccgagcatgtctggggagtttacaggaacttgaatctgaacctgtcattcaagtcactgtggggtcagcaaaatatgagagtgcctaccaggcagtggtatggaagatagatcggcttccagacaaaaattcaagtctagatcatccccattgtctgtcatacaaattagagcttggatcagaccaagaaattccctctgattggtatccatttgctactgttcagttttccgtgcctgacacctgtgcctcaaggacagaggtcaggtctctgggagtgggagagtgatgtccagccacagaaacatgttcagcagcgagcttgctacaacatccagcctaaactctacagatctgtaattgaagatgtaattgaaggagttcggaatctatttgctgaaagaaggtatagagggaacaagttttaaaagacttgaagcagctctgggaaaccaaggttttgcagtctaaagcaacagaagacttcttcagaaatagcatccaatcacctctgtttactcttcagttgccgcacagcttgcaccaaacattgcaatcgtcaacagcatcattagttattcctgctggtagaactcttccaagttttaccacagcagaactgggcacttcaaactccagtgcaaactttacttttcctggttatcccattcatgtaccagcaggtgtgacactacagactgtatctggtcacctttataaagtcaatgtaccaattatggtgacagagacttctggaagagcaggtattcttcagcatccaattcagcaagtatttcaacagcttggccagccttcagtaatacaaactagtgttccacaattgaatccatggtctcttcaagcaactactgaaaaatcacagagaattgaaaccgtgctacagcaacccgcaattctaccttctgggccagtagataggaaacacttagaaaatgccaccagtgatatacttgtatctcctggaaatgagcataaaatcgtgcctgaagctttgttgtgtcatcaggaaagttctcactatatcagtcttccaggtgttgtattttctccacaggtctctcaaacaaattctgatgtggagtcagtgctcagtggttcagctagcatggctcaaaatctgcatgatgagtccctctccacaagccctcatggggctctccaccagcacgtgactgatattcagcttcatattcttaaaaataggatgtatggatgtgattctgtaaagcaaccaagaaatatagaggaacccagcaacatacctgtatcagagaaggattctaattctcaggtggatttaagcattcgggttactgatgatgatattggtgaaataattcaagtagatggaagcggtgataccatcttcccaatgaggaaataggaagtacaagagatgcagatgaggaatgaatttctagggaatattgacgggggagatctgaaggtacctgaagaagaagctgacagtatttcaaatgaggattcagcccacaaacagtagtgataatgaagaccctcaagtaaacattgtagaagaggaccctttaaattctggagatgatgttagtgaacaggatgtgccaagacctgtttgacacggataatgtaattgtctgtcagtatgataagattcatcgaagcaagaacaaatggaaattctatttgaaagatggtgttatgtgttttggagggagagactatgtatttgcaaaagccattggtgatgcagagtggtaaaccttgtgagctcagtacatctattttgtgaacatcagttggactatattgcatattgtgaattcatttttattttgaatatagtccagcacagagctgttcaaatttttagttcactgtatggaatttaataaaattataattcagatgcagatacaatt

SEQ ID NO: 87662 - DNA, 1988 bp, Homo sapiens
cgcttgatcaccgtgaagttgcgacgagagacacgggcaggatccccctctcacatatccgcctcctgccccctgactataagatacagtgtgctgagccgtcaccggcccttctggtgccaagtgccaagcgccgcagccggaagaccagcaaagacactggggagggcaaagatggtggcacggctgggtcggaggagccaggagccaaggcccgtgggcgtgggcggaaacccagcgccaaggccaagggtgacagagccgctaccctggaggaggggaacccaacagacgaggtccccagtacccccttagccctggagccgagcagcaccccaggttccaagaagagccccccagagcctgtggacaagcgagccaaggcccccaaggcgcgcccggcactgccgcagcccagtcccgcaccacccgccttcaccagctgcccagcacccgagccatttgtggagctgccagctcctgccaccaccctggccccagcacccctcatcaccatgcctgccacacgccccaagcccaagaaggcgcgggcagccaaggagtcgggtgccaagggccctcggaggccgggggaggaggccgagctgcttgtcaaactggatcacgagggtgtcatgtcacccaaaagcaagaaggctaaagaggccctgctgctctgggaggatccggggcgcggggggcttggccccgaccgggacctcgcccaggaacccgggccggggctcacgttcgaggactctgggaaccccaagagcccggacaaggcccaggctgagcaggacggggccgaagagtccgagagcagcagcagcagcagcagcagcagcagcggctcggagacagaaggggaggaggaaggcgacaagaacggggacgggggctgtggcgccgggggccgcggcgctccccaccaaggccaccaagcaggctggcaaggcgcggcctcggcccactccccaggcaagaagacgcccgcgccccagccccaggcgcctcctccgcagcccacacagcctctgcagcccaagactcaggctggggccaagagccgacccaagaagagagagggcgtccacctccccaccaccaaggagctggccaagcggcagcgcctgccgtccgtggagaaccggcccaagattgccgccttcctgccagcctgacagctctggaagtggttcggcaagcccacccagcggcgtggcatgaagggcaaggccgcaaagctcttctacaaggccatcgtgcgcggcaaggagatgatccgtatcggggactgtgccgtgttcctctctgccggccgccccaacctgccctacatcggccgcatccagagcatgtgggagtcgtggggcaacaacatggtggtccgcgtcaagtggttctaccaccccgaggagaccagcccgggcaagcagttccaccagggccagcactgggaccagaagtccagccgcagccttcccggcggccctgcgggtcttccagccagaggaaggacttcatggagcgcgtgctataccagtcctcgcatgtggacgaaaatgacgtgcagacggtgttgcacaagtgcctggtggtgggcctggagcagtatgcgcagatgctgaagaccaagaagtaccaggacagcgagggcctgtactacctcgcgggcacctacgagcccaccacgggcattgatcttctccacggacggcgtgcctgtgctctgctgagcccgccgggccctgcgggccacctgtgccccgagggcggccagggacccatctccatcactgccatggcgcggagaccacgtgcgttgtgtgcatgcgagcgctcctgcaggcgtgtgcatggggccaggtgtgcacgtggatgcccgggtgagtgtgtgtgcatgcacgtgtgtgcacgcatgtgcacatgccttcagccccaccttccaacccctcagtgcccccaggacaggggcccctcttaag

SEQ ID NO: 87663 - DNA, 1711 bp, Homo sapiens
  misc_feature (1)...(1711): n = a,t,c or g
caactgacgcgtacgtttgctgggatcctccgagcggccgccgggagacggccaacttggagctgctgctgcagcgctgcagcgaggtcacgcactgggtggccaccgaagtgctgctctgcgaggccccgggcaagcgcgcgcagctgctcaagaagttcatcaagatcgcggccctctgcaagcagaaccaggacctgctgtctttctacgccgtggtcatggggctggacaacgccgctgtcagccgccttcgactcacctgggagaagctgccagggaaattcaagaacttgtttcgcaaatttgagaacctggacggacccttgcaggaaccacaaaagctaccgagaagtgatctccaaaatgaagccccctgtgattcccttcgtgcctctgaacctcaaagacctgactttcctgcacgaagggagtaagacccttgtagatggtttggtgaacatcgagaagctgcattcagtggccgaaaaagtgaggacaatccgcaaataccggagccggcccctttgcctggacatggaggcatcccccaatcacctgcagaccaaggcctatgtgcgccagtttcaggtcatcgacaaccagaacctcctcttcgagctctcctacaagctggaggcaaacagtcagtgagagtggaggctccagtcagacccgccagatccttgggcacctggcactcaagcactttgcacgatgtctcaaccaacatctgacatctttcccgtggagcaacttcctgctccacgggaaagaggtcgatggatttacccctggacccataagtctgttcatcctgctgaagtcccctccccattgctccttcaagccaaaactacactttgctggttcctgtcccctctgagaaaggggatagaaagctccttcctctatgtcctcccatcgagatctgttctggggatggagcttccaacttcctcttgcagcaggaaagaatgctgctcacccttctgtcttgcagagtgggattgtgggagggattggcagccttcttctccaccacctgtccagcttcttcctggtcagggctgggacccccaggaatattatgttgccgtgtgtgtgtgtgtgtgtgtgtgtgtgtgtgtgtgtgtgtgtgtgtgtgtgtgtgtcttcttttagggagcaggagtgcatctggtaattgagggtggatgttgtgtgtgctggggaggggtccttctgtttggtgctacccttgtctactctgcccctggatggtgcggggtgctttctccacccccacactccctgctcagctcctcgtgctgccctgcatgcccaggcttgtgagccaagctgctttttggggcagggagtancagcaggtgggaggggttacccatcagcccttgcaagtcccccactcaggcctctggaaggtccagggatgggctctgatgagagggtaaaagatgctcagggaaacacangcctcagctgcctagaggaccctccccctgccttgcagtgggctcgggtagagcantatcangagctagggttgtctgctgcccacactcctgctttttgggatatctaactgctaaagagggagttgacatccccttttgctcatgtgtctgacacccaacaacatgggcttttggcctctctctttgactctcccttttccccccaaaaaantnggggggggggggnaaccctt

SEQ ID NO: 87664 - DNA, 1096 bp, Homo sapiens
gtccaaggcggcgcccatgctgattgcccgctttggcccatggctcagctgagctggagaactgcctctatgtggtggggggacacacatccctggcaggggtcttcccggcctcgccttctgtctccctgaaacaagtggagaaatacgaccctggggccaacaagtggatgatggtggcccccttgcgggatggcgtcagcaatgccgcagtggtgagtgccaagctgaagctctttgttttcggaggaaccagcatccaccgggacatggtgtccaaggtccagtgctatgacccctcggagaacaggtggacgatcaaggccgagtgcccccagccttggcgttacacagccgctgccgtcctgggcagccagatcttcatcatgggaggtgacacggaattcacagccgcctcggcctaccgctttgactgtgagaccaaccagtggacgcggattggggacatgactgccaagcgcatgtcctgccatgccctggcttccggcaacaagctctatgtggtcgggggctactttgggacccagaggtgtaagactctggactgctatgaccccacttcagatacatggaactgcatcaccacagtgccctactcacttatccccacggcctttgtcagcacctggaagcacctgcccgcgtgaggagcacctgctgagcccagccagaccgcggccttcagtgtcacagcgtggccttgcttgtctgccacagcgggagctaagccggccctgggccagcactccgagaggtggaaggggccctgccagctctggggagcagcagccttgggctgttctgagctttatgcaagagaagagaagcatctcttgcatccgtgcccctgggggcctcttcagctttgcagtggtttgtgggaagacatacctcccagaggggcatggactgccaccaggactgaccctggcgtcggggagaaggacacttgcagagccttgagatcacctgtttggcaggtcctggactggggccgggcaggcaggggcagggaggcgccccgggtgggctttggggctgcggcactgccacacatcctttccctcctggcctg

SEQ ID NO: 87665 - DNA, 1570 bp, Homo sapiens
  misc_feature (1)...(1570): n = a,t,c or g
tttcgtacttcagcagcagcacacccacctaccctgtgggtaccactgtggagttcagctgcgaccctggctacaccctggagcagggctccatcatcatcgagtgtgttgacccccacgacccccagtggaatgagacagagccagcctgccgagccgtgtgcagcggggagatcacagactcggctggcgtggtactctctcccaactggccagagccctacggtcgtgggcaggattgtatctggggtgtgcatgtggaagaggacaagcgcatcatgctggacatccgagtgctgcgcataggccctggtgatgtgcttaccttctatgatggggatgacctgacggcccgggttctgggccagtactcagggccccgtagccacttcaagctctttacctccatggctgatgtcaccattcagttccagtcggaccccgggacctcagtgctgggctaccagcagggcttcgtcatccacttctttgaggtgccccgcaatgacacatgtccggagctgcctgagatccccaatggctggaagagcccatcgcagcctgagctagtgcacggcaccgtggtcacttaccagtgctaccctggctaccaggtagtgggatccagtgtcctcatgtgccagtgggacctaacttggagtgaggacctgccctcatgccagagggtgacttcctgccacgatcctggagatgtggagcacagccgacgcctcatatccagccccaagtttcccgtgggggccaccgtgcaatatatctgtgaccagggttttgtgctgatgggcagctccatcctcacctgccatgatcgccaggctggcagccccaagtggagtgaccgggcccctaaatgtctcctggaacagctcaagccatgccatggtctcagtgcccctgagaatggtgcccgaagtcctgagaagcagctacacccagcaggggccaccatccacttctcgtgtgcccctggctatgtgctgaagggccaggccagcatcaagtgtgtgcctgggcacccctcgcattggagtgaccccccacccatctgtagggctgcctctctggatgggttctacaacagtcgcagcctggatgttgccaaggcacctgctgcctccagcaccctggatgctgcccacattgcagctgccatcttcttgccactggtggcgatggtgttgttggtaggaggtgtatacttctacttctccaggctccagggaaaaagctccctgcagctgccccgcccccgcccccgccccttacaaccgcatttaccatagagtcagcgttttgacaatccaacttacgagactggagagacgagagaatatgaagtctccatctaggtnggggcagtctagggaagtcaactcagacttgcaccacagtccagcagcaaggctccttgcttcctgctgtccctccacctcctgtatataccacctagggagggagatgccaccaagccctcaagaagttgttgcccttccccgcctgcgatggcccaccatgggcctattttttttgggtgttcatttgcccattt

SEQ ID NO: 87666 - DNA, 920 bp, Homo sapiens; identical to SEQ ID NO: 65557

SEQ ID NO: 87667 - DNA, 2655 bp, Homo sapiens
  misc_feature (1)...(2655): n = a,t,c or g
tttcgtcttccagagcttcagggccgcggctcacacttgagcgcgactgcagaggggctgcacctggccttatgggctgagaagaaagccaaggtcattgcaggaatgaatgctgtggaagaaaaccaggggcccggggagtctcagaaggtggaggaggccagccctcctgctgtgcagcagcccactgaccccgcatcccccactgtggctaccacgcctgagcccgtggggtccgatgctggggacaagaatgccaccaaagcaggcgatgacgagccagagtacgaggacggccggggctttggcattggggagctggtgtgggggaaactgcggggcttctcctggtggccaggccgcattgtgtcttggtggatgacgggccggagccgagcagctgaaggcacccgctgggtcatgtggttcggagacggcaaattctcagtggtgtgtgttgagaagctgatgccgctgagctcgttttgcagtgcgttccaccaggccacgtacaacaagcagcccatgtaccgcaaagccatctacgaggtcctgcaggtggccagcagccgcgcggggaagctgttcccggtgtgccacgacagcgatgagagtgacactgccaaggccgtggaggtgcagaacaagcccatgattgaatgggccctggggggcttccagccttctggccctaagggcctggagccaccagaagaagagaagaatccctacaaagaagtgtacacggacatgtgggtggaacctgaggcagctgcctacgcaccacctccaccagccaaaaagccccggaagagcacagcggagaagcccaaggtcaaggagattattgatgagcgcacaagagagcggctggtgtacgaggtgcggcagaagtgccggaacattgaggacatctgcatctcctgtgggagcctcaatgttaccctggaacaccccctcttcgttggaggaatgtgccaaaactgcaagaactgctttctggagtgtgcgtaccagtacgacgacgacggctaccagtcctactgcaccatctgctgtgggggccgtgaggtgctcatgtgcggaaacaacaactgctgcaggtgcttttgcgtggagtgtgtggacctcttggtggggccgggggctgcccaggcagccattaaggaagacccctggaactgctacatgtgcgggcacaagggtacctacgggctgctgcggcggcgagaggactggccctcccggctccagatgttcttcgctaataaccacgaccaggaatttgaccctccaaaggtttacccacctgtcccagctgagaagaggaagcccatccgggtgctgtctctctttgatggaatcgctacagggctcctggtgctgaaggacttgggcattcaggtggaccgctacattgcctcggaggtgtgtgaggactccatcacggtgggcatggtgcggcaccaggggaagatcatgtacgtcggggacgtccgcagcgtcacacagaagcatatccaggagtggggcccattcgatctggtgattgggggcagtccctgcaatgacctctccatcgtcaaccctgctcgcaagggcctctacgagggcactggccggctcttctttgagttctaccgcctcctgcatgatgcgcggcccaaggaggggagatgatcgccccttcttctggctctttgagaatgtggtggccatgggcgttagtacacagagaggacacatctcgcgatttctcgagtccaaccctgtgatgattgatgccaaagaagtgtcagctgcacacagggcccgctacttctggggtaaccttcccggtatgaacaggccgttggcatccactgtgaatgataagctggagctgcaggagtgtctggagcatggcaggatagccaagttcagcaaagtgaggaccattactacgaggtcaaactccataaagcagggcaaagaccagcattttcctgtcttcatgaatgagaaagaggacatcttatggtgcactgaaatggaaagggtatttggtttcccagtccactatactgacgtctccaacatgagccgcttggcgaggcagagactgctgggccggtcatggagcgtgccagtcatccgccacctcttcgctccgctgaaggagtattttgcgtgtgtgtaagggacatgggggcaaactgaggtagcgacacaaagttaaacaaacaaacaaaaaacacaaaacataataaaacaccaagaacatgaggatggagagaagtatcagcacccagaagagaaaaaggaatttaaaacaaaaaccacagaggcggaaataccggagggctttgccttgcgaaaagggttggacatcatctcctgatttttcaatgttattcttcagtcctatttaaaaacaaaaccaagctcccttcccttcctcccccttcccttttttttcggtcagaccttttattttctactcttttcagaggggttttctgtttgtttgggttttgtttcttgctgtgactgaaacaagaaggttattgcagcaaaaatcagtaacaaaaaatagtaacaataccttgcagaggaaaggtgggaggagaggaaaaaagggaaattnctatagaaatctatatattggggttggtt

SEQ ID NO: 87668 - DNA, 4116 bp, Homo sapiens
gggctggctgcggcggtctcgctcggctgtccgttccttgctggagaatttggccacaaagagctgccaagatagctgggccaggaagaaagcgccgcagccctgacccagacgctgttgccgaccccggggcactctggctgtcgaccaagcggctcaagatgtctggcggggccagtgccacaggcccaaggagagggcccccaggactggaggacaccactagtaagaagaagcagaaggatcgagcaaaccaggagagcaaggatggagatcctaggaaagagacagggtctcgatatgttgcccaggctggtcttgaacctctggcctcaggtgatccttctgcctcagcctcccatgcagctgggatcacaggctcacgccaccgtacccggctgttctttccttcatcgtcagggtcagcatccactcctcaagaggagcagaccaaagagggagcttgtgaagaccctcatgatctcttggctactcccactccagagttgttgctcgattggaggcagagtgcagaagaggtgattgtcaagcttcgtgtgggagtaggtcccctgcagctggaggatgtagatgctgctttcacagatacagactgtgtggtgcggtttgcaggtggtcagcagtggggtggtgtcttctatgctgagataaaaagctcttgtgctaaagtgcaaacccgcaagggcagtctcctgcacctgacactgcccaaaaaggtgcctatgctcacgtggccctccctcctggttgaggctgatgaacagctttgcataccaccgctgaactcccaaacctgcctcctgggctcagaggagaatttagcccctttggcaggagagaaagcagtgcctcccgggaatgacccagtctctccagccatggtccggagcagaaaccctgggaaagatgactgtgccaaggaggagatggcagtggcagcagatgctgcaaccttggtggatgagcccgagtcgatggtgaacctggcgtttgtcaagaatgactcgtatgagaagggcccggattcagtggtggtgcacgtgtacgtgaaggagatctgcagggacacctcaagagtacttttccgtgagcaggacttcacgctcatcttccagaccagggatggaaacttcctgaggctgcacccgggctgtgggccccacaccaccttccgttggcaggtgaagctcaggaatctgattgagccagagcagtgcaccttctgtttcacggcttctcgcatcgacatctgccttcgtaagaggcagagtcagcgctgggggggcctggaggccccggctgcacgagtgggtggtgcaaaggttgccgtgccgacaggtccaacccctctggattcaaccccaccaggaggtgctccccaccccctgacaggccaggaggaggcccgggctgtggagaaggataaatccaaggcacgatctgaggacacagggctagacagtgtggcaacccgcacacccatggagcatgtaaccccaaagccagagacacacctggcctcgcccaagcctacatgcatggtgcctcccatgccccacagcccagttagtggagacagcgtggaggaggaggaagaggaagagaagaaggtgtgtctgccaggcttcactggccttgtcaatttaggcaacacctgcttcatgaacagcgtcattcagtctctgtccaacactcgggaactccgggacttcttccatgaccgctcctttgaggctgagatcaactacaacaacccactagggactggtgggcgtctggccattggctttgccgtgctgcttcgggcgctgtggaagggcacccaccatgccttccagccttccaagttgaaggccattgtggcgagtaaggccagccagttcacaggctatgcacagcatgatgcccaggagttcatggctttcctgctggatgggctgcacgaggacctgaatcgcattcagaacaagccctacacagagaccgtggattcagatgggcggcccgatgaggtggtagctgaggaagcatggcagcggcacaagatgaggaatgactctttcatcgtggacctatttcaggggcagtacaagtcgaagctggtgtgccctgtgtgtgccaaggtctccatcacttttgacccgtttctttatctgccggtgcccttgccacaaaagcaaaaggttctccctgtcttttattttgcccgagagccccacagcaagcccatcaagttcctggtgagcgtcagcaaggagaactccactgcgagcgaagtattggactccctctctcagagtgttcatgtgaagcctgagaacctgcgtttggcggaggtaattaagaatcgttttcatcgtgtgttcctaccctcccactcactggacactgtgtccccatctgatacgctcctctgctttgagctgctatcctcagagttggctaaggagcgggtagtggtgctagaggtgcaacagcgcccccaggtgcccagcgtccccatctccaagtgtgcagcctgccagcggaagcaacagtcggaggatgaaaagctgaagcgctgtacccggtgctaccgtgtgggctactgcaaccagctctgccagaaaacccactggcctgaccacaagggcctctgccgacctgagaacattggctaccccttcctggtcagtgtacctgcctcacgcctcacttatgcccgcctcgctcagttgctagagggctatgcccggtactctgtgagtgtattccagccaccctttcagccagggccgcatggccttggagtctcagagccctggctgcaccacactgctctccacaggttccctggaggctggggacagcgagagagaccccattcagccacctgagctccagctggtgacccctatggctgagggggacacagggcttccccgggtgtgggcagcccctgaccggggtcctgtgcccagcaccagtggaatttcttctgagatgctggccagtgggcccattgaggttggctccttgccagctggcgagagggtgtcccgacccgaagctgctgtgcctgggtaccagcatccaagtgaagctatgaatgcccacacaccccagttcttcatctataaaattgattcatccaaccgagagcagcggctagaggacaaaggagacaccccactggagctgggtgacgactgtagcctggctctcgtctggcggaacaatgagcgcttgcaggagtttgtgttggtagcctccaaggagctggaatgtgctgaggatccaggctctgccggtgaggctgcccgggccggccacttcaccctggaccagtgcctcaacctcttcacacggcctgaggtgctggcacccgaggaggcctggtactgcccacagtgcaaacagcaccgtgaggcctccaagcagctgttgctatggcgcctgccaaatgttctcatcgtgcagctcaagcgcttctcctttcgtagttttatctggcgtgacaagatcaatgacttggtggagttccctgttaggaacctggacctgagcaagttctgcattggtcagaaagaggagcagctgcccagctacgatctatatgctgtcatcaaccactatggaggcatgattggtggccactacactgcctgtgcacgcctgcccaatgatcgtagcagtcagcgcagtgacgtgggctggcgcttgtttgatgacagcacagtgacaacggtagacgagagccaggttgtgacgcgttatgcctatgtactcttctaccgccggcggaactctcctgtggagaggccccccagggcaggtcactctgagcaccacccagacctaggccctgcagctgaggctgctgccagccaggcttcccggatttggcaggagctggaggctgaggaggagccggtgcctgaggggtctgggcccctgggtccctgggggccccaagactgggtgggccccctaccacgtggccctaccacaccagatgagggctgcctccggtactttgtcctgggcaccgtggcggctttggtggccctcgtgctcaacgtgttctatcctctggtatcccagagtcgctggaga

SEQ ID NO: 87669 - DNA, 436 bp, Homo sapiens
  misc_feature (1)...(436): n = a,t,c or g
taccggtccggaattnnncgtcgacgatttcgtcgcacccgggcggccagctgggctcggagtgcatcggggttaggatggacgaggacgtgttgcaccctgaagagcctcatcatcgcctgttcttgaggttcacagatgatacctttgatccagaacttgcagcaacaatagggtcacctgcttccaggcaggcagggcgttgtattcatccctcgtcatgtctagtgcaaactggaaacattgggagaagcgccccgcggctcagtgaaaggagccgggcgtgcgtgtgttgttttacttccatccccaccccaccggaagaaccgtttacctcgaagtcttcgttggtgagatacatctcaagcttcagaggatcgaccccctccgggagtggcctggccaggaggtccgccaacgggtaaatgggtttacc

SEQ ID NO: 87670 - DNA, 1574 bp, Homo sapiens
ttttttttttttttgcagattctggaaggttctcaggtctttatttgcctgctctcaaattccagggaattgaccttatttaattaatccatcaacctctcatagcaaatattttgagaaaacaaattttatattcagattcttattttcagttagggaagtaagaagttgcagctcagtgcacgtaaagttgagacagagatggagacatccagccccacctctctggaacaagaaagatgactggggaggaaacacaggtcagcatgggaacaggggtcacagtggacacaagggtgggctgtctctccacctcctcacattatgctaacagggacgcagacacattcaggtgcctttgcagaaagagatgccagaggctcttgaagtcacaaaggggaggcgtgaagaaatcctgcatctcagtccctcacaagacagctgtctcaggcttttcaagctgtgagagacacatcagagccctgggcactgtcgctgcacgccagccctgagagtagctccctccttttccacctgagctcttcctgcttacacatcacagcagcgaccacagctcccgatgaccaccaactgctagggacagcccaagcccagcaccaatgcccaccgatggggggacggtggaactgggaagatgggctccccatcttcatagtggtgaggggcttcggcagcccctccgtgctgtacatggcatgtgtatctctgctcttctccagaaggcaccacccacagctgcccactttctggaaggttctatctcctgctggtctggtctccacaagctcagtgtcctgagtttggtcctcggcatccccgctgccaggtcagtgtgatctccgcagggtagaagcccagggcccagcacctcagggtggcctcatggtcagagatggggtggtgggtcacgtgtgtctttggggggtccgcgcgctccagcgtgtccttcccgttctccaggtatctgcggagccactccacgcacgtgccctccaggtaggctctgtcctgctccgccacacgggccgcctcccacttgcgctgggtgatctgagccgcggtgtccgccgcggtccaggagcgcaggtcctcgttcagggcgatgtaatccttgccgtcgtaggcgtactggttatgcccgcggaggaggcgcccgtccggcccccacgtcgcagccgtacatgctctggagggtgtgaagacccggcctcgctctggttgtagtagccgcgcaaggttccgcaggctctctcgggtcagtcttgtgtgttggtcttgaagatctgtgtgttccgggtcccaatactccggcccctcctgctctatccacggcgcccgcggctcctctctcggactcgcggcgtcgctgtcgaacctcacgaactgcgtgtcgtccacgtagcccactgagatgaagcggggctccccgcggccgggccgggacatggcggtgtcgaaatacctcatggagtgggagccggcccaggtctcggtcagggccagggccgccgagagcagcaggaggacggttcggggcgccatgaccagcatct

SEQ ID NO: 87671 - DNA, 2187 bp, Homo sapiens
ttttttttttttgagacggagtctcgctctgtcgcccaggctggagtgcagtggcgggatctcggctcactgcaagctccgcctcccgggttcacgccattctcctgcctcagcctcccgagtagctgggactacaggcgcccgccactacgcccggctaatttttttgtatttttagtagagacggggtttccccgttttagccgggatggtctcgatctcctgacctcgtgatccgcccacctcggcctcccaaagtgctgggattacaggcgtgagccaccgcgcccggcccaagagaataggggagccaaggaggaaatgtggaaacgcagttgtgtggcccagcacgagcctgggcgaccaccgggtgacatccgtcccacatcagggcggcctcccaggtcccataagggtagccccctcatctgcaggacagagggaagccagtcagggcccccccggacgttaggaccaggagaaatcaacaggagggcagcccgtcctctctcttggggcgcccacccggcccggctgagccctgccccacccaactccacagggctgttttgcctccccacggaaggcgggctgaggagacaaccagatcaggagagcaaggtcatgaaggaggggacctctccacacaggtgttccgtgggaccctcagcagctctggctctgcctcaggaggtcacctgccgccctgtgggagccgcagagcctgacgctcagccccaggccagctgcggccaggcctgcgggcccctggtgatggggttacgtggggtgcgggatacagctgagtgggaaccggaaacctattctctttttaacaaaaataatcttaggataagaattattttaacaacatataaaactgtttcaagccctcctccccagagctggcgctcagcagccctagcggctgctccttcaggcgaagggtggtttgcagatgtggggagggtgtctggggacgttgctgagctggctgcagaagggtggggatatcagggcacagtctccatgtgtgtgccaagccctggcccccacagcgctcgatggacctcagcaagctgcccagccctggcccaggtgccccgactgtgggactcagttgttctgagcacatttgactccacttttcccttaaaaatgaatgtcttgttcctgtgcattggtggcatcacagaccccagctggggcgcgatgtcaaaggtcgggacagctgtgccgggaggcagccacagggaagctcacacatcctgtcagtgtcaccttggtttgcaaaacccatatccccggtaaaatgaggccggacagaggggctgttaggacagcaaagcagcagtgtccagagacccctcaatccccaaaggtccgcaccctgtcctgcacaccctgggccacgccggccacacccctctgctgcaacaagctcatccctggacttctgggagaatgaacccgaggttggtttggggagacaggtgaggcggtcggatctacagaacaacccaccatttctgggggccgcagaggatccatcacagacggatactggggagtaaacggcccaggccaggtgcccaggaaaggacggctgagcatgtggagcgagagggaggcaggtggacgctgcagaccccaggttcagtgcggcccctcggctgttcctcccctgtagggtttggacagacccacccccagccttgcccagctttcaaaggacaaaagggagcatcccccacctactctcaggtttttgaggaaacaaagatttgtggtaactgaaggtgttgggtcagtggccaggtgccgacactgagctgtgacccagaggggacgctgaggaagtgggcgtgagtggacatgtcaggtggttaccagggcactggttgttgatggtcggtggttgggtgtgggcagtcatcagtcatcaggtgtgctcaggggacaatctcccctcaaccgcacatgtgccactgtttcagcggagctgactggtttcccctggtagaggggccggctgtttcctgacagatgcctggtgagcaggggaagcaggacccagtggtcaacaggtgtctttaactgtcattgtgtgtggaatgtcgcagactcctccacgtggcgggaatgagctgtgtaaatacttcaataaagcctgacttcacatctgca

SEQ ID NO: 87672 - DNA, 1510 bp, Homo sapiens
atgtcccgggggcccgaggaggtgaaccggctcacggagagcacctaccggaatgttatggaacagttcaatcctgggctgcgaaatttaataaacctggggaaaaattatgagaaagctgtaaacgctatgatcctggcaggaaaagcctactacgatggagtggccaagatcggtgagattgccactgggtcccccgtgtcaacttgaactgggacatgtcctcatagagatttcaagtacccacaagaaacttcaacgagagtctttgatggaaaatttttaaaaaattccacaaagagattatccatgagctggagaagaagatagaacttggacgtgaaatatatgaacgcaactctaaaaagataccaaacagaacacaagaataaattagagtctttggagaaatcccaagctgagttgaagaagatcagaaggaaaagccaaggaagccgaaacgcactcaaatatgaacacaaagaaattgagtatgtggagaccgttacttctcgtcagagtgaaatccagaaattcattgcagatggttgcaaagaggctctgcttgaagagaagaggcgcttctgctttctggttgataagcactgtggctttgcaaaccacatacattattatcacttacagtctgcagaactactgaattccaagctgcctcggtggcaggagacctgtgttgatgccatcaaagtgccagagaaaatcatgaatatgatcgaagaaataaagaccccagcctctacccccgtgtctggaactcctcaggcttcacccatgatcgagagaagcaatgtggttaggaaagattacgacaccctttctaaatgctcaccaaagatgccccccgctccttcaggcagagcatataccagtcccttgatcgatatgtttaataacccagccacggctgccccgaattcacaaagggtaaataattcaacaggtacttccgaagatcccagtttacagcgatcagtttcggttgcaacgggactgaacatgatgaagaagcagaaagtgaagaccatcttcccgcacactgcgggctccaacaagaccttactcagctttgcacagggagatgtcatcacgctgctcatccccgaggagaaggatggctggctctatggagaacacgacgtgtccaaggcgaggggttggttcccgtcgtcgtacacgaagttgctggaagaaaatgagacagaagcagtgaccgtgcccacgccaagccccacaccagtgagaagcatcagcaccgtgaacttgtctgagaatagcagtgttgtcatccccccacccgactacttggaatgcttatccatgggggcagctgccgacaggagagcagattcggccaggacgacatccacctttaaggccccagcgtccaagcccgagaccgcggctcctaacgatgccaacgggactgcaaagccgccttttctcagcggagaaaacccctttgccactgtgaaactccgcccgactgtga

SEQ ID NO: 87673 - DNA, 4948 bp, Homo sapiens
  misc_feature (1)...(4948): n = a,t,c or g
ctccagcctcctggagaagatgacgtccagcgacaaggacttcaggttcatggccaccagcgacctgatgtcggagttgcagaaggactccatccagctggacgaggacagcgagcgcaaggtggtgaagatgctgctccggctcctggaggacaagaacggtgaggtgcagaacctggctgtcaagtggctgggtgtcccgctgggcgccttccacgccagcctcctgcactgtctgctgccacagctgagcagcccgcgcctggcggtgcgcaagcgggcggtcggagcgcttggccacctggcgaccgcctgcagcaccgacctcttcgtcgagctcgctgaccacctactggaccggctgcccggcccgcgggtgcccaccagcccgactgccatccgcaccctgatccaatgtttgggcagcgtcggccgccaggccggccaccgcctcggggctcacctggaccgcctggtgcccctggtggaggatttctgcaacctggatgatgatgagctccgggagtcctgcctccaggcttttgaggccttcttgaggaagtgccccaaggaaatgggtcctcacgtgcccaacgtgaccagcctctgcctccaatacataaaacacgaccccaactacaactacgacagtgatgaggatgaggagcagatggagacagaggatagtgaattcagtgagcaagagagtgaagacgagtacagcgatgacgatgacatgagctggaaggtgcgccgggcagctgccaagtgcatcgcagccttgatcagctcgcggcctgacctgctgcccgatttccactgcaccctggcacctgtgctcatccgccgcttcaaagaacgcgaggagaacgtcaaggctgacgtcttcactgcttacatcgtgctgctgcggcaaacacggcccccgaagggatggctggaggccatggaggaacccacccagaccggcagcaacctccatatgctacgtggacaggtgccccttgtggtcaaggccctgcagcggcagcttaaagatcggagcgtcagagcccgccagggatgcttcagcctcctcaccgagctggcgggtgtcctcccaggcagcctggccgagcatatgcctgtgctggtatcaggcatcatcttctcgctggccgaccgctccagctcctccaccatccggatggatgccctggccttcttgcaggggctgctgggcaccgaaccagctgaggccttccacccacacttgcctatcctcctgccacctgtgatggcctgtgtggctgactctttctacaagattgcagccgaggccctggtggtgctgcaggagctggtgcgggccctgtggccgctgcacaggcctcggatgctggatcctgagccatatgttggagagatgtctgctgtcaccctggcgcgacttcgtgccactgacctggaccaggaggtgaaggagcgggccatttcctgcatgggccaccttgtaggccacctgggtgaccggcttggggatgacctggagcccacgttactgctcctcctggaccgcctgcggaatgagatcacccggctgcccgccatcaaggcgcttacgctggtggccgtatccccactacagcttgacctacagcccatcctggccgaggcactgcacattctggcctcattcctgcggaagaaccagcgggctttgcgactggccacactggcagccctggacgccctggcccagagccagggcctcagcctcccaccgtctgccgtgcaggccgtgctggctgagctgcctgccctggtcaacgagagcgacatgcatgtggcccagctggctgtggacttccttgccacagtgacccaggcccagccagcctctttggtggaggtcagtggccctgtgctctcagagctgctgcggctgctgcgttcgcccctgttgccagccggagttctggcagctgctgaaggcttcctgcaggccctggtagggacccgtcccccgtgtgtggactatgccaaactcatcagcctgctcactgcgcctgtttatgagcaggctgtggatggtgggcctggcctgcacaagcaggtgttccactcattggcccggtgtgtggcagccctctcagctgcctgtccccaaagaggcggaaagcacagccagtcgcctggtctgcgatgccaggtcgccccactccagcacgggggtcaaggtcctggcattcttgtcgctggctgaggtgggtcaggtggctgggccaggccacgagcgggagctgaaggcggtgctcctggaagctttggggtcacccagtgaggatgtgagggctgcagcctcgtatgcactgggccgtgtgggtgctggcagcctgcccgacttcctgcccttcctgctggagcaaatcgaggctgaaccccgacgacagtacctgctgctgcactcactcaaggaggccctgggggccgcccagcctgacagcctgaagccctacgccgaggacatctgggccttgctgttccagcgctgcgagggagctgaggagggcacccggggggtggtggccgagtgcattgggaagctggtccttgtgaacccttcgttccttctgccccgcttgcggaagcagcttgctgcaggtcggccacacacccggagcaccgtcatcacagcggtcaagttccttatctcggaccagccccatcccattgaccccctcctgaagagcttcatcgctgtgcacaacaagccctcgctagtccgggacctgctggatgacatcctgcccctcctctaccaggagacaaagatccggcgggacctcatccgagaggtggagatggggccctttaaacatacagtggacgatgggctggacgtgcggaaggcggcctttgaatgcatgtattcactgcttgagagctgcctgggccagctggatatctgtgagttcctgaaccatgtggaggacgggctgaaggaccactacgacatccggatgctgaccttcatcatggttgcccggctggccaccctgtgtcctgcacctgtcctgcagagggtggaccgactcattgagccactaagggccacctgcactgccaaggtcaaagctggttctgtgaagcaggagtttgaaaagcaagatgaactgaagcgctctgcaatgagggcagtggctgccctgctgaccatccccgaggtggggaaaagccccatcatggccgacttctcttcccaaatcagatccaaccctgaacttgctgccctctttgaaagcatccagaaggattccacttcagcccccagcacagactcaatggagctcagctagtcccctcagcaccaaggtgggccctcgcttaagagaaaggagcccacccaagtccgaggcctccccatcccaccatcgcaggactctacttttgcccttccaccatctcactgggggccctgtcgctcctggtcagggcttacagtgccttctccagggacccaactcaaaggcccccagcccaagctgtgaggctgccaacagttgggccccttccttaactcaggacagtcatccaaagaaatagggtgaggaagttttccagtgacttcacactgtacccctccatagtctgtctggttccttcagagggtgtctctgcctcacaaactagtagtatttagaaataggctgtgctgtcagctgtaaaagatcaggaggcagcagacaccactctggtttcttcactgcattcagcaatgcctgaagttagtgctcaggccgggcatctcaaaagaaaagatacttgagttattcacattttaaaattcaaaacggttcatttttaagtggcagtgatgaatcagaaatttggaagatgatacgggtttcttttttccagggaggaggaatgggttgggtagggaactggacaggcttggacctcatgtttcatttctaatttcaaaatacttattagcaaattgggcaacaatgggcatcttccatgccaccacccaggcataaccagttggtttgtttccttctgaggaaggtttcaaatgtgtctagtgttcagtattgaggacaaagaaatacaagtggcaggcccaagtattttctgtgatatcccaggttaataaagattagattctaagttacttctttcctctgcacgactcgtctccaattgttaatcgaatcgcctgaacccaggaggcagaagttgcagggagccaagatcaagccnctgcactccagccggggtgacagaatgagtctcaaaaacaaaatcccaaaaatgaccagtttgcattataaatatttatgactaggttttgaacaggagacaatctgtaagcttcctgtctagactagaagtagaaaagctttattatacccagcgcagcatttctgctaagttgaccaggatggttacagaaaaacatcctgtaagcatttctgtctcataagtaccacatcccatatccctcatgacctatatactacagaagatgcctgtaatcccagtactttggggagggctgaagcaggattgcttgagctcagggagttccgggagccctagggcaacatgggctaggaccacctctacaaaaaaacttcaaaaactacccaggtttggaggtgtgcatctgtagtcccagctacttggaaggctgaggtgggaagatcacctgagcctggggaggtcaaggctgtagtcagtgtgccactgcactcccagcctgggtgagagcaagaccccgtctccaaaaaaaatcaggaccacgtgtcactaaattctgagtaccagtcaagaggctcaattgtcaccagttaggtccccgccttggcaaactgctgtaacattatacctgaagcagcagctggtgggagggttataggagactgaaagtgcttttccagttaaccgtggtggattacct

SEQ ID NO: 87674 - DNA, 1442 bp, Homo sapiens
  misc_feature (1)...(1442): n = a,t,c or g
atcttgagaggacgtgaccctgaattatccggctgtgcttgacatccaatgactggtgatgttgtaagagaaagacggagggagatgtaagatatgagagaaggccacgccgagactggagtgatgtggccgtgagccgaggaatgcctggagccaccagaagctggcaaaggcagaaggagcctcctctggaccctgtggtgggtacgcagcctggcagatatannnnnnnnnnnnnnnnnnnnnnnnnnnnnnnnnnnnnnnnnnnnnnnnnnnnnnnnnnnnnnnnnnnnnnnntccctgggaagcccaaatagggcgagaccttttgccaagtggtctccaagtgtcacgtcatcgaatccttctcccgggcttgtgccatagtctttccactttagagaggaggaaacggaggctctgggcgcacaaagccagtcagtggcgggggctgactttcaacccagcctgcatggggtcagagaacccactttccccgtgggcctgcgctcatgctaaggatgcttgttcatctctcctgggcccgggagtggttcttctggcctagaaggcaagagaagccagtctttcggtttcaaggtttcccattagtggagtcaagcaaaaatggtgtgttgcgcttcttcctgagctcagcctgggagcacggccttaacatgctcagtggatcccaagacggcagcatggcggtgccagcctggcagccttagctccttgcagctgtgcttgtgaagggagcagtgagtggcttccctctgtgaccaccttgggtcctaagtttcactggggctgggatccatgcgtcttgcaattggctaggaatttcccgggctttccctcccttccctgttcagggcactgggtgtgaggcattgcatccgttcttctgctcacctgcttccccataagagtgtgagctgtataaaggcaggaaccaaacaggagcctccacgtgttcccagttcaagggcagtgtcccttgtgtgtttcttcaataattcagtggatgacttattctgcacggacactgcacacactcggccctgccgtctccggagctgggaggtgtggagctggctcctgacctatttacacacccgaggagggatgtggaaaacaggaggagtcccagggctccaatgcaaagaggagcctcttcattccctctgccgtggccgtgcaagggacagcgccttgtgggattgtgtcctccacccaattatccttaagcattagtttgctaaggataatggcctccagctccacccatgtccctgcaaaaggacatgatctcattcctttctgtgtctgcatagtattccatggtgtatatgtacccgcgttttctttatcgagtctatcattgatggggcgcttcagttgattccatgtctttgctaatgtgaatcgtgctgcaatga

SEQ ID NO: 87675 - DNA, 919 bp, Homo sapiens
gcggacccgcccgttattttcgggtcgacccacgcgtccggtctgcaccatgagtgatgagcggcggctgcctggcagtgcagtgggctggctggtatgtgggggcctctccctgctggccaatgcctggggcatcctcagcgttggcgccaagcagaagaagtggaagcccttggagttcctgctgtgtacgctcgcggccacccacatgctaaatgtggccgtgcccatcgccacctactccgtggtgcagctgcggcggcagcgccccgacttcgagtggaatgagggtctctgcaaggtcttcgtgtccaccttctacaccctcaccctggccacctgtttctctgtcacctccctctcctaccaccgcatgtggatggtctgctggcctgtcaactaccggctgagcaatgccaagaagcaggcggggcacacagtcatgggtatctggatggggtccttcatcctgtcggccctgcctgccgttggctggcacgacaccagcgagcgcttttacacccatggctgccgcttcatcgtggctgagatcggcctgggctttggcgtctgcttcctgctgctggtgggcggcagcgtggccatgggcgtgatctgcacagccatcgccctcttccagacgctggccgtgcaggtggggcgccaggccgaccaccgcgccttcaccgtgcccaccatcgtggtggaggacgcgcagggcaagcggcgctcctccatcgatggctcggagcccgccaaaacctctctgcagaccacgggcctcgtgaccaccatagtcttcatctacgactgcctcatgggcttccctgtgctgggccccttctccttggcagatacccacctgtcagacctgccgtacacatggggagaccgagactcagggggagcttgtgtgatg

SEQ ID NO: 87676 - DNA, 1993 bp, Homo sapiens
tttcgtggcggggctgagcgtgtttacatccgccgggtgcgcggcttcgccgcccgaggtcgttcggctcgggtaccatcctccgcgccatggacaccagcgacctgttcgccagctgcaggaagggggatgtgggccgagtgcggtaccatgaacccgtcctgacccaggctctgacctccttcctgcccaggtacctgctggagcagcgagacgtggaggtactatgcctgcttgtgtgggcacgaggagctggtactctaccttctggccaatggagcccgctgcgaggccaacaccttcgatggtgagcgctgcctctatggggcactgagtgaccccatccgccgggctctacgcgattacaagcaggtcacggcttcctgcaggaggcgggattactatgacgacttcttgcagcggcttctagagcagggcatccacagtgacgtggtctttgtagtacacgggaagccattccgggtgcatcgctgcgtcctgggtgcacgtagtgcctactttgccaacatgctggacaccaaatggaagggcaagagtgtcgtggttctcaggcacccactgatcaaccccgtggcctttggggccctgctgcagtacctgtacacaggccgcctggacattggcgtagagcatgtgagtgactgtgagcgcctggccaagcaatgccagctgtgggacctgctcagcgacctggaggccaagtgcgagaaggtgtctgagtttgtggcgtctaagccaggcacgtgtgtgaaggtgctgaccatcgagcccccacctgcagacccccgcctccgggaggacatggcgctgctggccgattgtgccctgccccccgagctccgaggtgatctttgggagctgcccttcccttgtcctgacggcttcaacagctgccctgacatctgcttccgagtggctggctgcagcttcctctgccacaaggcctttttctgtggccgcagtgactacttccgagccctgctggatgaccacttccgagagagcgaggagccagcgacctcagggggccccccagccgtcaccctgcatggcatctcacccgacgtcttcactcacgtgctctactacatgtacagcgaccacactgagctgtcccccgaggcagcctatgatgtgctgagcgtcgccgacatgtacctgctgccaggcctgaagaggctgtgcggccgcagcctggctcagatgctagacgaggacactgtggtgggtgtgtggcgcgtggccaagctcttccgcctggcgcggcttgaggaccagtgcactgagtacatggccaaggtcattgagaagctggtggagcgggaggacttcgtggaggcggtgaaggaggaggcagcggctgtggcagcccggcaggagacggactctatcccgctggtggacgacatccgcttccacgtggccagcacggtgcagacctacagcgccatagaggaggcgcagcagcgtctgcgggcactcgaggacctgctcgtgtccatcggtctggactgttgagcccctggctgggcagccccaggggccaggagctctcttggagacaagcatgtgtatgcgtttgtgtgcagctcttcttcctgctccctgcacattgagggcttcatggggggtgcgaggggctcagtggggcttctcttccctccatgagcctggagaccccaggggaggatccatttgggatgagccccctccccccaatgcacaagccagcccccaagaccctgggggtggacaccactcagggaaacctggggtgggggtgggctttggtcttagcactttccttctccagatcccccctacccaccccagtcccaaatccagtcctctggcccttgcctagccctgaattgcttctctaagctggtgttcccatgcacagggccattcaggaagggctgggggagtgtgtgtggcaataaagcttgaaggcaccgtgggagcatgaaaa

SEQ ID NO: 87677 - DNA, 826 bp, Homo sapiens
cgcacacacaatggtgcctgaagaagagcctcaagaccgagagaaaggactctggtgggtccaggtgaaggtctggtccatggcagtcgtatccatcttgctcctcagtgtctgtttcactgtgagttctgtggtgcctcacaattttatgtatagcaaaactgtcaagaggctgtccaagttacgagagtatcaacagtatcattcaagcctgacctgcgtcatggaaggaaaggacatagaagattggagctgctgcccaaccccttggacttcatttcagtctagttgctactttatttctactgggatgcaatcttggactaagagtcaaaagaactgttctgtgatgggggctgatctggtggtgatcaacaccagggaagaacaggatttcatcattcagaatctgaaaagaaattcttcttattttctggggctgtcagatccagggggtcggcgacattggcaatgggttgaccagacaccatacaatgaaaatgtcacgtgagtatagaatgagattctggcactcaggtgaacccaataaccttgatgagcgttgtgcgataataaatttccgttcttcagaagaatggggctggaatgacattcactgtcatgtacctcagaagtcaatttgcaagatgaagaagatctacatataaatgaaatattctccctggaaatgtgtttgggttggcatccaccgttgtagaaagctaaattgattttttaatttatgtgtaagttttgtacaaggaatgcccctaaaatgtttcagcaggctgtcacctattacacttatgatataatccatttaaaa

SEQ ID NO: 87678 - DNA, 462 bp, Homo sapiens
cgagccacctagggatcccaaggacccgaccagcaccataccccctccccaacatccgggctgatagggatcaaggaggcctgcctctcccagctgggctggggctcctgtcccccactgtggtgtgcctggggcctggccaggactcccagtgatgccagaagccctggggggaagccctgctaccctggaccttacaccgggtgtgggaatcagcctctgccccgccccctccagccccatctctgtctcaaggagagcagggtaggtgaaagtctagagaaagaggctacctgcccagggtcacagcaaggctgggaccatggcaagcttggaaccaggacttctatctcccaaccccagcagccagaatactgtgccctcttgctttgggggtaactcccgaaaaccctgccttacctctcccttcctggtaacattaaactatttggcatgaaaaaa

SEQ ID NO: 87679 - DNA, 772 bp, Homo sapiens
ttttttttttttgagctttcagatttgcttttattggtagggaaattccagagtggggagccacccaggaggagacaggggtgccgaggcttctgggagtctggaagctcccggatggagaggcttacagcccccagccttccccagcaggagcacaggcaggggactggccaagtctgtcagctcagagcaggaccggcttcagggcctgacttcggtctcctcttgacccgccccggaggcttgtggggggcctctgtgtttgcagctctcctgaacagagctagatgagggtgggaggcccccgttggctcacacagtggatgctaccatctccggcctcttggatgtggagctctgtgccagagtcaacagtctccagggtgggccccgaagttgttggtagcgttctcaaggccgaaatctgcttctccctcagattctggtctgtgccgttttcttctgggataggctgaataagatgattaggatgatcaatgcgagcagcagcaccgccatcacagcccccacgatcccatacacgaggctcttggcgatgttgaattcacaggtctctccccagtaccagtgtgtgttcgtatttgggcacaggcagcgggggccactgcgttgcagctgacatgtgcccaggttacagttcatttgcgacttcgttcctttggtgcacttgttcacacaggccagcttcccatccaagacatccacatagtagaactgggtatatccttcggcagccttctgggtgcattgc

SEQ ID NO: 87680 - DNA, 858 bp, Homo sapiens; identical to SEQ ID NO: 65405

SEQ ID NO: 87681 - DNA, 4362 bp, Homo sapiens; identical to SEQ ID NO: 65344

SEQ ID NO: 87682 - DNA, 1023 bp, Homo sapiens
aatgggtttgctgttgtgaggccccctggccatcacgctgaagaatccacagccatggggttctgcttttttaattcagttgcaattaccgccaaatacttgagagaccaactaaatataagcaagatattgattgtagatctggatgttcaccatggaaacggtacccagcaggccttttatgctgaccccagcatcctgtacatttcactccatcgctatgatgaagggaactttttccctggcagtggagccccaaatgaggttggaacaggccttggagaagggtacaatataaatattgcctggacaggtggccttgatcctcccatgggagatgttgagtaccttgaagcattcaggaccatcgtgaagcctgtggccaaagagtttgatccagacatggtcttagtatctgctggatttgatgcattggaaggccacacccctcctctagggtttttcgaaagtgacggcaaaatgttttggtcatttgacgaagcaattgatgacattggctgatggacgtgtggtgttggctctagaaggaggacatgatctcacagccatctgtgatgcatcagaagcctgtgtaaatgcccttctaggaaatgagctggagccacttgcagaagatattctccaccaaagcccgaatatgaatgctgttatttctttacagaagatcattgaaattcaaagcaagtattggaagtcagtaaggatggtggctgtgccaaggggctgtgctctggctggtgctcagttgcaagaggagacagagaccgtttctgccctggcctccctaacagtggatgtggaacagccctttgctcaggaagacagcagaactgctggtgagcctatggaagaggagccagccttgtgaagtgccaagtccccctctgatatttcctgtgtgtgacatcattgtgtatccccccaccccagtaccctcagacatgtcttgtctgctgcctgggtggcacagattcaatggaacataaacactgggcacataat

SEQ ID NO: 87683 - DNA, 1076 bp, Homo sapiens
ttttttttttttatggtagtgaatactttattttgttgtaaacaagttagttttgagggtatttcctcgtggtcctcctgccgtcactcgtccccatgttccaatgatgctgatcaactgctttattcagtttccccatcttttcttcttgcccagtcatccgtagcctttcttttttttaaacacatgaatccctaggtactcaatctttgggagggacaaaagggctttccaatatgttaggaaaaatttgaaaccctccatagtactcacaacaatgagcagcattgtaagttgtgatgcattcatttggattggaacattctcaatcagtccttccactcctaagtaaatatttgtttctcacagaacacaaggcagttcaaagggcctcttgttagagatttataggtgtatgaatgggaaacatcatacaagcagtgaaaacaaaaatctttccaggttgtcggattttctccttcttggtcttataaaaagcaactagacatctttaatttaaaaaatacatgcacatatatacaatagtgattggaatgttatttttatccaaaacattatagagtttatctcagatatactgagtactgtcactcagtctgtaaactacccccagagggtggtttgtttcctcattccttaaaaaaaaacaaaaccaaataaacaaacaaaaaagaagtttactaaatttaaacactgacatcctgtgaagatgccagtctttacaggcgtttgtaaaagtagactgtggggagtatgttacactaatacaaagttttacaaatgaatacaagtgaaatatataaattacaatgaaatagaggaagattgtggctctgtcctgggttggttcttttagcagtcatattgctgttggtgagagcagcaaaagccacatatgcctccaagcactccatttattacttgaataagacacaagatgaattcaattccaccaagagccaagaggatagaaaacagagatacattccattccacaatgtgcttgggttcattgcaccgggcccagttgaggtatccagaaggacgggccctcg

SEQ ID NO: 87684 - DNA, 649 bp, Homo sapiens
agtgcggtggaattctcagaatgcaagctgtaggtgggtgggtgagtgtgtcccctcccacactgctctctggtgggtttgggcagtccctggctctagtctctgctgcagattctcaggaccaaaatgtgggtgatttgtctgggtccaggcaggagacagaaatcacacaagctcttttattagagataatataaagaatgattaaccaggtgacagtaaagggcaggaagggaatacaaaggtatccatggaggtagcaccacaggaagcaggcatcacacttgaggcttgggaacaaggggaagatgctggactcattgaaaggtggttgcttggagaagggacatggggctgaatctcagacttctgaggtgggggagtggggatgccactcaatgcagctggtatctctgagctctgaggagagtcctgtggggatggtgccccctcctctgaataggggagatgttttgttggtgtctctgaggggacccccatgaggctgcttttgtgagtgttggaaaaaccaaaaactgcattgaaatgtttctgggaggagttgccactgcctgggtgaagaaaaagcactgctagggttagcaacctgtctggcagggacaggaagctgatagaaagtgaacaggat

SEQ ID NO: 87685 - DNA, 2389 bp, Homo sapiens
ttttttttttgaggcagagtcttgctctgtcccccaggctggagtgcagcggcccgatcttggctggctgcatgctccacctcccaggttcatgccattttcctgcttcagcctcacaagtagctgggacgacacacgcccgccaccacacccagctaattttttgcatttttagtagagaatggtctgtgttagccaggatggtctcgatctcctgaccttgtgatccgcctgccttggcctcccaaagtgctgggattacaggcgtgacaacccgcacctggcctattcagggaaggtttcaagcagaaagatgaactgagttggctttggagagattcacaggactcccacaggcagagtgaaataagggcattgtagatggacaaaggcacagatgagcagcaatggggacagtgtgactgggggacgctgaggggctgctgtggctggaatggagggctgccaccataatggaaatggccaatgaggcaaataaggttggattaggagcatagcatcaagggtgccagcttattaaatccctcttccagtatgctagcactggcctgctgggaaaagtaatacatcacataatcaaacaaaaggcaaaaagaggcgagctccaggaataggcactgtaaacaggactcgccccagggtagccagatgcaggctttagatttgttgatgcaggttgagcatctctaatccgagggggaatgtctcatatggtgtccaagaaatggtgacacatctcacagagggcctaggctcaggagggctggagtatgagacattccccctcccctgtgaatttgaaaacgtggccaaaatttttttttaaaaatggctaccctgtagttctttaactggacctatttagacaacaccttacacactggagaaggatgatactatgtgaatctagtaagtctacaagacaatacttctctcttttggctgtcttcttcctctccagggtgatgacaactccgtgagggtggagattatatgtctctcatcatttaagcaacaaggaaataaattagtggcagagtaaggggtgactcagtgagtacatccaattgttgacatagttttgggtgggagaaattttgctattatatcaacttaacttcttaaaatagtctagtgggattaacttggttttatttcacagagacctcctggaagcgaggatcctttaacaatcctggaatatacattgcagtaaaagaacaaagcacacctcagccttaaatgacagaagaagaatgtcaagtgggaaagtgacgttggttttcagtttgtggattctgaatccacacaaacacaggattgtattttgaaaacctgaattaattattgtctttacctctataaaacaaaaaattataatcaaaattattagtatgacagtcacagatattgcgaagatgagtttgttcttatagtcatatcctggaacttctttcatgagctcacttgacttctgctctttctgttcattctgttccatgttctcattaatataatttgttttttgttggtccgtatcccattctacattcaatgcctttgcttcctgctgctcgctgagaagcttcatcaggaggcctgttcgcgacatgagcttggcacagctcccttgcacatgtgtttctgaacattccattttcaaggtccagataacatgagacatgaactttctcacatcctcgttggggatgagggaccgtagctgctcggttagctgaatttcaagctgatcacccccaaagcctgacaagttgatgccactgctgtctgagggcgcctccgactcaatagtcagctgagtgctcatgtgctgcttccgggcttgtaacatcttcatgaacgctccttctggattccctacagatgcttcttcaggacaatgtatgctgttagtcagacatgcagtgttgcaatgcagcttgactgtcttgcagacagcctcaatgctatttttaaattggcagaggcagcaggccatatggctaggtaagatcctatagatgaaaacacaaaacaataaattagtggtaaagcggttacttgagtaggtaaaggaggcagccaacgctaccacagggctgggcaaagaggtgttactgagacccgtggactggacacttgggtaggaaccagaaggccaatgggaaggaggacacaggtgcccaactgaagggtaagcatggcagtgagtatggtatgcctagaataaaggtggttgggattagaattgggtgacactgatcagtagtttaaattcagaggtatctcttcccgactcaaaagtctcactttgggctgaaagatacaggaagaaggtagacttctaagaagagtctgactcgtgccg

SEQ ID NO: 87686 - DNA, 1325 bp, Homo sapiens
ttttttttttatttcttaacttgcaattttattaatttttcagtactcttaccttttatatactactaagaaaatttaaaccataactagacataaacattctgscagtttaattcaaattttcatatatacagaccagactacatatgtattacactgcaaaacttacacatgactgaagctgagcgtaataacttcaattagccaacaacagaagcactcccacttcctgcagtcacagcaattagctaacaataaaaacactcccacttcctgcagtcacagctgaaagacttttcaaggcagactacatttgggctggagatacaagtgatgtagtttgacttgggcaatacaaaacaaaagtcataggaattaaatggattttcaatcactgtataattcattctcctggcttaagtacgttttaattttttcacagaaaaaaatatatttcaggcaaataaaaacaaattccagattagcatagttcagcgtttcatttatcttacctttatcaaggcaaacaaagtacagatgctgtacattaaaaacatagaaatatatcactcacaccacatcaactcctacggacaaaagggctttttctaagccctgctcctttctgaagcacacaccacagctaaatgtacaaagagccatctgctggtccaacatagccaactccaatgagcaggacgtctatcagcgtccatattcccaggccaccgaagctgaagagcttgccsgaggccgtccccgctactggccccaggtagraaacggtctgctcccaaaccccaccgagggtgatgccttaagagccagagcccgtagacccacttatagcctccagtccaattgcaatatagcattttgggaaaagtacggttacccaagcagtggacgtggtccccgcaccgtgcagttggcagggtagcgctgccgaggacaggacaccgtcatgcagctggtggagttggtacactcgtaatctgtttcaggaagctgccagcaaaatctgcaagtcatgttaatgatgaagttcttttgggatttgaagtcttgatcaacacaggtaacagatggtttcactgcacagtcaaaagtgacaggcttcccataggtacaggagaaatttgttgtgcagtctatacagtctgcaggaagcctgctacacaaaccattgctcggacacttcatcacataaggtgggatttcagtactttcaccgcccgacagaatgcagaactgcgaaaggaagagcagcacgcgacacaaggcgcggaggcccctcagcgggcgcacccctcccgccatcttgc

SEQ ID NO: 87687 - DNA, 434 bp, Homo sapiens
tcgtcgctggcctgggcagtgcggtgcggggctggactctgcctggtgggggcacagccgccctcagccccggcgcagacatggacccctcgcgagccatccagaacgagatcagctccctcaaagatgagcgggatcgtgtgcagaagaaaaccttcaccaagtgggtcaacaagcacctcatcaagcactggcgggcagaggcccagaggcacatcagtgacctgtatgaagacctccgcgatggccacaacctcatctccctgctggaggtcctctcgggggacagcctgccgagggagcgggacgtaagcaggagctcacgcctgccccgggagaaggggaggatgcgtttccacaagctgcagaatgtccagattgccctggactacctccggcaccgccaggtgaagctggtgaacatcaggaatgat

SEQ ID NO: 87688 - DNA, 771 bp, Homo sapiens
agaactttagaactaattatgaataacaaaatatacatatgacagccattaatttcttacaaattcactatgaccacatcattttaagtactgcatgtgaaagccacaatacaagcgactaacatagcaaataggagaatggtccaaccagaatggcttcactggccactggcagctctttcaacagatcagtattagttcatttatttgtattcacctttaataatgatatgctatgaaaaaccttagcataccatcagtcattctaaagggaagactgcttttgcatggtgtctggctgtgtaaactactgataaaagaacacagtattcagccatgcttttcagaccagcaaaacaatttaatagaattgaaatatggtgaggatcttaccatcatcaatagcatttttgacagccctcaagccatcccttactgcatctttgatctaagtgtgggcttatttggtcctttgatcaataatgtgatagaacgagggttgttacacttctcaataaaggtgaacttctccctttgtgtagaagaaacatgattttcaaaaacacgatgtgtgcaaagagagaagagggacttacagagaatgacaagcagcatattaataaggaacaaacttgatcacatcaaaccaaattatctttttgaaaaatcacatataaatggcttcccattactacacataaaccttcaaaatgtatataaacaaaaatctgatcctgaatttcaattgatttttctgctaaagacttcatg

SEQ ID NO: 87689 - DNA, 1660 bp, Homo sapiens
tttttttttttgcattttcaacaacttgactcaatatttttaatatttcatcacaaaatccaggaggatgtacatataattctttacacttattttacaggaatcagggcatagtttcttacaggcctaaatcctgaaaaggtcaaagggaagattcagcataaatacaacaaagggagaataaagactggatttatattgccatttgggaccacggaaacatacacaaaggaaaatgtacatttgttttaggttttccagagttcatttggtttggcttgtttccacaatgaggataaagtactgaaatctgctatttgaagaaagtaacctgacccctgtggtaacttctgtgtgcaggaaccatctaccctcgcacaagctgcacctgaagtggttagccccatttagttcctgtcctctcttttaactggaaccaaaccaaaccaaacaaatccagaatggggtcacctacaagcaatatagttagaaatattaaccctgatgaacagaaacaacactgcatctttagaaaatccaaaaccttttgttcatattcagaacgattaaattaaaccacccaagtagaacaaataattcacattcttactgagttaaatcaagtttgatttcaggcagcttttaagatttgtctatttccccttcagaattagcagaattagaaattttggtctgcttaaatcacattgaggtgaaaataaaagctaaaagtcagaaaatggtagtgaaatactaccatatcagacatgattgaattccaaagccatatactgatcaaaaaacagattatcattcaagtctaaatagaaaaaaatacttatgagtagaggcatatgtttttcaaatgtatttgtaatcaatttcaggtataatttgtgacaatttatgtattacacttttgcattttcccctaaaagtgaaaaaatggtcatttttttccatatataaaatagtattcgattatttaaaaatccatacaaatgatatttattactatttcttgtttaagccctcatgtatcttctctattgtatttttggattctgtaaacaaattactgtatcatgaccaatacttgctcaagatcaacattgaatcatggatttggtgtcactgagtgcaagccatgtgaggtctacatgtgctgggacataccattcaccaaacttctcagctgtttcacgactgtctctatcaacttctgtttgtctcgatcattcttcctgaactgagcaaatatattgttctttttgctagtatccttcatcttctccaaaagagtaagggctgtgtttggattcacccgaaggtacttagaagctggctgcccataatcagctaggtaagtagaccaatcccaaaccataaacaggtcaaggagttgtctgaggtcaatgaatgctagctgcagggtatccccctggaatcctggcacatggctcagagctggcaaaccaattcacactgtatgacatctaagttaaactgctgaacagctcccatgcttatttgttttaactcactgtccagtagcatctgcattaaggatgttgatcagatgctggcaggctgacatgcaagctgtctgagcaactttcccctttttttttccccattccaagcagagagaggatggttg

SEQ ID NO: 87690 - DNA, 384 bp, Homo sapiens
actaaagagctacgggcccccttcatcctgtttttggtcaccacgatgtaccctgggatcgctgaccgcatgcagaaagagatcaccgcgctggcacccagcaccaggaagatcaagatcatcgccccggcggagcgcaaatactcgggggggatcggcggcttcatcctggcgctcgctaggcagcttaccagcaaatgcggactaacactcaggcgtaccaccaggccggcccttccatcgtccaccgcaaaagcttctagacacactccacctccagcacgcgacttatcaagacgacgaatcttctcaatgggggggcggctgatctctcaccaacccacagtcactttctttgtggcctcttctcgacactgacatcgg

SEQ ID NO: 87691 - DNA, 532 bp, Homo sapiens
tttttttttttttttttttcagcattattaacaaatttattgaacaactagaacttgacaagcacatgccaggtagaggggatacagtggagagcaataataatgatgataatgaggagtagttttttccctagcaggcagcagttgaaaggaatattggtttaacatccaccaatgagcaggggtggatagacccctctcctggagacagagtccataacgggattaaaaatatccctgtaagccggtcacccggtggctcaagcctgtaatcccagcactttgggagaccgaggtgggtggatcatgaggtcaagagatcgagaccatcctggccaacatagtgaaccctcatctgtactaaaagtacaaaaatttgttgggtgtggtggcgtgcacctatattcccagtactcgggaggctgaggcaggagaattgtttgaacccaggaggtggaggttgcagggagctgagatcgcaccactgcactccagcctagcaacagagtaagactccatcttaaaaaaaaaa

SEQ ID NO: 87692 - DNA, 1998 bp, Homo sapiens
cccacgcgtccgaccatctgtatcctaatttcttggtgaatgaactcattcttaaacagaagcaaagatttgaggaaaagaggttcaaattggaccactcagtgagtagcaccaatggccacaggtggcagatatttcaagattggttgggaactgaccaagataaccttgatttggccaatgtcaatcttatgttggagttactagtgcagaagaagaaacaactggaagcagaatcacatgcagcccaactacagattcttatggaattcctcaaggttgcaagaagaaataagagagagcaactggaacagatccagaaggagctaagtgttttggaagaggatattaagagagtggaagaaatgagtggcttatactctcctgtcagtgaggatagcacagtgcctcaatttgaagctccttctccatcacacagtagtattattgattccacagaatacagccaacctccaggtttcagtggcagttctcagacaaagaaacagccttggtataatagcacgttagcatcaagacgaaaacgacttactgctcattttgaagacttggagcagtgttacttttctacaaggatgtctcgtatctcagatgacagtcgaactgcaagccagttggatgaatttcaggaatgctttgtccaagttttactcgatataattcagtacgacctttaggccacattgtcatatgctagtgatctctataatggttcccagtataagtctctagtatttgaatttgaccgggattgtgactattttgcgattgctggagttacaaagaagattaaagtctatgaatatgacactgtcatccaggatgcagtggatattcattaccctgagaatgaaatgacctgcaattcgaaaatcagctgtatcagttggagtagttaccataagaacctgttagctagcagtgattatgaaggcactgttattttatgggatggattcacaggacagaggtcaaaggtctatcaggagcatgagaagaggtgttggagtgttgactttaatttgatggatcctaaactcttggcttcaggttctgatgatgcaaaagtgaagctgtggtctaccaatctagacaactcagtggcaagcattgaggcaaaggctaatgtgtgctgtgttaaattcagcccctcttccagataccatttggctttcggctgtgcagatcactgtgtccactactatgatcttcgtaacactaaacagccaatcatggtattcaaaggacaccgtaaagcagtctcttatgcaaagtttgtgagtggtgaggaaattgtctctgcctcaacagacagtcagctaaaactgtggaatgtagggaaacccatactgcctacgttccttcaagggtcatatcaatgaaaaaaactttgttaggcctggcttccaatggagattatatagcttgtggaagtgaaaataactctctctacctgtactataaaggactttctaagactttgctaacttttaagtttgatacagtcaaaagtgttctcgacaaagaccgaaaagaagatgatacaaatgaatttgttagtgctgtgtgctggagggcactaccagatggggagtccaatgtgctgattgctgctaacagttcagggtacaatttaaggtgctagaattggtatgaagggttaactcaagtcaaattgtacttgatcctgctgaaatacatctgcagctgacaatgagagaagaaacagaaaatgtcatgtgatgtctctccccaaagtcatcatgggttttggatttgttttgaatatttttttctttttttcttttccctcctttatgacctttgggacattgggaatacccagccaactctccaccatcaatgtaactccatggacattgctgctcttggtggtgttatctaatttttgtgatagggaaacaaattcttttgaataaaaataaataacaaaacaataaaagtttattgagccac

SEQ ID NO: 87693 - DNA, 3307 bp, Homo sapiens; identical to SEQ ID NO: 72456
